United States Patent Application Publication US 2025/0333767 A1 - sequence listing, part 9

SEQ ID NO: 36925 - protein, 978 aa, synthetic construct
  REGION 1..978: note = engineered CasX variant
QEIKRINKIRRRLVKDSNTKKAGKTGPMKTLLVRVMTPDLRERLENLRKKPENIPQPISNTSRANLNKLLTDYTEMKKAILHVYWEEFQKDPVGLMSRVAQPASKKIDQNKLKPEMDEKGNLTTAGFACSQCGQPLFVYKLEQVSEKGKAYTNYFGRCNVAEHEKLILLAQLKPEKDSDEAVTYSLGKFGQRALDFYSIHVTKESTHPVKPLAQIAGNRYASAPVGKALSDACMGTIASFLSKYQDIIIEHQKVVKGNQKRLESLRELAGKENLEYPSVTLPPQPHTKEGVDAYNEVIARVRMWVNLNLWQKLKLSRDDAKPLLRLKGFPSFPLVERQANEVDWWDMVCNVKKLINEKKEDGKVFWQNLAGYKRQEALRPYLSSEEDRKKGKKFARTQLGDLLLHLEKKHGEDWGKVYDEAWERIDKKVEGLSKHIKLEEERRSEDAQSKAALTDWLRAKASFVIEGLKEADKDEFCRCELKLQKWYGDLRGKPFAIEAENSILDISGFSKQYNCAFIWQKDGVKKLNLYLIINYFKGGKLRFKKIKPEAFEANRFYTVINKKSGEIVPMEVNFNFDDPNLIILPLAFGKRQGREFIWNDLLSLETGSLKLANGRVIEKTLYNRRTRQDEPALFVALTFERREVLDSSNIKPMNLIGVDRGENIPAVIALTDPEGCPLSRFKDSLGNPTHILRIRESYKEKQRTIQAKKEVEQRRAGGYSRKYASKAKNLADDMVRNTARDLLYYAVTQDAMLIFENLSRGFGRQGKRTFMAERQYTRMEDWLTAKLAYEGLPSKTYLSKTLAQYTSKTCSNCGFTITSADYDRVLEKLKKTATGWMTTINGKELKVEGQITYYNRYKRQNVVKDLSVELDRLSEESVNNDISSWTKGRSGEALSLLKKRFSHRPVQEKFVCLNCGFETHADEQAALNIARSWLFLRSQEYKKYQTNKTTGNTDKRAFVETWQSFYRKKLKEVWKPAV

SEQ ID NO: 36926 - protein, 978 aa, synthetic construct
  REGION 1..978: note = engineered CasX variant
QEIKRINKIRRRLVKDSNTKKAGKTGPMKTLLVRVMTPDLRERLENLRKKPENIPQPISNTSRANLNKLLTDYTEMKKAILHVYWEEFQKDPVGLMSRVAQPASKKIDQNKLKPEMDEKGNLTTAGFACSQCGQPLFVYKLEQVSEKGKAYTNYFGRCNVAEHEKLILLAQLKPEKDSDEAVTYSLGKFGQRALDFYSIHVTKESTHPVKPLAQIAGNRYASVPVGKALSDACMGTIASFLSKYQDIIIEHQKVVKGNQKRLESLRELAGKENLEYPSVTLPPQPHTKEGVDAYNEVIARVRMWVNLNLWQKLKLSRDDAKPLLRLKGFPSFPLVERQANEVDWWDMVCNVKKLINEKKEDGKVFWQNLAGYKRQEALRPYLSSEEDRKKGKKFARTQLGDLLLHLEKKHGEDWGKVYDEAWERIDKKVEGLSKHIKLEEERRSEDAQSKAALTDWLRAKASFVIEGLKEADKDEFCRCELKLQKWYGDLRGKPFAIEAENSILDISGFSKQYNCAFIWQKDGVKKLNLYLIINYFKGGKLRFKKIKPEAFEANRFYTVINKKSGEIVPMEVNFNFDDPNLIILPLAFGKRQGREFIWNDLLSLETGSLKLANGRVIEKTLYNRRTRQDEPALFVALTFERREVLDSSNIKPMNLIGVDRGENIPAVIALTDPEGCPLSRFKDSLGNPTHILRIRESYKEKQRTIQAKKEVEQRRAGGYSRKYASKAKNLADDMVRNTARDLLYYAVTQDAMLIFENLSRGFGRQGKRTFMAERQYTRMEDWLTAKLAYEGLPSKTYLSKTLAQYTSKTCSNCGFTITSADYDRVLEKLKKTATGWMTTINGKELKVEGQITYYNRYKRQNVVKDLSVELDRLSEESVNNDISSWTKGRSGEALSLLKKRFSHRPVQEKFVCLNCGFETHADEQAALNIARSWLFLRSQEYKKYQTNKTTGNTDKRAFVETWQSFYRKKLKEVWKPAV

SEQ ID NO: 36927 - protein, 978 aa, synthetic construct
  REGION 1..978: note = engineered CasX variant
QEIKRINKIRRRLVKDSNTKKAGKTGPMKTLLVRVMTPDLRERLENLRKKPENIPQPISNTSRANLNKLLTDYTEMKKAILHVYWEEFQKDPVGLMSRVAQPASKKIDQNKLKPEMDEKGNLTTAGFACSQCGQPLFVYKLEQVSEKGKAYTNYFGRCNVAEHEKLIKLAQLKPEKDSDEAVTYSLGKFGQRALDFYSIHVTKESTHPVKPLAQIAGNRYASGPVGKALSDACMGTIASFLSKYQDIIIEHQKVVKGNQKRLESLRELAGKENLEYPSVTLPPQPHTKEGVDAYNEVIARVRMWVNLNLWQKLKLSRDDAKPLLRLKGFPSFPLVERQANEVDWWDMVCNVKKLINEKKEDGKVFWQNLAGYKRQEALRPYLSSEEDRKKGKKFARTQLGDLLLHLEKKHGEDWGKVYDEAWERIDKKVEGLSKHIKLEEERRSEDAQSKAALTDWLRAKASFVIEGLKEADKDEFCRCELKLQKWYGDLRGKPFAIEAENSILDISGFSKQYNCAFIWQKDGVKKLNLYLIINYFKGGKLRFKKIKPEAFEANRFYTVINKKSGEIVPMEVNFNFDDPNLIILPLAFGKRQGREFIWNDLLSLETGSLKLANGRVIEKTLYNRRTRQDEPALFVALTFERREVLDSSNIKPMNLIGVDRGENIPAVIALTDPEGCPLSRFKDSLGNPTHILRIRESYKEKQRTIQAKKEVEQRRAGGYSRKYASKAKNLADDMVRNTARDLLYYAVTQDAMLIFENLSRGFGRQGKRTFMAERQYTRMEDWLTAKLAYEGLPSKTYLSKTLAQYTSKTCSNCGFTITSADYDRVLEKLKKTATGWMTTINGKELKVEGQITYYNRYKRQNVVKDLSVELDRLSEESVNNDISSWTKGRSGEALSLLKKRFSHRPVQEKFVCLNCGFETHADEQAALNIARSWLFLRSQEYKKYQTNKTTGNTDKRAFVETWQSFYRKKLKEVWKPAV

SEQ ID NO: 36928 - protein, 977 aa, synthetic construct
  REGION 1..977: note = engineered CasX variant
QEIKRINKIRRRLVKDSNTKKAGKTGPMKTLLVRVMTPDLRERLENLRKKPENIPQPISNTSRANLNKLLTDYTEMKKAILHVYWEEFQKDPVGLMSRVAQPASKKIDQNKLKPEMDEKGNLTTAGFACSQCGQPLFVYKLEQVSEKGKAYTNYFGRCNVAEHEKLILLAQLKPEKDSDEAVTYSLGKFGQRALDFYSIHVTKESTHPVKPLAQIAGNRYASPVGKALSDACMGTIASFLSKYQDIIIEHQKVVKGNQKRLESLRELAGKENLEYPSVTLPPQPHTKEGVDAYNEVIARVRMWVNLNLWQKLKLSRDDAKPLLRLKGFPSFPLVERQANEVDWWDMVCNVKKLINEKKEDGKVFWQNLAGYKRQEALRPYLSSEEDRKKGKKFARTQLGDLLLHLEKKHGEDWGKVYDEAWERIDKKVEGLSKHIKLEEERRSEDAQSKAALTDWLRAKASFVIEGLKEADKDEFCRCELKLQKWYGDLRGKPFAIEAENSILDISGFSKQYNCAFIWQKDGVKKLNLYLIINYFKGGKLRFKKIKPEAFEANRFYTVINKKSGEIVPMEVNFNFDDPNLIILPLAFGKRQGREFIWNDLLSLETGSLKLANGRVIEKTLYNRRTRQDEPALFVALTFERREVLDSSNIKPMNLIGVDRGENIPAVIALTDPEGCPLSRFKDSLGNPTHILRIRESYKEKQRTIQAKKEVEQRRAGGYSRKYASKAKNLADDMVRNTARDLLYYAVTQDAMLIFENLSRGFGRQGKRTFMAERQYTRMEDWLTAKLAYEGLPSKTYLSKTLAQYTSKTCSNCGFTITSADYDRVLEKLKKTATGWMTTINGKELKVEGQITYYNRYKRQNVVKDLSVELDRLSEESVNNDISSWTKGRSGEALSLLKKRFSHRPVQEKFVCLNCGFETHADEQAALNIARSWLFLRSQEYKKYQTNKTTGNTDKRAFVETWQSFYRKKLKEVWKPAV

SEQ ID NO: 36929 - protein, 978 aa, synthetic construct
  REGION 1..978: note = engineered CasX variant
QEIKRINKIRRRLVKDSNTKKAGKTGPMKTLLVRVMTPDLRERLENLRKKPENIPQPISNTSRANLNKLLTDYTEMKKAILHVYWEEFQKDPVGLMSRVAQPASKKIDQNKLKPEMDEKGNLTTAGFACSQCGQPLFVYKLEQVSEKGKAYTNYFGRCNVAEHEKLILLAQLKPEKDSDEAVTYSLGKFGQRALDFYSIHVTKESTHPVKPLAQIAGNRYASYPVGKALSDACMGTIASFLSKYQDIIIEHQKVVKGNQKRLESLRELAGKENLEYPSVTLPPQPHTKEGVDAYNEVIARVRMWVNLNLWQKLKLSRDDAKPLLRLKGFPSFPLVERQANEVDWWDMVCNVKKLINEKKEDGKVFWQNLAGYKRQEALRPYLSSEEDRKKGKKFARTQLGDLLLHLEKKHGEDWGKVYDEAWERIDKKVEGLSKHIKLEEERRSEDAQSKAALTDWLRAKASFVIEGLKEADKDEFCRCELKLQKWYGDLRGKPFAIEAENSILDISGFSKQYNCAFIWQKDGVKKLNLYLIINYFKGGKLRFKKIKPEAFEANRFYTVINKKSGEIVPMEVNFNFDDPNLIILPLAFGKRQGREFIWNDLLSLETGSLKLANGRVIEKTLYNRRTRQDEPALFVALTFERREVLDSSNIKPMNLIGVDRGENIPAVIALTDPEGCPLSRFKDSLGNPTHILRIGESYKEKQRTIQAKKEVEQRRAGGYSRKYASKAKNLADDMVRNTARDLLYYAVTQDAMLIFENLSRGFGRQGKRTFSAERQYTRMEDWLTAKLAYEGLPSKTYLSKTLAQYTSKTCSNCGFTITSADYDRVLEKLKKTATGWMTTINGKELKVEGQITYYNRYKRQNVVKDLSVELDRLSEESVNNDISSWTKGRSGEALSLLKKRFSHRPVQEKFVCLNCGFETHADEQAALNIARSWLFLRSQEYKKYQTNKTTGNTDKRAFVETWQSFYRKKLKEVWKPAV

SEQ ID NO: 36930 - protein, 978 aa, synthetic construct
  REGION 1..978: note = engineered CasX variant
QEIKRINKIRRRLVKDSNTKKAGKTGPMKTLLVRVMTPDLRERLENLRKKPENIPQPISNTSRANLNKLLTDYTEMKKAILHVYWEEFQKDPVGLMSRVAQPASKKIDQNKLKPEMDEKGNLTTAGFACSQCGQPLFVYKLEQVSEKGKAYTNYFGRCNVAEHEKLILLAQLKPEKDSDEAVTYSLGKFGQRALDFYSIHVTKESTHPVKPLAQIAGNRYASHPVGKALSDACMGTIASFLSKYQDIIIEHQKVVKGNQKRLESLRELAGKENLEYPSVTLPPQPHTKEGVDAYNEVIARVRMWVNLNLWQKLKLSRDDAKPLLRLKGFPSFPLVERQANEVDWWDMVCNVKKLINEKKEDGKVFWQNLAGYKRQEALRPYLSSEEDRKKGKKFARTQLGDLLLHLEKKHGEDWGKVYDEAWERIDKKVEGLSKHIKLEEERRSEDAQSKAALTDWLRAKASFVIEGLKEADKDEFCRCELKLQKWYGDLRGKPFAIEAENSILDISGFSKQYNCAFIWQKDGVKKLNLYLIINYFKGGKLRFKKIKPEAFEANRFYTVINKKSGEIVPMEVNFNFDDPNLIILPLAFGKRQGREFIWNDLLSLETGSLKLANGRVIEKTLYNRRTRQDEPALFVALTFERREVLDSSNIKPMNLIGVDRGENIPAVIALTDPEGCPLSRFKDSLGNPTHILRIGESYKEKQRTIQAKKEVEQRRAGGYSRKYASKAKNLADDMVRNTARDLLYYAVTQDAMLIFENLSRGFGRQGKRTFSAERQYTRMEDWLTAKLAYEGLPSKTYLSKTLAQYTSKTCSNCGFTITSADYDRVLEKLKKTATGWMTTINGKELKVEGQITYYNRYKRQNVVKDLSVELDRLSEESVNNDISSWTKGRSGEALSLLKKRFSHRPVQEKFVCLNCGFETHADEQAALNIARSWLFLRSQEYKKYQTNKTTGNTDKRAFVETWQSFYRKKLKEVWKPAV

SEQ ID NO: 36931 - protein, 978 aa, synthetic construct
  REGION 1..978: note = engineered CasX variant
QEIKRINKIRRRLVKDSNTKKAGKTGPMKTLLVRVMTPDLRERLENLRKKPENIPQPISNTSRANLNKLLTDYTEMKKAILHVYWEEFQKDPVGLMSRVAQPASKKIDQNKLKPEMDEKGNLTTAGFACSQCGQPLFVYKLEQVSEKGKAYTNYFGRCNVAEHEKLILLAQLKPEKDSDEAVTYSLGKFGQRALDFYSIHVTKESTHPVKPLAQIAGNRYASSPVGKALSDACMGTIASFLSKYQDIIIEHQKVVKGNQKRLESLRELAGKENLEYPSVTLPPQPHTKEGVDAYNEVIARVRMWVNLNLWQKLKLSRDDAKPLLRLKGFPSFPLVERQANEVDWWDMVCNVKKLINEKKEDGKVFWQNLAGYKRQEALRPYLSSEEDRKKGKKFARTQLGDLLLHLEKKHGEDWGKVYDEAWERIDKKVEGLSKHIKLEEERRSEDAQSKAALTDWLRAKASFVIEGLKEADKDEFCRCELKLQKWYGDLRGKPFAIEAENSILDISGFSKQYNCAFIWQKDGVKKLNLYLIINYFKGGKLRFKKIKPEAFEANRFYTVINKKSGEIVPMEVNFNFDDPNLIILPLAFGKRQGREFIWNDLLSLETGSLKLANGRVIEKTLYNRRTRQDEPALFVALTFERREVLDSSNIKPMNLIGVDRGENIPAVIALTDPEGCPLSRFKDSLGNPTHILRIGESYKEKQRTIQAKKEVEQRRAGGYSRKYASKAKNLADDMVRNTARDLLYYAVTQDAMLIFENLSRGFGRQGKRTFSAERQYTRMEDWLTAKLAYEGLPSKTYLSKTLAQYTSKTCSNCGFTITSADYDRVLEKLKKTATGWMTTINGKELKVEGQITYYNRYKRQNVVKDLSVELDRLSEESVNNDISSWTKGRSGEALSLLKKRFSHRPVQEKFVCLNCGFETHADEQAALNIARSWLFLRSQEYKKYQTNKTTGNTDKRAFVETWQSFYRKKLKEVWKPAV

SEQ ID NO: 36932 - protein, 978 aa, synthetic construct
  REGION 1..978: note = engineered CasX variant
QEIKRINKIRRRLVKDSNTKKAGKTGPMKTLLVRVMTPDLRERLENLRKKPENIPQPISNTSRANLNKLLTDYTEMKKAILHVYWEEFQKDPVGLMSRVAQPASKKIDQNKLKPEMDEKGNLTTAGFACSQCGQPLFVYKLEQVSEKGKAYTNYFGRCNVAEHEKLILLAQLKPEKDSDEAVTYSLGKFGQRALDFYSIHVTKESTHPVKPLAQIAGNRYASTPVGKALSDACMGTIASFLSKYQDIIIEHQKVVKGNQKRLESLRELAGKENLEYPSVTLPPQPHTKEGVDAYNEVIARVRMWVNLNLWQKLKLSRDDAKPLLRLKGFPSFPLVERQANEVDWWDMVCNVKKLINEKKEDGKVFWQNLAGYKRQEALRPYLSSEEDRKKGKKFARTQLGDLLLHLEKKHGEDWGKVYDEAWERIDKKVEGLSKHIKLEEERRSEDAQSKAALTDWLRAKASFVIEGLKEADKDEFCRCELKLQKWYGDLRGKPFAIEAENSILDISGFSKQYNCAFIWQKDGVKKLNLYLIINYFKGGKLRFKKIKPEAFEANRFYTVINKKSGEIVPMEVNFNFDDPNLIILPLAFGKRQGREFIWNDLLSLETGSLKLANGRVIEKTLYNRRTRQDEPALFVALTFERREVLDSSNIKPMNLIGVDRGENIPAVIALTDPEGCPLSRFKDSLGNPTHILRIGESYKEKQRTIQAKKEVEQRRAGGYSRKYASKAKNLADDMVRNTARDLLYYAVTQDAMLIFENLSRGFGRQGKRTFSAERQYTRMEDWLTAKLAYEGLPSKTYLSKTLAQYTSKTCSNCGFTITSADYDRVLEKLKKTATGWMTTINGKELKVEGQITYYNRYKRQNVVKDLSVELDRLSEESVNNDISSWTKGRSGEALSLLKKRFSHRPVQEKFVCLNCGFETHADEQAALNIARSWLFLRSQEYKKYQTNKTTGNTDKRAFVETWQSFYRKKLKEVWKPAV

SEQ ID NO: 36933 - protein, 978 aa, synthetic construct
  REGION 1..978: note = engineered CasX variant
QEIKRINKIRRRLVKDSNTKKAGKTGPMKTLLVRVMTPDLRERLENLRKKPENIPQPISNTSRANLNKLLTDYTEMKKAILHVYWEEFQKDPVGLMSRVAQPASKKIDQNKLKPEMDEKGNLTTAGFACSQCGQPLFVYKLEQVSEKGKAYTNYFGRCNVAEHEKLILLAQLKPEKDSDEAVTYSLGKFGQRALDFYSIHVTKESTHPVKPLAQIAGNRYASAPVGKALSDACMGTIASFLSKYQDIIIEHQKVVKGNQKRLESLRELAGKENLEYPSVTLPPQPHTKEGVDAYNEVIARVRMWVNLNLWQKLKLSRDDAKPLLRLKGFPSFPLVERQANEVDWWDMVCNVKKLINEKKEDGKVFWQNLAGYKRQEALRPYLSSEEDRKKGKKFARTQLGDLLLHLEKKHGEDWGKVYDEAWERIDKKVEGLSKHIKLEEERRSEDAQSKAALTDWLRAKASFVIEGLKEADKDEFCRCELKLQKWYGDLRGKPFAIEAENSILDISGFSKQYNCAFIWQKDGVKKLNLYLIINYFKGGKLRFKKIKPEAFEANRFYTVINKKSGEIVPMEVNFNFDDPNLIILPLAFGKRQGREFIWNDLLSLETGSLKLANGRVIEKTLYNRRTRQDEPALFVALTFERREVLDSSNIKPMNLIGVDRGENIPAVIALTDPEGCPLSRFKDSLGNPTHILRIGESYKEKQRTIQAKKEVEQRRAGGYSRKYASKAKNLADDMVRNTARDLLYYAVTQDAMLIFENLSRGFGRQGKRTFSAERQYTRMEDWLTAKLAYEGLPSKTYLSKTLAQYTSKTCSNCGFTITSADYDRVLEKLKKTATGWMTTINGKELKVEGQITYYNRYKRQNVVKDLSVELDRLSEESVNNDISSWTKGRSGEALSLLKKRFSHRPVQEKFVCLNCGFETHADEQAALNIARSWLFLRSQEYKKYQTNKTTGNTDKRAFVETWQSFYRKKLKEVWKPAV

SEQ ID NO: 36934 - protein, 978 aa, synthetic construct
  REGION 1..978: note = engineered CasX variant
QEIKRINKIRRRLVKDSNTKKAGKTGPMKTLLVRVMTPDLRERLENLRKKPENIPQPISNTSRANLNKLLTDYTEMKKAILHVYWEEFQKDPVGLMSRVAQPASKKIDQNKLKPEMDEKGNLTTAGFACSQCGQPLFVYKLEQVSEKGKAYTNYFGRCNVAEHEKLILLAQLKPEKDSDEAVTYSLGKFGQRALDFYSIHVTKESTHPVKPLAQIAGNRYASVPVGKALSDACMGTIASFLSKYQDIIIEHQKVVKGNQKRLESLRELAGKENLEYPSVTLPPQPHTKEGVDAYNEVIARVRMWVNLNLWQKLKLSRDDAKPLLRLKGFPSFPLVERQANEVDWWDMVCNVKKLINEKKEDGKVFWQNLAGYKRQEALRPYLSSEEDRKKGKKFARTQLGDLLLHLEKKHGEDWGKVYDEAWERIDKKVEGLSKHIKLEEERRSEDAQSKAALTDWLRAKASFVIEGLKEADKDEFCRCELKLQKWYGDLRGKPFAIEAENSILDISGFSKQYNCAFIWQKDGVKKLNLYLIINYFKGGKLRFKKIKPEAFEANRFYTVINKKSGEIVPMEVNFNFDDPNLIILPLAFGKRQGREFIWNDLLSLETGSLKLANGRVIEKTLYNRRTRQDEPALFVALTFERREVLDSSNIKPMNLIGVDRGENIPAVIALTDPEGCPLSRFKDSLGNPTHILRIGESYKEKQRTIQAKKEVEQRRAGGYSRKYASKAKNLADDMVRNTARDLLYYAVTQDAMLIFENLSRGFGRQGKRTFSAERQYTRMEDWLTAKLAYEGLPSKTYLSKTLAQYTSKTCSNCGFTITSADYDRVLEKLKKTATGWMTTINGKELKVEGQITYYNRYKRQNVVKDLSVELDRLSEESVNNDISSWTKGRSGEALSLLKKRFSHRPVQEKFVCLNCGFETHADEQAALNIARSWLFLRSQEYKKYQTNKTTGNTDKRAFVETWQSFYRKKLKEVWKPAV

SEQ ID NO: 36935 - protein, 978 aa, synthetic construct
  REGION 1..978: note = engineered CasX variant
QEIKRINKIRRRLVKDSNTKKAGKTGPMKTLLVRVMTPDLRERLENLRKKPENIPQPISNTSRANLNKLLTDYTEMKKAILHVYWEEFQKDPVGLMSRVAQPASKKIDQNKLKPEMDEKGNLTTAGFACSQCGQPLFVYKLEQVSEKGKAYTNYFGRCNVAEHEKLIKLAQLKPEKDSDEAVTYSLGKFGQRALDFYSIHVTKESTHPVKPLAQIAGNRYASGPVGKALSDACMGTIASFLSKYQDIIIEHQKVVKGNQKRLESLRELAGKENLEYPSVTLPPQPHTKEGVDAYNEVIARVRMWVNLNLWQKLKLSRDDAKPLLRLKGFPSFPLVERQANEVDWWDMVCNVKKLINEKKEDGKVFWQNLAGYKRQEALRPYLSSEEDRKKGKKFARTQLGDLLLHLEKKHGEDWGKVYDEAWERIDKKVEGLSKHIKLEEERRSEDAQSKAALTDWLRAKASFVIEGLKEADKDEFCRCELKLQKWYGDLRGKPFAIEAENSILDISGFSKQYNCAFIWQKDGVKKLNLYLIINYFKGGKLRFKKIKPEAFEANRFYTVINKKSGEIVPMEVNFNFDDPNLIILPLAFGKRQGREFIWNDLLSLETGSLKLANGRVIEKTLYNRRTRQDEPALFVALTFERREVLDSSNIKPMNLIGVDRGENIPAVIALTDPEGCPLSRFKDSLGNPTHILRIGESYKEKQRTIQAKKEVEQRRAGGYSRKYASKAKNLADDMVRNTARDLLYYAVTQDAMLIFENLSRGFGRQGKRTFSAERQYTRMEDWLTAKLAYEGLPSKTYLSKTLAQYTSKTCSNCGFTITSADYDRVLEKLKKTATGWMTTINGKELKVEGQITYYNRYKRQNVVKDLSVELDRLSEESVNNDISSWTKGRSGEALSLLKKRFSHRPVQEKFVCLNCGFETHADEQAALNIARSWLFLRSQEYKKYQTNKTTGNTDKRAFVETWQSFYRKKLKEVWKPAV

SEQ ID NO: 36936 - protein, 977 aa, synthetic construct
  REGION 1..977: note = engineered CasX variant
QEIKRINKIRRRLVKDSNTKKAGKTGPMKTLLVRVMTPDLRERLENLRKKPENIPQPISNTSRANLNKLLTDYTEMKKAILHVYWEEFQKDPVGLMSRVAQPASKKIDQNKLKPEMDEKGNLTTAGFACSQCGQPLFVYKLEQVSEKGKAYTNYFGRCNVAEHEKLILLAQLKPEKDSDEAVTYSLGKFGQRALDFYSIHVTKESTHPVKPLAQIAGNRYASPVGKALSDACMGTIASFLSKYQDIIIEHQKVVKGNQKRLESLRELAGKENLEYPSVTLPPQPHTKEGVDAYNEVIARVRMWVNLNLWQKLKLSRDDAKPLLRLKGFPSFPLVERQANEVDWWDMVCNVKKLINEKKEDGKVFWQNLAGYKRQEALRPYLSSEEDRKKGKKFARTQLGDLLLHLEKKHGEDWGKVYDEAWERIDKKVEGLSKHIKLEEERRSEDAQSKAALTDWLRAKASFVIEGLKEADKDEFCRCELKLQKWYGDLRGKPFAIEAENSILDISGFSKQYNCAFIWQKDGVKKLNLYLIINYFKGGKLRFKKIKPEAFEANRFYTVINKKSGEIVPMEVNFNFDDPNLIILPLAFGKRQGREFIWNDLLSLETGSLKLANGRVIEKTLYNRRTRQDEPALFVALTFERREVLDSSNIKPMNLIGVDRGENIPAVIALTDPEGCPLSRFKDSLGNPTHILRIGESYKEKQRTIQAKKEVEQRRAGGYSRKYASKAKNLADDMVRNTARDLLYYAVTQDAMLIFENLSRGFGRQGKRTFSAERQYTRMEDWLTAKLAYEGLPSKTYLSKTLAQYTSKTCSNCGFTITSADYDRVLEKLKKTATGWMTTINGKELKVEGQITYYNRYKRQNVVKDLSVELDRLSEESVNNDISSWTKGRSGEALSLLKKRFSHRPVQEKFVCLNCGFETHADEQAALNIARSWLFLRSQEYKKYQTNKTTGNTDKRAFVETWQSFYRKKLKEVWKPAV

SEQ ID NO: 36937 - protein, 978 aa, synthetic construct
  REGION 1..978: note = engineered CasX variant
QEIKRINKIRRRLVKDSNTKKAGKTGPMKTLLVRVMTPDLRERLENLRKKPENIPQPISNTSRANLNKLLTDYTEMKKAILHVYWEEFQKDPVGLMSRVAQPASKKIDQNKLKPEMDEKGNLTTAGFACSQCGQPLFVYKLEQVSEKGKAYTNYFGRCNVAEHEKLILLAQLKPEKDSDEAVTYSLGKFGQRALDFYSIHVTKESTHPVKPLAQIAGNRYASYPVGKALSDACMGTIASFLSKYQDIIIEHQKVVKGNQKRLESLRELAGKENLEYPSVTLPPQPHTKEGVDAYNEVIARVRMWVNLNLWQKLKLSRDDAKPLLRLKGFPSFPLVERQANEVDWWDMVCNVKKLINEKKEDGKVFWQNLAGYKRQEALRPYLSSEEDRKKGKKFARTQLGDLLLHLEKKHGEDWGKVYDEAWERIDKKVEGLSKHIKLEEERRSEDAQSKAALTDWLRAKASFVIEGLKEADKDEFCRCELKLQKWYGDLRGKPFAIEAENSILDISGFSKQYNCAFIWQKDGVKKLNLYLIINYFKGGKLRFKKIKPEAFEANRFYTVINKKSGEIVPMEVNFNFDDPNLIILPLAFGKRQGREFIWNDLLSLETGSLKLANGRVIEKTLYNRRTRQDEPALFVALTFERREVLDSSNIKPMNLIGVDRGENIPAVIALTDPEGCPLSRFKDSLGNPTHILRIGESYKEKQRTIQAKKEVEQRRAGGYSRKYASKAKNLADDMVRNTARDLLYYAVTQDAMLIFENLSRGFGRQGKRTFMAERQYTRMEDWLTAKLAYEGLPSKTYLSKTLAQYTSKTCSNCGFTITSADYDRVLEKLKKTATGWMTTINGKELKVEGQITYYNRYKRQNVVKDLSVELDRLSEESVNNDISSWDKGRSGEALSLLKKRFSHRPVQEKFVCLNCGFETHADEQAALNIARSWLFLRSQEYKKYQTNKTTGNTDKRAFVETWQSFYRKKLKEVWKPAV

SEQ ID NO: 36938 - protein, 978 aa, synthetic construct
  REGION 1..978: note = engineered CasX variant
QEIKRINKIRRRLVKDSNTKKAGKTGPMKTLLVRVMTPDLRERLENLRKKPENIPQPISNTSRANLNKLLTDYTEMKKAILHVYWEEFQKDPVGLMSRVAQPASKKIDQNKLKPEMDEKGNLTTAGFACSQCGQPLFVYKLEQVSEKGKAYTNYFGRCNVAEHEKLILLAQLKPEKDSDEAVTYSLGKFGQRALDFYSIHVTKESTHPVKPLAQIAGNRYASHPVGKALSDACMGTIASFLSKYQDIIIEHQKVVKGNQKRLESLRELAGKENLEYPSVTLPPQPHTKEGVDAYNEVIARVRMWVNLNLWQKLKLSRDDAKPLLRLKGFPSFPLVERQANEVDWWDMVCNVKKLINEKKEDGKVFWQNLAGYKRQEALRPYLSSEEDRKKGKKFARTQLGDLLLHLEKKHGEDWGKVYDEAWERIDKKVEGLSKHIKLEEERRSEDAQSKAALTDWLRAKASFVIEGLKEADKDEFCRCELKLQKWYGDLRGKPFAIEAENSILDISGFSKQYNCAFIWQKDGVKKLNLYLIINYFKGGKLRFKKIKPEAFEANRFYTVINKKSGEIVPMEVNFNFDDPNLIILPLAFGKRQGREFIWNDLLSLETGSLKLANGRVIEKTLYNRRTRQDEPALFVALTFERREVLDSSNIKPMNLIGVDRGENIPAVIALTDPEGCPLSRFKDSLGNPTHILRIGESYKEKQRTIQAKKEVEQRRAGGYSRKYASKAKNLADDMVRNTARDLLYYAVTQDAMLIFENLSRGFGRQGKRTFMAERQYTRMEDWLTAKLAYEGLPSKTYLSKTLAQYTSKTCSNCGFTITSADYDRVLEKLKKTATGWMTTINGKELKVEGQITYYNRYKRQNVVKDLSVELDRLSEESVNNDISSWDKGRSGEALSLLKKRFSHRPVQEKFVCLNCGFETHADEQAALNIARSWLFLRSQEYKKYQTNKTTGNTDKRAFVETWQSFYRKKLKEVWKPAV

SEQ ID NO: 36939 - protein, 978 aa, synthetic construct
  REGION 1..978: note = engineered CasX variant
QEIKRINKIRRRLVKDSNTKKAGKTGPMKTLLVRVMTPDLRERLENLRKKPENIPQPISNTSRANLNKLLTDYTEMKKAILHVYWEEFQKDPVGLMSRVAQPASKKIDQNKLKPEMDEKGNLTTAGFACSQCGQPLFVYKLEQVSEKGKAYTNYFGRCNVAEHEKLILLAQLKPEKDSDEAVTYSLGKFGQRALDFYSIHVTKESTHPVKPLAQIAGNRYASSPVGKALSDACMGTIASFLSKYQDIIIEHQKVVKGNQKRLESLRELAGKENLEYPSVTLPPQPHTKEGVDAYNEVIARVRMWVNLNLWQKLKLSRDDAKPLLRLKGFPSFPLVERQANEVDWWDMVCNVKKLINEKKEDGKVFWQNLAGYKRQEALRPYLSSEEDRKKGKKFARTQLGDLLLHLEKKHGEDWGKVYDEAWERIDKKVEGLSKHIKLEEERRSEDAQSKAALTDWLRAKASFVIEGLKEADKDEFCRCELKLQKWYGDLRGKPFAIEAENSILDISGFSKQYNCAFIWQKDGVKKLNLYLIINYFKGGKLRFKKIKPEAFEANRFYTVINKKSGEIVPMEVNFNFDDPNLIILPLAFGKRQGREFIWNDLLSLETGSLKLANGRVIEKTLYNRRTRQDEPALFVALTFERREVLDSSNIKPMNLIGVDRGENIPAVIALTDPEGCPLSRFKDSLGNPTHILRIGESYKEKQRTIQAKKEVEQRRAGGYSRKYASKAKNLADDMVRNTARDLLYYAVTQDAMLIFENLSRGFGRQGKRTFMAERQYTRMEDWLTAKLAYEGLPSKTYLSKTLAQYTSKTCSNCGFTITSADYDRVLEKLKKTATGWMTTINGKELKVEGQITYYNRYKRQNVVKDLSVELDRLSEESVNNDISSWDKGRSGEALSLLKKRFSHRPVQEKFVCLNCGFETHADEQAALNIARSWLFLRSQEYKKYQTNKTTGNTDKRAFVETWQSFYRKKLKEVWKPAV

SEQ ID NO: 36940 - protein, 978 aa, synthetic construct
  REGION 1..978: note = engineered CasX variant
QEIKRINKIRRRLVKDSNTKKAGKTGPMKTLLVRVMTPDLRERLENLRKKPENIPQPISNTSRANLNKLLTDYTEMKKAILHVYWEEFQKDPVGLMSRVAQPASKKIDQNKLKPEMDEKGNLTTAGFACSQCGQPLFVYKLEQVSEKGKAYTNYFGRCNVAEHEKLILLAQLKPEKDSDEAVTYSLGKFGQRALDFYSIHVTKESTHPVKPLAQIAGNRYASTPVGKALSDACMGTIASFLSKYQDIIIEHQKVVKGNQKRLESLRELAGKENLEYPSVTLPPQPHTKEGVDAYNEVIARVRMWVNLNLWQKLKLSRDDAKPLLRLKGFPSFPLVERQANEVDWWDMVCNVKKLINEKKEDGKVFWQNLAGYKRQEALRPYLSSEEDRKKGKKFARTQLGDLLLHLEKKHGEDWGKVYDEAWERIDKKVEGLSKHIKLEEERRSEDAQSKAALTDWLRAKASFVIEGLKEADKDEFCRCELKLQKWYGDLRGKPFAIEAENSILDISGFSKQYNCAFIWQKDGVKKLNLYLIINYFKGGKLRFKKIKPEAFEANRFYTVINKKSGEIVPMEVNFNFDDPNLIILPLAFGKRQGREFIWNDLLSLETGSLKLANGRVIEKTLYNRRTRQDEPALFVALTFERREVLDSSNIKPMNLIGVDRGENIPAVIALTDPEGCPLSRFKDSLGNPTHILRIGESYKEKQRTIQAKKEVEQRRAGGYSRKYASKAKNLADDMVRNTARDLLYYAVTQDAMLIFENLSRGFGRQGKRTFMAERQYTRMEDWLTAKLAYEGLPSKTYLSKTLAQYTSKTCSNCGFTITSADYDRVLEKLKKTATGWMTTINGKELKVEGQITYYNRYKRQNVVKDLSVELDRLSEESVNNDISSWDKGRSGEALSLLKKRFSHRPVQEKFVCLNCGFETHADEQAALNIARSWLFLRSQEYKKYQTNKTTGNTDKRAFVETWQSFYRKKLKEVWKPAV

SEQ ID NO: 36941 - protein, 978 aa, synthetic construct
  REGION 1..978: note = engineered CasX variant
QEIKRINKIRRRLVKDSNTKKAGKTGPMKTLLVRVMTPDLRERLENLRKKPENIPQPISNTSRANLNKLLTDYTEMKKAILHVYWEEFQKDPVGLMSRVAQPASKKIDQNKLKPEMDEKGNLTTAGFACSQCGQPLFVYKLEQVSEKGKAYTNYFGRCNVAEHEKLILLAQLKPEKDSDEAVTYSLGKFGQRALDFYSIHVTKESTHPVKPLAQIAGNRYASAPVGKALSDACMGTIASFLSKYQDIIIEHQKVVKGNQKRLESLRELAGKENLEYPSVTLPPQPHTKEGVDAYNEVIARVRMWVNLNLWQKLKLSRDDAKPLLRLKGFPSFPLVERQANEVDWWDMVCNVKKLINEKKEDGKVFWQNLAGYKRQEALRPYLSSEEDRKKGKKFARTQLGDLLLHLEKKHGEDWGKVYDEAWERIDKKVEGLSKHIKLEEERRSEDAQSKAALTDWLRAKASFVIEGLKEADKDEFCRCELKLQKWYGDLRGKPFAIEAENSILDISGFSKQYNCAFIWQKDGVKKLNLYLIINYFKGGKLRFKKIKPEAFEANRFYTVINKKSGEIVPMEVNFNFDDPNLIILPLAFGKRQGREFIWNDLLSLETGSLKLANGRVIEKTLYNRRTRQDEPALFVALTFERREVLDSSNIKPMNLIGVDRGENIPAVIALTDPEGCPLSRFKDSLGNPTHILRIGESYKEKQRTIQAKKEVEQRRAGGYSRKYASKAKNLADDMVRNTARDLLYYAVTQDAMLIFENLSRGFGRQGKRTFMAERQYTRMEDWLTAKLAYEGLPSKTYLSKTLAQYTSKTCSNCGFTITSADYDRVLEKLKKTATGWMTTINGKELKVEGQITYYNRYKRQNVVKDLSVELDRLSEESVNNDISSWDKGRSGEALSLLKKRFSHRPVQEKFVCLNCGFETHADEQAALNIARSWLFLRSQEYKKYQTNKTTGNTDKRAFVETWQSFYRKKLKEVWKPAV

SEQ ID NO: 36942 - protein, 978 aa, synthetic construct
  REGION 1..978: note = engineered CasX variant
QEIKRINKIRRRLVKDSNTKKAGKTGPMKTLLVRVMTPDLRERLENLRKKPENIPQPISNTSRANLNKLLTDYTEMKKAILHVYWEEFQKDPVGLMSRVAQPASKKIDQNKLKPEMDEKGNLTTAGFACSQCGQPLFVYKLEQVSEKGKAYTNYFGRCNVAEHEKLILLAQLKPEKDSDEAVTYSLGKFGQRALDFYSIHVTKESTHPVKPLAQIAGNRYASVPVGKALSDACMGTIASFLSKYQDIIIEHQKVVKGNQKRLESLRELAGKENLEYPSVTLPPQPHTKEGVDAYNEVIARVRMWVNLNLWQKLKLSRDDAKPLLRLKGFPSFPLVERQANEVDWWDMVCNVKKLINEKKEDGKVFWQNLAGYKRQEALRPYLSSEEDRKKGKKFARTQLGDLLLHLEKKHGEDWGKVYDEAWERIDKKVEGLSKHIKLEEERRSEDAQSKAALTDWLRAKASFVIEGLKEADKDEFCRCELKLQKWYGDLRGKPFAIEAENSILDISGFSKQYNCAFIWQKDGVKKLNLYLIINYFKGGKLRFKKIKPEAFEANRFYTVINKKSGEIVPMEVNFNFDDPNLIILPLAFGKRQGREFIWNDLLSLETGSLKLANGRVIEKTLYNRRTRQDEPALFVALTFERREVLDSSNIKPMNLIGVDRGENIPAVIALTDPEGCPLSRFKDSLGNPTHILRIGESYKEKQRTIQAKKEVEQRRAGGYSRKYASKAKNLADDMVRNTARDLLYYAVTQDAMLIFENLSRGFGRQGKRTFMAERQYTRMEDWLTAKLAYEGLPSKTYLSKTLAQYTSKTCSNCGFTITSADYDRVLEKLKKTATGWMTTINGKELKVEGQITYYNRYKRQNVVKDLSVELDRLSEESVNNDISSWDKGRSGEALSLLKKRFSHRPVQEKFVCLNCGFETHADEQAALNIARSWLFLRSQEYKKYQTNKTTGNTDKRAFVETWQSFYRKKLKEVWKPAV

SEQ ID NO: 36943 - protein, 978 aa, synthetic construct
  REGION 1..978: note = engineered CasX variant
QEIKRINKIRRRLVKDSNTKKAGKTGPMKTLLVRVMTPDLRERLENLRKKPENIPQPISNTSRANLNKLLTDYTEMKKAILHVYWEEFQKDPVGLMSRVAQPASKKIDQNKLKPEMDEKGNLTTAGFACSQCGQPLFVYKLEQVSEKGKAYTNYFGRCNVAEHEKLIKLAQLKPEKDSDEAVTYSLGKFGQRALDFYSIHVTKESTHPVKPLAQIAGNRYASGPVGKALSDACMGTIASFLSKYQDIIIEHQKVVKGNQKRLESLRELAGKENLEYPSVTLPPQPHTKEGVDAYNEVIARVRMWVNLNLWQKLKLSRDDAKPLLRLKGFPSFPLVERQANEVDWWDMVCNVKKLINEKKEDGKVFWQNLAGYKRQEALRPYLSSEEDRKKGKKFARTQLGDLLLHLEKKHGEDWGKVYDEAWERIDKKVEGLSKHIKLEEERRSEDAQSKAALTDWLRAKASFVIEGLKEADKDEFCRCELKLQKWYGDLRGKPFAIEAENSILDISGFSKQYNCAFIWQKDGVKKLNLYLIINYFKGGKLRFKKIKPEAFEANRFYTVINKKSGEIVPMEVNFNFDDPNLIILPLAFGKRQGREFIWNDLLSLETGSLKLANGRVIEKTLYNRRTRQDEPALFVALTFERREVLDSSNIKPMNLIGVDRGENIPAVIALTDPEGCPLSRFKDSLGNPTHILRIGESYKEKQRTIQAKKEVEQRRAGGYSRKYASKAKNLADDMVRNTARDLLYYAVTQDAMLIFENLSRGFGRQGKRTFMAERQYTRMEDWLTAKLAYEGLPSKTYLSKTLAQYTSKTCSNCGFTITSADYDRVLEKLKKTATGWMTTINGKELKVEGQITYYNRYKRQNVVKDLSVELDRLSEESVNNDISSWDKGRSGEALSLLKKRFSHRPVQEKFVCLNCGFETHADEQAALNIARSWLFLRSQEYKKYQTNKTTGNTDKRAFVETWQSFYRKKLKEVWKPAV

SEQ ID NO: 36944 - protein, 977 aa, synthetic construct
  REGION 1..977: note = engineered CasX variant
QEIKRINKIRRRLVKDSNTKKAGKTGPMKTLLVRVMTPDLRERLENLRKKPENIPQPISNTSRANLNKLLTDYTEMKKAILHVYWEEFQKDPVGLMSRVAQPASKKIDQNKLKPEMDEKGNLTTAGFACSQCGQPLFVYKLEQVSEKGKAYTNYFGRCNVAEHEKLILLAQLKPEKDSDEAVTYSLGKFGQRALDFYSIHVTKESTHPVKPLAQIAGNRYASPVGKALSDACMGTIASFLSKYQDIIIEHQKVVKGNQKRLESLRELAGKENLEYPSVTLPPQPHTKEGVDAYNEVIARVRMWVNLNLWQKLKLSRDDAKPLLRLKGFPSFPLVERQANEVDWWDMVCNVKKLINEKKEDGKVFWQNLAGYKRQEALRPYLSSEEDRKKGKKFARTQLGDLLLHLEKKHGEDWGKVYDEAWERIDKKVEGLSKHIKLEEERRSEDAQSKAALTDWLRAKASFVIEGLKEADKDEFCRCELKLQKWYGDLRGKPFAIEAENSILDISGFSKQYNCAFIWQKDGVKKLNLYLIINYFKGGKLRFKKIKPEAFEANRFYTVINKKSGEIVPMEVNFNFDDPNLIILPLAFGKRQGREFIWNDLLSLETGSLKLANGRVIEKTLYNRRTRQDEPALFVALTFERREVLDSSNIKPMNLIGVDRGENIPAVIALTDPEGCPLSRFKDSLGNPTHILRIGESYKEKQRTIQAKKEVEQRRAGGYSRKYASKAKNLADDMVRNTARDLLYYAVTQDAMLIFENLSRGFGRQGKRTFMAERQYTRMEDWLTAKLAYEGLPSKTYLSKTLAQYTSKTCSNCGFTITSADYDRVLEKLKKTATGWMTTINGKELKVEGQITYYNRYKRQNVVKDLSVELDRLSEESVNNDISSWDKGRSGEALSLLKKRFSHRPVQEKFVCLNCGFETHADEQAALNIARSWLFLRSQEYKKYQTNKTTGNTDKRAFVETWQSFYRKKLKEVWKPAV

SEQ ID NO: 36945 - protein, 978 aa, synthetic construct
  REGION 1..978: note = engineered CasX variant
QEIKRINKIRRRLVKDSNTKKAGKTGPMKTLLVRVMTPDLRERLENLRKKPENIPQPISNTSRANLNKLLTDYTEMKKAILHVYWEEFQVDPVGLMSRVAQPASKKIDQNKLKPEMDEKGNLTTAGFACSQCGQPLFVYKLEQVSEKGKAYTNYFGRCNVAEHEKLILLAQLKPEKDSDEAVTYSLGKFGQRALDFYSIHVTKESTHPVKPLAQIAGNRYASYPVGKALSDACMGTIASFLSKYQDIIIEHQKVVKGNQKRLESLRELAGKENLEYPSVTLPPQPHTKEGVDAYNEVIARVRMWVNLNLWQKLKLSRDDAKPLLRLKGFPSFPLVERQANEVDWWDMVCNVKKLINEKKEDGKVFWQNLAGYKRQEALRPYLSSEEDRKKGKKFARTQLGDLLLHLEKKHGEDWGKVYDEAWERIDKKVEGLSKHIKLEEERRSEDAQSKAALTDWLRAKASFVIEGLKEADKDEFCRCELKLQKWYGDLRGKPFAIEAENSILDISGFSKQYNCAFIWQKDGVKKLNLYLIINYFKGGKLRFKKIKPEAFEANRFYTVINKKSGEIVPMEVNFNFDDPNLIILPLAFGKRQGREFIWNDLLSLETGSLKLANGRVIEKTLYNRRTRQDEPALFVALTFERREVLDSSNIKPMNLIGVDRGENIPAVIALTDPEGCPLSRFKDSLGNPTHILRIGESYKEKQRTIQAKKEVEQRRAGGYSRKYASKAKNLADDMVRNTARDLLYYAVTQDAMLIFENLSRGFGRQGKRTFMAERQYTRMEDWLTAKLAYEGLPSKTYLSKTLAQYTSKTCSNCGFTITSADYDRVLEKLKKTATGWMTTINGKELKVEGQITYYNRYKRQNVVKDLSVELDRLSEESVNNDISSWTKGRSGEALSLLKKRFSHRPVQEKFVCLNCGFETHADEQAALNIARSWLFLRSQEYKKYQTNKTTGNTDKRAFVETWQSFYRKKLKEVWKPAV

SEQ ID NO: 36946 - protein, 978 aa, synthetic construct
  REGION 1..978: note = engineered CasX variant
QEIKRINKIRRRLVKDSNTKKAGKTGPMKTLLVRVMTPDLRERLENLRKKPENIPQPISNTSRANLNKLLTDYTEMKKAILHVYWEEFQVDPVGLMSRVAQPASKKIDQNKLKPEMDEKGNLTTAGFACSQCGQPLFVYKLEQVSEKGKAYTNYFGRCNVAEHEKLILLAQLKPEKDSDEAVTYSLGKFGQRALDFYSIHVTKESTHPVKPLAQIAGNRYASHPVGKALSDACMGTIASFLSKYQDIIIEHQKVVKGNQKRLESLRELAGKENLEYPSVTLPPQPHTKEGVDAYNEVIARVRMWVNLNLWQKLKLSRDDAKPLLRLKGFPSFPLVERQANEVDWWDMVCNVKKLINEKKEDGKVFWQNLAGYKRQEALRPYLSSEEDRKKGKKFARTQLGDLLLHLEKKHGEDWGKVYDEAWERIDKKVEGLSKHIKLEEERRSEDAQSKAALTDWLRAKASFVIEGLKEADKDEFCRCELKLQKWYGDLRGKPFAIEAENSILDISGFSKQYNCAFIWQKDGVKKLNLYLIINYFKGGKLRFKKIKPEAFEANRFYTVINKKSGEIVPMEVNFNFDDPNLIILPLAFGKRQGREFIWNDLLSLETGSLKLANGRVIEKTLYNRRTRQDEPALFVALTFERREVLDSSNIKPMNLIGVDRGENIPAVIALTDPEGCPLSRFKDSLGNPTHILRIGESYKEKQRTIQAKKEVEQRRAGGYSRKYASKAKNLADDMVRNTARDLLYYAVTQDAMLIFENLSRGFGRQGKRTFMAERQYTRMEDWLTAKLAYEGLPSKTYLSKTLAQYTSKTCSNCGFTITSADYDRVLEKLKKTATGWMTTINGKELKVEGQITYYNRYKRQNVVKDLSVELDRLSEESVNNDISSWTKGRSGEALSLLKKRFSHRPVQEKFVCLNCGFETHADEQAALNIARSWLFLRSQEYKKYQTNKTTGNTDKRAFVETWQSFYRKKLKEVWKPAV

SEQ ID NO: 36947 - protein, 978 aa, synthetic construct
  REGION 1..978: note = engineered CasX variant
QEIKRINKIRRRLVKDSNTKKAGKTGPMKTLLVRVMTPDLRERLENLRKKPENIPQPISNTSRANLNKLLTDYTEMKKAILHVYWEEFQVDPVGLMSRVAQPASKKIDQNKLKPEMDEKGNLTTAGFACSQCGQPLFVYKLEQVSEKGKAYTNYFGRCNVAEHEKLILLAQLKPEKDSDEAVTYSLGKFGQRALDFYSIHVTKESTHPVKPLAQIAGNRYASSPVGKALSDACMGTIASFLSKYQDIIIEHQKVVKGNQKRLESLRELAGKENLEYPSVTLPPQPHTKEGVDAYNEVIARVRMWVNLNLWQKLKLSRDDAKPLLRLKGFPSFPLVERQANEVDWWDMVCNVKKLINEKKEDGKVFWQNLAGYKRQEALRPYLSSEEDRKKGKKFARTQLGDLLLHLEKKHGEDWGKVYDEAWERIDKKVEGLSKHIKLEEERRSEDAQSKAALTDWLRAKASFVIEGLKEADKDEFCRCELKLQKWYGDLRGKPFAIEAENSILDISGFSKQYNCAFIWQKDGVKKLNLYLIINYFKGGKLRFKKIKPEAFEANRFYTVINKKSGEIVPMEVNFNFDDPNLIILPLAFGKRQGREFIWNDLLSLETGSLKLANGRVIEKTLYNRRTRQDEPALFVALTFERREVLDSSNIKPMNLIGVDRGENIPAVIALTDPEGCPLSRFKDSLGNPTHILRIGESYKEKQRTIQAKKEVEQRRAGGYSRKYASKAKNLADDMVRNTARDLLYYAVTQDAMLIFENLSRGFGRQGKRTFMAERQYTRMEDWLTAKLAYEGLPSKTYLSKTLAQYTSKTCSNCGFTITSADYDRVLEKLKKTATGWMTTINGKELKVEGQITYYNRYKRQNVVKDLSVELDRLSEESVNNDISSWTKGRSGEALSLLKKRFSHRPVQEKFVCLNCGFETHADEQAALNIARSWLFLRSQEYKKYQTNKTTGNTDKRAFVETWQSFYRKKLKEVWKPAV

SEQ ID NO: 36948 - protein, 978 aa, synthetic construct
  REGION 1..978: note = engineered CasX variant
QEIKRINKIRRRLVKDSNTKKAGKTGPMKTLLVRVMTPDLRERLENLRKKPENIPQPISNTSRANLNKLLTDYTEMKKAILHVYWEEFQVDPVGLMSRVAQPASKKIDQNKLKPEMDEKGNLTTAGFACSQCGQPLFVYKLEQVSEKGKAYTNYFGRCNVAEHEKLILLAQLKPEKDSDEAVTYSLGKFGQRALDFYSIHVTKESTHPVKPLAQIAGNRYASTPVGKALSDACMGTIASFLSKYQDIIIEHQKVVKGNQKRLESLRELAGKENLEYPSVTLPPQPHTKEGVDAYNEVIARVRMWVNLNLWQKLKLSRDDAKPLLRLKGFPSFPLVERQANEVDWWDMVCNVKKLINEKKEDGKVFWQNLAGYKRQEALRPYLSSEEDRKKGKKFARTQLGDLLLHLEKKHGEDWGKVYDEAWERIDKKVEGLSKHIKLEEERRSEDAQSKAALTDWLRAKASFVIEGLKEADKDEFCRCELKLQKWYGDLRGKPFAIEAENSILDISGFSKQYNCAFIWQKDGVKKLNLYLIINYFKGGKLRFKKIKPEAFEANRFYTVINKKSGEIVPMEVNFNFDDPNLIILPLAFGKRQGREFIWNDLLSLETGSLKLANGRVIEKTLYNRRTRQDEPALFVALTFERREVLDSSNIKPMNLIGVDRGENIPAVIALTDPEGCPLSRFKDSLGNPTHILRIGESYKEKQRTIQAKKEVEQRRAGGYSRKYASKAKNLADDMVRNTARDLLYYAVTQDAMLIFENLSRGFGRQGKRTFMAERQYTRMEDWLTAKLAYEGLPSKTYLSKTLAQYTSKTCSNCGFTITSADYDRVLEKLKKTATGWMTTINGKELKVEGQITYYNRYKRQNVVKDLSVELDRLSEESVNNDISSWTKGRSGEALSLLKKRFSHRPVQEKFVCLNCGFETHADEQAALNIARSWLFLRSQEYKKYQTNKTTGNTDKRAFVETWQSFYRKKLKEVWKPAV

SEQ ID NO: 36949 - protein, 978 aa, synthetic construct
  REGION 1..978: note = engineered CasX variant
QEIKRINKIRRRLVKDSNTKKAGKTGPMKTLLVRVMTPDLRERLENLRKKPENIPQPISNTSRANLNKLLTDYTEMKKAILHVYWEEFQVDPVGLMSRVAQPASKKIDQNKLKPEMDEKGNLTTAGFACSQCGQPLFVYKLEQVSEKGKAYTNYFGRCNVAEHEKLILLAQLKPEKDSDEAVTYSLGKFGQRALDFYSIHVTKESTHPVKPLAQIAGNRYASAPVGKALSDACMGTIASFLSKYQDIIIEHQKVVKGNQKRLESLRELAGKENLEYPSVTLPPQPHTKEGVDAYNEVIARVRMWVNLNLWQKLKLSRDDAKPLLRLKGFPSFPLVERQANEVDWWDMVCNVKKLINEKKEDGKVFWQNLAGYKRQEALRPYLSSEEDRKKGKKFARTQLGDLLLHLEKKHGEDWGKVYDEAWERIDKKVEGLSKHIKLEEERRSEDAQSKAALTDWLRAKASFVIEGLKEADKDEFCRCELKLQKWYGDLRGKPFAIEAENSILDISGFSKQYNCAFIWQKDGVKKLNLYLIINYFKGGKLRFKKIKPEAFEANRFYTVINKKSGEIVPMEVNFNFDDPNLIILPLAFGKRQGREFIWNDLLSLETGSLKLANGRVIEKTLYNRRTRQDEPALFVALTFERREVLDSSNIKPMNLIGVDRGENIPAVIALTDPEGCPLSRFKDSLGNPTHILRIGESYKEKQRTIQAKKEVEQRRAGGYSRKYASKAKNLADDMVRNTARDLLYYAVTQDAMLIFENLSRGFGRQGKRTFMAERQYTRMEDWLTAKLAYEGLPSKTYLSKTLAQYTSKTCSNCGFTITSADYDRVLEKLKKTATGWMTTINGKELKVEGQITYYNRYKRQNVVKDLSVELDRLSEESVNNDISSWTKGRSGEALSLLKKRFSHRPVQEKFVCLNCGFETHADEQAALNIARSWLFLRSQEYKKYQTNKTTGNTDKRAFVETWQSFYRKKLKEVWKPAV

SEQ ID NO: 36950 - protein, 978 aa, synthetic construct
  REGION 1..978: note = engineered CasX variant
QEIKRINKIRRRLVKDSNTKKAGKTGPMKTLLVRVMTPDLRERLENLRKKPENIPQPISNTSRANLNKLLTDYTEMKKAILHVYWEEFQVDPVGLMSRVAQPASKKIDQNKLKPEMDEKGNLTTAGFACSQCGQPLFVYKLEQVSEKGKAYTNYFGRCNVAEHEKLILLAQLKPEKDSDEAVTYSLGKFGQRALDFYSIHVTKESTHPVKPLAQIAGNRYASVPVGKALSDACMGTIASFLSKYQDIIIEHQKVVKGNQKRLESLRELAGKENLEYPSVTLPPQPHTKEGVDAYNEVIARVRMWVNLNLWQKLKLSRDDAKPLLRLKGFPSFPLVERQANEVDWWDMVCNVKKLINEKKEDGKVFWQNLAGYKRQEALRPYLSSEEDRKKGKKFARTQLGDLLLHLEKKHGEDWGKVYDEAWERIDKKVEGLSKHIKLEEERRSEDAQSKAALTDWLRAKASFVIEGLKEADKDEFCRCELKLQKWYGDLRGKPFAIEAENSILDISGFSKQYNCAFIWQKDGVKKLNLYLIINYFKGGKLRFKKIKPEAFEANRFYTVINKKSGEIVPMEVNFNFDDPNLIILPLAFGKRQGREFIWNDLLSLETGSLKLANGRVIEKTLYNRRTRQDEPALFVALTFERREVLDSSNIKPMNLIGVDRGENIPAVIALTDPEGCPLSRFKDSLGNPTHILRIGESYKEKQRTIQAKKEVEQRRAGGYSRKYASKAKNLADDMVRNTARDLLYYAVTQDAMLIFENLSRGFGRQGKRTFMAERQYTRMEDWLTAKLAYEGLPSKTYLSKTLAQYTSKTCSNCGFTITSADYDRVLEKLKKTATGWMTTINGKELKVEGQITYYNRYKRQNVVKDLSVELDRLSEESVNNDISSWTKGRSGEALSLLKKRFSHRPVQEKFVCLNCGFETHADEQAALNIARSWLFLRSQEYKKYQTNKTTGNTDKRAFVETWQSFYRKKLKEVWKPAV

SEQ ID NO: 36951 - protein, 978 aa, synthetic construct
  REGION 1..978: note = engineered CasX variant
QEIKRINKIRRRLVKDSNTKKAGKTGPMKTLLVRVMTPDLRERLENLRKKPENIPQPISNTSRANLNKLLTDYTEMKKAILHVYWEEFQVDPVGLMSRVAQPASKKIDQNKLKPEMDEKGNLTTAGFACSQCGQPLFVYKLEQVSEKGKAYTNYFGRCNVAEHEKLIKLAQLKPEKDSDEAVTYSLGKFGQRALDFYSIHVTKESTHPVKPLAQIAGNRYASGPVGKALSDACMGTIASFLSKYQDIIIEHQKVVKGNQKRLESLRELAGKENLEYPSVTLPPQPHTKEGVDAYNEVIARVRMWVNLNLWQKLKLSRDDAKPLLRLKGFPSFPLVERQANEVDWWDMVCNVKKLINEKKEDGKVFWQNLAGYKRQEALRPYLSSEEDRKKGKKFARTQLGDLLLHLEKKHGEDWGKVYDEAWERIDKKVEGLSKHIKLEEERRSEDAQSKAALTDWLRAKASFVIEGLKEADKDEFCRCELKLQKWYGDLRGKPFAIEAENSILDISGFSKQYNCAFIWQKDGVKKLNLYLIINYFKGGKLRFKKIKPEAFEANRFYTVINKKSGEIVPMEVNFNFDDPNLIILPLAFGKRQGREFIWNDLLSLETGSLKLANGRVIEKTLYNRRTRQDEPALFVALTFERREVLDSSNIKPMNLIGVDRGENIPAVIALTDPEGCPLSRFKDSLGNPTHILRIGESYKEKQRTIQAKKEVEQRRAGGYSRKYASKAKNLADDMVRNTARDLLYYAVTQDAMLIFENLSRGFGRQGKRTFMAERQYTRMEDWLTAKLAYEGLPSKTYLSKTLAQYTSKTCSNCGFTITSADYDRVLEKLKKTATGWMTTINGKELKVEGQITYYNRYKRQNVVKDLSVELDRLSEESVNNDISSWTKGRSGEALSLLKKRFSHRPVQEKFVCLNCGFETHADEQAALNIARSWLFLRSQEYKKYQTNKTTGNTDKRAFVETWQSFYRKKLKEVWKPAV

SEQ ID NO: 36952 - protein, 977 aa, synthetic construct
  REGION 1..977: note = engineered CasX variant
QEIKRINKIRRRLVKDSNTKKAGKTGPMKTLLVRVMTPDLRERLENLRKKPENIPQPISNTSRANLNKLLTDYTEMKKAILHVYWEEFQVDPVGLMSRVAQPASKKIDQNKLKPEMDEKGNLTTAGFACSQCGQPLFVYKLEQVSEKGKAYTNYFGRCNVAEHEKLILLAQLKPEKDSDEAVTYSLGKFGQRALDFYSIHVTKESTHPVKPLAQIAGNRYASPVGKALSDACMGTIASFLSKYQDIIIEHQKVVKGNQKRLESLRELAGKENLEYPSVTLPPQPHTKEGVDAYNEVIARVRMWVNLNLWQKLKLSRDDAKPLLRLKGFPSFPLVERQANEVDWWDMVCNVKKLINEKKEDGKVFWQNLAGYKRQEALRPYLSSEEDRKKGKKFARTQLGDLLLHLEKKHGEDWGKVYDEAWERIDKKVEGLSKHIKLEEERRSEDAQSKAALTDWLRAKASFVIEGLKEADKDEFCRCELKLQKWYGDLRGKPFAIEAENSILDISGFSKQYNCAFIWQKDGVKKLNLYLIINYFKGGKLRFKKIKPEAFEANRFYTVINKKSGEIVPMEVNFNFDDPNLIILPLAFGKRQGREFIWNDLLSLETGSLKLANGRVIEKTLYNRRTRQDEPALFVALTFERREVLDSSNIKPMNLIGVDRGENIPAVIALTDPEGCPLSRFKDSLGNPTHILRIGESYKEKQRTIQAKKEVEQRRAGGYSRKYASKAKNLADDMVRNTARDLLYYAVTQDAMLIFENLSRGFGRQGKRTFMAERQYTRMEDWLTAKLAYEGLPSKTYLSKTLAQYTSKTCSNCGFTITSADYDRVLEKLKKTATGWMTTINGKELKVEGQITYYNRYKRQNVVKDLSVELDRLSEESVNNDISSWTKGRSGEALSLLKKRFSHRPVQEKFVCLNCGFETHADEQAALNIARSWLFLRSQEYKKYQTNKTTGNTDKRAFVETWQSFYRKKLKEVWKPAV

SEQ ID NO: 36953 - protein, 978 aa, synthetic construct
  REGION 1..978: note = engineered CasX variant
QEIKRLNKIRRRLVKDSNTKKAGKTGPMKTLLVRVMTPDLRERLENLRKKPENIPQPISNTSRANLNKLLTDYTEMKKAILHVYWEEFQKDPVGLMSRVAQPASKKIDQNKLKPEMDEKGNLTTAGFACSQCGQPLFVYKLEQVSEKGKAYTNYFGRCNVAEHEKLILLAQLKPEKDSDEAVTYSLGKFGQRALDFYSIHVTKESTHPVKPLAQIAGNRYASYPVGKALSDACMGTIASFLSKYQDIIIEHQKVVKGNQKRLESLRELAGKENLEYPSVTLPPQPHTKEGVDAYNEVIARVRMWVNLNLWQKLKLSRDDAKPLLRLKGFPSFPLVERQANEVDWWDMVCNVKKLINEKKEDGKVFWQNLAGYKRQEALRPYLSSEEDRKKGKKFARTQLGDLLLHLEKKHGEDWGKVYDEAWERIDKKVEGLSKHIKLEEERRSEDAQSKAALTDWLRAKASFVIEGLKEADKDEFCRCELKLQKWYGDLRGKPFAIEAENSILDISGFSKQYNCAFIWQKDGVKKLNLYLIINYFKGGKLRFKKIKPEAFEANRFYTVINKKSGEIVPMEVNFNFDDPNLIILPLAFGKRQGREFIWNDLLSLETGSLKLANGRVIEKTLYNRRTRQDEPALFVALTFERREVLDSSNIKPMNLIGVDRGENIPAVIALTDPEGCPLSRFKDSLGNPTHILRIGESYKEKQRTIQAKKEVEQRRAGGYSRKYASKAKNLADDMVRNTARDLLYYAVTQDAMLIFENLSRGFGRQGKRTFMAERQYTRMEDWLTAKLAYEGLPSKTYLSKTLAQYTSKTCSNCGFTITSADYDRVLEKLKKTATGWMTTINGKELKVEGQITYYNRYKRQNVVKDLSVELDRLSEESVNNDISSWTKGRSGEALSLLKKRFSHRPVQEKFVCLNCGFETHADEQAALNIARSWLFLRSQEYKKYQTNKTTGNTDKRAFVETWQSFYRKKLKEVWKPAV

SEQ ID NO: 36954 - protein, 978 aa, synthetic construct
  REGION 1..978: note = engineered CasX variant
QEIKRLNKIRRRLVKDSNTKKAGKTGPMKTLLVRVMTPDLRERLENLRKKPENIPQPISNTSRANLNKLLTDYTEMKKAILHVYWEEFQKDPVGLMSRVAQPASKKIDQNKLKPEMDEKGNLTTAGFACSQCGQPLFVYKLEQVSEKGKAYTNYFGRCNVAEHEKLILLAQLKPEKDSDEAVTYSLGKFGQRALDFYSIHVTKESTHPVKPLAQIAGNRYASHPVGKALSDACMGTIASFLSKYQDIIIEHQKVVKGNQKRLESLRELAGKENLEYPSVTLPPQPHTKEGVDAYNEVIARVRMWVNLNLWQKLKLSRDDAKPLLRLKGFPSFPLVERQANEVDWWDMVCNVKKLINEKKEDGKVFWQNLAGYKRQEALRPYLSSEEDRKKGKKFARTQLGDLLLHLEKKHGEDWGKVYDEAWERIDKKVEGLSKHIKLEEERRSEDAQSKAALTDWLRAKASFVIEGLKEADKDEFCRCELKLQKWYGDLRGKPFAIEAENSILDISGFSKQYNCAFIWQKDGVKKLNLYLIINYFKGGKLRFKKIKPEAFEANRFYTVINKKSGEIVPMEVNFNFDDPNLIILPLAFGKRQGREFIWNDLLSLETGSLKLANGRVIEKTLYNRRTRQDEPALFVALTFERREVLDSSNIKPMNLIGVDRGENIPAVIALTDPEGCPLSRFKDSLGNPTHILRIGESYKEKQRTIQAKKEVEQRRAGGYSRKYASKAKNLADDMVRNTARDLLYYAVTQDAMLIFENLSRGFGRQGKRTFMAERQYTRMEDWLTAKLAYEGLPSKTYLSKTLAQYTSKTCSNCGFTITSADYDRVLEKLKKTATGWMTTINGKELKVEGQITYYNRYKRQNVVKDLSVELDRLSEESVNNDISSWTKGRSGEALSLLKKRFSHRPVQEKFVCLNCGFETHADEQAALNIARSWLFLRSQEYKKYQTNKTTGNTDKRAFVETWQSFYRKKLKEVWKPAV

SEQ ID NO: 36955 - protein, 978 aa, synthetic construct
  REGION 1..978: note = engineered CasX variant
QEIKRLNKIRRRLVKDSNTKKAGKTGPMKTLLVRVMTPDLRERLENLRKKPENIPQPISNTSRANLNKLLTDYTEMKKAILHVYWEEFQKDPVGLMSRVAQPASKKIDQNKLKPEMDEKGNLTTAGFACSQCGQPLFVYKLEQVSEKGKAYTNYFGRCNVAEHEKLILLAQLKPEKDSDEAVTYSLGKFGQRALDFYSIHVTKESTHPVKPLAQIAGNRYASSPVGKALSDACMGTIASFLSKYQDIIIEHQKVVKGNQKRLESLRELAGKENLEYPSVTLPPQPHTKEGVDAYNEVIARVRMWVNLNLWQKLKLSRDDAKPLLRLKGFPSFPLVERQANEVDWWDMVCNVKKLINEKKEDGKVFWQNLAGYKRQEALRPYLSSEEDRKKGKKFARTQLGDLLLHLEKKHGEDWGKVYDEAWERIDKKVEGLSKHIKLEEERRSEDAQSKAALTDWLRAKASFVIEGLKEADKDEFCRCELKLQKWYGDLRGKPFAIEAENSILDISGFSKQYNCAFIWQKDGVKKLNLYLIINYFKGGKLRFKKIKPEAFEANRFYTVINKKSGEIVPMEVNFNFDDPNLIILPLAFGKRQGREFIWNDLLSLETGSLKLANGRVIEKTLYNRRTRQDEPALFVALTFERREVLDSSNIKPMNLIGVDRGENIPAVIALTDPEGCPLSRFKDSLGNPTHILRIGESYKEKQRTIQAKKEVEQRRAGGYSRKYASKAKNLADDMVRNTARDLLYYAVTQDAMLIFENLSRGFGRQGKRTFMAERQYTRMEDWLTAKLAYEGLPSKTYLSKTLAQYTSKTCSNCGFTITSADYDRVLEKLKKTATGWMTTINGKELKVEGQITYYNRYKRQNVVKDLSVELDRLSEESVNNDISSWTKGRSGEALSLLKKRFSHRPVQEKFVCLNCGFETHADEQAALNIARSWLFLRSQEYKKYQTNKTTGNTDKRAFVETWQSFYRKKLKEVWKPAV

SEQ ID NO: 36956 - protein, 978 aa, synthetic construct
  REGION 1..978: note = engineered CasX variant
QEIKRLNKIRRRLVKDSNTKKAGKTGPMKTLLVRVMTPDLRERLENLRKKPENIPQPISNTSRANLNKLLTDYTEMKKAILHVYWEEFQKDPVGLMSRVAQPASKKIDQNKLKPEMDEKGNLTTAGFACSQCGQPLFVYKLEQVSEKGKAYTNYFGRCNVAEHEKLILLAQLKPEKDSDEAVTYSLGKFGQRALDFYSIHVTKESTHPVKPLAQIAGNRYASTPVGKALSDACMGTIASFLSKYQDIIIEHQKVVKGNQKRLESLRELAGKENLEYPSVTLPPQPHTKEGVDAYNEVIARVRMWVNLNLWQKLKLSRDDAKPLLRLKGFPSFPLVERQANEVDWWDMVCNVKKLINEKKEDGKVFWQNLAGYKRQEALRPYLSSEEDRKKGKKFARTQLGDLLLHLEKKHGEDWGKVYDEAWERIDKKVEGLSKHIKLEEERRSEDAQSKAALTDWLRAKASFVIEGLKEADKDEFCRCELKLQKWYGDLRGKPFAIEAENSILDISGFSKQYNCAFIWQKDGVKKLNLYLIINYFKGGKLRFKKIKPEAFEANRFYTVINKKSGEIVPMEVNFNFDDPNLIILPLAFGKRQGREFIWNDLLSLETGSLKLANGRVIEKTLYNRRTRQDEPALFVALTFERREVLDSSNIKPMNLIGVDRGENIPAVIALTDPEGCPLSRFKDSLGNPTHILRIGESYKEKQRTIQAKKEVEQRRAGGYSRKYASKAKNLADDMVRNTARDLLYYAVTQDAMLIFENLSRGFGRQGKRTFMAERQYTRMEDWLTAKLAYEGLPSKTYLSKTLAQYTSKTCSNCGFTITSADYDRVLEKLKKTATGWMTTINGKELKVEGQITYYNRYKRQNVVKDLSVELDRLSEESVNNDISSWTKGRSGEALSLLKKRFSHRPVQEKFVCLNCGFETHADEQAALNIARSWLFLRSQEYKKYQTNKTTGNTDKRAFVETWQSFYRKKLKEVWKPAV

SEQ ID NO: 36957 - protein, 978 aa, synthetic construct
  REGION 1..978: note = engineered CasX variant
QEIKRLNKIRRRLVKDSNTKKAGKTGPMKTLLVRVMTPDLRERLENLRKKPENIPQPISNTSRANLNKLLTDYTEMKKAILHVYWEEFQKDPVGLMSRVAQPASKKIDQNKLKPEMDEKGNLTTAGFACSQCGQPLFVYKLEQVSEKGKAYTNYFGRCNVAEHEKLILLAQLKPEKDSDEAVTYSLGKFGQRALDFYSIHVTKESTHPVKPLAQIAGNRYASAPVGKALSDACMGTIASFLSKYQDIIIEHQKVVKGNQKRLESLRELAGKENLEYPSVTLPPQPHTKEGVDAYNEVIARVRMWVNLNLWQKLKLSRDDAKPLLRLKGFPSFPLVERQANEVDWWDMVCNVKKLINEKKEDGKVFWQNLAGYKRQEALRPYLSSEEDRKKGKKFARTQLGDLLLHLEKKHGEDWGKVYDEAWERIDKKVEGLSKHIKLEEERRSEDAQSKAALTDWLRAKASFVIEGLKEADKDEFCRCELKLQKWYGDLRGKPFAIEAENSILDISGFSKQYNCAFIWQKDGVKKLNLYLIINYFKGGKLRFKKIKPEAFEANRFYTVINKKSGEIVPMEVNFNFDDPNLIILPLAFGKRQGREFIWNDLLSLETGSLKLANGRVIEKTLYNRRTRQDEPALFVALTFERREVLDSSNIKPMNLIGVDRGENIPAVIALTDPEGCPLSRFKDSLGNPTHILRIGESYKEKQRTIQAKKEVEQRRAGGYSRKYASKAKNLADDMVRNTARDLLYYAVTQDAMLIFENLSRGFGRQGKRTFMAERQYTRMEDWLTAKLAYEGLPSKTYLSKTLAQYTSKTCSNCGFTITSADYDRVLEKLKKTATGWMTTINGKELKVEGQITYYNRYKRQNVVKDLSVELDRLSEESVNNDISSWTKGRSGEALSLLKKRFSHRPVQEKFVCLNCGFETHADEQAALNIARSWLFLRSQEYKKYQTNKTTGNTDKRAFVETWQSFYRKKLKEVWKPAV

SEQ ID NO: 36958 - protein, 978 aa, synthetic construct
  REGION 1..978: note = engineered CasX variant
QEIKRLNKIRRRLVKDSNTKKAGKTGPMKTLLVRVMTPDLRERLENLRKKPENIPQPISNTSRANLNKLLTDYTEMKKAILHVYWEEFQKDPVGLMSRVAQPASKKIDQNKLKPEMDEKGNLTTAGFACSQCGQPLFVYKLEQVSEKGKAYTNYFGRCNVAEHEKLILLAQLKPEKDSDEAVTYSLGKFGQRALDFYSIHVTKESTHPVKPLAQIAGNRYASVPVGKALSDACMGTIASFLSKYQDIIIEHQKVVKGNQKRLESLRELAGKENLEYPSVTLPPQPHTKEGVDAYNEVIARVRMWVNLNLWQKLKLSRDDAKPLLRLKGFPSFPLVERQANEVDWWDMVCNVKKLINEKKEDGKVFWQNLAGYKRQEALRPYLSSEEDRKKGKKFARTQLGDLLLHLEKKHGEDWGKVYDEAWERIDKKVEGLSKHIKLEEERRSEDAQSKAALTDWLRAKASFVIEGLKEADKDEFCRCELKLQKWYGDLRGKPFAIEAENSILDISGFSKQYNCAFIWQKDGVKKLNLYLIINYFKGGKLRFKKIKPEAFEANRFYTVINKKSGEIVPMEVNFNFDDPNLIILPLAFGKRQGREFIWNDLLSLETGSLKLANGRVIEKTLYNRRTRQDEPALFVALTFERREVLDSSNIKPMNLIGVDRGENIPAVIALTDPEGCPLSRFKDSLGNPTHILRIGESYKEKQRTIQAKKEVEQRRAGGYSRKYASKAKNLADDMVRNTARDLLYYAVTQDAMLIFENLSRGFGRQGKRTFMAERQYTRMEDWLTAKLAYEGLPSKTYLSKTLAQYTSKTCSNCGFTITSADYDRVLEKLKKTATGWMTTINGKELKVEGQITYYNRYKRQNVVKDLSVELDRLSEESVNNDISSWTKGRSGEALSLLKKRFSHRPVQEKFVCLNCGFETHADEQAALNIARSWLFLRSQEYKKYQTNKTTGNTDKRAFVETWQSFYRKKLKEVWKPAV

SEQ ID NO: 36959 - protein, 978 aa, synthetic construct
  REGION 1..978: note = engineered CasX variant
QEIKRLNKIRRRLVKDSNTKKAGKTGPMKTLLVRVMTPDLRERLENLRKKPENIPQPISNTSRANLNKLLTDYTEMKKAILHVYWEEFQKDPVGLMSRVAQPASKKIDQNKLKPEMDEKGNLTTAGFACSQCGQPLFVYKLEQVSEKGKAYTNYFGRCNVAEHEKLIKLAQLKPEKDSDEAVTYSLGKFGQRALDFYSIHVTKESTHPVKPLAQIAGNRYASGPVGKALSDACMGTIASFLSKYQDIIIEHQKVVKGNQKRLESLRELAGKENLEYPSVTLPPQPHTKEGVDAYNEVIARVRMWVNLNLWQKLKLSRDDAKPLLRLKGFPSFPLVERQANEVDWWDMVCNVKKLINEKKEDGKVFWQNLAGYKRQEALRPYLSSEEDRKKGKKFARTQLGDLLLHLEKKHGEDWGKVYDEAWERIDKKVEGLSKHIKLEEERRSEDAQSKAALTDWLRAKASFVIEGLKEADKDEFCRCELKLQKWYGDLRGKPFAIEAENSILDISGFSKQYNCAFIWQKDGVKKLNLYLIINYFKGGKLRFKKIKPEAFEANRFYTVINKKSGEIVPMEVNFNFDDPNLIILPLAFGKRQGREFIWNDLLSLETGSLKLANGRVIEKTLYNRRTRQDEPALFVALTFERREVLDSSNIKPMNLIGVDRGENIPAVIALTDPEGCPLSRFKDSLGNPTHILRIGESYKEKQRTIQAKKEVEQRRAGGYSRKYASKAKNLADDMVRNTARDLLYYAVTQDAMLIFENLSRGFGRQGKRTFMAERQYTRMEDWLTAKLAYEGLPSKTYLSKTLAQYTSKTCSNCGFTITSADYDRVLEKLKKTATGWMTTINGKELKVEGQITYYNRYKRQNVVKDLSVELDRLSEESVNNDISSWTKGRSGEALSLLKKRFSHRPVQEKFVCLNCGFETHADEQAALNIARSWLFLRSQEYKKYQTNKTTGNTDKRAFVETWQSFYRKKLKEVWKPAV

SEQ ID NO: 36960 - protein, 977 aa, synthetic construct
  REGION 1..977: note = engineered CasX variant
QEIKRLNKIRRRLVKDSNTKKAGKTGPMKTLLVRVMTPDLRERLENLRKKPENIPQPISNTSRANLNKLLTDYTEMKKAILHVYWEEFQKDPVGLMSRVAQPASKKIDQNKLKPEMDEKGNLTTAGFACSQCGQPLFVYKLEQVSEKGKAYTNYFGRCNVAEHEKLILLAQLKPEKDSDEAVTYSLGKFGQRALDFYSIHVTKESTHPVKPLAQIAGNRYASPVGKALSDACMGTIASFLSKYQDIIIEHQKVVKGNQKRLESLRELAGKENLEYPSVTLPPQPHTKEGVDAYNEVIARVRMWVNLNLWQKLKLSRDDAKPLLRLKGFPSFPLVERQANEVDWWDMVCNVKKLINEKKEDGKVFWQNLAGYKRQEALRPYLSSEEDRKKGKKFARTQLGDLLLHLEKKHGEDWGKVYDEAWERIDKKVEGLSKHIKLEEERRSEDAQSKAALTDWLRAKASFVIEGLKEADKDEFCRCELKLQKWYGDLRGKPFAIEAENSILDISGFSKQYNCAFIWQKDGVKKLNLYLIINYFKGGKLRFKKIKPEAFEANRFYTVINKKSGEIVPMEVNFNFDDPNLIILPLAFGKRQGREFIWNDLLSLETGSLKLANGRVIEKTLYNRRTRQDEPALFVALTFERREVLDSSNIKPMNLIGVDRGENIPAVIALTDPEGCPLSRFKDSLGNPTHILRIGESYKEKQRTIQAKKEVEQRRAGGYSRKYASKAKNLADDMVRNTARDLLYYAVTQDAMLIFENLSRGFGRQGKRTFMAERQYTRMEDWLTAKLAYEGLPSKTYLSKTLAQYTSKTCSNCGFTITSADYDRVLEKLKKTATGWMTTINGKELKVEGQITYYNRYKRQNVVKDLSVELDRLSEESVNNDISSWTKGRSGEALSLLKKRFSHRPVQEKFVCLNCGFETHADEQAALNIARSWLFLRSQEYKKYQTNKTTGNTDKRAFVETWQSFYRKKLKEVWKPAV

SEQ ID NO: 36961 - protein, 978 aa, synthetic construct
  REGION 1..978: note = engineered CasX variant
QEIKRINKIRRRLVKDSNTKKAGKTGPMKTLLVRVMTPDLRERLENLRKKPENIPQPISNTSRANLNKLLTDYTEMKKAILHVYWEEFQKDPVGLMSRVAQPASKKIDQNKLKPEMDEKGNLTTAGFACSQCGQPLFVYKLEQVSEKGKAYTNYVGRCNVAEHEKLILLAQLKPEKDSDEAVTYSLGKFGQRALDFYSIHVTKESTHPVKPLAQIAGNRYASYPVGKALSDACMGTIASFLSKYQDIIIEHQKVVKGNQKRLESLRELAGKENLEYPSVTLPPQPHTKEGVDAYNEVIARVRMWVNLNLWQKLKLSRDDAKPLLRLKGFPSFPLVERQANEVDWWDMVCNVKKLINEKKEDGKVFWQNLAGYKRQEALRPYLSSEEDRKKGKKFARTQLGDLLLHLEKKHGEDWGKVYDEAWERIDKKVEGLSKHIKLEEERRSEDAQSKAALTDWLRAKASFVIEGLKEADKDEFCRCELKLQKWYGDLRGKPFAIEAENSILDISGFSKQYNCAFIWQKDGVKKLNLYLIINYFKGGKLRFKKIKPEAFEANRFYTVINKKSGEIVPMEVNFNFDDPNLIILPLAFGKRQGREFIWNDLLSLETGSLKLANGRVIEKTLYNRRTRQDEPALFVALTFERREVLDSSNIKPMNLIGVDRGENIPAVIALTDPEGCPLSRFKDSLGNPTHILRIGESYKEKQRTIQAKKEVEQRRAGGYSRKYASKAKNLADDMVRNTARDLLYYAVTQDAMLIFENLSRGFGRQGKRTFMAERQYTRMEDWLTAKLAYEGLPSKTYLSKTLAQYTSKTCSNCGFTITSADYDRVLEKLKKTATGWMTTINGKELKVEGQITYYNRYKRQNVVKDLSVELDRLSEESVNNDISSWTKGRSGEALSLLKKRFSHRPVQEKFVCLNCGFETHADEQAALNIARSWLFLRSQEYKKYQTNKTTGNTDKRAFVETWQSFYRKKLKEVWKPAV

SEQ ID NO: 36962 - protein, 978 aa, synthetic construct
  REGION 1..978: note = engineered CasX variant
QEIKRINKIRRRLVKDSNTKKAGKTGPMKTLLVRVMTPDLRERLENLRKKPENIPQPISNTSRANLNKLLTDYTEMKKAILHVYWEEFQKDPVGLMSRVAQPASKKIDQNKLKPEMDEKGNLTTAGFACSQCGQPLFVYKLEQVSEKGKAYTNYVGRCNVAEHEKLILLAQLKPEKDSDEAVTYSLGKFGQRALDFYSIHVTKESTHPVKPLAQIAGNRYASHPVGKALSDACMGTIASFLSKYQDIIIEHQKVVKGNQKRLESLRELAGKENLEYPSVTLPPQPHTKEGVDAYNEVIARVRMWVNLNLWQKLKLSRDDAKPLLRLKGFPSFPLVERQANEVDWWDMVCNVKKLINEKKEDGKVFWQNLAGYKRQEALRPYLSSEEDRKKGKKFARTQLGDLLLHLEKKHGEDWGKVYDEAWERIDKKVEGLSKHIKLEEERRSEDAQSKAALTDWLRAKASFVIEGLKEADKDEFCRCELKLQKWYGDLRGKPFAIEAENSILDISGFSKQYNCAFIWQKDGVKKLNLYLIINYFKGGKLRFKKIKPEAFEANRFYTVINKKSGEIVPMEVNFNFDDPNLIILPLAFGKRQGREFIWNDLLSLETGSLKLANGRVIEKTLYNRRTRQDEPALFVALTFERREVLDSSNIKPMNLIGVDRGENIPAVIALTDPEGCPLSRFKDSLGNPTHILRIGESYKEKQRTIQAKKEVEQRRAGGYSRKYASKAKNLADDMVRNTARDLLYYAVTQDAMLIFENLSRGFGRQGKRTFMAERQYTRMEDWLTAKLAYEGLPSKTYLSKTLAQYTSKTCSNCGFTITSADYDRVLEKLKKTATGWMTTINGKELKVEGQITYYNRYKRQNVVKDLSVELDRLSEESVNNDISSWTKGRSGEALSLLKKRFSHRPVQEKFVCLNCGFETHADEQAALNIARSWLFLRSQEYKKYQTNKTTGNTDKRAFVETWQSFYRKKLKEVWKPAV

SEQ ID NO: 36963 - protein, 978 aa, synthetic construct
  REGION 1..978: note = engineered CasX variant
QEIKRINKIRRRLVKDSNTKKAGKTGPMKTLLVRVMTPDLRERLENLRKKPENIPQPISNTSRANLNKLLTDYTEMKKAILHVYWEEFQKDPVGLMSRVAQPASKKIDQNKLKPEMDEKGNLTTAGFACSQCGQPLFVYKLEQVSEKGKAYTNYVGRCNVAEHEKLILLAQLKPEKDSDEAVTYSLGKFGQRALDFYSIHVTKESTHPVKPLAQIAGNRYASSPVGKALSDACMGTIASFLSKYQDIIIEHQKVVKGNQKRLESLRELAGKENLEYPSVTLPPQPHTKEGVDAYNEVIARVRMWVNLNLWQKLKLSRDDAKPLLRLKGFPSFPLVERQANEVDWWDMVCNVKKLINEKKEDGKVFWQNLAGYKRQEALRPYLSSEEDRKKGKKFARTQLGDLLLHLEKKHGEDWGKVYDEAWERIDKKVEGLSKHIKLEEERRSEDAQSKAALTDWLRAKASFVIEGLKEADKDEFCRCELKLQKWYGDLRGKPFAIEAENSILDISGFSKQYNCAFIWQKDGVKKLNLYLIINYFKGGKLRFKKIKPEAFEANRFYTVINKKSGEIVPMEVNFNFDDPNLIILPLAFGKRQGREFIWNDLLSLETGSLKLANGRVIEKTLYNRRTRQDEPALFVALTFERREVLDSSNIKPMNLIGVDRGENIPAVIALTDPEGCPLSRFKDSLGNPTHILRIGESYKEKQRTIQAKKEVEQRRAGGYSRKYASKAKNLADDMVRNTARDLLYYAVTQDAMLIFENLSRGFGRQGKRTFMAERQYTRMEDWLTAKLAYEGLPSKTYLSKTLAQYTSKTCSNCGFTITSADYDRVLEKLKKTATGWMTTINGKELKVEGQITYYNRYKRQNVVKDLSVELDRLSEESVNNDISSWTKGRSGEALSLLKKRFSHRPVQEKFVCLNCGFETHADEQAALNIARSWLFLRSQEYKKYQTNKTTGNTDKRAFVETWQSFYRKKLKEVWKPAV

SEQ ID NO: 36964 - protein, 978 aa, synthetic construct
  REGION 1..978: note = engineered CasX variant
QEIKRINKIRRRLVKDSNTKKAGKTGPMKTLLVRVMTPDLRERLENLRKKPENIPQPISNTSRANLNKLLTDYTEMKKAILHVYWEEFQKDPVGLMSRVAQPASKKIDQNKLKPEMDEKGNLTTAGFACSQCGQPLFVYKLEQVSEKGKAYTNYVGRCNVAEHEKLILLAQLKPEKDSDEAVTYSLGKFGQRALDFYSIHVTKESTHPVKPLAQIAGNRYASTPVGKALSDACMGTIASFLSKYQDIIIEHQKVVKGNQKRLESLRELAGKENLEYPSVTLPPQPHTKEGVDAYNEVIARVRMWVNLNLWQKLKLSRDDAKPLLRLKGFPSFPLVERQANEVDWWDMVCNVKKLINEKKEDGKVFWQNLAGYKRQEALRPYLSSEEDRKKGKKFARTQLGDLLLHLEKKHGEDWGKVYDEAWERIDKKVEGLSKHIKLEEERRSEDAQSKAALTDWLRAKASFVIEGLKEADKDEFCRCELKLQKWYGDLRGKPFAIEAENSILDISGFSKQYNCAFIWQKDGVKKLNLYLIINYFKGGKLRFKKIKPEAFEANRFYTVINKKSGEIVPMEVNFNFDDPNLIILPLAFGKRQGREFIWNDLLSLETGSLKLANGRVIEKTLYNRRTRQDEPALFVALTFERREVLDSSNIKPMNLIGVDRGENIPAVIALTDPEGCPLSRFKDSLGNPTHILRIGESYKEKQRTIQAKKEVEQRRAGGYSRKYASKAKNLADDMVRNTARDLLYYAVTQDAMLIFENLSRGFGRQGKRTFMAERQYTRMEDWLTAKLAYEGLPSKTYLSKTLAQYTSKTCSNCGFTITSADYDRVLEKLKKTATGWMTTINGKELKVEGQITYYNRYKRQNVVKDLSVELDRLSEESVNNDISSWTKGRSGEALSLLKKRFSHRPVQEKFVCLNCGFETHADEQAALNIARSWLFLRSQEYKKYQTNKTTGNTDKRAFVETWQSFYRKKLKEVWKPAV

SEQ ID NO: 36965 - protein, 978 aa, synthetic construct
  REGION 1..978: note = engineered CasX variant
QEIKRINKIRRRLVKDSNTKKAGKTGPMKTLLVRVMTPDLRERLENLRKKPENIPQPISNTSRANLNKLLTDYTEMKKAILHVYWEEFQKDPVGLMSRVAQPASKKIDQNKLKPEMDEKGNLTTAGFACSQCGQPLFVYKLEQVSEKGKAYTNYVGRCNVAEHEKLILLAQLKPEKDSDEAVTYSLGKFGQRALDFYSIHVTKESTHPVKPLAQIAGNRYASAPVGKALSDACMGTIASFLSKYQDIIIEHQKVVKGNQKRLESLRELAGKENLEYPSVTLPPQPHTKEGVDAYNEVIARVRMWVNLNLWQKLKLSRDDAKPLLRLKGFPSFPLVERQANEVDWWDMVCNVKKLINEKKEDGKVFWQNLAGYKRQEALRPYLSSEEDRKKGKKFARTQLGDLLLHLEKKHGEDWGKVYDEAWERIDKKVEGLSKHIKLEEERRSEDAQSKAALTDWLRAKASFVIEGLKEADKDEFCRCELKLQKWYGDLRGKPFAIEAENSILDISGFSKQYNCAFIWQKDGVKKLNLYLIINYFKGGKLRFKKIKPEAFEANRFYTVINKKSGEIVPMEVNFNFDDPNLIILPLAFGKRQGREFIWNDLLSLETGSLKLANGRVIEKTLYNRRTRQDEPALFVALTFERREVLDSSNIKPMNLIGVDRGENIPAVIALTDPEGCPLSRFKDSLGNPTHILRIGESYKEKQRTIQAKKEVEQRRAGGYSRKYASKAKNLADDMVRNTARDLLYYAVTQDAMLIFENLSRGFGRQGKRTFMAERQYTRMEDWLTAKLAYEGLPSKTYLSKTLAQYTSKTCSNCGFTITSADYDRVLEKLKKTATGWMTTINGKELKVEGQITYYNRYKRQNVVKDLSVELDRLSEESVNNDISSWTKGRSGEALSLLKKRFSHRPVQEKFVCLNCGFETHADEQAALNIARSWLFLRSQEYKKYQTNKTTGNTDKRAFVETWQSFYRKKLKEVWKPAV

SEQ ID NO: 36966 - protein, 978 aa, synthetic construct
  REGION 1..978: note = engineered CasX variant
QEIKRINKIRRRLVKDSNTKKAGKTGPMKTLLVRVMTPDLRERLENLRKKPENIPQPISNTSRANLNKLLTDYTEMKKAILHVYWEEFQKDPVGLMSRVAQPASKKIDQNKLKPEMDEKGNLTTAGFACSQCGQPLFVYKLEQVSEKGKAYTNYVGRCNVAEHEKLILLAQLKPEKDSDEAVTYSLGKFGQRALDFYSIHVTKESTHPVKPLAQIAGNRYASVPVGKALSDACMGTIASFLSKYQDIIIEHQKVVKGNQKRLESLRELAGKENLEYPSVTLPPQPHTKEGVDAYNEVIARVRMWVNLNLWQKLKLSRDDAKPLLRLKGFPSFPLVERQANEVDWWDMVCNVKKLINEKKEDGKVFWQNLAGYKRQEALRPYLSSEEDRKKGKKFARTQLGDLLLHLEKKHGEDWGKVYDEAWERIDKKVEGLSKHIKLEEERRSEDAQSKAALTDWLRAKASFVIEGLKEADKDEFCRCELKLQKWYGDLRGKPFAIEAENSILDISGFSKQYNCAFIWQKDGVKKLNLYLIINYFKGGKLRFKKIKPEAFEANRFYTVINKKSGEIVPMEVNFNFDDPNLIILPLAFGKRQGREFIWNDLLSLETGSLKLANGRVIEKTLYNRRTRQDEPALFVALTFERREVLDSSNIKPMNLIGVDRGENIPAVIALTDPEGCPLSRFKDSLGNPTHILRIGESYKEKQRTIQAKKEVEQRRAGGYSRKYASKAKNLADDMVRNTARDLLYYAVTQDAMLIFENLSRGFGRQGKRTFMAERQYTRMEDWLTAKLAYEGLPSKTYLSKTLAQYTSKTCSNCGFTITSADYDRVLEKLKKTATGWMTTINGKELKVEGQITYYNRYKRQNVVKDLSVELDRLSEESVNNDISSWTKGRSGEALSLLKKRFSHRPVQEKFVCLNCGFETHADEQAALNIARSWLFLRSQEYKKYQTNKTTGNTDKRAFVETWQSFYRKKLKEVWKPAV

SEQ ID NO: 36967 - protein, 978 aa, synthetic construct
  REGION 1..978: note = engineered CasX variant
QEIKRINKIRRRLVKDSNTKKAGKTGPMKTLLVRVMTPDLRERLENLRKKPENIPQPISNTSRANLNKLLTDYTEMKKAILHVYWEEFQKDPVGLMSRVAQPASKKIDQNKLKPEMDEKGNLTTAGFACSQCGQPLFVYKLEQVSEKGKAYTNYVGRCNVAEHEKLIKLAQLKPEKDSDEAVTYSLGKFGQRALDFYSIHVTKESTHPVKPLAQIAGNRYASGPVGKALSDACMGTIASFLSKYQDIIIEHQKVVKGNQKRLESLRELAGKENLEYPSVTLPPQPHTKEGVDAYNEVIARVRMWVNLNLWQKLKLSRDDAKPLLRLKGFPSFPLVERQANEVDWWDMVCNVKKLINEKKEDGKVFWQNLAGYKRQEALRPYLSSEEDRKKGKKFARTQLGDLLLHLEKKHGEDWGKVYDEAWERIDKKVEGLSKHIKLEEERRSEDAQSKAALTDWLRAKASFVIEGLKEADKDEFCRCELKLQKWYGDLRGKPFAIEAENSILDISGFSKQYNCAFIWQKDGVKKLNLYLIINYFKGGKLRFKKIKPEAFEANRFYTVINKKSGEIVPMEVNFNFDDPNLIILPLAFGKRQGREFIWNDLLSLETGSLKLANGRVIEKTLYNRRTRQDEPALFVALTFERREVLDSSNIKPMNLIGVDRGENIPAVIALTDPEGCPLSRFKDSLGNPTHILRIGESYKEKQRTIQAKKEVEQRRAGGYSRKYASKAKNLADDMVRNTARDLLYYAVTQDAMLIFENLSRGFGRQGKRTFMAERQYTRMEDWLTAKLAYEGLPSKTYLSKTLAQYTSKTCSNCGFTITSADYDRVLEKLKKTATGWMTTINGKELKVEGQITYYNRYKRQNVVKDLSVELDRLSEESVNNDISSWTKGRSGEALSLLKKRFSHRPVQEKFVCLNCGFETHADEQAALNIARSWLFLRSQEYKKYQTNKTTGNTDKRAFVETWQSFYRKKLKEVWKPAV

SEQ ID NO: 36968 - protein, 977 aa, synthetic construct
  REGION 1..977: note = engineered CasX variant
QEIKRINKIRRRLVKDSNTKKAGKTGPMKTLLVRVMTPDLRERLENLRKKPENIPQPISNTSRANLNKLLTDYTEMKKAILHVYWEEFQKDPVGLMSRVAQPASKKIDQNKLKPEMDEKGNLTTAGFACSQCGQPLFVYKLEQVSEKGKAYTNYVGRCNVAEHEKLILLAQLKPEKDSDEAVTYSLGKFGQRALDFYSIHVTKESTHPVKPLAQIAGNRYASPVGKALSDACMGTIASFLSKYQDIIIEHQKVVKGNQKRLESLRELAGKENLEYPSVTLPPQPHTKEGVDAYNEVIARVRMWVNLNLWQKLKLSRDDAKPLLRLKGFPSFPLVERQANEVDWWDMVCNVKKLINEKKEDGKVFWQNLAGYKRQEALRPYLSSEEDRKKGKKFARTQLGDLLLHLEKKHGEDWGKVYDEAWERIDKKVEGLSKHIKLEEERRSEDAQSKAALTDWLRAKASFVIEGLKEADKDEFCRCELKLQKWYGDLRGKPFAIEAENSILDISGFSKQYNCAFIWQKDGVKKLNLYLIINYFKGGKLRFKKIKPEAFEANRFYTVINKKSGEIVPMEVNFNFDDPNLIILPLAFGKRQGREFIWNDLLSLETGSLKLANGRVIEKTLYNRRTRQDEPALFVALTFERREVLDSSNIKPMNLIGVDRGENIPAVIALTDPEGCPLSRFKDSLGNPTHILRIGESYKEKQRTIQAKKEVEQRRAGGYSRKYASKAKNLADDMVRNTARDLLYYAVTQDAMLIFENLSRGFGRQGKRTFMAERQYTRMEDWLTAKLAYEGLPSKTYLSKTLAQYTSKTCSNCGFTITSADYDRVLEKLKKTATGWMTTINGKELKVEGQITYYNRYKRQNVVKDLSVELDRLSEESVNNDISSWTKGRSGEALSLLKKRFSHRPVQEKFVCLNCGFETHADEQAALNIARSWLFLRSQEYKKYQTNKTTGNTDKRAFVETWQSFYRKKLKEVWKPAV

SEQ ID NO: 36969 - protein, 978 aa, synthetic construct
  REGION 1..978: note = engineered CasX variant
QEIKRINKIRRRLVKDSNTKKAGKTGPMKTLLVRVMTPDLRERLENLRKKPENIPQPISNTSRANLNKLLTDYTEMKKAILHVYWEEFQKDPVGLMSRVAQPASKKIDQNKLKPEMDEKGNLTTAGFACSQCGQPLFVYKLEQVSEKGKAYTNYFGRCNVAEHEKLILLAQLKPEKDSDEAVTYSLGKFGQRALDFYSIHVTKESTHPVKPLAQIAGNRYASYPVGKALSDACMGTIASFLSKYQDIIIEHQKVVKGNQKRLESLRELAGKENLEYPSVTLPPQPHTKEGVDAYNEVIARVRMWVNLNLWQKLKLSRDDAKPLLRLKGFPSFPLVERQANEVDWWDMVCNVKKLINEKKEDGKVFWQNLAGYKRQEALRPYLSSEEDRKKGKKFARTQLGDLLLHLEKKHGEDWGKVYDEAWERIDKKVEGLSKHIKLEEERRSEDAQSKAALTDWLRAKASFVIEGLKEADKDEFCRCELKLQKWYGDLRGKPFAIEAENSILDISGFSKQYNCAFIWQKDGVKKLNLYLIINYFKGGKLRFKKIKPEAFEANRFYTVINKKSGEIVPMEVNFNFDDPNLIILPLAFGKRQGREFIWNDLLSLETGSLKLANGRVIEKTLYNRRTRQDEPALFVALTFERREVLDSSNIKPMNLIGVDRGENIPAVIALTDPEGCPLSRFKDSLGNPTHILRIGESYKEKQRTIQAKKEVEQRRAGGYSRKYASKAKNLADDMVRNTARDLLYYAVTQDAMLIFENLSRGFGRQGKRTFMAERQYTRMEDWLTAKLAYEGLASKTYLSKTLAQYTSKTCSNCGFTITSADYDRVLEKLKKTATGWMTTINGKELKVEGQITYYNRYKRQNVVKDLSVELDRLSEESVNNDISSWTKGRSGEALSLLKKRFSHRPVQEKFVCLNCGFETHADEQAALNIARSWLFLRSQEYKKYQTNKTTGNTDKRAFVETWQSFYRKKLKEVWKPAV

SEQ ID NO: 36970 - protein, 978 aa, synthetic construct
  REGION 1..978: note = engineered CasX variant
QEIKRINKIRRRLVKDSNTKKAGKTGPMKTLLVRVMTPDLRERLENLRKKPENIPQPISNTSRANLNKLLTDYTEMKKAILHVYWEEFQKDPVGLMSRVAQPASKKIDQNKLKPEMDEKGNLTTAGFACSQCGQPLFVYKLEQVSEKGKAYTNYFGRCNVAEHEKLILLAQLKPEKDSDEAVTYSLGKFGQRALDFYSIHVTKESTHPVKPLAQIAGNRYASHPVGKALSDACMGTIASFLSKYQDIIIEHQKVVKGNQKRLESLRELAGKENLEYPSVTLPPQPHTKEGVDAYNEVIARVRMWVNLNLWQKLKLSRDDAKPLLRLKGFPSFPLVERQANEVDWWDMVCNVKKLINEKKEDGKVFWQNLAGYKRQEALRPYLSSEEDRKKGKKFARTQLGDLLLHLEKKHGEDWGKVYDEAWERIDKKVEGLSKHIKLEEERRSEDAQSKAALTDWLRAKASFVIEGLKEADKDEFCRCELKLQKWYGDLRGKPFAIEAENSILDISGFSKQYNCAFIWQKDGVKKLNLYLIINYFKGGKLRFKKIKPEAFEANRFYTVINKKSGEIVPMEVNFNFDDPNLIILPLAFGKRQGREFIWNDLLSLETGSLKLANGRVIEKTLYNRRTRQDEPALFVALTFERREVLDSSNIKPMNLIGVDRGENIPAVIALTDPEGCPLSRFKDSLGNPTHILRIGESYKEKQRTIQAKKEVEQRRAGGYSRKYASKAKNLADDMVRNTARDLLYYAVTQDAMLIFENLSRGFGRQGKRTFMAERQYTRMEDWLTAKLAYEGLASKTYLSKTLAQYTSKTCSNCGFTITSADYDRVLEKLKKTATGWMTTINGKELKVEGQITYYNRYKRQNVVKDLSVELDRLSEESVNNDISSWTKGRSGEALSLLKKRFSHRPVQEKFVCLNCGFETHADEQAALNIARSWLFLRSQEYKKYQTNKTTGNTDKRAFVETWQSFYRKKLKEVWKPAV

SEQ ID NO: 36971 - protein, 978 aa, synthetic construct
  REGION 1..978: note = engineered CasX variant
QEIKRINKIRRRLVKDSNTKKAGKTGPMKTLLVRVMTPDLRERLENLRKKPENIPQPISNTSRANLNKLLTDYTEMKKAILHVYWEEFQKDPVGLMSRVAQPASKKIDQNKLKPEMDEKGNLTTAGFACSQCGQPLFVYKLEQVSEKGKAYTNYFGRCNVAEHEKLILLAQLKPEKDSDEAVTYSLGKFGQRALDFYSIHVTKESTHPVKPLAQIAGNRYASSPVGKALSDACMGTIASFLSKYQDIIIEHQKVVKGNQKRLESLRELAGKENLEYPSVTLPPQPHTKEGVDAYNEVIARVRMWVNLNLWQKLKLSRDDAKPLLRLKGFPSFPLVERQANEVDWWDMVCNVKKLINEKKEDGKVFWQNLAGYKRQEALRPYLSSEEDRKKGKKFARTQLGDLLLHLEKKHGEDWGKVYDEAWERIDKKVEGLSKHIKLEEERRSEDAQSKAALTDWLRAKASFVIEGLKEADKDEFCRCELKLQKWYGDLRGKPFAIEAENSILDISGFSKQYNCAFIWQKDGVKKLNLYLIINYFKGGKLRFKKIKPEAFEANRFYTVINKKSGEIVPMEVNFNFDDPNLIILPLAFGKRQGREFIWNDLLSLETGSLKLANGRVIEKTLYNRRTRQDEPALFVALTFERREVLDSSNIKPMNLIGVDRGENIPAVIALTDPEGCPLSRFKDSLGNPTHILRIGESYKEKQRTIQAKKEVEQRRAGGYSRKYASKAKNLADDMVRNTARDLLYYAVTQDAMLIFENLSRGFGRQGKRTFMAERQYTRMEDWLTAKLAYEGLASKTYLSKTLAQYTSKTCSNCGFTITSADYDRVLEKLKKTATGWMTTINGKELKVEGQITYYNRYKRQNVVKDLSVELDRLSEESVNNDISSWTKGRSGEALSLLKKRFSHRPVQEKFVCLNCGFETHADEQAALNIARSWLFLRSQEYKKYQTNKTTGNTDKRAFVETWQSFYRKKLKEVWKPAV

SEQ ID NO: 36972 - protein, 978 aa, synthetic construct
  REGION 1..978: note = engineered CasX variant
QEIKRINKIRRRLVKDSNTKKAGKTGPMKTLLVRVMTPDLRERLENLRKKPENIPQPISNTSRANLNKLLTDYTEMKKAILHVYWEEFQKDPVGLMSRVAQPASKKIDQNKLKPEMDEKGNLTTAGFACSQCGQPLFVYKLEQVSEKGKAYTNYFGRCNVAEHEKLILLAQLKPEKDSDEAVTYSLGKFGQRALDFYSIHVTKESTHPVKPLAQIAGNRYASTPVGKALSDACMGTIASFLSKYQDIIIEHQKVVKGNQKRLESLRELAGKENLEYPSVTLPPQPHTKEGVDAYNEVIARVRMWVNLNLWQKLKLSRDDAKPLLRLKGFPSFPLVERQANEVDWWDMVCNVKKLINEKKEDGKVFWQNLAGYKRQEALRPYLSSEEDRKKGKKFARTQLGDLLLHLEKKHGEDWGKVYDEAWERIDKKVEGLSKHIKLEEERRSEDAQSKAALTDWLRAKASFVIEGLKEADKDEFCRCELKLQKWYGDLRGKPFAIEAENSILDISGFSKQYNCAFIWQKDGVKKLNLYLIINYFKGGKLRFKKIKPEAFEANRFYTVINKKSGEIVPMEVNFNFDDPNLIILPLAFGKRQGREFIWNDLLSLETGSLKLANGRVIEKTLYNRRTRQDEPALFVALTFERREVLDSSNIKPMNLIGVDRGENIPAVIALTDPEGCPLSRFKDSLGNPTHILRIGESYKEKQRTIQAKKEVEQRRAGGYSRKYASKAKNLADDMVRNTARDLLYYAVTQDAMLIFENLSRGFGRQGKRTFMAERQYTRMEDWLTAKLAYEGLASKTYLSKTLAQYTSKTCSNCGFTITSADYDRVLEKLKKTATGWMTTINGKELKVEGQITYYNRYKRQNVVKDLSVELDRLSEESVNNDISSWTKGRSGEALSLLKKRFSHRPVQEKFVCLNCGFETHADEQAALNIARSWLFLRSQEYKKYQTNKTTGNTDKRAFVETWQSFYRKKLKEVWKPAV

SEQ ID NO: 36973 - protein, 978 aa, synthetic construct
  REGION 1..978: note = engineered CasX variant
QEIKRINKIRRRLVKDSNTKKAGKTGPMKTLLVRVMTPDLRERLENLRKKPENIPQPISNTSRANLNKLLTDYTEMKKAILHVYWEEFQKDPVGLMSRVAQPASKKIDQNKLKPEMDEKGNLTTAGFACSQCGQPLFVYKLEQVSEKGKAYTNYFGRCNVAEHEKLILLAQLKPEKDSDEAVTYSLGKFGQRALDFYSIHVTKESTHPVKPLAQIAGNRYASAPVGKALSDACMGTIASFLSKYQDIIIEHQKVVKGNQKRLESLRELAGKENLEYPSVTLPPQPHTKEGVDAYNEVIARVRMWVNLNLWQKLKLSRDDAKPLLRLKGFPSFPLVERQANEVDWWDMVCNVKKLINEKKEDGKVFWQNLAGYKRQEALRPYLSSEEDRKKGKKFARTQLGDLLLHLEKKHGEDWGKVYDEAWERIDKKVEGLSKHIKLEEERRSEDAQSKAALTDWLRAKASFVIEGLKEADKDEFCRCELKLQKWYGDLRGKPFAIEAENSILDISGFSKQYNCAFIWQKDGVKKLNLYLIINYFKGGKLRFKKIKPEAFEANRFYTVINKKSGEIVPMEVNFNFDDPNLIILPLAFGKRQGREFIWNDLLSLETGSLKLANGRVIEKTLYNRRTRQDEPALFVALTFERREVLDSSNIKPMNLIGVDRGENIPAVIALTDPEGCPLSRFKDSLGNPTHILRIGESYKEKQRTIQAKKEVEQRRAGGYSRKYASKAKNLADDMVRNTARDLLYYAVTQDAMLIFENLSRGFGRQGKRTFMAERQYTRMEDWLTAKLAYEGLASKTYLSKTLAQYTSKTCSNCGFTITSADYDRVLEKLKKTATGWMTTINGKELKVEGQITYYNRYKRQNVVKDLSVELDRLSEESVNNDISSWTKGRSGEALSLLKKRFSHRPVQEKFVCLNCGFETHADEQAALNIARSWLFLRSQEYKKYQTNKTTGNTDKRAFVETWQSFYRKKLKEVWKPAV

SEQ ID NO: 36974 - protein, 978 aa, synthetic construct
  REGION 1..978: note = engineered CasX variant
QEIKRINKIRRRLVKDSNTKKAGKTGPMKTLLVRVMTPDLRERLENLRKKPENIPQPISNTSRANLNKLLTDYTEMKKAILHVYWEEFQKDPVGLMSRVAQPASKKIDQNKLKPEMDEKGNLTTAGFACSQCGQPLFVYKLEQVSEKGKAYTNYFGRCNVAEHEKLILLAQLKPEKDSDEAVTYSLGKFGQRALDFYSIHVTKESTHPVKPLAQIAGNRYASVPVGKALSDACMGTIASFLSKYQDIIIEHQKVVKGNQKRLESLRELAGKENLEYPSVTLPPQPHTKEGVDAYNEVIARVRMWVNLNLWQKLKLSRDDAKPLLRLKGFPSFPLVERQANEVDWWDMVCNVKKLINEKKEDGKVFWQNLAGYKRQEALRPYLSSEEDRKKGKKFARTQLGDLLLHLEKKHGEDWGKVYDEAWERIDKKVEGLSKHIKLEEERRSEDAQSKAALTDWLRAKASFVIEGLKEADKDEFCRCELKLQKWYGDLRGKPFAIEAENSILDISGFSKQYNCAFIWQKDGVKKLNLYLIINYFKGGKLRFKKIKPEAFEANRFYTVINKKSGEIVPMEVNFNFDDPNLIILPLAFGKRQGREFIWNDLLSLETGSLKLANGRVIEKTLYNRRTRQDEPALFVALTFERREVLDSSNIKPMNLIGVDRGENIPAVIALTDPEGCPLSRFKDSLGNPTHILRIGESYKEKQRTIQAKKEVEQRRAGGYSRKYASKAKNLADDMVRNTARDLLYYAVTQDAMLIFENLSRGFGRQGKRTFMAERQYTRMEDWLTAKLAYEGLASKTYLSKTLAQYTSKTCSNCGFTITSADYDRVLEKLKKTATGWMTTINGKELKVEGQITYYNRYKRQNVVKDLSVELDRLSEESVNNDISSWTKGRSGEALSLLKKRFSHRPVQEKFVCLNCGFETHADEQAALNIARSWLFLRSQEYKKYQTNKTTGNTDKRAFVETWQSFYRKKLKEVWKPAV

SEQ ID NO: 36975 - protein, 978 aa, synthetic construct
  REGION 1..978: note = engineered CasX variant
QEIKRINKIRRRLVKDSNTKKAGKTGPMKTLLVRVMTPDLRERLENLRKKPENIPQPISNTSRANLNKLLTDYTEMKKAILHVYWEEFQKDPVGLMSRVAQPASKKIDQNKLKPEMDEKGNLTTAGFACSQCGQPLFVYKLEQVSEKGKAYTNYFGRCNVAEHEKLIKLAQLKPEKDSDEAVTYSLGKFGQRALDFYSIHVTKESTHPVKPLAQIAGNRYASGPVGKALSDACMGTIASFLSKYQDIIIEHQKVVKGNQKRLESLRELAGKENLEYPSVTLPPQPHTKEGVDAYNEVIARVRMWVNLNLWQKLKLSRDDAKPLLRLKGFPSFPLVERQANEVDWWDMVCNVKKLINEKKEDGKVFWQNLAGYKRQEALRPYLSSEEDRKKGKKFARTQLGDLLLHLEKKHGEDWGKVYDEAWERIDKKVEGLSKHIKLEEERRSEDAQSKAALTDWLRAKASFVIEGLKEADKDEFCRCELKLQKWYGDLRGKPFAIEAENSILDISGFSKQYNCAFIWQKDGVKKLNLYLIINYFKGGKLRFKKIKPEAFEANRFYTVINKKSGEIVPMEVNFNFDDPNLIILPLAFGKRQGREFIWNDLLSLETGSLKLANGRVIEKTLYNRRTRQDEPALFVALTFERREVLDSSNIKPMNLIGVDRGENIPAVIALTDPEGCPLSRFKDSLGNPTHILRIGESYKEKQRTIQAKKEVEQRRAGGYSRKYASKAKNLADDMVRNTARDLLYYAVTQDAMLIFENLSRGFGRQGKRTFMAERQYTRMEDWLTAKLAYEGLASKTYLSKTLAQYTSKTCSNCGFTITSADYDRVLEKLKKTATGWMTTINGKELKVEGQITYYNRYKRQNVVKDLSVELDRLSEESVNNDISSWTKGRSGEALSLLKKRFSHRPVQEKFVCLNCGFETHADEQAALNIARSWLFLRSQEYKKYQTNKTTGNTDKRAFVETWQSFYRKKLKEVWKPAV

SEQ ID NO: 36976 - protein, 977 aa, synthetic construct
  REGION 1..977: note = engineered CasX variant
QEIKRINKIRRRLVKDSNTKKAGKTGPMKTLLVRVMTPDLRERLENLRKKPENIPQPISNTSRANLNKLLTDYTEMKKAILHVYWEEFQKDPVGLMSRVAQPASKKIDQNKLKPEMDEKGNLTTAGFACSQCGQPLFVYKLEQVSEKGKAYTNYFGRCNVAEHEKLILLAQLKPEKDSDEAVTYSLGKFGQRALDFYSIHVTKESTHPVKPLAQIAGNRYASPVGKALSDACMGTIASFLSKYQDIIIEHQKVVKGNQKRLESLRELAGKENLEYPSVTLPPQPHTKEGVDAYNEVIARVRMWVNLNLWQKLKLSRDDAKPLLRLKGFPSFPLVERQANEVDWWDMVCNVKKLINEKKEDGKVFWQNLAGYKRQEALRPYLSSEEDRKKGKKFARTQLGDLLLHLEKKHGEDWGKVYDEAWERIDKKVEGLSKHIKLEEERRSEDAQSKAALTDWLRAKASFVIEGLKEADKDEFCRCELKLQKWYGDLRGKPFAIEAENSILDISGFSKQYNCAFIWQKDGVKKLNLYLIINYFKGGKLRFKKIKPEAFEANRFYTVINKKSGEIVPMEVNFNFDDPNLIILPLAFGKRQGREFIWNDLLSLETGSLKLANGRVIEKTLYNRRTRQDEPALFVALTFERREVLDSSNIKPMNLIGVDRGENIPAVIALTDPEGCPLSRFKDSLGNPTHILRIGESYKEKQRTIQAKKEVEQRRAGGYSRKYASKAKNLADDMVRNTARDLLYYAVTQDAMLIFENLSRGFGRQGKRTFMAERQYTRMEDWLTAKLAYEGLASKTYLSKTLAQYTSKTCSNCGFTITSADYDRVLEKLKKTATGWMTTINGKELKVEGQITYYNRYKRQNVVKDLSVELDRLSEESVNNDISSWTKGRSGEALSLLKKRFSHRPVQEKFVCLNCGFETHADEQAALNIARSWLFLRSQEYKKYQTNKTTGNTDKRAFVETWQSFYRKKLKEVWKPAV

SEQ ID NO: 36977 - protein, 978 aa, synthetic construct
  REGION 1..978: note = engineered CasX variant
QEIKRINKIRRRLVKDSNTKKAGKTGPMKTLLVRVMTPDLRERLENLRKKPENIPQPISNTSRANLNKLLTDYTEMKKAILHVYWEEFQKDPVGLMSRVAQPASKKIDQNKLKPEMDEKGNLTTAGFACSQCGQPLFVYKLEQVSEKGKAYTNYFGRCNVAEHEKLILLAQLKPEKDSDEAVTYSLGKFGQRALDFYSIHVTKESTHPVKPLAQIAGNRYASYPVGKALSDACMGTIASFLSKYQDIIIEHQKVVKGNQKRLESLRELAGKENLEYPSVTLPPQPHTKEGVDAYNEVIARVRMWVNLNLWQKLKLSRDDAKPLLRLKGFPSFPLVERQANEVDWWDMVCNVKKLINEKKEDGKVFWQNLAGYKRQEALRPYLSSEEDRKKGKKFARTQLGDLLLHLEKKHGEDWGKVYDEAWERIDKKVEGLSKHIKLEEERRSEDAQSKAALTDWLRAKASFVIEGLKEADKDEFCRCELKLQKWYGDLRGKPFAIEAENSILDISGFSKQYNCAFIWQKDGVKKLNLYLIINYFKGGKLRFKKIKPEAFEANRFYTVINKKSGEIVPMEVNFNFDDPNLIILPLAFGKRQGREFIWNDLLSLETGSLKLANGRVIEKTLYNRRTRQDEPALFVALTFERREVLDSSNIKPMNLIGVDRGENIPAVIALTDPEGCPLSRFKDSLGNPTHILRIGESYKEKQRTIQAKKEVEQRRAGGYSRKYASKAKNLADDMVRNTARDLLYYAVTQDAMLIFENLSRGFGRQGKRTFMAERQYTRMEDWLTAKLAYEGLPSKVYLSKTLAQYTSKTCSNCGFTITSADYDRVLEKLKKTATGWMTTINGKELKVEGQITYYNRYKRQNVVKDLSVELDRLSEESVNNDISSWTKGRSGEALSLLKKRFSHRPVQEKFVCLNCGFETHADEQAALNIARSWLFLRSQEYKKYQTNKTTGNTDKRAFVETWQSFYRKKLKEVWKPAV

SEQ ID NO: 36978 - protein, 978 aa, synthetic construct
  REGION 1..978: note = engineered CasX variant
QEIKRINKIRRRLVKDSNTKKAGKTGPMKTLLVRVMTPDLRERLENLRKKPENIPQPISNTSRANLNKLLTDYTEMKKAILHVYWEEFQKDPVGLMSRVAQPASKKIDQNKLKPEMDEKGNLTTAGFACSQCGQPLFVYKLEQVSEKGKAYTNYFGRCNVAEHEKLILLAQLKPEKDSDEAVTYSLGKFGQRALDFYSIHVTKESTHPVKPLAQIAGNRYASHPVGKALSDACMGTIASFLSKYQDIIIEHQKVVKGNQKRLESLRELAGKENLEYPSVTLPPQPHTKEGVDAYNEVIARVRMWVNLNLWQKLKLSRDDAKPLLRLKGFPSFPLVERQANEVDWWDMVCNVKKLINEKKEDGKVFWQNLAGYKRQEALRPYLSSEEDRKKGKKFARTQLGDLLLHLEKKHGEDWGKVYDEAWERIDKKVEGLSKHIKLEEERRSEDAQSKAALTDWLRAKASFVIEGLKEADKDEFCRCELKLQKWYGDLRGKPFAIEAENSILDISGFSKQYNCAFIWQKDGVKKLNLYLIINYFKGGKLRFKKIKPEAFEANRFYTVINKKSGEIVPMEVNFNFDDPNLIILPLAFGKRQGREFIWNDLLSLETGSLKLANGRVIEKTLYNRRTRQDEPALFVALTFERREVLDSSNIKPMNLIGVDRGENIPAVIALTDPEGCPLSRFKDSLGNPTHILRIGESYKEKQRTIQAKKEVEQRRAGGYSRKYASKAKNLADDMVRNTARDLLYYAVTQDAMLIFENLSRGFGRQGKRTFMAERQYTRMEDWLTAKLAYEGLPSKVYLSKTLAQYTSKTCSNCGFTITSADYDRVLEKLKKTATGWMTTINGKELKVEGQITYYNRYKRQNVVKDLSVELDRLSEESVNNDISSWTKGRSGEALSLLKKRFSHRPVQEKFVCLNCGFETHADEQAALNIARSWLFLRSQEYKKYQTNKTTGNTDKRAFVETWQSFYRKKLKEVWKPAV

SEQ ID NO: 36979 - protein, 978 aa, synthetic construct
  REGION 1..978: note = engineered CasX variant
QEIKRINKIRRRLVKDSNTKKAGKTGPMKTLLVRVMTPDLRERLENLRKKPENIPQPISNTSRANLNKLLTDYTEMKKAILHVYWEEFQKDPVGLMSRVAQPASKKIDQNKLKPEMDEKGNLTTAGFACSQCGQPLFVYKLEQVSEKGKAYTNYFGRCNVAEHEKLILLAQLKPEKDSDEAVTYSLGKFGQRALDFYSIHVTKESTHPVKPLAQIAGNRYASSPVGKALSDACMGTIASFLSKYQDIIIEHQKVVKGNQKRLESLRELAGKENLEYPSVTLPPQPHTKEGVDAYNEVIARVRMWVNLNLWQKLKLSRDDAKPLLRLKGFPSFPLVERQANEVDWWDMVCNVKKLINEKKEDGKVFWQNLAGYKRQEALRPYLSSEEDRKKGKKFARTQLGDLLLHLEKKHGEDWGKVYDEAWERIDKKVEGLSKHIKLEEERRSEDAQSKAALTDWLRAKASFVIEGLKEADKDEFCRCELKLQKWYGDLRGKPFAIEAENSILDISGFSKQYNCAFIWQKDGVKKLNLYLIINYFKGGKLRFKKIKPEAFEANRFYTVINKKSGEIVPMEVNFNFDDPNLIILPLAFGKRQGREFIWNDLLSLETGSLKLANGRVIEKTLYNRRTRQDEPALFVALTFERREVLDSSNIKPMNLIGVDRGENIPAVIALTDPEGCPLSRFKDSLGNPTHILRIGESYKEKQRTIQAKKEVEQRRAGGYSRKYASKAKNLADDMVRNTARDLLYYAVTQDAMLIFENLSRGFGRQGKRTFMAERQYTRMEDWLTAKLAYEGLPSKVYLSKTLAQYTSKTCSNCGFTITSADYDRVLEKLKKTATGWMTTINGKELKVEGQITYYNRYKRQNVVKDLSVELDRLSEESVNNDISSWTKGRSGEALSLLKKRFSHRPVQEKFVCLNCGFETHADEQAALNIARSWLFLRSQEYKKYQTNKTTGNTDKRAFVETWQSFYRKKLKEVWKPAV

SEQ ID NO: 36980 - protein, 978 aa, synthetic construct
  REGION 1..978: note = engineered CasX variant
QEIKRINKIRRRLVKDSNTKKAGKTGPMKTLLVRVMTPDLRERLENLRKKPENIPQPISNTSRANLNKLLTDYTEMKKAILHVYWEEFQKDPVGLMSRVAQPASKKIDQNKLKPEMDEKGNLTTAGFACSQCGQPLFVYKLEQVSEKGKAYTNYFGRCNVAEHEKLILLAQLKPEKDSDEAVTYSLGKFGQRALDFYSIHVTKESTHPVKPLAQIAGNRYASTPVGKALSDACMGTIASFLSKYQDIIIEHQKVVKGNQKRLESLRELAGKENLEYPSVTLPPQPHTKEGVDAYNEVIARVRMWVNLNLWQKLKLSRDDAKPLLRLKGFPSFPLVERQANEVDWWDMVCNVKKLINEKKEDGKVFWQNLAGYKRQEALRPYLSSEEDRKKGKKFARTQLGDLLLHLEKKHGEDWGKVYDEAWERIDKKVEGLSKHIKLEEERRSEDAQSKAALTDWLRAKASFVIEGLKEADKDEFCRCELKLQKWYGDLRGKPFAIEAENSILDISGFSKQYNCAFIWQKDGVKKLNLYLIINYFKGGKLRFKKIKPEAFEANRFYTVINKKSGEIVPMEVNFNFDDPNLIILPLAFGKRQGREFIWNDLLSLETGSLKLANGRVIEKTLYNRRTRQDEPALFVALTFERREVLDSSNIKPMNLIGVDRGENIPAVIALTDPEGCPLSRFKDSLGNPTHILRIGESYKEKQRTIQAKKEVEQRRAGGYSRKYASKAKNLADDMVRNTARDLLYYAVTQDAMLIFENLSRGFGRQGKRTFMAERQYTRMEDWLTAKLAYEGLPSKVYLSKTLAQYTSKTCSNCGFTITSADYDRVLEKLKKTATGWMTTINGKELKVEGQITYYNRYKRQNVVKDLSVELDRLSEESVNNDISSWTKGRSGEALSLLKKRFSHRPVQEKFVCLNCGFETHADEQAALNIARSWLFLRSQEYKKYQTNKTTGNTDKRAFVETWQSFYRKKLKEVWKPAV

SEQ ID NO: 36981 - protein, 978 aa, synthetic construct
  REGION 1..978: note = engineered CasX variant
QEIKRINKIRRRLVKDSNTKKAGKTGPMKTLLVRVMTPDLRERLENLRKKPENIPQPISNTSRANLNKLLTDYTEMKKAILHVYWEEFQKDPVGLMSRVAQPASKKIDQNKLKPEMDEKGNLTTAGFACSQCGQPLFVYKLEQVSEKGKAYTNYFGRCNVAEHEKLILLAQLKPEKDSDEAVTYSLGKFGQRALDFYSIHVTKESTHPVKPLAQIAGNRYASAPVGKALSDACMGTIASFLSKYQDIIIEHQKVVKGNQKRLESLRELAGKENLEYPSVTLPPQPHTKEGVDAYNEVIARVRMWVNLNLWQKLKLSRDDAKPLLRLKGFPSFPLVERQANEVDWWDMVCNVKKLINEKKEDGKVFWQNLAGYKRQEALRPYLSSEEDRKKGKKFARTQLGDLLLHLEKKHGEDWGKVYDEAWERIDKKVEGLSKHIKLEEERRSEDAQSKAALTDWLRAKASFVIEGLKEADKDEFCRCELKLQKWYGDLRGKPFAIEAENSILDISGFSKQYNCAFIWQKDGVKKLNLYLIINYFKGGKLRFKKIKPEAFEANRFYTVINKKSGEIVPMEVNFNFDDPNLIILPLAFGKRQGREFIWNDLLSLETGSLKLANGRVIEKTLYNRRTRQDEPALFVALTFERREVLDSSNIKPMNLIGVDRGENIPAVIALTDPEGCPLSRFKDSLGNPTHILRIGESYKEKQRTIQAKKEVEQRRAGGYSRKYASKAKNLADDMVRNTARDLLYYAVTQDAMLIFENLSRGFGRQGKRTFMAERQYTRMEDWLTAKLAYEGLPSKVYLSKTLAQYTSKTCSNCGFTITSADYDRVLEKLKKTATGWMTTINGKELKVEGQITYYNRYKRQNVVKDLSVELDRLSEESVNNDISSWTKGRSGEALSLLKKRFSHRPVQEKFVCLNCGFETHADEQAALNIARSWLFLRSQEYKKYQTNKTTGNTDKRAFVETWQSFYRKKLKEVWKPAV

SEQ ID NO: 36982 - protein, 978 aa, synthetic construct
  REGION 1..978: note = engineered CasX variant
QEIKRINKIRRRLVKDSNTKKAGKTGPMKTLLVRVMTPDLRERLENLRKKPENIPQPISNTSRANLNKLLTDYTEMKKAILHVYWEEFQKDPVGLMSRVAQPASKKIDQNKLKPEMDEKGNLTTAGFACSQCGQPLFVYKLEQVSEKGKAYTNYFGRCNVAEHEKLILLAQLKPEKDSDEAVTYSLGKFGQRALDFYSIHVTKESTHPVKPLAQIAGNRYASVPVGKALSDACMGTIASFLSKYQDIIIEHQKVVKGNQKRLESLRELAGKENLEYPSVTLPPQPHTKEGVDAYNEVIARVRMWVNLNLWQKLKLSRDDAKPLLRLKGFPSFPLVERQANEVDWWDMVCNVKKLINEKKEDGKVFWQNLAGYKRQEALRPYLSSEEDRKKGKKFARTQLGDLLLHLEKKHGEDWGKVYDEAWERIDKKVEGLSKHIKLEEERRSEDAQSKAALTDWLRAKASFVIEGLKEADKDEFCRCELKLQKWYGDLRGKPFAIEAENSILDISGFSKQYNCAFIWQKDGVKKLNLYLIINYFKGGKLRFKKIKPEAFEANRFYTVINKKSGEIVPMEVNFNFDDPNLIILPLAFGKRQGREFIWNDLLSLETGSLKLANGRVIEKTLYNRRTRQDEPALFVALTFERREVLDSSNIKPMNLIGVDRGENIPAVIALTDPEGCPLSRFKDSLGNPTHILRIGESYKEKQRTIQAKKEVEQRRAGGYSRKYASKAKNLADDMVRNTARDLLYYAVTQDAMLIFENLSRGFGRQGKRTFMAERQYTRMEDWLTAKLAYEGLPSKVYLSKTLAQYTSKTCSNCGFTITSADYDRVLEKLKKTATGWMTTINGKELKVEGQITYYNRYKRQNVVKDLSVELDRLSEESVNNDISSWTKGRSGEALSLLKKRFSHRPVQEKFVCLNCGFETHADEQAALNIARSWLFLRSQEYKKYQTNKTTGNTDKRAFVETWQSFYRKKLKEVWKPAV

SEQ ID NO: 36983 - protein, 978 aa, synthetic construct
  REGION 1..978: note = engineered CasX variant
QEIKRINKIRRRLVKDSNTKKAGKTGPMKTLLVRVMTPDLRERLENLRKKPENIPQPISNTSRANLNKLLTDYTEMKKAILHVYWEEFQKDPVGLMSRVAQPASKKIDQNKLKPEMDEKGNLTTAGFACSQCGQPLFVYKLEQVSEKGKAYTNYFGRCNVAEHEKLIKLAQLKPEKDSDEAVTYSLGKFGQRALDFYSIHVTKESTHPVKPLAQIAGNRYASGPVGKALSDACMGTIASFLSKYQDIIIEHQKVVKGNQKRLESLRELAGKENLEYPSVTLPPQPHTKEGVDAYNEVIARVRMWVNLNLWQKLKLSRDDAKPLLRLKGFPSFPLVERQANEVDWWDMVCNVKKLINEKKEDGKVFWQNLAGYKRQEALRPYLSSEEDRKKGKKFARTQLGDLLLHLEKKHGEDWGKVYDEAWERIDKKVEGLSKHIKLEEERRSEDAQSKAALTDWLRAKASFVIEGLKEADKDEFCRCELKLQKWYGDLRGKPFAIEAENSILDISGFSKQYNCAFIWQKDGVKKLNLYLIINYFKGGKLRFKKIKPEAFEANRFYTVINKKSGEIVPMEVNFNFDDPNLIILPLAFGKRQGREFIWNDLLSLETGSLKLANGRVIEKTLYNRRTRQDEPALFVALTFERREVLDSSNIKPMNLIGVDRGENIPAVIALTDPEGCPLSRFKDSLGNPTHILRIGESYKEKQRTIQAKKEVEQRRAGGYSRKYASKAKNLADDMVRNTARDLLYYAVTQDAMLIFENLSRGFGRQGKRTFMAERQYTRMEDWLTAKLAYEGLPSKVYLSKTLAQYTSKTCSNCGFTITSADYDRVLEKLKKTATGWMTTINGKELKVEGQITYYNRYKRQNVVKDLSVELDRLSEESVNNDISSWTKGRSGEALSLLKKRFSHRPVQEKFVCLNCGFETHADEQAALNIARSWLFLRSQEYKKYQTNKTTGNTDKRAFVETWQSFYRKKLKEVWKPAV

SEQ ID NO: 36984 - protein, 977 aa, synthetic construct
  REGION 1..977: note = engineered CasX variant
QEIKRINKIRRRLVKDSNTKKAGKTGPMKTLLVRVMTPDLRERLENLRKKPENIPQPISNTSRANLNKLLTDYTEMKKAILHVYWEEFQKDPVGLMSRVAQPASKKIDQNKLKPEMDEKGNLTTAGFACSQCGQPLFVYKLEQVSEKGKAYTNYFGRCNVAEHEKLILLAQLKPEKDSDEAVTYSLGKFGQRALDFYSIHVTKESTHPVKPLAQIAGNRYASPVGKALSDACMGTIASFLSKYQDIIIEHQKVVKGNQKRLESLRELAGKENLEYPSVTLPPQPHTKEGVDAYNEVIARVRMWVNLNLWQKLKLSRDDAKPLLRLKGFPSFPLVERQANEVDWWDMVCNVKKLINEKKEDGKVFWQNLAGYKRQEALRPYLSSEEDRKKGKKFARTQLGDLLLHLEKKHGEDWGKVYDEAWERIDKKVEGLSKHIKLEEERRSEDAQSKAALTDWLRAKASFVIEGLKEADKDEFCRCELKLQKWYGDLRGKPFAIEAENSILDISGFSKQYNCAFIWQKDGVKKLNLYLIINYFKGGKLRFKKIKPEAFEANRFYTVINKKSGEIVPMEVNFNFDDPNLIILPLAFGKRQGREFIWNDLLSLETGSLKLANGRVIEKTLYNRRTRQDEPALFVALTFERREVLDSSNIKPMNLIGVDRGENIPAVIALTDPEGCPLSRFKDSLGNPTHILRIGESYKEKQRTIQAKKEVEQRRAGGYSRKYASKAKNLADDMVRNTARDLLYYAVTQDAMLIFENLSRGFGRQGKRTFMAERQYTRMEDWLTAKLAYEGLPSKVYLSKTLAQYTSKTCSNCGFTITSADYDRVLEKLKKTATGWMTTINGKELKVEGQITYYNRYKRQNVVKDLSVELDRLSEESVNNDISSWTKGRSGEALSLLKKRFSHRPVQEKFVCLNCGFETHADEQAALNIARSWLFLRSQEYKKYQTNKTTGNTDKRAFVETWQSFYRKKLKEVWKPAV

SEQ ID NO: 36985 - protein, 979 aa, synthetic construct
  REGION 1..979: note = engineered CasX variant
QEIKRINKIRRRLVKDSNTKKAGKTGPMKTLLVRVMTPDLRERLENLRKKPENIPQPISNTSRANLNKLLTDYTEMKKAILHVYWEEFQKDPVGLMSRVAQPASKKIDQNKLKPEMDEKGNLTTAGFACSQCGQPLFVYKLEQVSEKGKAYTNYFGRCNVAEHEKLILLAQLKPEKDSDEAVTYSLGKFGQRALDFYSIHVTKESTHPVKPLAQIAGNRYASYPVGKALSDACMGTIASFLSKYQDIIIEHQKVVKGNQKRLESLRELAGKENLEYPSVTLPPQPHTKEGVDAYNEVIARVRMWVNLNLWQKLKLSRDDAKPLLRLKGFPSFPLVERQANEVDWWDMVCNVKKLINEKKEDGKVFWQNLAGYKRQEALRPYLSSEEDRKKGKKFARTQLGDLLLHLEKKHGEDWGKVYDEAWERIDKKVEGLSKHIKLEEERRSEDAQSKAALTDWLRAKASFVIEGLKEADKDEFCRCELKLQKWYGDLRGKPFAIEAENSILDISGFSKQYNCAFIWQKDGVKKLNLYLIINYFKGGKLRFKKIKPEAFEANRFYTVINKKSGEIVPMEVNFNFDDPNLIILPLAFGKRQGREFIWNDLLSLETGSLKLANGRVIEKTLYNRRTRQDEPALFVALTFERREVLDSSNIKPMNLIGVDRGENIPAVIALTDPEGCPLSRFKDSLGNPTHILRIGESYKEKQRTIQAKKEVEQRRAGGYSRKYASKAKNLADDMVRNTARDLLYYAVTQDAMLIFENLSRGFGRQGKRTFMAERQYTRMEDWLTAKLAYEGPLPSKTYLSKTLAQYTSKTCSNCGFTITSADYDRVLEKLKKTATGWMTTINGKELKVEGQITYYNRYKRQNVVKDLSVELDRLSEESVNNDISSWTKGRSGEALSLLKKRFSHRPVQEKFVCLNCGFETHADEQAALNIARSWLFLRSQEYKKYQTNKTTGNTDKRAFVETWQSFYRKKLKEVWKPAV

SEQ ID NO: 36986 - protein, 979 aa, synthetic construct
  REGION 1..979: note = engineered CasX variant
QEIKRINKIRRRLVKDSNTKKAGKTGPMKTLLVRVMTPDLRERLENLRKKPENIPQPISNTSRANLNKLLTDYTEMKKAILHVYWEEFQKDPVGLMSRVAQPASKKIDQNKLKPEMDEKGNLTTAGFACSQCGQPLFVYKLEQVSEKGKAYTNYFGRCNVAEHEKLILLAQLKPEKDSDEAVTYSLGKFGQRALDFYSIHVTKESTHPVKPLAQIAGNRYASHPVGKALSDACMGTIASFLSKYQDIIIEHQKVVKGNQKRLESLRELAGKENLEYPSVTLPPQPHTKEGVDAYNEVIARVRMWVNLNLWQKLKLSRDDAKPLLRLKGFPSFPLVERQANEVDWWDMVCNVKKLINEKKEDGKVFWQNLAGYKRQEALRPYLSSEEDRKKGKKFARTQLGDLLLHLEKKHGEDWGKVYDEAWERIDKKVEGLSKHIKLEEERRSEDAQSKAALTDWLRAKASFVIEGLKEADKDEFCRCELKLQKWYGDLRGKPFAIEAENSILDISGFSKQYNCAFIWQKDGVKKLNLYLIINYFKGGKLRFKKIKPEAFEANRFYTVINKKSGEIVPMEVNFNFDDPNLIILPLAFGKRQGREFIWNDLLSLETGSLKLANGRVIEKTLYNRRTRQDEPALFVALTFERREVLDSSNIKPMNLIGVDRGENIPAVIALTDPEGCPLSRFKDSLGNPTHILRIGESYKEKQRTIQAKKEVEQRRAGGYSRKYASKAKNLADDMVRNTARDLLYYAVTQDAMLIFENLSRGFGRQGKRTFMAERQYTRMEDWLTAKLAYEGPLPSKTYLSKTLAQYTSKTCSNCGFTITSADYDRVLEKLKKTATGWMTTINGKELKVEGQITYYNRYKRQNVVKDLSVELDRLSEESVNNDISSWTKGRSGEALSLLKKRFSHRPVQEKFVCLNCGFETHADEQAALNIARSWLFLRSQEYKKYQTNKTTGNTDKRAFVETWQSFYRKKLKEVWKPAV

SEQ ID NO: 36987 - protein, 979 aa, synthetic construct
  REGION 1..979: note = engineered CasX variant
QEIKRINKIRRRLVKDSNTKKAGKTGPMKTLLVRVMTPDLRERLENLRKKPENIPQPISNTSRANLNKLLTDYTEMKKAILHVYWEEFQKDPVGLMSRVAQPASKKIDQNKLKPEMDEKGNLTTAGFACSQCGQPLFVYKLEQVSEKGKAYTNYFGRCNVAEHEKLILLAQLKPEKDSDEAVTYSLGKFGQRALDFYSIHVTKESTHPVKPLAQIAGNRYASSPVGKALSDACMGTIASFLSKYQDIIIEHQKVVKGNQKRLESLRELAGKENLEYPSVTLPPQPHTKEGVDAYNEVIARVRMWVNLNLWQKLKLSRDDAKPLLRLKGFPSFPLVERQANEVDWWDMVCNVKKLINEKKEDGKVFWQNLAGYKRQEALRPYLSSEEDRKKGKKFARTQLGDLLLHLEKKHGEDWGKVYDEAWERIDKKVEGLSKHIKLEEERRSEDAQSKAALTDWLRAKASFVIEGLKEADKDEFCRCELKLQKWYGDLRGKPFAIEAENSILDISGFSKQYNCAFIWQKDGVKKLNLYLIINYFKGGKLRFKKIKPEAFEANRFYTVINKKSGEIVPMEVNFNFDDPNLIILPLAFGKRQGREFIWNDLLSLETGSLKLANGRVIEKTLYNRRTRQDEPALFVALTFERREVLDSSNIKPMNLIGVDRGENIPAVIALTDPEGCPLSRFKDSLGNPTHILRIGESYKEKQRTIQAKKEVEQRRAGGYSRKYASKAKNLADDMVRNTARDLLYYAVTQDAMLIFENLSRGFGRQGKRTFMAERQYTRMEDWLTAKLAYEGPLPSKTYLSKTLAQYTSKTCSNCGFTITSADYDRVLEKLKKTATGWMTTINGKELKVEGQITYYNRYKRQNVVKDLSVELDRLSEESVNNDISSWTKGRSGEALSLLKKRFSHRPVQEKFVCLNCGFETHADEQAALNIARSWLFLRSQEYKKYQTNKTTGNTDKRAFVETWQSFYRKKLKEVWKPAV

SEQ ID NO: 36988 - protein, 979 aa, synthetic construct
  REGION 1..979: note = engineered CasX variant
QEIKRINKIRRRLVKDSNTKKAGKTGPMKTLLVRVMTPDLRERLENLRKKPENIPQPISNTSRANLNKLLTDYTEMKKAILHVYWEEFQKDPVGLMSRVAQPASKKIDQNKLKPEMDEKGNLTTAGFACSQCGQPLFVYKLEQVSEKGKAYTNYFGRCNVAEHEKLILLAQLKPEKDSDEAVTYSLGKFGQRALDFYSIHVTKESTHPVKPLAQIAGNRYASTPVGKALSDACMGTIASFLSKYQDIIIEHQKVVKGNQKRLESLRELAGKENLEYPSVTLPPQPHTKEGVDAYNEVIARVRMWVNLNLWQKLKLSRDDAKPLLRLKGFPSFPLVERQANEVDWWDMVCNVKKLINEKKEDGKVFWQNLAGYKRQEALRPYLSSEEDRKKGKKFARTQLGDLLLHLEKKHGEDWGKVYDEAWERIDKKVEGLSKHIKLEEERRSEDAQSKAALTDWLRAKASFVIEGLKEADKDEFCRCELKLQKWYGDLRGKPFAIEAENSILDISGFSKQYNCAFIWQKDGVKKLNLYLIINYFKGGKLRFKKIKPEAFEANRFYTVINKKSGEIVPMEVNFNFDDPNLIILPLAFGKRQGREFIWNDLLSLETGSLKLANGRVIEKTLYNRRTRQDEPALFVALTFERREVLDSSNIKPMNLIGVDRGENIPAVIALTDPEGCPLSRFKDSLGNPTHILRIGESYKEKQRTIQAKKEVEQRRAGGYSRKYASKAKNLADDMVRNTARDLLYYAVTQDAMLIFENLSRGFGRQGKRTFMAERQYTRMEDWLTAKLAYEGPLPSKTYLSKTLAQYTSKTCSNCGFTITSADYDRVLEKLKKTATGWMTTINGKELKVEGQITYYNRYKRQNVVKDLSVELDRLSEESVNNDISSWTKGRSGEALSLLKKRFSHRPVQEKFVCLNCGFETHADEQAALNIARSWLFLRSQEYKKYQTNKTTGNTDKRAFVETWQSFYRKKLKEVWKPAV

SEQ ID NO: 36989 - protein, 979 aa, synthetic construct
  REGION 1..979: note = engineered CasX variant
QEIKRINKIRRRLVKDSNTKKAGKTGPMKTLLVRVMTPDLRERLENLRKKPENIPQPISNTSRANLNKLLTDYTEMKKAILHVYWEEFQKDPVGLMSRVAQPASKKIDQNKLKPEMDEKGNLTTAGFACSQCGQPLFVYKLEQVSEKGKAYTNYFGRCNVAEHEKLILLAQLKPEKDSDEAVTYSLGKFGQRALDFYSIHVTKESTHPVKPLAQIAGNRYASAPVGKALSDACMGTIASFLSKYQDIIIEHQKVVKGNQKRLESLRELAGKENLEYPSVTLPPQPHTKEGVDAYNEVIARVRMWVNLNLWQKLKLSRDDAKPLLRLKGFPSFPLVERQANEVDWWDMVCNVKKLINEKKEDGKVFWQNLAGYKRQEALRPYLSSEEDRKKGKKFARTQLGDLLLHLEKKHGEDWGKVYDEAWERIDKKVEGLSKHIKLEEERRSEDAQSKAALTDWLRAKASFVIEGLKEADKDEFCRCELKLQKWYGDLRGKPFAIEAENSILDISGFSKQYNCAFIWQKDGVKKLNLYLIINYFKGGKLRFKKIKPEAFEANRFYTVINKKSGEIVPMEVNFNFDDPNLIILPLAFGKRQGREFIWNDLLSLETGSLKLANGRVIEKTLYNRRTRQDEPALFVALTFERREVLDSSNIKPMNLIGVDRGENIPAVIALTDPEGCPLSRFKDSLGNPTHILRIGESYKEKQRTIQAKKEVEQRRAGGYSRKYASKAKNLADDMVRNTARDLLYYAVTQDAMLIFENLSRGFGRQGKRTFMAERQYTRMEDWLTAKLAYEGPLPSKTYLSKTLAQYTSKTCSNCGFTITSADYDRVLEKLKKTATGWMTTINGKELKVEGQITYYNRYKRQNVVKDLSVELDRLSEESVNNDISSWTKGRSGEALSLLKKRFSHRPVQEKFVCLNCGFETHADEQAALNIARSWLFLRSQEYKKYQTNKTTGNTDKRAFVETWQSFYRKKLKEVWKPAV

SEQ ID NO: 36990 - protein, 979 aa, synthetic construct
  REGION 1..979: note = engineered CasX variant
QEIKRINKIRRRLVKDSNTKKAGKTGPMKTLLVRVMTPDLRERLENLRKKPENIPQPISNTSRANLNKLLTDYTEMKKAILHVYWEEFQKDPVGLMSRVAQPASKKIDQNKLKPEMDEKGNLTTAGFACSQCGQPLFVYKLEQVSEKGKAYTNYFGRCNVAEHEKLILLAQLKPEKDSDEAVTYSLGKFGQRALDFYSIHVTKESTHPVKPLAQIAGNRYASVPVGKALSDACMGTIASFLSKYQDIIIEHQKVVKGNQKRLESLRELAGKENLEYPSVTLPPQPHTKEGVDAYNEVIARVRMWVNLNLWQKLKLSRDDAKPLLRLKGFPSFPLVERQANEVDWWDMVCNVKKLINEKKEDGKVFWQNLAGYKRQEALRPYLSSEEDRKKGKKFARTQLGDLLLHLEKKHGEDWGKVYDEAWERIDKKVEGLSKHIKLEEERRSEDAQSKAALTDWLRAKASFVIEGLKEADKDEFCRCELKLQKWYGDLRGKPFAIEAENSILDISGFSKQYNCAFIWQKDGVKKLNLYLIINYFKGGKLRFKKIKPEAFEANRFYTVINKKSGEIVPMEVNFNFDDPNLIILPLAFGKRQGREFIWNDLLSLETGSLKLANGRVIEKTLYNRRTRQDEPALFVALTFERREVLDSSNIKPMNLIGVDRGENIPAVIALTDPEGCPLSRFKDSLGNPTHILRIGESYKEKQRTIQAKKEVEQRRAGGYSRKYASKAKNLADDMVRNTARDLLYYAVTQDAMLIFENLSRGFGRQGKRTFMAERQYTRMEDWLTAKLAYEGPLPSKTYLSKTLAQYTSKTCSNCGFTITSADYDRVLEKLKKTATGWMTTINGKELKVEGQITYYNRYKRQNVVKDLSVELDRLSEESVNNDISSWTKGRSGEALSLLKKRFSHRPVQEKFVCLNCGFETHADEQAALNIARSWLFLRSQEYKKYQTNKTTGNTDKRAFVETWQSFYRKKLKEVWKPAV

SEQ ID NO: 36991 - protein, 979 aa, synthetic construct
  REGION 1..979: note = engineered CasX variant
QEIKRINKIRRRLVKDSNTKKAGKTGPMKTLLVRVMTPDLRERLENLRKKPENIPQPISNTSRANLNKLLTDYTEMKKAILHVYWEEFQKDPVGLMSRVAQPASKKIDQNKLKPEMDEKGNLTTAGFACSQCGQPLFVYKLEQVSEKGKAYTNYFGRCNVAEHEKLIKLAQLKPEKDSDEAVTYSLGKFGQRALDFYSIHVTKESTHPVKPLAQIAGNRYASGPVGKALSDACMGTIASFLSKYQDIIIEHQKVVKGNQKRLESLRELAGKENLEYPSVTLPPQPHTKEGVDAYNEVIARVRMWVNLNLWQKLKLSRDDAKPLLRLKGFPSFPLVERQANEVDWWDMVCNVKKLINEKKEDGKVFWQNLAGYKRQEALRPYLSSEEDRKKGKKFARTQLGDLLLHLEKKHGEDWGKVYDEAWERIDKKVEGLSKHIKLEEERRSEDAQSKAALTDWLRAKASFVIEGLKEADKDEFCRCELKLQKWYGDLRGKPFAIEAENSILDISGFSKQYNCAFIWQKDGVKKLNLYLIINYFKGGKLRFKKIKPEAFEANRFYTVINKKSGEIVPMEVNFNFDDPNLIILPLAFGKRQGREFIWNDLLSLETGSLKLANGRVIEKTLYNRRTRQDEPALFVALTFERREVLDSSNIKPMNLIGVDRGENIPAVIALTDPEGCPLSRFKDSLGNPTHILRIGESYKEKQRTIQAKKEVEQRRAGGYSRKYASKAKNLADDMVRNTARDLLYYAVTQDAMLIFENLSRGFGRQGKRTFMAERQYTRMEDWLTAKLAYEGPLPSKTYLSKTLAQYTSKTCSNCGFTITSADYDRVLEKLKKTATGWMTTINGKELKVEGQITYYNRYKRQNVVKDLSVELDRLSEESVNNDISSWTKGRSGEALSLLKKRFSHRPVQEKFVCLNCGFETHADEQAALNIARSWLFLRSQEYKKYQTNKTTGNTDKRAFVETWQSFYRKKLKEVWKPAV

SEQ ID NO: 36992 - protein, 978 aa, synthetic construct
  REGION 1..978: note = engineered CasX variant
QEIKRINKIRRRLVKDSNTKKAGKTGPMKTLLVRVMTPDLRERLENLRKKPENIPQPISNTSRANLNKLLTDYTEMKKAILHVYWEEFQKDPVGLMSRVAQPASKKIDQNKLKPEMDEKGNLTTAGFACSQCGQPLFVYKLEQVSEKGKAYTNYFGRCNVAEHEKLILLAQLKPEKDSDEAVTYSLGKFGQRALDFYSIHVTKESTHPVKPLAQIAGNRYASPVGKALSDACMGTIASFLSKYQDIIIEHQKVVKGNQKRLESLRELAGKENLEYPSVTLPPQPHTKEGVDAYNEVIARVRMWVNLNLWQKLKLSRDDAKPLLRLKGFPSFPLVERQANEVDWWDMVCNVKKLINEKKEDGKVFWQNLAGYKRQEALRPYLSSEEDRKKGKKFARTQLGDLLLHLEKKHGEDWGKVYDEAWERIDKKVEGLSKHIKLEEERRSEDAQSKAALTDWLRAKASFVIEGLKEADKDEFCRCELKLQKWYGDLRGKPFAIEAENSILDISGFSKQYNCAFIWQKDGVKKLNLYLIINYFKGGKLRFKKIKPEAFEANRFYTVINKKSGEIVPMEVNFNFDDPNLIILPLAFGKRQGREFIWNDLLSLETGSLKLANGRVIEKTLYNRRTRQDEPALFVALTFERREVLDSSNIKPMNLIGVDRGENIPAVIALTDPEGCPLSRFKDSLGNPTHILRIGESYKEKQRTIQAKKEVEQRRAGGYSRKYASKAKNLADDMVRNTARDLLYYAVTQDAMLIFENLSRGFGRQGKRTFMAERQYTRMEDWLTAKLAYEGPLPSKTYLSKTLAQYTSKTCSNCGFTITSADYDRVLEKLKKTATGWMTTINGKELKVEGQITYYNRYKRQNVVKDLSVELDRLSEESVNNDISSWTKGRSGEALSLLKKRFSHRPVQEKFVCLNCGFETHADEQAALNIARSWLFLRSQEYKKYQTNKTTGNTDKRAFVETWQSFYRKKLKEVWKPAV

SEQ ID NO: 36993 - protein, 979 aa, synthetic construct
  REGION 1..979: note = engineered CasX variant
QEIKRINKIRRRLVKDSNTKKAGKTGPMKTLLVRVMTPDLRERLENLRKKPENIPQPISNTSRANLNKLLTDYTEMKKAILHVYWEEFQKDPVGLMSRVAQPASKKIDQNKLKPEMDEKGNLTTAGFACSQCGQPLFVYKLEQVSEKGKAYTNYFGRCNVAEHEKLILLAQLKPEKDSDEAVTYSLGKFGQRALDFYSIHVTKESTHPVKPLAQIAGNRYASYPVGKALSDACMGTIASFLSKYQDIIIEHQKVVKGNQKRLESLRELAGKENLEYPSVTLPPQPHTKEGVDAYNEVIARVRMWVNLNLWQKLKLSRDDAKPLLRLKGFPSFPLVERQANEVDWWDMVCNVKKLINEKKEDGKVFWQNLAGYKRQEALRPYLSSEEDVRKKGKKFARTQLGDLLLHLEKKHGEDWGKVYDEAWERIDKKVEGLSKHIKLEEERRSEDAQSKAALTDWLRAKASFVIEGLKEADKDEFCRCELKLQKWYGDLRGKPFAIEAENSILDISGFSKQYNCAFIWQKDGVKKLNLYLIINYFKGGKLRFKKIKPEAFEANRFYTVINKKSGEIVPMEVNFNFDDPNLIILPLAFGKRQGREFIWNDLLSLETGSLKLANGRVIEKTLYNRRTRQDEPALFVALTFERREVLDSSNIKPMNLIGVDRGENIPAVIALTDPEGCPLSRFKDSLGNPTHILRIGESYKEKQRTIQAKKEVEQRRAGGYSRKYASKAKNLADDMVRNTARDLLYYAVTQDAMLIFENLSRGFGRQGKRTFMAERQYTRMEDWLTAKLAYEGLPSKTYLSKTLAQYTSKTCSNCGFTITSADYDRVLEKLKKTATGWMTTINGKELKVEGQITYYNRYKRQNVVKDLSVELDRLSEESVNNDISSWTKGRSGEALSLLKKRFSHRPVQEKFVCLNCGFETHADEQAALNIARSWLFLRSQEYKKYQTNKTTGNTDKRAFVETWQSFYRKKLKEVWKPAV

SEQ ID NO: 36994 - protein, 979 aa, synthetic construct
  REGION 1..979: note = engineered CasX variant
QEIKRINKIRRRLVKDSNTKKAGKTGPMKTLLVRVMTPDLRERLENLRKKPENIPQPISNTSRANLNKLLTDYTEMKKAILHVYWEEFQKDPVGLMSRVAQPASKKIDQNKLKPEMDEKGNLTTAGFACSQCGQPLFVYKLEQVSEKGKAYTNYFGRCNVAEHEKLILLAQLKPEKDSDEAVTYSLGKFGQRALDFYSIHVTKESTHPVKPLAQIAGNRYASHPVGKALSDACMGTIASFLSKYQDIIIEHQKVVKGNQKRLESLRELAGKENLEYPSVTLPPQPHTKEGVDAYNEVIARVRMWVNLNLWQKLKLSRDDAKPLLRLKGFPSFPLVERQANEVDWWDMVCNVKKLINEKKEDGKVFWQNLAGYKRQEALRPYLSSEEDVRKKGKKFARTQLGDLLLHLEKKHGEDWGKVYDEAWERIDKKVEGLSKHIKLEEERRSEDAQSKAALTDWLRAKASFVIEGLKEADKDEFCRCELKLQKWYGDLRGKPFAIEAENSILDISGFSKQYNCAFIWQKDGVKKLNLYLIINYFKGGKLRFKKIKPEAFEANRFYTVINKKSGEIVPMEVNFNFDDPNLIILPLAFGKRQGREFIWNDLLSLETGSLKLANGRVIEKTLYNRRTRQDEPALFVALTFERREVLDSSNIKPMNLIGVDRGENIPAVIALTDPEGCPLSRFKDSLGNPTHILRIGESYKEKQRTIQAKKEVEQRRAGGYSRKYASKAKNLADDMVRNTARDLLYYAVTQDAMLIFENLSRGFGRQGKRTFMAERQYTRMEDWLTAKLAYEGLPSKTYLSKTLAQYTSKTCSNCGFTITSADYDRVLEKLKKTATGWMTTINGKELKVEGQITYYNRYKRQNVVKDLSVELDRLSEESVNNDISSWTKGRSGEALSLLKKRFSHRPVQEKFVCLNCGFETHADEQAALNIARSWLFLRSQEYKKYQTNKTTGNTDKRAFVETWQSFYRKKLKEVWKPAV

SEQ ID NO: 36995 - protein, 979 aa, synthetic construct
  REGION 1..979: note = engineered CasX variant
QEIKRINKIRRRLVKDSNTKKAGKTGPMKTLLVRVMTPDLRERLENLRKKPENIPQPISNTSRANLNKLLTDYTEMKKAILHVYWEEFQKDPVGLMSRVAQPASKKIDQNKLKPEMDEKGNLTTAGFACSQCGQPLFVYKLEQVSEKGKAYTNYFGRCNVAEHEKLILLAQLKPEKDSDEAVTYSLGKFGQRALDFYSIHVTKESTHPVKPLAQIAGNRYASSPVGKALSDACMGTIASFLSKYQDIIIEHQKVVKGNQKRLESLRELAGKENLEYPSVTLPPQPHTKEGVDAYNEVIARVRMWVNLNLWQKLKLSRDDAKPLLRLKGFPSFPLVERQANEVDWWDMVCNVKKLINEKKEDGKVFWQNLAGYKRQEALRPYLSSEEDVRKKGKKFARTQLGDLLLHLEKKHGEDWGKVYDEAWERIDKKVEGLSKHIKLEEERRSEDAQSKAALTDWLRAKASFVIEGLKEADKDEFCRCELKLQKWYGDLRGKPFAIEAENSILDISGFSKQYNCAFIWQKDGVKKLNLYLIINYFKGGKLRFKKIKPEAFEANRFYTVINKKSGEIVPMEVNFNFDDPNLIILPLAFGKRQGREFIWNDLLSLETGSLKLANGRVIEKTLYNRRTRQDEPALFVALTFERREVLDSSNIKPMNLIGVDRGENIPAVIALTDPEGCPLSRFKDSLGNPTHILRIGESYKEKQRTIQAKKEVEQRRAGGYSRKYASKAKNLADDMVRNTARDLLYYAVTQDAMLIFENLSRGFGRQGKRTFMAERQYTRMEDWLTAKLAYEGLPSKTYLSKTLAQYTSKTCSNCGFTITSADYDRVLEKLKKTATGWMTTINGKELKVEGQITYYNRYKRQNVVKDLSVELDRLSEESVNNDISSWTKGRSGEALSLLKKRFSHRPVQEKFVCLNCGFETHADEQAALNIARSWLFLRSQEYKKYQTNKTTGNTDKRAFVETWQSFYRKKLKEVWKPAV

SEQ ID NO: 36996 - protein, 979 aa, synthetic construct
  REGION 1..979: note = engineered CasX variant
QEIKRINKIRRRLVKDSNTKKAGKTGPMKTLLVRVMTPDLRERLENLRKKPENIPQPISNTSRANLNKLLTDYTEMKKAILHVYWEEFQKDPVGLMSRVAQPASKKIDQNKLKPEMDEKGNLTTAGFACSQCGQPLFVYKLEQVSEKGKAYTNYFGRCNVAEHEKLILLAQLKPEKDSDEAVTYSLGKFGQRALDFYSIHVTKESTHPVKPLAQIAGNRYASTPVGKALSDACMGTIASFLSKYQDIIIEHQKVVKGNQKRLESLRELAGKENLEYPSVTLPPQPHTKEGVDAYNEVIARVRMWVNLNLWQKLKLSRDDAKPLLRLKGFPSFPLVERQANEVDWWDMVCNVKKLINEKKEDGKVFWQNLAGYKRQEALRPYLSSEEDVRKKGKKFARTQLGDLLLHLEKKHGEDWGKVYDEAWERIDKKVEGLSKHIKLEEERRSEDAQSKAALTDWLRAKASFVIEGLKEADKDEFCRCELKLQKWYGDLRGKPFAIEAENSILDISGFSKQYNCAFIWQKDGVKKLNLYLIINYFKGGKLRFKKIKPEAFEANRFYTVINKKSGEIVPMEVNFNFDDPNLIILPLAFGKRQGREFIWNDLLSLETGSLKLANGRVIEKTLYNRRTRQDEPALFVALTFERREVLDSSNIKPMNLIGVDRGENIPAVIALTDPEGCPLSRFKDSLGNPTHILRIGESYKEKQRTIQAKKEVEQRRAGGYSRKYASKAKNLADDMVRNTARDLLYYAVTQDAMLIFENLSRGFGRQGKRTFMAERQYTRMEDWLTAKLAYEGLPSKTYLSKTLAQYTSKTCSNCGFTITSADYDRVLEKLKKTATGWMTTINGKELKVEGQITYYNRYKRQNVVKDLSVELDRLSEESVNNDISSWTKGRSGEALSLLKKRFSHRPVQEKFVCLNCGFETHADEQAALNIARSWLFLRSQEYKKYQTNKTTGNTDKRAFVETWQSFYRKKLKEVWKPAV

SEQ ID NO: 36997 - protein, 979 aa, synthetic construct
  REGION 1..979: note = engineered CasX variant
QEIKRINKIRRRLVKDSNTKKAGKTGPMKTLLVRVMTPDLRERLENLRKKPENIPQPISNTSRANLNKLLTDYTEMKKAILHVYWEEFQKDPVGLMSRVAQPASKKIDQNKLKPEMDEKGNLTTAGFACSQCGQPLFVYKLEQVSEKGKAYTNYFGRCNVAEHEKLILLAQLKPEKDSDEAVTYSLGKFGQRALDFYSIHVTKESTHPVKPLAQIAGNRYASAPVGKALSDACMGTIASFLSKYQDIIIEHQKVVKGNQKRLESLRELAGKENLEYPSVTLPPQPHTKEGVDAYNEVIARVRMWVNLNLWQKLKLSRDDAKPLLRLKGFPSFPLVERQANEVDWWDMVCNVKKLINEKKEDGKVFWQNLAGYKRQEALRPYLSSEEDVRKKGKKFARTQLGDLLLHLEKKHGEDWGKVYDEAWERIDKKVEGLSKHIKLEEERRSEDAQSKAALTDWLRAKASFVIEGLKEADKDEFCRCELKLQKWYGDLRGKPFAIEAENSILDISGFSKQYNCAFIWQKDGVKKLNLYLIINYFKGGKLRFKKIKPEAFEANRFYTVINKKSGEIVPMEVNFNFDDPNLIILPLAFGKRQGREFIWNDLLSLETGSLKLANGRVIEKTLYNRRTRQDEPALFVALTFERREVLDSSNIKPMNLIGVDRGENIPAVIALTDPEGCPLSRFKDSLGNPTHILRIGESYKEKQRTIQAKKEVEQRRAGGYSRKYASKAKNLADDMVRNTARDLLYYAVTQDAMLIFENLSRGFGRQGKRTFMAERQYTRMEDWLTAKLAYEGLPSKTYLSKTLAQYTSKTCSNCGFTITSADYDRVLEKLKKTATGWMTTINGKELKVEGQITYYNRYKRQNVVKDLSVELDRLSEESVNNDISSWTKGRSGEALSLLKKRFSHRPVQEKFVCLNCGFETHADEQAALNIARSWLFLRSQEYKKYQTNKTTGNTDKRAFVETWQSFYRKKLKEVWKPAV

SEQ ID NO: 36998 - protein, 979 aa, synthetic construct
  REGION 1..979: note = engineered CasX variant
QEIKRINKIRRRLVKDSNTKKAGKTGPMKTLLVRVMTPDLRERLENLRKKPENIPQPISNTSRANLNKLLTDYTEMKKAILHVYWEEFQKDPVGLMSRVAQPASKKIDQNKLKPEMDEKGNLTTAGFACSQCGQPLFVYKLEQVSEKGKAYTNYFGRCNVAEHEKLILLAQLKPEKDSDEAVTYSLGKFGQRALDFYSIHVTKESTHPVKPLAQIAGNRYASVPVGKALSDACMGTIASFLSKYQDIIIEHQKVVKGNQKRLESLRELAGKENLEYPSVTLPPQPHTKEGVDAYNEVIARVRMWVNLNLWQKLKLSRDDAKPLLRLKGFPSFPLVERQANEVDWWDMVCNVKKLINEKKEDGKVFWQNLAGYKRQEALRPYLSSEEDVRKKGKKFARTQLGDLLLHLEKKHGEDWGKVYDEAWERIDKKVEGLSKHIKLEEERRSEDAQSKAALTDWLRAKASFVIEGLKEADKDEFCRCELKLQKWYGDLRGKPFAIEAENSILDISGFSKQYNCAFIWQKDGVKKLNLYLIINYFKGGKLRFKKIKPEAFEANRFYTVINKKSGEIVPMEVNFNFDDPNLIILPLAFGKRQGREFIWNDLLSLETGSLKLANGRVIEKTLYNRRTRQDEPALFVALTFERREVLDSSNIKPMNLIGVDRGENIPAVIALTDPEGCPLSRFKDSLGNPTHILRIGESYKEKQRTIQAKKEVEQRRAGGYSRKYASKAKNLADDMVRNTARDLLYYAVTQDAMLIFENLSRGFGRQGKRTFMAERQYTRMEDWLTAKLAYEGLPSKTYLSKTLAQYTSKTCSNCGFTITSADYDRVLEKLKKTATGWMTTINGKELKVEGQITYYNRYKRQNVVKDLSVELDRLSEESVNNDISSWTKGRSGEALSLLKKRFSHRPVQEKFVCLNCGFETHADEQAALNIARSWLFLRSQEYKKYQTNKTTGNTDKRAFVETWQSFYRKKLKEVWKPAV

SEQ ID NO: 36999 - protein, 979 aa, synthetic construct
  REGION 1..979: note = engineered CasX variant
QEIKRINKIRRRLVKDSNTKKAGKTGPMKTLLVRVMTPDLRERLENLRKKPENIPQPISNTSRANLNKLLTDYTEMKKAILHVYWEEFQKDPVGLMSRVAQPASKKIDQNKLKPEMDEKGNLTTAGFACSQCGQPLFVYKLEQVSEKGKAYTNYFGRCNVAEHEKLIKLAQLKPEKDSDEAVTYSLGKFGQRALDFYSIHVTKESTHPVKPLAQIAGNRYASGPVGKALSDACMGTIASFLSKYQDIIIEHQKVVKGNQKRLESLRELAGKENLEYPSVTLPPQPHTKEGVDAYNEVIARVRMWVNLNLWQKLKLSRDDAKPLLRLKGFPSFPLVERQANEVDWWDMVCNVKKLINEKKEDGKVFWQNLAGYKRQEALRPYLSSEEDVRKKGKKFARTQLGDLLLHLEKKHGEDWGKVYDEAWERIDKKVEGLSKHIKLEEERRSEDAQSKAALTDWLRAKASFVIEGLKEADKDEFCRCELKLQKWYGDLRGKPFAIEAENSILDISGFSKQYNCAFIWQKDGVKKLNLYLIINYFKGGKLRFKKIKPEAFEANRFYTVINKKSGEIVPMEVNFNFDDPNLIILPLAFGKRQGREFIWNDLLSLETGSLKLANGRVIEKTLYNRRTRQDEPALFVALTFERREVLDSSNIKPMNLIGVDRGENIPAVIALTDPEGCPLSRFKDSLGNPTHILRIGESYKEKQRTIQAKKEVEQRRAGGYSRKYASKAKNLADDMVRNTARDLLYYAVTQDAMLIFENLSRGFGRQGKRTFMAERQYTRMEDWLTAKLAYEGLPSKTYLSKTLAQYTSKTCSNCGFTITSADYDRVLEKLKKTATGWMTTINGKELKVEGQITYYNRYKRQNVVKDLSVELDRLSEESVNNDISSWTKGRSGEALSLLKKRFSHRPVQEKFVCLNCGFETHADEQAALNIARSWLFLRSQEYKKYQTNKTTGNTDKRAFVETWQSFYRKKLKEVWKPAV

SEQ ID NO: 37000 - protein, 978 aa, synthetic construct
  REGION 1..978: note = engineered CasX variant
QEIKRINKIRRRLVKDSNTKKAGKTGPMKTLLVRVMTPDLRERLENLRKKPENIPQPISNTSRANLNKLLTDYTEMKKAILHVYWEEFQKDPVGLMSRVAQPASKKIDQNKLKPEMDEKGNLTTAGFACSQCGQPLFVYKLEQVSEKGKAYTNYFGRCNVAEHEKLILLAQLKPEKDSDEAVTYSLGKFGQRALDFYSIHVTKESTHPVKPLAQIAGNRYASPVGKALSDACMGTIASFLSKYQDIIIEHQKVVKGNQKRLESLRELAGKENLEYPSVTLPPQPHTKEGVDAYNEVIARVRMWVNLNLWQKLKLSRDDAKPLLRLKGFPSFPLVERQANEVDWWDMVCNVKKLINEKKEDGKVFWQNLAGYKRQEALRPYLSSEEDVRKKGKKFARTQLGDLLLHLEKKHGEDWGKVYDEAWERIDKKVEGLSKHIKLEEERRSEDAQSKAALTDWLRAKASFVIEGLKEADKDEFCRCELKLQKWYGDLRGKPFAIEAENSILDISGFSKQYNCAFIWQKDGVKKLNLYLIINYFKGGKLRFKKIKPEAFEANRFYTVINKKSGEIVPMEVNFNFDDPNLIILPLAFGKRQGREFIWNDLLSLETGSLKLANGRVIEKTLYNRRTRQDEPALFVALTFERREVLDSSNIKPMNLIGVDRGENIPAVIALTDPEGCPLSRFKDSLGNPTHILRIGESYKEKQRTIQAKKEVEQRRAGGYSRKYASKAKNLADDMVRNTARDLLYYAVTQDAMLIFENLSRGFGRQGKRTFMAERQYTRMEDWLTAKLAYEGLPSKTYLSKTLAQYTSKTCSNCGFTITSADYDRVLEKLKKTATGWMTTINGKELKVEGQITYYNRYKRQNVVKDLSVELDRLSEESVNNDISSWTKGRSGEALSLLKKRFSHRPVQEKFVCLNCGFETHADEQAALNIARSWLFLRSQEYKKYQTNKTTGNTDKRAFVETWQSFYRKKLKEVWKPAV

SEQ ID NO: 37001 - protein, 978 aa, synthetic construct
  REGION 1..978: note = engineered CasX variant
QEIKRINKIRRRLVKDSNTKKAGKTGPMKTLLVRVMTPDLRERLENLRKKPENIPQPISNTSRANLNKLLTDYTEMKKAILHVYWEEFQKDPVGLMSRVAQPASKKIDQNKLKPEMDEKGNLTTAGFACSQCGQPLFVYKLEQVSEKGKAYTNYFGRCNVAEHEKLILLAQLKPEKDSDEAVTYSLGKFGQRALDFYSIHVTKESTHPVKPLAQIAGNRYASYPVGKALSDACMGTIASFLSKYQDIIIEHQKVVKGNQKRLESLRELAGKENLEYPSVTLPPQPHTKEGVDAYNEVIARVRMWVNLNLWQKLKLSRDDAKPLLRLKGFPSFPLVERQANEVDWWDMVCNVKKLINEKKEDGKVFWQNLAGYKRQEALRPYLSSEEDRKKGKKFARTQLGDLLLHLEKKHGEDWGKVYDEAWERIDKKVEGLSKHIKLEEERRSEDAQSKAALTDWLRAKASFVIEGLKEADKDEFCRCELKLQKWYGDLRGKPFAIEAENSILDISGFSKQYNCAFIWQKDGVKKLNLYLIINYFKGGKLRFKKIKPEAFEANRFYTVINKKSGEIVPMEVNFNFDDPNLIILPLAFGKRQGREFIWNDLLSLETGSLKLANGRVIEKTLYNRRTRQDEPALFVALTFERREVLDSSNIKPMNLIGVDRGENIPAVIALTDPEGCPLSRFKDSLGNPTHILRIGESYKEKQRTIQAKKEVEQRRAGGYSRKYASKAKNLADDMVRNTARDLLYYAVTQDAMLIFENLSRGFGRQGKRTFMAERQYTRMEDWLTAKLAYEGLPSKTYLSKTLAQYTSKTCSNCGFTITSADYDRMLEKLKKTATGWMTTINGKELKVEGQITYYNRYKRQNVVKDLSVELDRLSEESVNNDISSWTKGRSGEALSLLKKRFSHRPVQEKFVCLNCGFETHADEQAALNIARSWLFLRSQEYKKYQTNKTTGNTDKRAFVETWQSFYRKKLKEVWKPAV

SEQ ID NO: 37002 - protein, 978 aa, synthetic construct
  REGION 1..978: note = engineered CasX variant
QEIKRINKIRRRLVKDSNTKKAGKTGPMKTLLVRVMTPDLRERLENLRKKPENIPQPISNTSRANLNKLLTDYTEMKKAILHVYWEEFQKDPVGLMSRVAQPASKKIDQNKLKPEMDEKGNLTTAGFACSQCGQPLFVYKLEQVSEKGKAYTNYFGRCNVAEHEKLILLAQLKPEKDSDEAVTYSLGKFGQRALDFYSIHVTKESTHPVKPLAQIAGNRYASHPVGKALSDACMGTIASFLSKYQDIIIEHQKVVKGNQKRLESLRELAGKENLEYPSVTLPPQPHTKEGVDAYNEVIARVRMWVNLNLWQKLKLSRDDAKPLLRLKGFPSFPLVERQANEVDWWDMVCNVKKLINEKKEDGKVFWQNLAGYKRQEALRPYLSSEEDRKKGKKFARTQLGDLLLHLEKKHGEDWGKVYDEAWERIDKKVEGLSKHIKLEEERRSEDAQSKAALTDWLRAKASFVIEGLKEADKDEFCRCELKLQKWYGDLRGKPFAIEAENSILDISGFSKQYNCAFIWQKDGVKKLNLYLIINYFKGGKLRFKKIKPEAFEANRFYTVINKKSGEIVPMEVNFNFDDPNLIILPLAFGKRQGREFIWNDLLSLETGSLKLANGRVIEKTLYNRRTRQDEPALFVALTFERREVLDSSNIKPMNLIGVDRGENIPAVIALTDPEGCPLSRFKDSLGNPTHILRIGESYKEKQRTIQAKKEVEQRRAGGYSRKYASKAKNLADDMVRNTARDLLYYAVTQDAMLIFENLSRGFGRQGKRTFMAERQYTRMEDWLTAKLAYEGLPSKTYLSKTLAQYTSKTCSNCGFTITSADYDRMLEKLKKTATGWMTTINGKELKVEGQITYYNRYKRQNVVKDLSVELDRLSEESVNNDISSWTKGRSGEALSLLKKRFSHRPVQEKFVCLNCGFETHADEQAALNIARSWLFLRSQEYKKYQTNKTTGNTDKRAFVETWQSFYRKKLKEVWKPAV

SEQ ID NO: 37003 - protein, 978 aa, synthetic construct
  REGION 1..978: note = engineered CasX variant
QEIKRINKIRRRLVKDSNTKKAGKTGPMKTLLVRVMTPDLRERLENLRKKPENIPQPISNTSRANLNKLLTDYTEMKKAILHVYWEEFQKDPVGLMSRVAQPASKKIDQNKLKPEMDEKGNLTTAGFACSQCGQPLFVYKLEQVSEKGKAYTNYFGRCNVAEHEKLILLAQLKPEKDSDEAVTYSLGKFGQRALDFYSIHVTKESTHPVKPLAQIAGNRYASSPVGKALSDACMGTIASFLSKYQDIIIEHQKVVKGNQKRLESLRELAGKENLEYPSVTLPPQPHTKEGVDAYNEVIARVRMWVNLNLWQKLKLSRDDAKPLLRLKGFPSFPLVERQANEVDWWDMVCNVKKLINEKKEDGKVFWQNLAGYKRQEALRPYLSSEEDRKKGKKFARTQLGDLLLHLEKKHGEDWGKVYDEAWERIDKKVEGLSKHIKLEEERRSEDAQSKAALTDWLRAKASFVIEGLKEADKDEFCRCELKLQKWYGDLRGKPFAIEAENSILDISGFSKQYNCAFIWQKDGVKKLNLYLIINYFKGGKLRFKKIKPEAFEANRFYTVINKKSGEIVPMEVNFNFDDPNLIILPLAFGKRQGREFIWNDLLSLETGSLKLANGRVIEKTLYNRRTRQDEPALFVALTFERREVLDSSNIKPMNLIGVDRGENIPAVIALTDPEGCPLSRFKDSLGNPTHILRIGESYKEKQRTIQAKKEVEQRRAGGYSRKYASKAKNLADDMVRNTARDLLYYAVTQDAMLIFENLSRGFGRQGKRTFMAERQYTRMEDWLTAKLAYEGLPSKTYLSKTLAQYTSKTCSNCGFTITSADYDRMLEKLKKTATGWMTTINGKELKVEGQITYYNRYKRQNVVKDLSVELDRLSEESVNNDISSWTKGRSGEALSLLKKRFSHRPVQEKFVCLNCGFETHADEQAALNIARSWLFLRSQEYKKYQTNKTTGNTDKRAFVETWQSFYRKKLKEVWKPAV

SEQ ID NO: 37004 - protein, 978 aa, synthetic construct
  REGION 1..978: note = engineered CasX variant
QEIKRINKIRRRLVKDSNTKKAGKTGPMKTLLVRVMTPDLRERLENLRKKPENIPQPISNTSRANLNKLLTDYTEMKKAILHVYWEEFQKDPVGLMSRVAQPASKKIDQNKLKPEMDEKGNLTTAGFACSQCGQPLFVYKLEQVSEKGKAYTNYFGRCNVAEHEKLILLAQLKPEKDSDEAVTYSLGKFGQRALDFYSIHVTKESTHPVKPLAQIAGNRYASTPVGKALSDACMGTIASFLSKYQDIIIEHQKVVKGNQKRLESLRELAGKENLEYPSVTLPPQPHTKEGVDAYNEVIARVRMWVNLNLWQKLKLSRDDAKPLLRLKGFPSFPLVERQANEVDWWDMVCNVKKLINEKKEDGKVFWQNLAGYKRQEALRPYLSSEEDRKKGKKFARTQLGDLLLHLEKKHGEDWGKVYDEAWERIDKKVEGLSKHIKLEEERRSEDAQSKAALTDWLRAKASFVIEGLKEADKDEFCRCELKLQKWYGDLRGKPFAIEAENSILDISGFSKQYNCAFIWQKDGVKKLNLYLIINYFKGGKLRFKKIKPEAFEANRFYTVINKKSGEIVPMEVNFNFDDPNLIILPLAFGKRQGREFIWNDLLSLETGSLKLANGRVIEKTLYNRRTRQDEPALFVALTFERREVLDSSNIKPMNLIGVDRGENIPAVIALTDPEGCPLSRFKDSLGNPTHILRIGESYKEKQRTIQAKKEVEQRRAGGYSRKYASKAKNLADDMVRNTARDLLYYAVTQDAMLIFENLSRGFGRQGKRTFMAERQYTRMEDWLTAKLAYEGLPSKTYLSKTLAQYTSKTCSNCGFTITSADYDRMLEKLKKTATGWMTTINGKELKVEGQITYYNRYKRQNVVKDLSVELDRLSEESVNNDISSWTKGRSGEALSLLKKRFSHRPVQEKFVCLNCGFETHADEQAALNIARSWLFLRSQEYKKYQTNKTTGNTDKRAFVETWQSFYRKKLKEVWKPAV

SEQ ID NO: 37005 - protein, 978 aa, synthetic construct
  REGION 1..978: note = engineered CasX variant
QEIKRINKIRRRLVKDSNTKKAGKTGPMKTLLVRVMTPDLRERLENLRKKPENIPQPISNTSRANLNKLLTDYTEMKKAILHVYWEEFQKDPVGLMSRVAQPASKKIDQNKLKPEMDEKGNLTTAGFACSQCGQPLFVYKLEQVSEKGKAYTNYFGRCNVAEHEKLILLAQLKPEKDSDEAVTYSLGKFGQRALDFYSIHVTKESTHPVKPLAQIAGNRYASAPVGKALSDACMGTIASFLSKYQDIIIEHQKVVKGNQKRLESLRELAGKENLEYPSVTLPPQPHTKEGVDAYNEVIARVRMWVNLNLWQKLKLSRDDAKPLLRLKGFPSFPLVERQANEVDWWDMVCNVKKLINEKKEDGKVFWQNLAGYKRQEALRPYLSSEEDRKKGKKFARTQLGDLLLHLEKKHGEDWGKVYDEAWERIDKKVEGLSKHIKLEEERRSEDAQSKAALTDWLRAKASFVIEGLKEADKDEFCRCELKLQKWYGDLRGKPFAIEAENSILDISGFSKQYNCAFIWQKDGVKKLNLYLIINYFKGGKLRFKKIKPEAFEANRFYTVINKKSGEIVPMEVNFNFDDPNLIILPLAFGKRQGREFIWNDLLSLETGSLKLANGRVIEKTLYNRRTRQDEPALFVALTFERREVLDSSNIKPMNLIGVDRGENIPAVIALTDPEGCPLSRFKDSLGNPTHILRIGESYKEKQRTIQAKKEVEQRRAGGYSRKYASKAKNLADDMVRNTARDLLYYAVTQDAMLIFENLSRGFGRQGKRTFMAERQYTRMEDWLTAKLAYEGLPSKTYLSKTLAQYTSKTCSNCGFTITSADYDRMLEKLKKTATGWMTTINGKELKVEGQITYYNRYKRQNVVKDLSVELDRLSEESVNNDISSWTKGRSGEALSLLKKRFSHRPVQEKFVCLNCGFETHADEQAALNIARSWLFLRSQEYKKYQTNKTTGNTDKRAFVETWQSFYRKKLKEVWKPAV

SEQ ID NO: 37006 - protein, 978 aa, synthetic construct
  REGION 1..978: note = engineered CasX variant
QEIKRINKIRRRLVKDSNTKKAGKTGPMKTLLVRVMTPDLRERLENLRKKPENIPQPISNTSRANLNKLLTDYTEMKKAILHVYWEEFQKDPVGLMSRVAQPASKKIDQNKLKPEMDEKGNLTTAGFACSQCGQPLFVYKLEQVSEKGKAYTNYFGRCNVAEHEKLILLAQLKPEKDSDEAVTYSLGKFGQRALDFYSIHVTKESTHPVKPLAQIAGNRYASVPVGKALSDACMGTIASFLSKYQDIIIEHQKVVKGNQKRLESLRELAGKENLEYPSVTLPPQPHTKEGVDAYNEVIARVRMWVNLNLWQKLKLSRDDAKPLLRLKGFPSFPLVERQANEVDWWDMVCNVKKLINEKKEDGKVFWQNLAGYKRQEALRPYLSSEEDRKKGKKFARTQLGDLLLHLEKKHGEDWGKVYDEAWERIDKKVEGLSKHIKLEEERRSEDAQSKAALTDWLRAKASFVIEGLKEADKDEFCRCELKLQKWYGDLRGKPFAIEAENSILDISGFSKQYNCAFIWQKDGVKKLNLYLIINYFKGGKLRFKKIKPEAFEANRFYTVINKKSGEIVPMEVNFNFDDPNLIILPLAFGKRQGREFIWNDLLSLETGSLKLANGRVIEKTLYNRRTRQDEPALFVALTFERREVLDSSNIKPMNLIGVDRGENIPAVIALTDPEGCPLSRFKDSLGNPTHILRIGESYKEKQRTIQAKKEVEQRRAGGYSRKYASKAKNLADDMVRNTARDLLYYAVTQDAMLIFENLSRGFGRQGKRTFMAERQYTRMEDWLTAKLAYEGLPSKTYLSKTLAQYTSKTCSNCGFTITSADYDRMLEKLKKTATGWMTTINGKELKVEGQITYYNRYKRQNVVKDLSVELDRLSEESVNNDISSWTKGRSGEALSLLKKRFSHRPVQEKFVCLNCGFETHADEQAALNIARSWLFLRSQEYKKYQTNKTTGNTDKRAFVETWQSFYRKKLKEVWKPAV

SEQ ID NO: 37007 - protein, 978 aa, synthetic construct
  REGION 1..978: note = engineered CasX variant
QEIKRINKIRRRLVKDSNTKKAGKTGPMKTLLVRVMTPDLRERLENLRKKPENIPQPISNTSRANLNKLLTDYTEMKKAILHVYWEEFQKDPVGLMSRVAQPASKKIDQNKLKPEMDEKGNLTTAGFACSQCGQPLFVYKLEQVSEKGKAYTNYFGRCNVAEHEKLIKLAQLKPEKDSDEAVTYSLGKFGQRALDFYSIHVTKESTHPVKPLAQIAGNRYASGPVGKALSDACMGTIASFLSKYQDIIIEHQKVVKGNQKRLESLRELAGKENLEYPSVTLPPQPHTKEGVDAYNEVIARVRMWVNLNLWQKLKLSRDDAKPLLRLKGFPSFPLVERQANEVDWWDMVCNVKKLINEKKEDGKVFWQNLAGYKRQEALRPYLSSEEDRKKGKKFARTQLGDLLLHLEKKHGEDWGKVYDEAWERIDKKVEGLSKHIKLEEERRSEDAQSKAALTDWLRAKASFVIEGLKEADKDEFCRCELKLQKWYGDLRGKPFAIEAENSILDISGFSKQYNCAFIWQKDGVKKLNLYLIINYFKGGKLRFKKIKPEAFEANRFYTVINKKSGEIVPMEVNFNFDDPNLIILPLAFGKRQGREFIWNDLLSLETGSLKLANGRVIEKTLYNRRTRQDEPALFVALTFERREVLDSSNIKPMNLIGVDRGENIPAVIALTDPEGCPLSRFKDSLGNPTHILRIGESYKEKQRTIQAKKEVEQRRAGGYSRKYASKAKNLADDMVRNTARDLLYYAVTQDAMLIFENLSRGFGRQGKRTFMAERQYTRMEDWLTAKLAYEGLPSKTYLSKTLAQYTSKTCSNCGFTITSADYDRMLEKLKKTATGWMTTINGKELKVEGQITYYNRYKRQNVVKDLSVELDRLSEESVNNDISSWTKGRSGEALSLLKKRFSHRPVQEKFVCLNCGFETHADEQAALNIARSWLFLRSQEYKKYQTNKTTGNTDKRAFVETWQSFYRKKLKEVWKPAV

SEQ ID NO: 37008 - protein, 977 aa, synthetic construct
  REGION 1..977: note = engineered CasX variant
QEIKRINKIRRRLVKDSNTKKAGKTGPMKTLLVRVMTPDLRERLENLRKKPENIPQPISNTSRANLNKLLTDYTEMKKAILHVYWEEFQKDPVGLMSRVAQPASKKIDQNKLKPEMDEKGNLTTAGFACSQCGQPLFVYKLEQVSEKGKAYTNYFGRCNVAEHEKLILLAQLKPEKDSDEAVTYSLGKFGQRALDFYSIHVTKESTHPVKPLAQIAGNRYASPVGKALSDACMGTIASFLSKYQDIIIEHQKVVKGNQKRLESLRELAGKENLEYPSVTLPPQPHTKEGVDAYNEVIARVRMWVNLNLWQKLKLSRDDAKPLLRLKGFPSFPLVERQANEVDWWDMVCNVKKLINEKKEDGKVFWQNLAGYKRQEALRPYLSSEEDRKKGKKFARTQLGDLLLHLEKKHGEDWGKVYDEAWERIDKKVEGLSKHIKLEEERRSEDAQSKAALTDWLRAKASFVIEGLKEADKDEFCRCELKLQKWYGDLRGKPFAIEAENSILDISGFSKQYNCAFIWQKDGVKKLNLYLIINYFKGGKLRFKKIKPEAFEANRFYTVINKKSGEIVPMEVNFNFDDPNLIILPLAFGKRQGREFIWNDLLSLETGSLKLANGRVIEKTLYNRRTRQDEPALFVALTFERREVLDSSNIKPMNLIGVDRGENIPAVIALTDPEGCPLSRFKDSLGNPTHILRIGESYKEKQRTIQAKKEVEQRRAGGYSRKYASKAKNLADDMVRNTARDLLYYAVTQDAMLIFENLSRGFGRQGKRTFMAERQYTRMEDWLTAKLAYEGLPSKTYLSKTLAQYTSKTCSNCGFTITSADYDRMLEKLKKTATGWMTTINGKELKVEGQITYYNRYKRQNVVKDLSVELDRLSEESVNNDISSWTKGRSGEALSLLKKRFSHRPVQEKFVCLNCGFETHADEQAALNIARSWLFLRSQEYKKYQTNKTTGNTDKRAFVETWQSFYRKKLKEVWKPAV

SEQ ID NO: 37009 - protein, 978 aa, synthetic construct
  REGION 1..978: note = engineered CasX variant
QEIKRINKIRRRLVKDSNTKKAGKTGPMKTLLVRVMTPDLRERLENLRKKPENIPQPISNTSRANLNKLLTDYTEMKKAILHVYWEEFQKDPVGLMSRVAQPASKKIDQNKLKPEMDEKGNLTTAGFACSQCGQPLFVYKLEQVSEKGKAYTNYFGRCNVAEHEKLILLAQLKPEKDSDEAVTYSLGKFGQRALDFYSIHVTKESTHPVKPLAQIAGNRYASYPVGKALSDACMGTIASFLSKYQDIIIEHQKVVKGNQKRLESLRELAGKENLEYPSVTLPPQPHTKEGVDAYNEVIARVRMWVNLNLWQKLKLSRDDAKPLLRLKGFPSFPLVERQANEVDWWDMVCNVKKLINEKKEDGKVFWQNLAGYKRQEALRPYLSSEEDRKKGKKFARTQLGDLLLHLEKKHGEDWGKVYDEAWERIDKKVEGLSKHIKLEEERRSEDAQSKAALTDWLRAKASFVIEGLKEADKDEFCRCELKLQKWYGDLRGKPFAIEAENSILDISGFSKQYNCAFIWQKDGVKKLNLYLIINYFKGGKLRFKKIKPEAFEANRFYTVINKKSGEIVPMEVNFNFDDPNLIILPLAFGKRQGREFIWNDLLSLETGSLKLANGRVIEKTLYNRRTRQDEPALFVALTFERREVLDSSNIKPMNLIGVDRGENIPAVIALTDPEGCPLSRFKDSLGNPTHILRIGESYKEKQRTIQAKKEVEQRRAGGYSRKYASKAKNLADDMVRNTARDLLYYAVTQDAMLIFENLSRGFGRQGKRTFMAERQYTRMEDWLTAKLAYEGLPSKTYLSKTLAQYTSKTCSNCGFTITSADYDRVLEKLKKTATGWMTTINGKELKVEGQITYYNRYKRQNVVKDLSVELDRLSEESVNNDISSWTKGRQGEALSLLKKRFSHRPVQEKFVCLNCGFETHADEQAALNIARSWLFLRSQEYKKYQTNKTTGNTDKRAFVETWQSFYRKKLKEVWKPAV

SEQ ID NO: 37010 - protein, 978 aa, synthetic construct
  REGION 1..978: note = engineered CasX variant
QEIKRINKIRRRLVKDSNTKKAGKTGPMKTLLVRVMTPDLRERLENLRKKPENIPQPISNTSRANLNKLLTDYTEMKKAILHVYWEEFQKDPVGLMSRVAQPASKKIDQNKLKPEMDEKGNLTTAGFACSQCGQPLFVYKLEQVSEKGKAYTNYFGRCNVAEHEKLILLAQLKPEKDSDEAVTYSLGKFGQRALDFYSIHVTKESTHPVKPLAQIAGNRYASHPVGKALSDACMGTIASFLSKYQDIIIEHQKVVKGNQKRLESLRELAGKENLEYPSVTLPPQPHTKEGVDAYNEVIARVRMWVNLNLWQKLKLSRDDAKPLLRLKGFPSFPLVERQANEVDWWDMVCNVKKLINEKKEDGKVFWQNLAGYKRQEALRPYLSSEEDRKKGKKFARTQLGDLLLHLEKKHGEDWGKVYDEAWERIDKKVEGLSKHIKLEEERRSEDAQSKAALTDWLRAKASFVIEGLKEADKDEFCRCELKLQKWYGDLRGKPFAIEAENSILDISGFSKQYNCAFIWQKDGVKKLNLYLIINYFKGGKLRFKKIKPEAFEANRFYTVINKKSGEIVPMEVNFNFDDPNLIILPLAFGKRQGREFIWNDLLSLETGSLKLANGRVIEKTLYNRRTRQDEPALFVALTFERREVLDSSNIKPMNLIGVDRGENIPAVIALTDPEGCPLSRFKDSLGNPTHILRIGESYKEKQRTIQAKKEVEQRRAGGYSRKYASKAKNLADDMVRNTARDLLYYAVTQDAMLIFENLSRGFGRQGKRTFMAERQYTRMEDWLTAKLAYEGLPSKTYLSKTLAQYTSKTCSNCGFTITSADYDRVLEKLKKTATGWMTTINGKELKVEGQITYYNRYKRQNVVKDLSVELDRLSEESVNNDISSWTKGRQGEALSLLKKRFSHRPVQEKFVCLNCGFETHADEQAALNIARSWLFLRSQEYKKYQTNKTTGNTDKRAFVETWQSFYRKKLKEVWKPAV

SEQ ID NO: 37011 - protein, 978 aa, synthetic construct
  REGION 1..978: note = engineered CasX variant
QEIKRINKIRRRLVKDSNTKKAGKTGPMKTLLVRVMTPDLRERLENLRKKPENIPQPISNTSRANLNKLLTDYTEMKKAILHVYWEEFQKDPVGLMSRVAQPASKKIDQNKLKPEMDEKGNLTTAGFACSQCGQPLFVYKLEQVSEKGKAYTNYFGRCNVAEHEKLILLAQLKPEKDSDEAVTYSLGKFGQRALDFYSIHVTKESTHPVKPLAQIAGNRYASSPVGKALSDACMGTIASFLSKYQDIIIEHQKVVKGNQKRLESLRELAGKENLEYPSVTLPPQPHTKEGVDAYNEVIARVRMWVNLNLWQKLKLSRDDAKPLLRLKGFPSFPLVERQANEVDWWDMVCNVKKLINEKKEDGKVFWQNLAGYKRQEALRPYLSSEEDRKKGKKFARTQLGDLLLHLEKKHGEDWGKVYDEAWERIDKKVEGLSKHIKLEEERRSEDAQSKAALTDWLRAKASFVIEGLKEADKDEFCRCELKLQKWYGDLRGKPFAIEAENSILDISGFSKQYNCAFIWQKDGVKKLNLYLIINYFKGGKLRFKKIKPEAFEANRFYTVINKKSGEIVPMEVNFNFDDPNLIILPLAFGKRQGREFIWNDLLSLETGSLKLANGRVIEKTLYNRRTRQDEPALFVALTFERREVLDSSNIKPMNLIGVDRGENIPAVIALTDPEGCPLSRFKDSLGNPTHILRIGESYKEKQRTIQAKKEVEQRRAGGYSRKYASKAKNLADDMVRNTARDLLYYAVTQDAMLIFENLSRGFGRQGKRTFMAERQYTRMEDWLTAKLAYEGLPSKTYLSKTLAQYTSKTCSNCGFTITSADYDRVLEKLKKTATGWMTTINGKELKVEGQITYYNRYKRQNVVKDLSVELDRLSEESVNNDISSWTKGRQGEALSLLKKRFSHRPVQEKFVCLNCGFETHADEQAALNIARSWLFLRSQEYKKYQTNKTTGNTDKRAFVETWQSFYRKKLKEVWKPAV

SEQ ID NO: 37012 - protein, 978 aa, synthetic construct
  REGION 1..978: note = engineered CasX variant
QEIKRINKIRRRLVKDSNTKKAGKTGPMKTLLVRVMTPDLRERLENLRKKPENIPQPISNTSRANLNKLLTDYTEMKKAILHVYWEEFQKDPVGLMSRVAQPASKKIDQNKLKPEMDEKGNLTTAGFACSQCGQPLFVYKLEQVSEKGKAYTNYFGRCNVAEHEKLILLAQLKPEKDSDEAVTYSLGKFGQRALDFYSIHVTKESTHPVKPLAQIAGNRYASTPVGKALSDACMGTIASFLSKYQDIIIEHQKVVKGNQKRLESLRELAGKENLEYPSVTLPPQPHTKEGVDAYNEVIARVRMWVNLNLWQKLKLSRDDAKPLLRLKGFPSFPLVERQANEVDWWDMVCNVKKLINEKKEDGKVFWQNLAGYKRQEALRPYLSSEEDRKKGKKFARTQLGDLLLHLEKKHGEDWGKVYDEAWERIDKKVEGLSKHIKLEEERRSEDAQSKAALTDWLRAKASFVIEGLKEADKDEFCRCELKLQKWYGDLRGKPFAIEAENSILDISGFSKQYNCAFIWQKDGVKKLNLYLIINYFKGGKLRFKKIKPEAFEANRFYTVINKKSGEIVPMEVNFNFDDPNLIILPLAFGKRQGREFIWNDLLSLETGSLKLANGRVIEKTLYNRRTRQDEPALFVALTFERREVLDSSNIKPMNLIGVDRGENIPAVIALTDPEGCPLSRFKDSLGNPTHILRIGESYKEKQRTIQAKKEVEQRRAGGYSRKYASKAKNLADDMVRNTARDLLYYAVTQDAMLIFENLSRGFGRQGKRTFMAERQYTRMEDWLTAKLAYEGLPSKTYLSKTLAQYTSKTCSNCGFTITSADYDRVLEKLKKTATGWMTTINGKELKVEGQITYYNRYKRQNVVKDLSVELDRLSEESVNNDISSWTKGRQGEALSLLKKRFSHRPVQEKFVCLNCGFETHADEQAALNIARSWLFLRSQEYKKYQTNKTTGNTDKRAFVETWQSFYRKKLKEVWKPAV

SEQ ID NO: 37013 - protein, 978 aa, synthetic construct
  REGION 1..978: note = engineered CasX variant
QEIKRINKIRRRLVKDSNTKKAGKTGPMKTLLVRVMTPDLRERLENLRKKPENIPQPISNTSRANLNKLLTDYTEMKKAILHVYWEEFQKDPVGLMSRVAQPASKKIDQNKLKPEMDEKGNLTTAGFACSQCGQPLFVYKLEQVSEKGKAYTNYFGRCNVAEHEKLILLAQLKPEKDSDEAVTYSLGKFGQRALDFYSIHVTKESTHPVKPLAQIAGNRYASAPVGKALSDACMGTIASFLSKYQDIIIEHQKVVKGNQKRLESLRELAGKENLEYPSVTLPPQPHTKEGVDAYNEVIARVRMWVNLNLWQKLKLSRDDAKPLLRLKGFPSFPLVERQANEVDWWDMVCNVKKLINEKKEDGKVFWQNLAGYKRQEALRPYLSSEEDRKKGKKFARTQLGDLLLHLEKKHGEDWGKVYDEAWERIDKKVEGLSKHIKLEEERRSEDAQSKAALTDWLRAKASFVIEGLKEADKDEFCRCELKLQKWYGDLRGKPFAIEAENSILDISGFSKQYNCAFIWQKDGVKKLNLYLIINYFKGGKLRFKKIKPEAFEANRFYTVINKKSGEIVPMEVNFNFDDPNLIILPLAFGKRQGREFIWNDLLSLETGSLKLANGRVIEKTLYNRRTRQDEPALFVALTFERREVLDSSNIKPMNLIGVDRGENIPAVIALTDPEGCPLSRFKDSLGNPTHILRIGESYKEKQRTIQAKKEVEQRRAGGYSRKYASKAKNLADDMVRNTARDLLYYAVTQDAMLIFENLSRGFGRQGKRTFMAERQYTRMEDWLTAKLAYEGLPSKTYLSKTLAQYTSKTCSNCGFTITSADYDRVLEKLKKTATGWMTTINGKELKVEGQITYYNRYKRQNVVKDLSVELDRLSEESVNNDISSWTKGRQGEALSLLKKRFSHRPVQEKFVCLNCGFETHADEQAALNIARSWLFLRSQEYKKYQTNKTTGNTDKRAFVETWQSFYRKKLKEVWKPAV

SEQ ID NO: 37014 - protein, 978 aa, synthetic construct
  REGION 1..978: note = engineered CasX variant
QEIKRINKIRRRLVKDSNTKKAGKTGPMKTLLVRVMTPDLRERLENLRKKPENIPQPISNTSRANLNKLLTDYTEMKKAILHVYWEEFQKDPVGLMSRVAQPASKKIDQNKLKPEMDEKGNLTTAGFACSQCGQPLFVYKLEQVSEKGKAYTNYFGRCNVAEHEKLILLAQLKPEKDSDEAVTYSLGKFGQRALDFYSIHVTKESTHPVKPLAQIAGNRYASVPVGKALSDACMGTIASFLSKYQDIIIEHQKVVKGNQKRLESLRELAGKENLEYPSVTLPPQPHTKEGVDAYNEVIARVRMWVNLNLWQKLKLSRDDAKPLLRLKGFPSFPLVERQANEVDWWDMVCNVKKLINEKKEDGKVFWQNLAGYKRQEALRPYLSSEEDRKKGKKFARTQLGDLLLHLEKKHGEDWGKVYDEAWERIDKKVEGLSKHIKLEEERRSEDAQSKAALTDWLRAKASFVIEGLKEADKDEFCRCELKLQKWYGDLRGKPFAIEAENSILDISGFSKQYNCAFIWQKDGVKKLNLYLIINYFKGGKLRFKKIKPEAFEANRFYTVINKKSGEIVPMEVNFNFDDPNLIILPLAFGKRQGREFIWNDLLSLETGSLKLANGRVIEKTLYNRRTRQDEPALFVALTFERREVLDSSNIKPMNLIGVDRGENIPAVIALTDPEGCPLSRFKDSLGNPTHILRIGESYKEKQRTIQAKKEVEQRRAGGYSRKYASKAKNLADDMVRNTARDLLYYAVTQDAMLIFENLSRGFGRQGKRTFMAERQYTRMEDWLTAKLAYEGLPSKTYLSKTLAQYTSKTCSNCGFTITSADYDRVLEKLKKTATGWMTTINGKELKVEGQITYYNRYKRQNVVKDLSVELDRLSEESVNNDISSWTKGRQGEALSLLKKRFSHRPVQEKFVCLNCGFETHADEQAALNIARSWLFLRSQEYKKYQTNKTTGNTDKRAFVETWQSFYRKKLKEVWKPAV

SEQ ID NO: 37015 - protein, 978 aa, synthetic construct
  REGION 1..978: note = engineered CasX variant
QEIKRINKIRRRLVKDSNTKKAGKTGPMKTLLVRVMTPDLRERLENLRKKPENIPQPISNTSRANLNKLLTDYTEMKKAILHVYWEEFQKDPVGLMSRVAQPASKKIDQNKLKPEMDEKGNLTTAGFACSQCGQPLFVYKLEQVSEKGKAYTNYFGRCNVAEHEKLIKLAQLKPEKDSDEAVTYSLGKFGQRALDFYSIHVTKESTHPVKPLAQIAGNRYASGPVGKALSDACMGTIASFLSKYQDIIIEHQKVVKGNQKRLESLRELAGKENLEYPSVTLPPQPHTKEGVDAYNEVIARVRMWVNLNLWQKLKLSRDDAKPLLRLKGFPSFPLVERQANEVDWWDMVCNVKKLINEKKEDGKVFWQNLAGYKRQEALRPYLSSEEDRKKGKKFARTQLGDLLLHLEKKHGEDWGKVYDEAWERIDKKVEGLSKHIKLEEERRSEDAQSKAALTDWLRAKASFVIEGLKEADKDEFCRCELKLQKWYGDLRGKPFAIEAENSILDISGFSKQYNCAFIWQKDGVKKLNLYLIINYFKGGKLRFKKIKPEAFEANRFYTVINKKSGEIVPMEVNFNFDDPNLIILPLAFGKRQGREFIWNDLLSLETGSLKLANGRVIEKTLYNRRTRQDEPALFVALTFERREVLDSSNIKPMNLIGVDRGENIPAVIALTDPEGCPLSRFKDSLGNPTHILRIGESYKEKQRTIQAKKEVEQRRAGGYSRKYASKAKNLADDMVRNTARDLLYYAVTQDAMLIFENLSRGFGRQGKRTFMAERQYTRMEDWLTAKLAYEGLPSKTYLSKTLAQYTSKTCSNCGFTITSADYDRVLEKLKKTATGWMTTINGKELKVEGQITYYNRYKRQNVVKDLSVELDRLSEESVNNDISSWTKGRQGEALSLLKKRFSHRPVQEKFVCLNCGFETHADEQAALNIARSWLFLRSQEYKKYQTNKTTGNTDKRAFVETWQSFYRKKLKEVWKPAV

SEQ ID NO: 37016 - protein, 977 aa, synthetic construct
  REGION 1..977: note = engineered CasX variant
QEIKRINKIRRRLVKDSNTKKAGKTGPMKTLLVRVMTPDLRERLENLRKKPENIPQPISNTSRANLNKLLTDYTEMKKAILHVYWEEFQKDPVGLMSRVAQPASKKIDQNKLKPEMDEKGNLTTAGFACSQCGQPLFVYKLEQVSEKGKAYTNYFGRCNVAEHEKLILLAQLKPEKDSDEAVTYSLGKFGQRALDFYSIHVTKESTHPVKPLAQIAGNRYASPVGKALSDACMGTIASFLSKYQDIIIEHQKVVKGNQKRLESLRELAGKENLEYPSVTLPPQPHTKEGVDAYNEVIARVRMWVNLNLWQKLKLSRDDAKPLLRLKGFPSFPLVERQANEVDWWDMVCNVKKLINEKKEDGKVFWQNLAGYKRQEALRPYLSSEEDRKKGKKFARTQLGDLLLHLEKKHGEDWGKVYDEAWERIDKKVEGLSKHIKLEEERRSEDAQSKAALTDWLRAKASFVIEGLKEADKDEFCRCELKLQKWYGDLRGKPFAIEAENSILDISGFSKQYNCAFIWQKDGVKKLNLYLIINYFKGGKLRFKKIKPEAFEANRFYTVINKKSGEIVPMEVNFNFDDPNLIILPLAFGKRQGREFIWNDLLSLETGSLKLANGRVIEKTLYNRRTRQDEPALFVALTFERREVLDSSNIKPMNLIGVDRGENIPAVIALTDPEGCPLSRFKDSLGNPTHILRIGESYKEKQRTIQAKKEVEQRRAGGYSRKYASKAKNLADDMVRNTARDLLYYAVTQDAMLIFENLSRGFGRQGKRTFMAERQYTRMEDWLTAKLAYEGLPSKTYLSKTLAQYTSKTCSNCGFTITSADYDRVLEKLKKTATGWMTTINGKELKVEGQITYYNRYKRQNVVKDLSVELDRLSEESVNNDISSWTKGRQGEALSLLKKRFSHRPVQEKFVCLNCGFETHADEQAALNIARSWLFLRSQEYKKYQTNKTTGNTDKRAFVETWQSFYRKKLKEVWKPAV

SEQ ID NO: 37017 - protein, 978 aa, synthetic construct
  REGION 1..978: note = engineered CasX variant
QEIKRINKIRRRLVKDSNTKKAGKTGPMKTLLVRVMTPDLRERLENLRKKPENIPQPISNTSRANLNKLLTDYTEMKKAILHVYWEEFQKDPVGLMSRVAQPASKKIDQNKLKPEMDEKGNLTTAGFACSQCGQPLFVYKLEQVSEKGKAYTNYFGRCNVAEHEKLILLAQLKPEKDSDEAVTYSLGKFGQRALDFYSIHVTKESTHPVKPLAQIAGNRYASYPVGKALSDACMGTIASFLSKYQDIIIEHQKVVKGNQKRLESLRELAGKENLEYPSVTLPPQPHTKEGVDAYNEVIARVRMWVNLNLWQKLKLSRDDAKPLLRLKGFPSFPLVERQANEVDWWDMVCNVKKLINEKKEDGKVFWQNLAGYKRQEALRPYLSSEEDRKKGKKFARTQLGDLLLHLEKKHGEDWGKVYDEAWERIDKKVEGLSKHIKLEEERRSEDAQSKAALTDWLRAKASFVIEGLKEADKDEFCRCELKLQKWYGDLRGKPFAIEAENSILDISGFSKQYNCAFIWQKDGVKKLNLYLIINYFKGGKLRFKKIKPEAFEANRFYTVINKKSGEIVPMEVNFNFDDPNLIILPLAFGKRQGREFIWNDLLSLETGSLKLANGRVIEKTLYNRRTRQDEPALFVALTFERREVLDSSNIKPMNLIGVDRGENIPAVIALTDPEGCPLSRFKDSLGNPTHILRIGESYKEKQRTIQAKKEVEQRRAGGYSRKYASKAKNLADDMVRNTARDLLYYAVTQDAMLIFENLSRGFGRQGKRTFMAERQYTRMEDWLTAKLAYEGLPSKTYLSKTLAQYTSKTCSNCGFTITSADYDRVLEKLKKTATGWMTTINGKELKVEGQITYYNRYKRQNVVKDLSVELDRLSEESVNNDISSWTKGRSGEALSLLKKRFSHRPVQEKFVCLNCEFETHADEQAALNIARSWLFLRSQEYKKYQTNKTTGNTDKRAFVETWQSFYRKKLKEVWKPAV

SEQ ID NO: 37018 - protein, 978 aa, synthetic construct
  REGION 1..978: note = engineered CasX variant
QEIKRINKIRRRLVKDSNTKKAGKTGPMKTLLVRVMTPDLRERLENLRKKPENIPQPISNTSRANLNKLLTDYTEMKKAILHVYWEEFQKDPVGLMSRVAQPASKKIDQNKLKPEMDEKGNLTTAGFACSQCGQPLFVYKLEQVSEKGKAYTNYFGRCNVAEHEKLILLAQLKPEKDSDEAVTYSLGKFGQRALDFYSIHVTKESTHPVKPLAQIAGNRYASHPVGKALSDACMGTIASFLSKYQDIIIEHQKVVKGNQKRLESLRELAGKENLEYPSVTLPPQPHTKEGVDAYNEVIARVRMWVNLNLWQKLKLSRDDAKPLLRLKGFPSFPLVERQANEVDWWDMVCNVKKLINEKKEDGKVFWQNLAGYKRQEALRPYLSSEEDRKKGKKFARTQLGDLLLHLEKKHGEDWGKVYDEAWERIDKKVEGLSKHIKLEEERRSEDAQSKAALTDWLRAKASFVIEGLKEADKDEFCRCELKLQKWYGDLRGKPFAIEAENSILDISGFSKQYNCAFIWQKDGVKKLNLYLIINYFKGGKLRFKKIKPEAFEANRFYTVINKKSGEIVPMEVNFNFDDPNLIILPLAFGKRQGREFIWNDLLSLETGSLKLANGRVIEKTLYNRRTRQDEPALFVALTFERREVLDSSNIKPMNLIGVDRGENIPAVIALTDPEGCPLSRFKDSLGNPTHILRIGESYKEKQRTIQAKKEVEQRRAGGYSRKYASKAKNLADDMVRNTARDLLYYAVTQDAMLIFENLSRGFGRQGKRTFMAERQYTRMEDWLTAKLAYEGLPSKTYLSKTLAQYTSKTCSNCGFTITSADYDRVLEKLKKTATGWMTTINGKELKVEGQITYYNRYKRQNVVKDLSVELDRLSEESVNNDISSWTKGRSGEALSLLKKRFSHRPVQEKFVCLNCEFETHADEQAALNIARSWLFLRSQEYKKYQTNKTTGNTDKRAFVETWQSFYRKKLKEVWKPAV

SEQ ID NO: 37019 - protein, 978 aa, synthetic construct
  REGION 1..978: note = engineered CasX variant
QEIKRINKIRRRLVKDSNTKKAGKTGPMKTLLVRVMTPDLRERLENLRKKPENIPQPISNTSRANLNKLLTDYTEMKKAILHVYWEEFQKDPVGLMSRVAQPASKKIDQNKLKPEMDEKGNLTTAGFACSQCGQPLFVYKLEQVSEKGKAYTNYFGRCNVAEHEKLILLAQLKPEKDSDEAVTYSLGKFGQRALDFYSIHVTKESTHPVKPLAQIAGNRYASSPVGKALSDACMGTIASFLSKYQDIIIEHQKVVKGNQKRLESLRELAGKENLEYPSVTLPPQPHTKEGVDAYNEVIARVRMWVNLNLWQKLKLSRDDAKPLLRLKGFPSFPLVERQANEVDWWDMVCNVKKLINEKKEDGKVFWQNLAGYKRQEALRPYLSSEEDRKKGKKFARTQLGDLLLHLEKKHGEDWGKVYDEAWERIDKKVEGLSKHIKLEEERRSEDAQSKAALTDWLRAKASFVIEGLKEADKDEFCRCELKLQKWYGDLRGKPFAIEAENSILDISGFSKQYNCAFIWQKDGVKKLNLYLIINYFKGGKLRFKKIKPEAFEANRFYTVINKKSGEIVPMEVNFNFDDPNLIILPLAFGKRQGREFIWNDLLSLETGSLKLANGRVIEKTLYNRRTRQDEPALFVALTFERREVLDSSNIKPMNLIGVDRGENIPAVIALTDPEGCPLSRFKDSLGNPTHILRIGESYKEKQRTIQAKKEVEQRRAGGYSRKYASKAKNLADDMVRNTARDLLYYAVTQDAMLIFENLSRGFGRQGKRTFMAERQYTRMEDWLTAKLAYEGLPSKTYLSKTLAQYTSKTCSNCGFTITSADYDRVLEKLKKTATGWMTTINGKELKVEGQITYYNRYKRQNVVKDLSVELDRLSEESVNNDISSWTKGRSGEALSLLKKRFSHRPVQEKFVCLNCEFETHADEQAALNIARSWLFLRSQEYKKYQTNKTTGNTDKRAFVETWQSFYRKKLKEVWKPAV

SEQ ID NO: 37020 - protein, 978 aa, synthetic construct
  REGION 1..978: note = engineered CasX variant
QEIKRINKIRRRLVKDSNTKKAGKTGPMKTLLVRVMTPDLRERLENLRKKPENIPQPISNTSRANLNKLLTDYTEMKKAILHVYWEEFQKDPVGLMSRVAQPASKKIDQNKLKPEMDEKGNLTTAGFACSQCGQPLFVYKLEQVSEKGKAYTNYFGRCNVAEHEKLILLAQLKPEKDSDEAVTYSLGKFGQRALDFYSIHVTKESTHPVKPLAQIAGNRYASTPVGKALSDACMGTIASFLSKYQDIIIEHQKVVKGNQKRLESLRELAGKENLEYPSVTLPPQPHTKEGVDAYNEVIARVRMWVNLNLWQKLKLSRDDAKPLLRLKGFPSFPLVERQANEVDWWDMVCNVKKLINEKKEDGKVFWQNLAGYKRQEALRPYLSSEEDRKKGKKFARTQLGDLLLHLEKKHGEDWGKVYDEAWERIDKKVEGLSKHIKLEEERRSEDAQSKAALTDWLRAKASFVIEGLKEADKDEFCRCELKLQKWYGDLRGKPFAIEAENSILDISGFSKQYNCAFIWQKDGVKKLNLYLIINYFKGGKLRFKKIKPEAFEANRFYTVINKKSGEIVPMEVNFNFDDPNLIILPLAFGKRQGREFIWNDLLSLETGSLKLANGRVIEKTLYNRRTRQDEPALFVALTFERREVLDSSNIKPMNLIGVDRGENIPAVIALTDPEGCPLSRFKDSLGNPTHILRIGESYKEKQRTIQAKKEVEQRRAGGYSRKYASKAKNLADDMVRNTARDLLYYAVTQDAMLIFENLSRGFGRQGKRTFMAERQYTRMEDWLTAKLAYEGLPSKTYLSKTLAQYTSKTCSNCGFTITSADYDRVLEKLKKTATGWMTTINGKELKVEGQITYYNRYKRQNVVKDLSVELDRLSEESVNNDISSWTKGRSGEALSLLKKRFSHRPVQEKFVCLNCEFETHADEQAALNIARSWLFLRSQEYKKYQTNKTTGNTDKRAFVETWQSFYRKKLKEVWKPAV

SEQ ID NO: 37021 - protein, 978 aa, synthetic construct
  REGION 1..978: note = engineered CasX variant
QEIKRINKIRRRLVKDSNTKKAGKTGPMKTLLVRVMTPDLRERLENLRKKPENIPQPISNTSRANLNKLLTDYTEMKKAILHVYWEEFQKDPVGLMSRVAQPASKKIDQNKLKPEMDEKGNLTTAGFACSQCGQPLFVYKLEQVSEKGKAYTNYFGRCNVAEHEKLILLAQLKPEKDSDEAVTYSLGKFGQRALDFYSIHVTKESTHPVKPLAQIAGNRYASAPVGKALSDACMGTIASFLSKYQDIIIEHQKVVKGNQKRLESLRELAGKENLEYPSVTLPPQPHTKEGVDAYNEVIARVRMWVNLNLWQKLKLSRDDAKPLLRLKGFPSFPLVERQANEVDWWDMVCNVKKLINEKKEDGKVFWQNLAGYKRQEALRPYLSSEEDRKKGKKFARTQLGDLLLHLEKKHGEDWGKVYDEAWERIDKKVEGLSKHIKLEEERRSEDAQSKAALTDWLRAKASFVIEGLKEADKDEFCRCELKLQKWYGDLRGKPFAIEAENSILDISGFSKQYNCAFIWQKDGVKKLNLYLIINYFKGGKLRFKKIKPEAFEANRFYTVINKKSGEIVPMEVNFNFDDPNLIILPLAFGKRQGREFIWNDLLSLETGSLKLANGRVIEKTLYNRRTRQDEPALFVALTFERREVLDSSNIKPMNLIGVDRGENIPAVIALTDPEGCPLSRFKDSLGNPTHILRIGESYKEKQRTIQAKKEVEQRRAGGYSRKYASKAKNLADDMVRNTARDLLYYAVTQDAMLIFENLSRGFGRQGKRTFMAERQYTRMEDWLTAKLAYEGLPSKTYLSKTLAQYTSKTCSNCGFTITSADYDRVLEKLKKTATGWMTTINGKELKVEGQITYYNRYKRQNVVKDLSVELDRLSEESVNNDISSWTKGRSGEALSLLKKRFSHRPVQEKFVCLNCEFETHADEQAALNIARSWLFLRSQEYKKYQTNKTTGNTDKRAFVETWQSFYRKKLKEVWKPAV

SEQ ID NO: 37022 - protein, 978 aa, synthetic construct
  REGION 1..978: note = engineered CasX variant
QEIKRINKIRRRLVKDSNTKKAGKTGPMKTLLVRVMTPDLRERLENLRKKPENIPQPISNTSRANLNKLLTDYTEMKKAILHVYWEEFQKDPVGLMSRVAQPASKKIDQNKLKPEMDEKGNLTTAGFACSQCGQPLFVYKLEQVSEKGKAYTNYFGRCNVAEHEKLILLAQLKPEKDSDEAVTYSLGKFGQRALDFYSIHVTKESTHPVKPLAQIAGNRYASVPVGKALSDACMGTIASFLSKYQDIIIEHQKVVKGNQKRLESLRELAGKENLEYPSVTLPPQPHTKEGVDAYNEVIARVRMWVNLNLWQKLKLSRDDAKPLLRLKGFPSFPLVERQANEVDWWDMVCNVKKLINEKKEDGKVFWQNLAGYKRQEALRPYLSSEEDRKKGKKFARTQLGDLLLHLEKKHGEDWGKVYDEAWERIDKKVEGLSKHIKLEEERRSEDAQSKAALTDWLRAKASFVIEGLKEADKDEFCRCELKLQKWYGDLRGKPFAIEAENSILDISGFSKQYNCAFIWQKDGVKKLNLYLIINYFKGGKLRFKKIKPEAFEANRFYTVINKKSGEIVPMEVNFNFDDPNLIILPLAFGKRQGREFIWNDLLSLETGSLKLANGRVIEKTLYNRRTRQDEPALFVALTFERREVLDSSNIKPMNLIGVDRGENIPAVIALTDPEGCPLSRFKDSLGNPTHILRIGESYKEKQRTIQAKKEVEQRRAGGYSRKYASKAKNLADDMVRNTARDLLYYAVTQDAMLIFENLSRGFGRQGKRTFMAERQYTRMEDWLTAKLAYEGLPSKTYLSKTLAQYTSKTCSNCGFTITSADYDRVLEKLKKTATGWMTTINGKELKVEGQITYYNRYKRQNVVKDLSVELDRLSEESVNNDISSWTKGRSGEALSLLKKRFSHRPVQEKFVCLNCEFETHADEQAALNIARSWLFLRSQEYKKYQTNKTTGNTDKRAFVETWQSFYRKKLKEVWKPAV

SEQ ID NO: 37023 - protein, 978 aa, synthetic construct
  REGION 1..978: note = engineered CasX variant
QEIKRINKIRRRLVKDSNTKKAGKTGPMKTLLVRVMTPDLRERLENLRKKPENIPQPISNTSRANLNKLLTDYTEMKKAILHVYWEEFQKDPVGLMSRVAQPASKKIDQNKLKPEMDEKGNLTTAGFACSQCGQPLFVYKLEQVSEKGKAYTNYFGRCNVAEHEKLIKLAQLKPEKDSDEAVTYSLGKFGQRALDFYSIHVTKESTHPVKPLAQIAGNRYASGPVGKALSDACMGTIASFLSKYQDIIIEHQKVVKGNQKRLESLRELAGKENLEYPSVTLPPQPHTKEGVDAYNEVIARVRMWVNLNLWQKLKLSRDDAKPLLRLKGFPSFPLVERQANEVDWWDMVCNVKKLINEKKEDGKVFWQNLAGYKRQEALRPYLSSEEDRKKGKKFARTQLGDLLLHLEKKHGEDWGKVYDEAWERIDKKVEGLSKHIKLEEERRSEDAQSKAALTDWLRAKASFVIEGLKEADKDEFCRCELKLQKWYGDLRGKPFAIEAENSILDISGFSKQYNCAFIWQKDGVKKLNLYLIINYFKGGKLRFKKIKPEAFEANRFYTVINKKSGEIVPMEVNFNFDDPNLIILPLAFGKRQGREFIWNDLLSLETGSLKLANGRVIEKTLYNRRTRQDEPALFVALTFERREVLDSSNIKPMNLIGVDRGENIPAVIALTDPEGCPLSRFKDSLGNPTHILRIGESYKEKQRTIQAKKEVEQRRAGGYSRKYASKAKNLADDMVRNTARDLLYYAVTQDAMLIFENLSRGFGRQGKRTFMAERQYTRMEDWLTAKLAYEGLPSKTYLSKTLAQYTSKTCSNCGFTITSADYDRVLEKLKKTATGWMTTINGKELKVEGQITYYNRYKRQNVVKDLSVELDRLSEESVNNDISSWTKGRSGEALSLLKKRFSHRPVQEKFVCLNCEFETHADEQAALNIARSWLFLRSQEYKKYQTNKTTGNTDKRAFVETWQSFYRKKLKEVWKPAV

SEQ ID NO: 37024 - protein, 977 aa, synthetic construct
  REGION 1..977: note = engineered CasX variant
QEIKRINKIRRRLVKDSNTKKAGKTGPMKTLLVRVMTPDLRERLENLRKKPENIPQPISNTSRANLNKLLTDYTEMKKAILHVYWEEFQKDPVGLMSRVAQPASKKIDQNKLKPEMDEKGNLTTAGFACSQCGQPLFVYKLEQVSEKGKAYTNYFGRCNVAEHEKLILLAQLKPEKDSDEAVTYSLGKFGQRALDFYSIHVTKESTHPVKPLAQIAGNRYASPVGKALSDACMGTIASFLSKYQDIIIEHQKVVKGNQKRLESLRELAGKENLEYPSVTLPPQPHTKEGVDAYNEVIARVRMWVNLNLWQKLKLSRDDAKPLLRLKGFPSFPLVERQANEVDWWDMVCNVKKLINEKKEDGKVFWQNLAGYKRQEALRPYLSSEEDRKKGKKFARTQLGDLLLHLEKKHGEDWGKVYDEAWERIDKKVEGLSKHIKLEEERRSEDAQSKAALTDWLRAKASFVIEGLKEADKDEFCRCELKLQKWYGDLRGKPFAIEAENSILDISGFSKQYNCAFIWQKDGVKKLNLYLIINYFKGGKLRFKKIKPEAFEANRFYTVINKKSGEIVPMEVNFNFDDPNLIILPLAFGKRQGREFIWNDLLSLETGSLKLANGRVIEKTLYNRRTRQDEPALFVALTFERREVLDSSNIKPMNLIGVDRGENIPAVIALTDPEGCPLSRFKDSLGNPTHILRIGESYKEKQRTIQAKKEVEQRRAGGYSRKYASKAKNLADDMVRNTARDLLYYAVTQDAMLIFENLSRGFGRQGKRTFMAERQYTRMEDWLTAKLAYEGLPSKTYLSKTLAQYTSKTCSNCGFTITSADYDRVLEKLKKTATGWMTTINGKELKVEGQITYYNRYKRQNVVKDLSVELDRLSEESVNNDISSWTKGRSGEALSLLKKRFSHRPVQEKFVCLNCEFETHADEQAALNIARSWLFLRSQEYKKYQTNKTTGNTDKRAFVETWQSFYRKKLKEVWKPAV

SEQ ID NO: 37025 - protein, 979 aa, synthetic construct
  REGION 1..979: note = engineered CasX variant
QEIKRINKIRRRLVKDSNTKKAGKTGPMKTLLVRVMTPDLRERLENLRKKPENIPQPISNTSRANLNKLLTDYTEMKKAILHVYWEEFQKDPVGLMSRVAQPASKKIDQNKLKPEMDEKGNLTTAGFACSQCGQPLFVYKLEQVSEKGKAYTNYFGRCNVAEHEKLILLAQLKPEKDSDEAVTYSLGKFGQRALDFYSIHVTKESTHPVKPLAQIAGNRYASYPVGKALSDACMGTIASFLSKYQDIIIEHQKVVKGNQKRLESLRELAGKENLEYPSVTLPPQPHTKEGVDAYNEVIARVRMWVNLNLWQKLKLSRDDAKPLLRLKGFPSFPLVERQANEVDWWDMVCNVKKLINEKKEDGKVFWQNLAGYKRQEALRPYLSSEEDRKKGKKFARTQLGDLLLHLEKKHGEDWGKVYDEAWERIDKKVEGLSKHIKLEEERRSEDAQSKAALTDWLRAKASFVIEGLKEADKDEFCRCELKLQKWYGDLRGKPFAIEAENSILDISGFSKQYNCAFIWQKDGVKKLNLYLIINYFKGGKLRFKKIKPEAFEANRFYTVINKKSGEIVPMEVNFNFDDPNLIILPLAFGKRQGREFIWNDLLSLETGSLKLANGRVIEKTLYNRRTRQDEPALFVALTFERREVLDSSNIKPMNLIGVDRGENIPAVIALTDPEGCPLSRFKDSLGNPTHILRIGESYKEKQRTIQAKKEVEQRRAGGYSRKYASKAKNLADDMVRNTARDLLYYAVTQDAMLIFENLSRGFGRQGKRTFMAERQYTRMEDWLTAKLAYEGLPSKTYLSKTLAQYTSKTCSNCGFTITSADYDRVLEKLKKTATGWMTTINGKELKVEGQITYYNRYKRQNVVKDLSVELDRLSEESVNNDISSWTKGRSGEALSLLKKRFSHRPVQEKFVCLNCGFETHADEQAALNIARSWLFLRSQEYKKYQTNKTSTGNTDKRAFVETWQSFYRKKLKEVWKPAV

SEQ ID NO: 37026 - protein, 979 aa, synthetic construct
  REGION 1..979: note = engineered CasX variant
QEIKRINKIRRRLVKDSNTKKAGKTGPMKTLLVRVMTPDLRERLENLRKKPENIPQPISNTSRANLNKLLTDYTEMKKAILHVYWEEFQKDPVGLMSRVAQPASKKIDQNKLKPEMDEKGNLTTAGFACSQCGQPLFVYKLEQVSEKGKAYTNYFGRCNVAEHEKLILLAQLKPEKDSDEAVTYSLGKFGQRALDFYSIHVTKESTHPVKPLAQIAGNRYASHPVGKALSDACMGTIASFLSKYQDIIIEHQKVVKGNQKRLESLRELAGKENLEYPSVTLPPQPHTKEGVDAYNEVIARVRMWVNLNLWQKLKLSRDDAKPLLRLKGFPSFPLVERQANEVDWWDMVCNVKKLINEKKEDGKVFWQNLAGYKRQEALRPYLSSEEDRKKGKKFARTQLGDLLLHLEKKHGEDWGKVYDEAWERIDKKVEGLSKHIKLEEERRSEDAQSKAALTDWLRAKASFVIEGLKEADKDEFCRCELKLQKWYGDLRGKPFAIEAENSILDISGFSKQYNCAFIWQKDGVKKLNLYLIINYFKGGKLRFKKIKPEAFEANRFYTVINKKSGEIVPMEVNFNFDDPNLIILPLAFGKRQGREFIWNDLLSLETGSLKLANGRVIEKTLYNRRTRQDEPALFVALTFERREVLDSSNIKPMNLIGVDRGENIPAVIALTDPEGCPLSRFKDSLGNPTHILRIGESYKEKQRTIQAKKEVEQRRAGGYSRKYASKAKNLADDMVRNTARDLLYYAVTQDAMLIFENLSRGFGRQGKRTFMAERQYTRMEDWLTAKLAYEGLPSKTYLSKTLAQYTSKTCSNCGFTITSADYDRVLEKLKKTATGWMTTINGKELKVEGQITYYNRYKRQNVVKDLSVELDRLSEESVNNDISSWTKGRSGEALSLLKKRFSHRPVQEKFVCLNCGFETHADEQAALNIARSWLFLRSQEYKKYQTNKTSTGNTDKRAFVETWQSFYRKKLKEVWKPAV

SEQ ID NO: 37027 - protein, 979 aa, synthetic construct
  REGION 1..979: note = engineered CasX variant
QEIKRINKIRRRLVKDSNTKKAGKTGPMKTLLVRVMTPDLRERLENLRKKPENIPQPISNTSRANLNKLLTDYTEMKKAILHVYWEEFQKDPVGLMSRVAQPASKKIDQNKLKPEMDEKGNLTTAGFACSQCGQPLFVYKLEQVSEKGKAYTNYFGRCNVAEHEKLILLAQLKPEKDSDEAVTYSLGKFGQRALDFYSIHVTKESTHPVKPLAQIAGNRYASSPVGKALSDACMGTIASFLSKYQDIIIEHQKVVKGNQKRLESLRELAGKENLEYPSVTLPPQPHTKEGVDAYNEVIARVRMWVNLNLWQKLKLSRDDAKPLLRLKGFPSFPLVERQANEVDWWDMVCNVKKLINEKKEDGKVFWQNLAGYKRQEALRPYLSSEEDRKKGKKFARTQLGDLLLHLEKKHGEDWGKVYDEAWERIDKKVEGLSKHIKLEEERRSEDAQSKAALTDWLRAKASFVIEGLKEADKDEFCRCELKLQKWYGDLRGKPFAIEAENSILDISGFSKQYNCAFIWQKDGVKKLNLYLIINYFKGGKLRFKKIKPEAFEANRFYTVINKKSGEIVPMEVNFNFDDPNLIILPLAFGKRQGREFIWNDLLSLETGSLKLANGRVIEKTLYNRRTRQDEPALFVALTFERREVLDSSNIKPMNLIGVDRGENIPAVIALTDPEGCPLSRFKDSLGNPTHILRIGESYKEKQRTIQAKKEVEQRRAGGYSRKYASKAKNLADDMVRNTARDLLYYAVTQDAMLIFENLSRGFGRQGKRTFMAERQYTRMEDWLTAKLAYEGLPSKTYLSKTLAQYTSKTCSNCGFTITSADYDRVLEKLKKTATGWMTTINGKELKVEGQITYYNRYKRQNVVKDLSVELDRLSEESVNNDISSWTKGRSGEALSLLKKRFSHRPVQEKFVCLNCGFETHADEQAALNIARSWLFLRSQEYKKYQTNKTSTGNTDKRAFVETWQSFYRKKLKEVWKPAV

SEQ ID NO: 37028 - protein, 979 aa, synthetic construct
  REGION 1..979: note = engineered CasX variant
QEIKRINKIRRRLVKDSNTKKAGKTGPMKTLLVRVMTPDLRERLENLRKKPENIPQPISNTSRANLNKLLTDYTEMKKAILHVYWEEFQKDPVGLMSRVAQPASKKIDQNKLKPEMDEKGNLTTAGFACSQCGQPLFVYKLEQVSEKGKAYTNYFGRCNVAEHEKLILLAQLKPEKDSDEAVTYSLGKFGQRALDFYSIHVTKESTHPVKPLAQIAGNRYASTPVGKALSDACMGTIASFLSKYQDIIIEHQKVVKGNQKRLESLRELAGKENLEYPSVTLPPQPHTKEGVDAYNEVIARVRMWVNLNLWQKLKLSRDDAKPLLRLKGFPSFPLVERQANEVDWWDMVCNVKKLINEKKEDGKVFWQNLAGYKRQEALRPYLSSEEDRKKGKKFARTQLGDLLLHLEKKHGEDWGKVYDEAWERIDKKVEGLSKHIKLEEERRSEDAQSKAALTDWLRAKASFVIEGLKEADKDEFCRCELKLQKWYGDLRGKPFAIEAENSILDISGFSKQYNCAFIWQKDGVKKLNLYLIINYFKGGKLRFKKIKPEAFEANRFYTVINKKSGEIVPMEVNFNFDDPNLIILPLAFGKRQGREFIWNDLLSLETGSLKLANGRVIEKTLYNRRTRQDEPALFVALTFERREVLDSSNIKPMNLIGVDRGENIPAVIALTDPEGCPLSRFKDSLGNPTHILRIGESYKEKQRTIQAKKEVEQRRAGGYSRKYASKAKNLADDMVRNTARDLLYYAVTQDAMLIFENLSRGFGRQGKRTFMAERQYTRMEDWLTAKLAYEGLPSKTYLSKTLAQYTSKTCSNCGFTITSADYDRVLEKLKKTATGWMTTINGKELKVEGQITYYNRYKRQNVVKDLSVELDRLSEESVNNDISSWTKGRSGEALSLLKKRFSHRPVQEKFVCLNCGFETHADEQAALNIARSWLFLRSQEYKKYQTNKTSTGNTDKRAFVETWQSFYRKKLKEVWKPAV

SEQ ID NO: 37029 - protein, 979 aa, synthetic construct
  REGION 1..979: note = engineered CasX variant
QEIKRINKIRRRLVKDSNTKKAGKTGPMKTLLVRVMTPDLRERLENLRKKPENIPQPISNTSRANLNKLLTDYTEMKKAILHVYWEEFQKDPVGLMSRVAQPASKKIDQNKLKPEMDEKGNLTTAGFACSQCGQPLFVYKLEQVSEKGKAYTNYFGRCNVAEHEKLILLAQLKPEKDSDEAVTYSLGKFGQRALDFYSIHVTKESTHPVKPLAQIAGNRYASAPVGKALSDACMGTIASFLSKYQDIIIEHQKVVKGNQKRLESLRELAGKENLEYPSVTLPPQPHTKEGVDAYNEVIARVRMWVNLNLWQKLKLSRDDAKPLLRLKGFPSFPLVERQANEVDWWDMVCNVKKLINEKKEDGKVFWQNLAGYKRQEALRPYLSSEEDRKKGKKFARTQLGDLLLHLEKKHGEDWGKVYDEAWERIDKKVEGLSKHIKLEEERRSEDAQSKAALTDWLRAKASFVIEGLKEADKDEFCRCELKLQKWYGDLRGKPFAIEAENSILDISGFSKQYNCAFIWQKDGVKKLNLYLIINYFKGGKLRFKKIKPEAFEANRFYTVINKKSGEIVPMEVNFNFDDPNLIILPLAFGKRQGREFIWNDLLSLETGSLKLANGRVIEKTLYNRRTRQDEPALFVALTFERREVLDSSNIKPMNLIGVDRGENIPAVIALTDPEGCPLSRFKDSLGNPTHILRIGESYKEKQRTIQAKKEVEQRRAGGYSRKYASKAKNLADDMVRNTARDLLYYAVTQDAMLIFENLSRGFGRQGKRTFMAERQYTRMEDWLTAKLAYEGLPSKTYLSKTLAQYTSKTCSNCGFTITSADYDRVLEKLKKTATGWMTTINGKELKVEGQITYYNRYKRQNVVKDLSVELDRLSEESVNNDISSWTKGRSGEALSLLKKRFSHRPVQEKFVCLNCGFETHADEQAALNIARSWLFLRSQEYKKYQTNKTSTGNTDKRAFVETWQSFYRKKLKEVWKPAV

SEQ ID NO: 37030 - protein, 979 aa, synthetic construct
  REGION 1..979: note = engineered CasX variant
QEIKRINKIRRRLVKDSNTKKAGKTGPMKTLLVRVMTPDLRERLENLRKKPENIPQPISNTSRANLNKLLTDYTEMKKAILHVYWEEFQKDPVGLMSRVAQPASKKIDQNKLKPEMDEKGNLTTAGFACSQCGQPLFVYKLEQVSEKGKAYTNYFGRCNVAEHEKLILLAQLKPEKDSDEAVTYSLGKFGQRALDFYSIHVTKESTHPVKPLAQIAGNRYASVPVGKALSDACMGTIASFLSKYQDIIIEHQKVVKGNQKRLESLRELAGKENLEYPSVTLPPQPHTKEGVDAYNEVIARVRMWVNLNLWQKLKLSRDDAKPLLRLKGFPSFPLVERQANEVDWWDMVCNVKKLINEKKEDGKVFWQNLAGYKRQEALRPYLSSEEDRKKGKKFARTQLGDLLLHLEKKHGEDWGKVYDEAWERIDKKVEGLSKHIKLEEERRSEDAQSKAALTDWLRAKASFVIEGLKEADKDEFCRCELKLQKWYGDLRGKPFAIEAENSILDISGFSKQYNCAFIWQKDGVKKLNLYLIINYFKGGKLRFKKIKPEAFEANRFYTVINKKSGEIVPMEVNFNFDDPNLIILPLAFGKRQGREFIWNDLLSLETGSLKLANGRVIEKTLYNRRTRQDEPALFVALTFERREVLDSSNIKPMNLIGVDRGENIPAVIALTDPEGCPLSRFKDSLGNPTHILRIGESYKEKQRTIQAKKEVEQRRAGGYSRKYASKAKNLADDMVRNTARDLLYYAVTQDAMLIFENLSRGFGRQGKRTFMAERQYTRMEDWLTAKLAYEGLPSKTYLSKTLAQYTSKTCSNCGFTITSADYDRVLEKLKKTATGWMTTINGKELKVEGQITYYNRYKRQNVVKDLSVELDRLSEESVNNDISSWTKGRSGEALSLLKKRFSHRPVQEKFVCLNCGFETHADEQAALNIARSWLFLRSQEYKKYQTNKTSTGNTDKRAFVETWQSFYRKKLKEVWKPAV

SEQ ID NO: 37031 - protein, 979 aa, synthetic construct
  REGION 1..979: note = engineered CasX variant
QEIKRINKIRRRLVKDSNTKKAGKTGPMKTLLVRVMTPDLRERLENLRKKPENIPQPISNTSRANLNKLLTDYTEMKKAILHVYWEEFQKDPVGLMSRVAQPASKKIDQNKLKPEMDEKGNLTTAGFACSQCGQPLFVYKLEQVSEKGKAYTNYFGRCNVAEHEKLIKLAQLKPEKDSDEAVTYSLGKFGQRALDFYSIHVTKESTHPVKPLAQIAGNRYASGPVGKALSDACMGTIASFLSKYQDIIIEHQKVVKGNQKRLESLRELAGKENLEYPSVTLPPQPHTKEGVDAYNEVIARVRMWVNLNLWQKLKLSRDDAKPLLRLKGFPSFPLVERQANEVDWWDMVCNVKKLINEKKEDGKVFWQNLAGYKRQEALRPYLSSEEDRKKGKKFARTQLGDLLLHLEKKHGEDWGKVYDEAWERIDKKVEGLSKHIKLEEERRSEDAQSKAALTDWLRAKASFVIEGLKEADKDEFCRCELKLQKWYGDLRGKPFAIEAENSILDISGFSKQYNCAFIWQKDGVKKLNLYLIINYFKGGKLRFKKIKPEAFEANRFYTVINKKSGEIVPMEVNFNFDDPNLIILPLAFGKRQGREFIWNDLLSLETGSLKLANGRVIEKTLYNRRTRQDEPALFVALTFERREVLDSSNIKPMNLIGVDRGENIPAVIALTDPEGCPLSRFKDSLGNPTHILRIGESYKEKQRTIQAKKEVEQRRAGGYSRKYASKAKNLADDMVRNTARDLLYYAVTQDAMLIFENLSRGFGRQGKRTFMAERQYTRMEDWLTAKLAYEGLPSKTYLSKTLAQYTSKTCSNCGFTITSADYDRVLEKLKKTATGWMTTINGKELKVEGQITYYNRYKRQNVVKDLSVELDRLSEESVNNDISSWTKGRSGEALSLLKKRFSHRPVQEKFVCLNCGFETHADEQAALNIARSWLFLRSQEYKKYQTNKTSTGNTDKRAFVETWQSFYRKKLKEVWKPAV

SEQ ID NO: 37032 - protein, 978 aa, synthetic construct
  REGION 1..978: note = engineered CasX variant
QEIKRINKIRRRLVKDSNTKKAGKTGPMKTLLVRVMTPDLRERLENLRKKPENIPQPISNTSRANLNKLLTDYTEMKKAILHVYWEEFQKDPVGLMSRVAQPASKKIDQNKLKPEMDEKGNLTTAGFACSQCGQPLFVYKLEQVSEKGKAYTNYFGRCNVAEHEKLILLAQLKPEKDSDEAVTYSLGKFGQRALDFYSIHVTKESTHPVKPLAQIAGNRYASPVGKALSDACMGTIASFLSKYQDIIIEHQKVVKGNQKRLESLRELAGKENLEYPSVTLPPQPHTKEGVDAYNEVIARVRMWVNLNLWQKLKLSRDDAKPLLRLKGFPSFPLVERQANEVDWWDMVCNVKKLINEKKEDGKVFWQNLAGYKRQEALRPYLSSEEDRKKGKKFARTQLGDLLLHLEKKHGEDWGKVYDEAWERIDKKVEGLSKHIKLEEERRSEDAQSKAALTDWLRAKASFVIEGLKEADKDEFCRCELKLQKWYGDLRGKPFAIEAENSILDISGFSKQYNCAFIWQKDGVKKLNLYLIINYFKGGKLRFKKIKPEAFEANRFYTVINKKSGEIVPMEVNFNFDDPNLIILPLAFGKRQGREFIWNDLLSLETGSLKLANGRVIEKTLYNRRTRQDEPALFVALTFERREVLDSSNIKPMNLIGVDRGENIPAVIALTDPEGCPLSRFKDSLGNPTHILRIGESYKEKQRTIQAKKEVEQRRAGGYSRKYASKAKNLADDMVRNTARDLLYYAVTQDAMLIFENLSRGFGRQGKRTFMAERQYTRMEDWLTAKLAYEGLPSKTYLSKTLAQYTSKTCSNCGFTITSADYDRVLEKLKKTATGWMTTINGKELKVEGQITYYNRYKRQNVVKDLSVELDRLSEESVNNDISSWTKGRSGEALSLLKKRFSHRPVQEKFVCLNCGFETHADEQAALNIARSWLFLRSQEYKKYQTNKTSTGNTDKRAFVETWQSFYRKKLKEVWKPAV

SEQ ID NO: 37033 - protein, 979 aa, synthetic construct
  REGION 1..979: note = engineered CasX variant
QEIKRINKIRRRLVKDSNTKKAGKTGPMKTLLVRVMTPDLRERLENLRKKPENIPQPISNTSRANLNKLLTDYTEMKKAILHVYWEEFQKDPVGLMSRVAQPASKKIDQNKLKPEMDEKGNLTTAGFACSQCGQPLFVYKLEQVSEKGKAYTNYFGRCNVAEHEKLILLAQLKPEKDSDEAVTYSLGKFGQRALDFYSIHVTKESTHPVKPLAQIAGNRYASYPVGKALSDACMGTIASFLSKYQDIIIEHQKVVKGNQKRLESLRELAGKENLEYPSVTLPPQPHTKEGVDAYNEVIARVRMWVNLNLWQKLKLSRDDAKPLLRLKGFPSFPLVERQANEVDWWDMVCNVKKLINEKKEDGKVFWQNLAGYKRQEALRPYLSSEEDRKKGKKFARTQLGDLLLHLEKKHGEDWGKVYDEAWERIDKKVEGLSKHIKLEEERRSEDAQSKAALTDWLRAKASFVIEGLKEADKDEFCRCELKLQKWYGDLRGKPFAIEAENSILDISGFSKQYNCAFIWQKDGVKKLNLYLIINYFKGGKLRFKKIKPEAFEANRFYTVINKKSGEIVPMEVNFNFDDPNLIILPLAFGKRQGREFIWNDLLSLETGSLKLANGRVIEKTLYNRRTRQDEPALFVALTFERREVLDSSNIKPMNLIGVDRGENIPAVIALTDPEGCPLSRFKDSLGNPTHILRIGESYKEKQRTIQAKKEVEQRRAGGYSRKYASKAKNLADDMVRNTARDLLYYAVTQDAMLIFENLSRGFGRQGKRTFMAERQYTRMEDWLTAKLAYEGLPSKTYLSKTLAQYTSKTCSNCGFTITSADYDRVLEKLKKTATGWMTTINGKELKVEGQITYYNRYKRQNVVKDLSVELDRLSEESVNNDISSWTKGRSGEALSLLKKRFSHRPVQEKFVCLNCGFETHADEQAALNIARSWLFLRSQEYKKYQTNKTTGKNTDKRAFVETWQSFYRKKLKEVWKPAV

SEQ ID NO: 37034 - protein, 979 aa, synthetic construct
  REGION 1..979: note = engineered CasX variant
QEIKRINKIRRRLVKDSNTKKAGKTGPMKTLLVRVMTPDLRERLENLRKKPENIPQPISNTSRANLNKLLTDYTEMKKAILHVYWEEFQKDPVGLMSRVAQPASKKIDQNKLKPEMDEKGNLTTAGFACSQCGQPLFVYKLEQVSEKGKAYTNYFGRCNVAEHEKLILLAQLKPEKDSDEAVTYSLGKFGQRALDFYSIHVTKESTHPVKPLAQIAGNRYASHPVGKALSDACMGTIASFLSKYQDIIIEHQKVVKGNQKRLESLRELAGKENLEYPSVTLPPQPHTKEGVDAYNEVIARVRMWVNLNLWQKLKLSRDDAKPLLRLKGFPSFPLVERQANEVDWWDMVCNVKKLINEKKEDGKVFWQNLAGYKRQEALRPYLSSEEDRKKGKKFARTQLGDLLLHLEKKHGEDWGKVYDEAWERIDKKVEGLSKHIKLEEERRSEDAQSKAALTDWLRAKASFVIEGLKEADKDEFCRCELKLQKWYGDLRGKPFAIEAENSILDISGFSKQYNCAFIWQKDGVKKLNLYLIINYFKGGKLRFKKIKPEAFEANRFYTVINKKSGEIVPMEVNFNFDDPNLIILPLAFGKRQGREFIWNDLLSLETGSLKLANGRVIEKTLYNRRTRQDEPALFVALTFERREVLDSSNIKPMNLIGVDRGENIPAVIALTDPEGCPLSRFKDSLGNPTHILRIGESYKEKQRTIQAKKEVEQRRAGGYSRKYASKAKNLADDMVRNTARDLLYYAVTQDAMLIFENLSRGFGRQGKRTFMAERQYTRMEDWLTAKLAYEGLPSKTYLSKTLAQYTSKTCSNCGFTITSADYDRVLEKLKKTATGWMTTINGKELKVEGQITYYNRYKRQNVVKDLSVELDRLSEESVNNDISSWTKGRSGEALSLLKKRFSHRPVQEKFVCLNCGFETHADEQAALNIARSWLFLRSQEYKKYQTNKTTGKNTDKRAFVETWQSFYRKKLKEVWKPAV

SEQ ID NO: 37035 - protein, 979 aa, synthetic construct
  REGION 1..979: note = engineered CasX variant
QEIKRINKIRRRLVKDSNTKKAGKTGPMKTLLVRVMTPDLRERLENLRKKPENIPQPISNTSRANLNKLLTDYTEMKKAILHVYWEEFQKDPVGLMSRVAQPASKKIDQNKLKPEMDEKGNLTTAGFACSQCGQPLFVYKLEQVSEKGKAYTNYFGRCNVAEHEKLILLAQLKPEKDSDEAVTYSLGKFGQRALDFYSIHVTKESTHPVKPLAQIAGNRYASSPVGKALSDACMGTIASFLSKYQDIIIEHQKVVKGNQKRLESLRELAGKENLEYPSVTLPPQPHTKEGVDAYNEVIARVRMWVNLNLWQKLKLSRDDAKPLLRLKGFPSFPLVERQANEVDWWDMVCNVKKLINEKKEDGKVFWQNLAGYKRQEALRPYLSSEEDRKKGKKFARTQLGDLLLHLEKKHGEDWGKVYDEAWERIDKKVEGLSKHIKLEEERRSEDAQSKAALTDWLRAKASFVIEGLKEADKDEFCRCELKLQKWYGDLRGKPFAIEAENSILDISGFSKQYNCAFIWQKDGVKKLNLYLIINYFKGGKLRFKKIKPEAFEANRFYTVINKKSGEIVPMEVNFNFDDPNLIILPLAFGKRQGREFIWNDLLSLETGSLKLANGRVIEKTLYNRRTRQDEPALFVALTFERREVLDSSNIKPMNLIGVDRGENIPAVIALTDPEGCPLSRFKDSLGNPTHILRIGESYKEKQRTIQAKKEVEQRRAGGYSRKYASKAKNLADDMVRNTARDLLYYAVTQDAMLIFENLSRGFGRQGKRTFMAERQYTRMEDWLTAKLAYEGLPSKTYLSKTLAQYTSKTCSNCGFTITSADYDRVLEKLKKTATGWMTTINGKELKVEGQITYYNRYKRQNVVKDLSVELDRLSEESVNNDISSWTKGRSGEALSLLKKRFSHRPVQEKFVCLNCGFETHADEQAALNIARSWLFLRSQEYKKYQTNKTTGKNTDKRAFVETWQSFYRKKLKEVWKPAV

SEQ ID NO: 37036 - protein, 979 aa, synthetic construct
  REGION 1..979: note = engineered CasX variant
QEIKRINKIRRRLVKDSNTKKAGKTGPMKTLLVRVMTPDLRERLENLRKKPENIPQPISNTSRANLNKLLTDYTEMKKAILHVYWEEFQKDPVGLMSRVAQPASKKIDQNKLKPEMDEKGNLTTAGFACSQCGQPLFVYKLEQVSEKGKAYTNYFGRCNVAEHEKLILLAQLKPEKDSDEAVTYSLGKFGQRALDFYSIHVTKESTHPVKPLAQIAGNRYASTPVGKALSDACMGTIASFLSKYQDIIIEHQKVVKGNQKRLESLRELAGKENLEYPSVTLPPQPHTKEGVDAYNEVIARVRMWVNLNLWQKLKLSRDDAKPLLRLKGFPSFPLVERQANEVDWWDMVCNVKKLINEKKEDGKVFWQNLAGYKRQEALRPYLSSEEDRKKGKKFARTQLGDLLLHLEKKHGEDWGKVYDEAWERIDKKVEGLSKHIKLEEERRSEDAQSKAALTDWLRAKASFVIEGLKEADKDEFCRCELKLQKWYGDLRGKPFAIEAENSILDISGFSKQYNCAFIWQKDGVKKLNLYLIINYFKGGKLRFKKIKPEAFEANRFYTVINKKSGEIVPMEVNFNFDDPNLIILPLAFGKRQGREFIWNDLLSLETGSLKLANGRVIEKTLYNRRTRQDEPALFVALTFERREVLDSSNIKPMNLIGVDRGENIPAVIALTDPEGCPLSRFKDSLGNPTHILRIGESYKEKQRTIQAKKEVEQRRAGGYSRKYASKAKNLADDMVRNTARDLLYYAVTQDAMLIFENLSRGFGRQGKRTFMAERQYTRMEDWLTAKLAYEGLPSKTYLSKTLAQYTSKTCSNCGFTITSADYDRVLEKLKKTATGWMTTINGKELKVEGQITYYNRYKRQNVVKDLSVELDRLSEESVNNDISSWTKGRSGEALSLLKKRFSHRPVQEKFVCLNCGFETHADEQAALNIARSWLFLRSQEYKKYQTNKTTGKNTDKRAFVETWQSFYRKKLKEVWKPAV

SEQ ID NO: 37037 - protein, 979 aa, synthetic construct
  REGION 1..979: note = engineered CasX variant
QEIKRINKIRRRLVKDSNTKKAGKTGPMKTLLVRVMTPDLRERLENLRKKPENIPQPISNTSRANLNKLLTDYTEMKKAILHVYWEEFQKDPVGLMSRVAQPASKKIDQNKLKPEMDEKGNLTTAGFACSQCGQPLFVYKLEQVSEKGKAYTNYFGRCNVAEHEKLILLAQLKPEKDSDEAVTYSLGKFGQRALDFYSIHVTKESTHPVKPLAQIAGNRYASAPVGKALSDACMGTIASFLSKYQDIIIEHQKVVKGNQKRLESLRELAGKENLEYPSVTLPPQPHTKEGVDAYNEVIARVRMWVNLNLWQKLKLSRDDAKPLLRLKGFPSFPLVERQANEVDWWDMVCNVKKLINEKKEDGKVFWQNLAGYKRQEALRPYLSSEEDRKKGKKFARTQLGDLLLHLEKKHGEDWGKVYDEAWERIDKKVEGLSKHIKLEEERRSEDAQSKAALTDWLRAKASFVIEGLKEADKDEFCRCELKLQKWYGDLRGKPFAIEAENSILDISGFSKQYNCAFIWQKDGVKKLNLYLIINYFKGGKLRFKKIKPEAFEANRFYTVINKKSGEIVPMEVNFNFDDPNLIILPLAFGKRQGREFIWNDLLSLETGSLKLANGRVIEKTLYNRRTRQDEPALFVALTFERREVLDSSNIKPMNLIGVDRGENIPAVIALTDPEGCPLSRFKDSLGNPTHILRIGESYKEKQRTIQAKKEVEQRRAGGYSRKYASKAKNLADDMVRNTARDLLYYAVTQDAMLIFENLSRGFGRQGKRTFMAERQYTRMEDWLTAKLAYEGLPSKTYLSKTLAQYTSKTCSNCGFTITSADYDRVLEKLKKTATGWMTTINGKELKVEGQITYYNRYKRQNVVKDLSVELDRLSEESVNNDISSWTKGRSGEALSLLKKRFSHRPVQEKFVCLNCGFETHADEQAALNIARSWLFLRSQEYKKYQTNKTTGKNTDKRAFVETWQSFYRKKLKEVWKPAV

SEQ ID NO: 37038 - protein, 979 aa, synthetic construct
  REGION 1..979: note = engineered CasX variant
QEIKRINKIRRRLVKDSNTKKAGKTGPMKTLLVRVMTPDLRERLENLRKKPENIPQPISNTSRANLNKLLTDYTEMKKAILHVYWEEFQKDPVGLMSRVAQPASKKIDQNKLKPEMDEKGNLTTAGFACSQCGQPLFVYKLEQVSEKGKAYTNYFGRCNVAEHEKLILLAQLKPEKDSDEAVTYSLGKFGQRALDFYSIHVTKESTHPVKPLAQIAGNRYASVPVGKALSDACMGTIASFLSKYQDIIIEHQKVVKGNQKRLESLRELAGKENLEYPSVTLPPQPHTKEGVDAYNEVIARVRMWVNLNLWQKLKLSRDDAKPLLRLKGFPSFPLVERQANEVDWWDMVCNVKKLINEKKEDGKVFWQNLAGYKRQEALRPYLSSEEDRKKGKKFARTQLGDLLLHLEKKHGEDWGKVYDEAWERIDKKVEGLSKHIKLEEERRSEDAQSKAALTDWLRAKASFVIEGLKEADKDEFCRCELKLQKWYGDLRGKPFAIEAENSILDISGFSKQYNCAFIWQKDGVKKLNLYLIINYFKGGKLRFKKIKPEAFEANRFYTVINKKSGEIVPMEVNFNFDDPNLIILPLAFGKRQGREFIWNDLLSLETGSLKLANGRVIEKTLYNRRTRQDEPALFVALTFERREVLDSSNIKPMNLIGVDRGENIPAVIALTDPEGCPLSRFKDSLGNPTHILRIGESYKEKQRTIQAKKEVEQRRAGGYSRKYASKAKNLADDMVRNTARDLLYYAVTQDAMLIFENLSRGFGRQGKRTFMAERQYTRMEDWLTAKLAYEGLPSKTYLSKTLAQYTSKTCSNCGFTITSADYDRVLEKLKKTATGWMTTINGKELKVEGQITYYNRYKRQNVVKDLSVELDRLSEESVNNDISSWTKGRSGEALSLLKKRFSHRPVQEKFVCLNCGFETHADEQAALNIARSWLFLRSQEYKKYQTNKTTGKNTDKRAFVETWQSFYRKKLKEVWKPAV

SEQ ID NO: 37039 - protein, 979 aa, synthetic construct
  REGION 1..979: note = engineered CasX variant
QEIKRINKIRRRLVKDSNTKKAGKTGPMKTLLVRVMTPDLRERLENLRKKPENIPQPISNTSRANLNKLLTDYTEMKKAILHVYWEEFQKDPVGLMSRVAQPASKKIDQNKLKPEMDEKGNLTTAGFACSQCGQPLFVYKLEQVSEKGKAYTNYFGRCNVAEHEKLIKLAQLKPEKDSDEAVTYSLGKFGQRALDFYSIHVTKESTHPVKPLAQIAGNRYASGPVGKALSDACMGTIASFLSKYQDIIIEHQKVVKGNQKRLESLRELAGKENLEYPSVTLPPQPHTKEGVDAYNEVIARVRMWVNLNLWQKLKLSRDDAKPLLRLKGFPSFPLVERQANEVDWWDMVCNVKKLINEKKEDGKVFWQNLAGYKRQEALRPYLSSEEDRKKGKKFARTQLGDLLLHLEKKHGEDWGKVYDEAWERIDKKVEGLSKHIKLEEERRSEDAQSKAALTDWLRAKASFVIEGLKEADKDEFCRCELKLQKWYGDLRGKPFAIEAENSILDISGFSKQYNCAFIWQKDGVKKLNLYLIINYFKGGKLRFKKIKPEAFEANRFYTVINKKSGEIVPMEVNFNFDDPNLIILPLAFGKRQGREFIWNDLLSLETGSLKLANGRVIEKTLYNRRTRQDEPALFVALTFERREVLDSSNIKPMNLIGVDRGENIPAVIALTDPEGCPLSRFKDSLGNPTHILRIGESYKEKQRTIQAKKEVEQRRAGGYSRKYASKAKNLADDMVRNTARDLLYYAVTQDAMLIFENLSRGFGRQGKRTFMAERQYTRMEDWLTAKLAYEGLPSKTYLSKTLAQYTSKTCSNCGFTITSADYDRVLEKLKKTATGWMTTINGKELKVEGQITYYNRYKRQNVVKDLSVELDRLSEESVNNDISSWTKGRSGEALSLLKKRFSHRPVQEKFVCLNCGFETHADEQAALNIARSWLFLRSQEYKKYQTNKTTGKNTDKRAFVETWQSFYRKKLKEVWKPAV

SEQ ID NO: 37040 - protein, 978 aa, synthetic construct
  REGION 1..978: note = engineered CasX variant
QEIKRINKIRRRLVKDSNTKKAGKTGPMKTLLVRVMTPDLRERLENLRKKPENIPQPISNTSRANLNKLLTDYTEMKKAILHVYWEEFQKDPVGLMSRVAQPASKKIDQNKLKPEMDEKGNLTTAGFACSQCGQPLFVYKLEQVSEKGKAYTNYFGRCNVAEHEKLILLAQLKPEKDSDEAVTYSLGKFGQRALDFYSIHVTKESTHPVKPLAQIAGNRYASPVGKALSDACMGTIASFLSKYQDIIIEHQKVVKGNQKRLESLRELAGKENLEYPSVTLPPQPHTKEGVDAYNEVIARVRMWVNLNLWQKLKLSRDDAKPLLRLKGFPSFPLVERQANEVDWWDMVCNVKKLINEKKEDGKVFWQNLAGYKRQEALRPYLSSEEDRKKGKKFARTQLGDLLLHLEKKHGEDWGKVYDEAWERIDKKVEGLSKHIKLEEERRSEDAQSKAALTDWLRAKASFVIEGLKEADKDEFCRCELKLQKWYGDLRGKPFAIEAENSILDISGFSKQYNCAFIWQKDGVKKLNLYLIINYFKGGKLRFKKIKPEAFEANRFYTVINKKSGEIVPMEVNFNFDDPNLIILPLAFGKRQGREFIWNDLLSLETGSLKLANGRVIEKTLYNRRTRQDEPALFVALTFERREVLDSSNIKPMNLIGVDRGENIPAVIALTDPEGCPLSRFKDSLGNPTHILRIGESYKEKQRTIQAKKEVEQRRAGGYSRKYASKAKNLADDMVRNTARDLLYYAVTQDAMLIFENLSRGFGRQGKRTFMAERQYTRMEDWLTAKLAYEGLPSKTYLSKTLAQYTSKTCSNCGFTITSADYDRVLEKLKKTATGWMTTINGKELKVEGQITYYNRYKRQNVVKDLSVELDRLSEESVNNDISSWTKGRSGEALSLLKKRFSHRPVQEKFVCLNCGFETHADEQAALNIARSWLFLRSQEYKKYQTNKTTGKNTDKRAFVETWQSFYRKKLKEVWKPAV

SEQ ID NO: 37041 - protein, 978 aa, synthetic construct
  REGION 1..978: note = engineered CasX variant
QEIKRINKIRRRLVKDSNTKKAGKTGPMKTLLVRVMTPDLRERLENLRKKPENIPQPISNTSRANLNKLLTDYTEMKKAILHVYWEEFQKDPVGLMSRVAQPASKKIDQNKLKPEMDEKGNLTTAGFACSQCGQPLFVYKLEQVSEKGKAYTNYFGRCNVAEHEKLILLAQLKPEKDSDEAVTYSLGKFGQRALDFYSIHVTKESTHPVKPLAQIAGNRYASYPVGKALSDACMGTIASFLSKYQDIIIEHQKVVKGNQKRLESLRELAGKENLEYPSVTLPPQPHTKEGVDAYNEVIARVRMWVNLNLWQKLKLSRDDAKPLLRLKKFPSFPLVERQANEVDWWDMVCNVKKLINEKKEDGKVFWQNLAGYKRQEALRPYLSSEEDRKKGKKFARTQLGDLLLHLEKKHGEDWGKVYDEAWERIDKKVEGLSKHIKLEEERRSEDAQSKAALTDWLRAKASFVIEGLKEADKDEFCRCELKLQKWYGDLRGKPFAIEAENSILDISGFSKQYNCAFIWQKDGVKKLNLYLIINYFKGGKLRFKKIKPEAFEANRFYTVINKKSGEIVPMEVNFNFDDPNLIILPLAFGKRQGREFIWNDLLSLETGSLKLANGRVIEKTLYNRRTRQDEPALFVALTFERREVLDSSNIKPMNLIGVDRGENIPAVIALTDPEGCPLSRFKDSLGNPTHILRIGESYKEKQRTIQAKKEVEQRRAGGYSRKYASKAKNLADDMVRNTARDLLYYAVTQDAMLIFENLSRGFGRQGKRTFMAERQYTRMEDWLTAKLAYEGLPSKTYLSKTLAQYTSKTCSNCGFTITSADYDRVLEKLKKTATGWMTTINGKELKVEGQITYYNRYKRQNVVKDLSVELDRLSEESVNNDISSWTKGRSGEALSLLKKRFSHRPVQEKFVCLNCGFETHADEQAALNIARSWLFLRSQEYKKYQTNKTTGNTDKRAFVETWQSFYRKKLKEVWKPAV

SEQ ID NO: 37042 - protein, 978 aa, synthetic construct
  REGION 1..978: note = engineered CasX variant
QEIKRINKIRRRLVKDSNTKKAGKTGPMKTLLVRVMTPDLRERLENLRKKPENIPQPISNTSRANLNKLLTDYTEMKKAILHVYWEEFQKDPVGLMSRVAQPASKKIDQNKLKPEMDEKGNLTTAGFACSQCGQPLFVYKLEQVSEKGKAYTNYFGRCNVAEHEKLILLAQLKPEKDSDEAVTYSLGKFGQRALDFYSIHVTKESTHPVKPLAQIAGNRYASHPVGKALSDACMGTIASFLSKYQDIIIEHQKVVKGNQKRLESLRELAGKENLEYPSVTLPPQPHTKEGVDAYNEVIARVRMWVNLNLWQKLKLSRDDAKPLLRLKKFPSFPLVERQANEVDWWDMVCNVKKLINEKKEDGKVFWQNLAGYKRQEALRPYLSSEEDRKKGKKFARTQLGDLLLHLEKKHGEDWGKVYDEAWERIDKKVEGLSKHIKLEEERRSEDAQSKAALTDWLRAKASFVIEGLKEADKDEFCRCELKLQKWYGDLRGKPFAIEAENSILDISGFSKQYNCAFIWQKDGVKKLNLYLIINYFKGGKLRFKKIKPEAFEANRFYTVINKKSGEIVPMEVNFNFDDPNLIILPLAFGKRQGREFIWNDLLSLETGSLKLANGRVIEKTLYNRRTRQDEPALFVALTFERREVLDSSNIKPMNLIGVDRGENIPAVIALTDPEGCPLSRFKDSLGNPTHILRIGESYKEKQRTIQAKKEVEQRRAGGYSRKYASKAKNLADDMVRNTARDLLYYAVTQDAMLIFENLSRGFGRQGKRTFMAERQYTRMEDWLTAKLAYEGLPSKTYLSKTLAQYTSKTCSNCGFTITSADYDRVLEKLKKTATGWMTTINGKELKVEGQITYYNRYKRQNVVKDLSVELDRLSEESVNNDISSWTKGRSGEALSLLKKRFSHRPVQEKFVCLNCGFETHADEQAALNIARSWLFLRSQEYKKYQTNKTTGNTDKRAFVETWQSFYRKKLKEVWKPAV

SEQ ID NO: 37043 - protein, 978 aa, synthetic construct
  REGION 1..978: note = engineered CasX variant
QEIKRINKIRRRLVKDSNTKKAGKTGPMKTLLVRVMTPDLRERLENLRKKPENIPQPISNTSRANLNKLLTDYTEMKKAILHVYWEEFQKDPVGLMSRVAQPASKKIDQNKLKPEMDEKGNLTTAGFACSQCGQPLFVYKLEQVSEKGKAYTNYFGRCNVAEHEKLILLAQLKPEKDSDEAVTYSLGKFGQRALDFYSIHVTKESTHPVKPLAQIAGNRYASSPVGKALSDACMGTIASFLSKYQDIIIEHQKVVKGNQKRLESLRELAGKENLEYPSVTLPPQPHTKEGVDAYNEVIARVRMWVNLNLWQKLKLSRDDAKPLLRLKKFPSFPLVERQANEVDWWDMVCNVKKLINEKKEDGKVFWQNLAGYKRQEALRPYLSSEEDRKKGKKFARTQLGDLLLHLEKKHGEDWGKVYDEAWERIDKKVEGLSKHIKLEEERRSEDAQSKAALTDWLRAKASFVIEGLKEADKDEFCRCELKLQKWYGDLRGKPFAIEAENSILDISGFSKQYNCAFIWQKDGVKKLNLYLIINYFKGGKLRFKKIKPEAFEANRFYTVINKKSGEIVPMEVNFNFDDPNLIILPLAFGKRQGREFIWNDLLSLETGSLKLANGRVIEKTLYNRRTRQDEPALFVALTFERREVLDSSNIKPMNLIGVDRGENIPAVIALTDPEGCPLSRFKDSLGNPTHILRIGESYKEKQRTIQAKKEVEQRRAGGYSRKYASKAKNLADDMVRNTARDLLYYAVTQDAMLIFENLSRGFGRQGKRTFMAERQYTRMEDWLTAKLAYEGLPSKTYLSKTLAQYTSKTCSNCGFTITSADYDRVLEKLKKTATGWMTTINGKELKVEGQITYYNRYKRQNVVKDLSVELDRLSEESVNNDISSWTKGRSGEALSLLKKRFSHRPVQEKFVCLNCGFETHADEQAALNIARSWLFLRSQEYKKYQTNKTTGNTDKRAFVETWQSFYRKKLKEVWKPAV

SEQ ID NO: 37044 - protein, 978 aa, synthetic construct
  REGION 1..978: note = engineered CasX variant
QEIKRINKIRRRLVKDSNTKKAGKTGPMKTLLVRVMTPDLRERLENLRKKPENIPQPISNTSRANLNKLLTDYTEMKKAILHVYWEEFQKDPVGLMSRVAQPASKKIDQNKLKPEMDEKGNLTTAGFACSQCGQPLFVYKLEQVSEKGKAYTNYFGRCNVAEHEKLILLAQLKPEKDSDEAVTYSLGKFGQRALDFYSIHVTKESTHPVKPLAQIAGNRYASTPVGKALSDACMGTIASFLSKYQDIIIEHQKVVKGNQKRLESLRELAGKENLEYPSVTLPPQPHTKEGVDAYNEVIARVRMWVNLNLWQKLKLSRDDAKPLLRLKKFPSFPLVERQANEVDWWDMVCNVKKLINEKKEDGKVFWQNLAGYKRQEALRPYLSSEEDRKKGKKFARTQLGDLLLHLEKKHGEDWGKVYDEAWERIDKKVEGLSKHIKLEEERRSEDAQSKAALTDWLRAKASFVIEGLKEADKDEFCRCELKLQKWYGDLRGKPFAIEAENSILDISGFSKQYNCAFIWQKDGVKKLNLYLIINYFKGGKLRFKKIKPEAFEANRFYTVINKKSGEIVPMEVNFNFDDPNLIILPLAFGKRQGREFIWNDLLSLETGSLKLANGRVIEKTLYNRRTRQDEPALFVALTFERREVLDSSNIKPMNLIGVDRGENIPAVIALTDPEGCPLSRFKDSLGNPTHILRIGESYKEKQRTIQAKKEVEQRRAGGYSRKYASKAKNLADDMVRNTARDLLYYAVTQDAMLIFENLSRGFGRQGKRTFMAERQYTRMEDWLTAKLAYEGLPSKTYLSKTLAQYTSKTCSNCGFTITSADYDRVLEKLKKTATGWMTTINGKELKVEGQITYYNRYKRQNVVKDLSVELDRLSEESVNNDISSWTKGRSGEALSLLKKRFSHRPVQEKFVCLNCGFETHADEQAALNIARSWLFLRSQEYKKYQTNKTTGNTDKRAFVETWQSFYRKKLKEVWKPAV

SEQ ID NO: 37045 - protein, 978 aa, synthetic construct
  REGION 1..978: note = engineered CasX variant
QEIKRINKIRRRLVKDSNTKKAGKTGPMKTLLVRVMTPDLRERLENLRKKPENIPQPISNTSRANLNKLLTDYTEMKKAILHVYWEEFQKDPVGLMSRVAQPASKKIDQNKLKPEMDEKGNLTTAGFACSQCGQPLFVYKLEQVSEKGKAYTNYFGRCNVAEHEKLILLAQLKPEKDSDEAVTYSLGKFGQRALDFYSIHVTKESTHPVKPLAQIAGNRYASAPVGKALSDACMGTIASFLSKYQDIIIEHQKVVKGNQKRLESLRELAGKENLEYPSVTLPPQPHTKEGVDAYNEVIARVRMWVNLNLWQKLKLSRDDAKPLLRLKKFPSFPLVERQANEVDWWDMVCNVKKLINEKKEDGKVFWQNLAGYKRQEALRPYLSSEEDRKKGKKFARTQLGDLLLHLEKKHGEDWGKVYDEAWERIDKKVEGLSKHIKLEEERRSEDAQSKAALTDWLRAKASFVIEGLKEADKDEFCRCELKLQKWYGDLRGKPFAIEAENSILDISGFSKQYNCAFIWQKDGVKKLNLYLIINYFKGGKLRFKKIKPEAFEANRFYTVINKKSGEIVPMEVNFNFDDPNLIILPLAFGKRQGREFIWNDLLSLETGSLKLANGRVIEKTLYNRRTRQDEPALFVALTFERREVLDSSNIKPMNLIGVDRGENIPAVIALTDPEGCPLSRFKDSLGNPTHILRIGESYKEKQRTIQAKKEVEQRRAGGYSRKYASKAKNLADDMVRNTARDLLYYAVTQDAMLIFENLSRGFGRQGKRTFMAERQYTRMEDWLTAKLAYEGLPSKTYLSKTLAQYTSKTCSNCGFTITSADYDRVLEKLKKTATGWMTTINGKELKVEGQITYYNRYKRQNVVKDLSVELDRLSEESVNNDISSWTKGRSGEALSLLKKRFSHRPVQEKFVCLNCGFETHADEQAALNIARSWLFLRSQEYKKYQTNKTTGNTDKRAFVETWQSFYRKKLKEVWKPAV

SEQ ID NO: 37046 - protein, 978 aa, synthetic construct
  REGION 1..978: note = engineered CasX variant
QEIKRINKIRRRLVKDSNTKKAGKTGPMKTLLVRVMTPDLRERLENLRKKPENIPQPISNTSRANLNKLLTDYTEMKKAILHVYWEEFQKDPVGLMSRVAQPASKKIDQNKLKPEMDEKGNLTTAGFACSQCGQPLFVYKLEQVSEKGKAYTNYFGRCNVAEHEKLILLAQLKPEKDSDEAVTYSLGKFGQRALDFYSIHVTKESTHPVKPLAQIAGNRYASVPVGKALSDACMGTIASFLSKYQDIIIEHQKVVKGNQKRLESLRELAGKENLEYPSVTLPPQPHTKEGVDAYNEVIARVRMWVNLNLWQKLKLSRDDAKPLLRLKKFPSFPLVERQANEVDWWDMVCNVKKLINEKKEDGKVFWQNLAGYKRQEALRPYLSSEEDRKKGKKFARTQLGDLLLHLEKKHGEDWGKVYDEAWERIDKKVEGLSKHIKLEEERRSEDAQSKAALTDWLRAKASFVIEGLKEADKDEFCRCELKLQKWYGDLRGKPFAIEAENSILDISGFSKQYNCAFIWQKDGVKKLNLYLIINYFKGGKLRFKKIKPEAFEANRFYTVINKKSGEIVPMEVNFNFDDPNLIILPLAFGKRQGREFIWNDLLSLETGSLKLANGRVIEKTLYNRRTRQDEPALFVALTFERREVLDSSNIKPMNLIGVDRGENIPAVIALTDPEGCPLSRFKDSLGNPTHILRIGESYKEKQRTIQAKKEVEQRRAGGYSRKYASKAKNLADDMVRNTARDLLYYAVTQDAMLIFENLSRGFGRQGKRTFMAERQYTRMEDWLTAKLAYEGLPSKTYLSKTLAQYTSKTCSNCGFTITSADYDRVLEKLKKTATGWMTTINGKELKVEGQITYYNRYKRQNVVKDLSVELDRLSEESVNNDISSWTKGRSGEALSLLKKRFSHRPVQEKFVCLNCGFETHADEQAALNIARSWLFLRSQEYKKYQTNKTTGNTDKRAFVETWQSFYRKKLKEVWKPAV

SEQ ID NO: 37047 - protein, 978 aa, synthetic construct
  REGION 1..978: note = engineered CasX variant
QEIKRINKIRRRLVKDSNTKKAGKTGPMKTLLVRVMTPDLRERLENLRKKPENIPQPISNTSRANLNKLLTDYTEMKKAILHVYWEEFQKDPVGLMSRVAQPASKKIDQNKLKPEMDEKGNLTTAGFACSQCGQPLFVYKLEQVSEKGKAYTNYFGRCNVAEHEKLIKLAQLKPEKDSDEAVTYSLGKFGQRALDFYSIHVTKESTHPVKPLAQIAGNRYASGPVGKALSDACMGTIASFLSKYQDIIIEHQKVVKGNQKRLESLRELAGKENLEYPSVTLPPQPHTKEGVDAYNEVIARVRMWVNLNLWQKLKLSRDDAKPLLRLKKFPSFPLVERQANEVDWWDMVCNVKKLINEKKEDGKVFWQNLAGYKRQEALRPYLSSEEDRKKGKKFARTQLGDLLLHLEKKHGEDWGKVYDEAWERIDKKVEGLSKHIKLEEERRSEDAQSKAALTDWLRAKASFVIEGLKEADKDEFCRCELKLQKWYGDLRGKPFAIEAENSILDISGFSKQYNCAFIWQKDGVKKLNLYLIINYFKGGKLRFKKIKPEAFEANRFYTVINKKSGEIVPMEVNFNFDDPNLIILPLAFGKRQGREFIWNDLLSLETGSLKLANGRVIEKTLYNRRTRQDEPALFVALTFERREVLDSSNIKPMNLIGVDRGENIPAVIALTDPEGCPLSRFKDSLGNPTHILRIGESYKEKQRTIQAKKEVEQRRAGGYSRKYASKAKNLADDMVRNTARDLLYYAVTQDAMLIFENLSRGFGRQGKRTFMAERQYTRMEDWLTAKLAYEGLPSKTYLSKTLAQYTSKTCSNCGFTITSADYDRVLEKLKKTATGWMTTINGKELKVEGQITYYNRYKRQNVVKDLSVELDRLSEESVNNDISSWTKGRSGEALSLLKKRFSHRPVQEKFVCLNCGFETHADEQAALNIARSWLFLRSQEYKKYQTNKTTGNTDKRAFVETWQSFYRKKLKEVWKPAV

SEQ ID NO: 37048 - protein, 977 aa, synthetic construct
  REGION 1..977: note = engineered CasX variant
QEIKRINKIRRRLVKDSNTKKAGKTGPMKTLLVRVMTPDLRERLENLRKKPENIPQPISNTSRANLNKLLTDYTEMKKAILHVYWEEFQKDPVGLMSRVAQPASKKIDQNKLKPEMDEKGNLTTAGFACSQCGQPLFVYKLEQVSEKGKAYTNYFGRCNVAEHEKLILLAQLKPEKDSDEAVTYSLGKFGQRALDFYSIHVTKESTHPVKPLAQIAGNRYASPVGKALSDACMGTIASFLSKYQDIIIEHQKVVKGNQKRLESLRELAGKENLEYPSVTLPPQPHTKEGVDAYNEVIARVRMWVNLNLWQKLKLSRDDAKPLLRLKKFPSFPLVERQANEVDWWDMVCNVKKLINEKKEDGKVFWQNLAGYKRQEALRPYLSSEEDRKKGKKFARTQLGDLLLHLEKKHGEDWGKVYDEAWERIDKKVEGLSKHIKLEEERRSEDAQSKAALTDWLRAKASFVIEGLKEADKDEFCRCELKLQKWYGDLRGKPFAIEAENSILDISGFSKQYNCAFIWQKDGVKKLNLYLIINYFKGGKLRFKKIKPEAFEANRFYTVINKKSGEIVPMEVNFNFDDPNLIILPLAFGKRQGREFIWNDLLSLETGSLKLANGRVIEKTLYNRRTRQDEPALFVALTFERREVLDSSNIKPMNLIGVDRGENIPAVIALTDPEGCPLSRFKDSLGNPTHILRIGESYKEKQRTIQAKKEVEQRRAGGYSRKYASKAKNLADDMVRNTARDLLYYAVTQDAMLIFENLSRGFGRQGKRTFMAERQYTRMEDWLTAKLAYEGLPSKTYLSKTLAQYTSKTCSNCGFTITSADYDRVLEKLKKTATGWMTTINGKELKVEGQITYYNRYKRQNVVKDLSVELDRLSEESVNNDISSWTKGRSGEALSLLKKRFSHRPVQEKFVCLNCGFETHADEQAALNIARSWLFLRSQEYKKYQTNKTTGNTDKRAFVETWQSFYRKKLKEVWKPAV

SEQ ID NO: 37049 - protein, 978 aa, synthetic construct
  REGION 1..978: note = engineered CasX variant
QEIKRINKIRRRLVKDSNTKKAGKTGPMKTLLVRVMTPDLRERLENLRKKPENIPQPISNTSRANLNKLLTDYTEMKKAILHVYWEEFQKDPVGLMSRVAQPASKKIDQNKLKPEMDEKGNLTTAGFACSQCGQPLFVYKLEQVSEKGKAYTNYFGRCNVAEHEKLILLAQLKPEKDSDEAVTYSLGKFGQRALDFYSIHVTKESTHPVKPLAQIAGNRYASYPVGKALSDACMGTIASFLSKYQDIIIEHQKVVKGNQKRLESLRELAGKENLEYPSVTLPPQPHTKEGVDAYNEVIARVRMWVNLNLWQKLKLSRDDAKPLLRLKGFPSFPLVERQANEVDWWDMVCNVKKLINEKKEDGKVFWQNLAGYKRQEALRPYLSSEEDRKKGKKFARTQLGDLLLHLEKKHGEDWGKVYDEAWERIDKKVEGLSKHIKLEEERRSEDAQSKAALTDWLRAKASFVIEGLKEADKDEFCRCELKLQKWYGDLRGKPFAIEAENSILDISGFSKQYNCAFIWQKDGVKKLNLYLIINYFKGGKLRFKKIKPEAFEANRFYTVINKKSGEIVPMEVNFNFDDPNLIILPLAFGKRQGREFIWNDLLSLETGSLKLANGRVIEKTLYNRRTRQDEPALFVALTFERREVLDSSNIKPMNLIGVDRGENIPAVIALTDPEGCPLSRFKDSLGNPTHILRIGERYKEKQRTIQAKKEVEQRRAGGYSRKYASKAKNLADDMVRNTARDLLYYAVTQDAMLIFENLSRGFGRQGKRTFMAERQYTRMEDWLTAKLAYEGLPSKTYLSKTLAQYTSKTCSNCGFTITSADYDRVLEKLKKTATGWMTTINGKELKVEGQITYYNRYKRQNVVKDLSVELDRLSEESVNNDISSWTKGRSGEALSLLKKRFSHRPVQEKFVCLNCGFETHADEQAALNIARSWLFLRSQEYKKYQTNKTTGNTDKRAFVETWQSFYRKKLKEVWKPAV

SEQ ID NO: 37050 - protein, 978 aa, synthetic construct
  REGION 1..978: note = engineered CasX variant
QEIKRINKIRRRLVKDSNTKKAGKTGPMKTLLVRVMTPDLRERLENLRKKPENIPQPISNTSRANLNKLLTDYTEMKKAILHVYWEEFQKDPVGLMSRVAQPASKKIDQNKLKPEMDEKGNLTTAGFACSQCGQPLFVYKLEQVSEKGKAYTNYFGRCNVAEHEKLILLAQLKPEKDSDEAVTYSLGKFGQRALDFYSIHVTKESTHPVKPLAQIAGNRYASHPVGKALSDACMGTIASFLSKYQDIIIEHQKVVKGNQKRLESLRELAGKENLEYPSVTLPPQPHTKEGVDAYNEVIARVRMWVNLNLWQKLKLSRDDAKPLLRLKGFPSFPLVERQANEVDWWDMVCNVKKLINEKKEDGKVFWQNLAGYKRQEALRPYLSSEEDRKKGKKFARTQLGDLLLHLEKKHGEDWGKVYDEAWERIDKKVEGLSKHIKLEEERRSEDAQSKAALTDWLRAKASFVIEGLKEADKDEFCRCELKLQKWYGDLRGKPFAIEAENSILDISGFSKQYNCAFIWQKDGVKKLNLYLIINYFKGGKLRFKKIKPEAFEANRFYTVINKKSGEIVPMEVNFNFDDPNLIILPLAFGKRQGREFIWNDLLSLETGSLKLANGRVIEKTLYNRRTRQDEPALFVALTFERREVLDSSNIKPMNLIGVDRGENIPAVIALTDPEGCPLSRFKDSLGNPTHILRIGERYKEKQRTIQAKKEVEQRRAGGYSRKYASKAKNLADDMVRNTARDLLYYAVTQDAMLIFENLSRGFGRQGKRTFMAERQYTRMEDWLTAKLAYEGLPSKTYLSKTLAQYTSKTCSNCGFTITSADYDRVLEKLKKTATGWMTTINGKELKVEGQITYYNRYKRQNVVKDLSVELDRLSEESVNNDISSWTKGRSGEALSLLKKRFSHRPVQEKFVCLNCGFETHADEQAALNIARSWLFLRSQEYKKYQTNKTTGNTDKRAFVETWQSFYRKKLKEVWKPAV

SEQ ID NO: 37051 - protein, 978 aa, synthetic construct
  REGION 1..978: note = engineered CasX variant
QEIKRINKIRRRLVKDSNTKKAGKTGPMKTLLVRVMTPDLRERLENLRKKPENIPQPISNTSRANLNKLLTDYTEMKKAILHVYWEEFQKDPVGLMSRVAQPASKKIDQNKLKPEMDEKGNLTTAGFACSQCGQPLFVYKLEQVSEKGKAYTNYFGRCNVAEHEKLILLAQLKPEKDSDEAVTYSLGKFGQRALDFYSIHVTKESTHPVKPLAQIAGNRYASSPVGKALSDACMGTIASFLSKYQDIIIEHQKVVKGNQKRLESLRELAGKENLEYPSVTLPPQPHTKEGVDAYNEVIARVRMWVNLNLWQKLKLSRDDAKPLLRLKGFPSFPLVERQANEVDWWDMVCNVKKLINEKKEDGKVFWQNLAGYKRQEALRPYLSSEEDRKKGKKFARTQLGDLLLHLEKKHGEDWGKVYDEAWERIDKKVEGLSKHIKLEEERRSEDAQSKAALTDWLRAKASFVIEGLKEADKDEFCRCELKLQKWYGDLRGKPFAIEAENSILDISGFSKQYNCAFIWQKDGVKKLNLYLIINYFKGGKLRFKKIKPEAFEANRFYTVINKKSGEIVPMEVNFNFDDPNLIILPLAFGKRQGREFIWNDLLSLETGSLKLANGRVIEKTLYNRRTRQDEPALFVALTFERREVLDSSNIKPMNLIGVDRGENIPAVIALTDPEGCPLSRFKDSLGNPTHILRIGERYKEKQRTIQAKKEVEQRRAGGYSRKYASKAKNLADDMVRNTARDLLYYAVTQDAMLIFENLSRGFGRQGKRTFMAERQYTRMEDWLTAKLAYEGLPSKTYLSKTLAQYTSKTCSNCGFTITSADYDRVLEKLKKTATGWMTTINGKELKVEGQITYYNRYKRQNVVKDLSVELDRLSEESVNNDISSWTKGRSGEALSLLKKRFSHRPVQEKFVCLNCGFETHADEQAALNIARSWLFLRSQEYKKYQTNKTTGNTDKRAFVETWQSFYRKKLKEVWKPAV

SEQ ID NO: 37052 - protein, 978 aa, synthetic construct
  REGION 1..978: note = engineered CasX variant
QEIKRINKIRRRLVKDSNTKKAGKTGPMKTLLVRVMTPDLRERLENLRKKPENIPQPISNTSRANLNKLLTDYTEMKKAILHVYWEEFQKDPVGLMSRVAQPASKKIDQNKLKPEMDEKGNLTTAGFACSQCGQPLFVYKLEQVSEKGKAYTNYFGRCNVAEHEKLILLAQLKPEKDSDEAVTYSLGKFGQRALDFYSIHVTKESTHPVKPLAQIAGNRYASTPVGKALSDACMGTIASFLSKYQDIIIEHQKVVKGNQKRLESLRELAGKENLEYPSVTLPPQPHTKEGVDAYNEVIARVRMWVNLNLWQKLKLSRDDAKPLLRLKGFPSFPLVERQANEVDWWDMVCNVKKLINEKKEDGKVFWQNLAGYKRQEALRPYLSSEEDRKKGKKFARTQLGDLLLHLEKKHGEDWGKVYDEAWERIDKKVEGLSKHIKLEEERRSEDAQSKAALTDWLRAKASFVIEGLKEADKDEFCRCELKLQKWYGDLRGKPFAIEAENSILDISGFSKQYNCAFIWQKDGVKKLNLYLIINYFKGGKLRFKKIKPEAFEANRFYTVINKKSGEIVPMEVNFNFDDPNLIILPLAFGKRQGREFIWNDLLSLETGSLKLANGRVIEKTLYNRRTRQDEPALFVALTFERREVLDSSNIKPMNLIGVDRGENIPAVIALTDPEGCPLSRFKDSLGNPTHILRIGERYKEKQRTIQAKKEVEQRRAGGYSRKYASKAKNLADDMVRNTARDLLYYAVTQDAMLIFENLSRGFGRQGKRTFMAERQYTRMEDWLTAKLAYEGLPSKTYLSKTLAQYTSKTCSNCGFTITSADYDRVLEKLKKTATGWMTTINGKELKVEGQITYYNRYKRQNVVKDLSVELDRLSEESVNNDISSWTKGRSGEALSLLKKRFSHRPVQEKFVCLNCGFETHADEQAALNIARSWLFLRSQEYKKYQTNKTTGNTDKRAFVETWQSFYRKKLKEVWKPAV

SEQ ID NO: 37053 - protein, 978 aa, synthetic construct
  REGION 1..978: note = engineered CasX variant
QEIKRINKIRRRLVKDSNTKKAGKTGPMKTLLVRVMTPDLRERLENLRKKPENIPQPISNTSRANLNKLLTDYTEMKKAILHVYWEEFQKDPVGLMSRVAQPASKKIDQNKLKPEMDEKGNLTTAGFACSQCGQPLFVYKLEQVSEKGKAYTNYFGRCNVAEHEKLILLAQLKPEKDSDEAVTYSLGKFGQRALDFYSIHVTKESTHPVKPLAQIAGNRYASAPVGKALSDACMGTIASFLSKYQDIIIEHQKVVKGNQKRLESLRELAGKENLEYPSVTLPPQPHTKEGVDAYNEVIARVRMWVNLNLWQKLKLSRDDAKPLLRLKGFPSFPLVERQANEVDWWDMVCNVKKLINEKKEDGKVFWQNLAGYKRQEALRPYLSSEEDRKKGKKFARTQLGDLLLHLEKKHGEDWGKVYDEAWERIDKKVEGLSKHIKLEEERRSEDAQSKAALTDWLRAKASFVIEGLKEADKDEFCRCELKLQKWYGDLRGKPFAIEAENSILDISGFSKQYNCAFIWQKDGVKKLNLYLIINYFKGGKLRFKKIKPEAFEANRFYTVINKKSGEIVPMEVNFNFDDPNLIILPLAFGKRQGREFIWNDLLSLETGSLKLANGRVIEKTLYNRRTRQDEPALFVALTFERREVLDSSNIKPMNLIGVDRGENIPAVIALTDPEGCPLSRFKDSLGNPTHILRIGERYKEKQRTIQAKKEVEQRRAGGYSRKYASKAKNLADDMVRNTARDLLYYAVTQDAMLIFENLSRGFGRQGKRTFMAERQYTRMEDWLTAKLAYEGLPSKTYLSKTLAQYTSKTCSNCGFTITSADYDRVLEKLKKTATGWMTTINGKELKVEGQITYYNRYKRQNVVKDLSVELDRLSEESVNNDISSWTKGRSGEALSLLKKRFSHRPVQEKFVCLNCGFETHADEQAALNIARSWLFLRSQEYKKYQTNKTTGNTDKRAFVETWQSFYRKKLKEVWKPAV

SEQ ID NO: 37054 - protein, 978 aa, synthetic construct
  REGION 1..978: note = engineered CasX variant
QEIKRINKIRRRLVKDSNTKKAGKTGPMKTLLVRVMTPDLRERLENLRKKPENIPQPISNTSRANLNKLLTDYTEMKKAILHVYWEEFQKDPVGLMSRVAQPASKKIDQNKLKPEMDEKGNLTTAGFACSQCGQPLFVYKLEQVSEKGKAYTNYFGRCNVAEHEKLILLAQLKPEKDSDEAVTYSLGKFGQRALDFYSIHVTKESTHPVKPLAQIAGNRYASVPVGKALSDACMGTIASFLSKYQDIIIEHQKVVKGNQKRLESLRELAGKENLEYPSVTLPPQPHTKEGVDAYNEVIARVRMWVNLNLWQKLKLSRDDAKPLLRLKGFPSFPLVERQANEVDWWDMVCNVKKLINEKKEDGKVFWQNLAGYKRQEALRPYLSSEEDRKKGKKFARTQLGDLLLHLEKKHGEDWGKVYDEAWERIDKKVEGLSKHIKLEEERRSEDAQSKAALTDWLRAKASFVIEGLKEADKDEFCRCELKLQKWYGDLRGKPFAIEAENSILDISGFSKQYNCAFIWQKDGVKKLNLYLIINYFKGGKLRFKKIKPEAFEANRFYTVINKKSGEIVPMEVNFNFDDPNLIILPLAFGKRQGREFIWNDLLSLETGSLKLANGRVIEKTLYNRRTRQDEPALFVALTFERREVLDSSNIKPMNLIGVDRGENIPAVIALTDPEGCPLSRFKDSLGNPTHILRIGERYKEKQRTIQAKKEVEQRRAGGYSRKYASKAKNLADDMVRNTARDLLYYAVTQDAMLIFENLSRGFGRQGKRTFMAERQYTRMEDWLTAKLAYEGLPSKTYLSKTLAQYTSKTCSNCGFTITSADYDRVLEKLKKTATGWMTTINGKELKVEGQITYYNRYKRQNVVKDLSVELDRLSEESVNNDISSWTKGRSGEALSLLKKRFSHRPVQEKFVCLNCGFETHADEQAALNIARSWLFLRSQEYKKYQTNKTTGNTDKRAFVETWQSFYRKKLKEVWKPAV

SEQ ID NO: 37055 - protein, 978 aa, synthetic construct
  REGION 1..978: note = engineered CasX variant
QEIKRINKIRRRLVKDSNTKKAGKTGPMKTLLVRVMTPDLRERLENLRKKPENIPQPISNTSRANLNKLLTDYTEMKKAILHVYWEEFQKDPVGLMSRVAQPASKKIDQNKLKPEMDEKGNLTTAGFACSQCGQPLFVYKLEQVSEKGKAYTNYFGRCNVAEHEKLIKLAQLKPEKDSDEAVTYSLGKFGQRALDFYSIHVTKESTHPVKPLAQIAGNRYASGPVGKALSDACMGTIASFLSKYQDIIIEHQKVVKGNQKRLESLRELAGKENLEYPSVTLPPQPHTKEGVDAYNEVIARVRMWVNLNLWQKLKLSRDDAKPLLRLKGFPSFPLVERQANEVDWWDMVCNVKKLINEKKEDGKVFWQNLAGYKRQEALRPYLSSEEDRKKGKKFARTQLGDLLLHLEKKHGEDWGKVYDEAWERIDKKVEGLSKHIKLEEERRSEDAQSKAALTDWLRAKASFVIEGLKEADKDEFCRCELKLQKWYGDLRGKPFAIEAENSILDISGFSKQYNCAFIWQKDGVKKLNLYLIINYFKGGKLRFKKIKPEAFEANRFYTVINKKSGEIVPMEVNFNFDDPNLIILPLAFGKRQGREFIWNDLLSLETGSLKLANGRVIEKTLYNRRTRQDEPALFVALTFERREVLDSSNIKPMNLIGVDRGENIPAVIALTDPEGCPLSRFKDSLGNPTHILRIGERYKEKQRTIQAKKEVEQRRAGGYSRKYASKAKNLADDMVRNTARDLLYYAVTQDAMLIFENLSRGFGRQGKRTFMAERQYTRMEDWLTAKLAYEGLPSKTYLSKTLAQYTSKTCSNCGFTITSADYDRVLEKLKKTATGWMTTINGKELKVEGQITYYNRYKRQNVVKDLSVELDRLSEESVNNDISSWTKGRSGEALSLLKKRFSHRPVQEKFVCLNCGFETHADEQAALNIARSWLFLRSQEYKKYQTNKTTGNTDKRAFVETWQSFYRKKLKEVWKPAV

SEQ ID NO: 37056 - protein, 977 aa, synthetic construct
  REGION 1..977: note = engineered CasX variant
QEIKRINKIRRRLVKDSNTKKAGKTGPMKTLLVRVMTPDLRERLENLRKKPENIPQPISNTSRANLNKLLTDYTEMKKAILHVYWEEFQKDPVGLMSRVAQPASKKIDQNKLKPEMDEKGNLTTAGFACSQCGQPLFVYKLEQVSEKGKAYTNYFGRCNVAEHEKLILLAQLKPEKDSDEAVTYSLGKFGQRALDFYSIHVTKESTHPVKPLAQIAGNRYASPVGKALSDACMGTIASFLSKYQDIIIEHQKVVKGNQKRLESLRELAGKENLEYPSVTLPPQPHTKEGVDAYNEVIARVRMWVNLNLWQKLKLSRDDAKPLLRLKGFPSFPLVERQANEVDWWDMVCNVKKLINEKKEDGKVFWQNLAGYKRQEALRPYLSSEEDRKKGKKFARTQLGDLLLHLEKKHGEDWGKVYDEAWERIDKKVEGLSKHIKLEEERRSEDAQSKAALTDWLRAKASFVIEGLKEADKDEFCRCELKLQKWYGDLRGKPFAIEAENSILDISGFSKQYNCAFIWQKDGVKKLNLYLIINYFKGGKLRFKKIKPEAFEANRFYTVINKKSGEIVPMEVNFNFDDPNLIILPLAFGKRQGREFIWNDLLSLETGSLKLANGRVIEKTLYNRRTRQDEPALFVALTFERREVLDSSNIKPMNLIGVDRGENIPAVIALTDPEGCPLSRFKDSLGNPTHILRIGERYKEKQRTIQAKKEVEQRRAGGYSRKYASKAKNLADDMVRNTARDLLYYAVTQDAMLIFENLSRGFGRQGKRTFMAERQYTRMEDWLTAKLAYEGLPSKTYLSKTLAQYTSKTCSNCGFTITSADYDRVLEKLKKTATGWMTTINGKELKVEGQITYYNRYKRQNVVKDLSVELDRLSEESVNNDISSWTKGRSGEALSLLKKRFSHRPVQEKFVCLNCGFETHADEQAALNIARSWLFLRSQEYKKYQTNKTTGNTDKRAFVETWQSFYRKKLKEVWKPAV

SEQ ID NO: 37057 - protein, 978 aa, synthetic construct
  REGION 1..978: note = engineered CasX variant
QEIKRINKIRRRLVKDSNTKKAGKTGPMKTLLVRVMTPDLRERLENLRKKPENIPQPISNTSRANLNKLLTDYTEMKKAILHVYWEEFQKDPVGLMSRVAQPASKKIDQNKLKPEMDEKGNLTTAGFACSQCGQPLFVYKLEQVSEKGKAYTNYFGRCNVAEHEKLILLAQLKPEKDSDEAVTYSLGKFGQRALDFYSIHVTKESTHPVKPLAQIAGNRYASYPVGKALSDACMGTIASFLSKYQDIIIEHQKVVKGNQKRLESLRELAGKENLEYPSVTLPPQPHTKEGVDAYNEVIARVRMWVNLNLWQKLKLSRDDAKPLLRLKGFPSFPLVERQANEVDWWDMVCNVKKLINEKKEDGKVFWQNLAGYKRQEALRPYLSSEEDRKKGKKFARTQLGDLLLHLEKKHGEDWGKVYDEAWERIDKKVEGLSKHIKLEEERRSEDAQSKAALTDWLRAKASFVIEGLKEADKDEFCRCELKLQKWYGDLRGKPFAIEAENSILDISGFSKQYNCAFIWQKDGVKKLNLYLIINYFKGGKLRFKKIKPEAFEANRFYTVINKKSGEIVPMEVNFNFDDPNLIILPLAFGKRQGREFIWNDLLSLETGSLQLANGRVIEKTLYNRRTRQDEPALFVALTFERREVLDSSNIKPMNLIGVDRGENIPAVIALTDPEGCPLSRFKDSLGNPTHILRIGESYKEKQRTIQAKKEVEQRRAGGYSRKYASKAKNLADDMVRNTARDLLYYAVTQDAMLIFENLSRGFGRQGKRTFMAERQYTRMEDWLTAKLAYEGLPSKTYLSKTLAQYTSKTCSNCGFTITSADYDRVLEKLKKTATGWMTTINGKELKVEGQITYYNRYKRQNVVKDLSVELDRLSEESVNNDISSWTKGRSGEALSLLKKRFSHRPVQEKFVCLNCGFETHADEQAALNIARSWLFLRSQEYKKYQTNKTTGNTDKRAFVETWQSFYRKKLKEVWKPAV

SEQ ID NO: 37058 - protein, 978 aa, synthetic construct
  REGION 1..978: note = engineered CasX variant
QEIKRINKIRRRLVKDSNTKKAGKTGPMKTLLVRVMTPDLRERLENLRKKPENIPQPISNTSRANLNKLLTDYTEMKKAILHVYWEEFQKDPVGLMSRVAQPASKKIDQNKLKPEMDEKGNLTTAGFACSQCGQPLFVYKLEQVSEKGKAYTNYFGRCNVAEHEKLILLAQLKPEKDSDEAVTYSLGKFGQRALDFYSIHVTKESTHPVKPLAQIAGNRYASHPVGKALSDACMGTIASFLSKYQDIIIEHQKVVKGNQKRLESLRELAGKENLEYPSVTLPPQPHTKEGVDAYNEVIARVRMWVNLNLWQKLKLSRDDAKPLLRLKGFPSFPLVERQANEVDWWDMVCNVKKLINEKKEDGKVFWQNLAGYKRQEALRPYLSSEEDRKKGKKFARTQLGDLLLHLEKKHGEDWGKVYDEAWERIDKKVEGLSKHIKLEEERRSEDAQSKAALTDWLRAKASFVIEGLKEADKDEFCRCELKLQKWYGDLRGKPFAIEAENSILDISGFSKQYNCAFIWQKDGVKKLNLYLIINYFKGGKLRFKKIKPEAFEANRFYTVINKKSGEIVPMEVNFNFDDPNLIILPLAFGKRQGREFIWNDLLSLETGSLQLANGRVIEKTLYNRRTRQDEPALFVALTFERREVLDSSNIKPMNLIGVDRGENIPAVIALTDPEGCPLSRFKDSLGNPTHILRIGESYKEKQRTIQAKKEVEQRRAGGYSRKYASKAKNLADDMVRNTARDLLYYAVTQDAMLIFENLSRGFGRQGKRTFMAERQYTRMEDWLTAKLAYEGLPSKTYLSKTLAQYTSKTCSNCGFTITSADYDRVLEKLKKTATGWMTTINGKELKVEGQITYYNRYKRQNVVKDLSVELDRLSEESVNNDISSWTKGRSGEALSLLKKRFSHRPVQEKFVCLNCGFETHADEQAALNIARSWLFLRSQEYKKYQTNKTTGNTDKRAFVETWQSFYRKKLKEVWKPAV

SEQ ID NO: 37059 - protein, 978 aa, synthetic construct
  REGION 1..978: note = engineered CasX variant
QEIKRINKIRRRLVKDSNTKKAGKTGPMKTLLVRVMTPDLRERLENLRKKPENIPQPISNTSRANLNKLLTDYTEMKKAILHVYWEEFQKDPVGLMSRVAQPASKKIDQNKLKPEMDEKGNLTTAGFACSQCGQPLFVYKLEQVSEKGKAYTNYFGRCNVAEHEKLILLAQLKPEKDSDEAVTYSLGKFGQRALDFYSIHVTKESTHPVKPLAQIAGNRYASSPVGKALSDACMGTIASFLSKYQDIIIEHQKVVKGNQKRLESLRELAGKENLEYPSVTLPPQPHTKEGVDAYNEVIARVRMWVNLNLWQKLKLSRDDAKPLLRLKGFPSFPLVERQANEVDWWDMVCNVKKLINEKKEDGKVFWQNLAGYKRQEALRPYLSSEEDRKKGKKFARTQLGDLLLHLEKKHGEDWGKVYDEAWERIDKKVEGLSKHIKLEEERRSEDAQSKAALTDWLRAKASFVIEGLKEADKDEFCRCELKLQKWYGDLRGKPFAIEAENSILDISGFSKQYNCAFIWQKDGVKKLNLYLIINYFKGGKLRFKKIKPEAFEANRFYTVINKKSGEIVPMEVNFNFDDPNLIILPLAFGKRQGREFIWNDLLSLETGSLQLANGRVIEKTLYNRRTRQDEPALFVALTFERREVLDSSNIKPMNLIGVDRGENIPAVIALTDPEGCPLSRFKDSLGNPTHILRIGESYKEKQRTIQAKKEVEQRRAGGYSRKYASKAKNLADDMVRNTARDLLYYAVTQDAMLIFENLSRGFGRQGKRTFMAERQYTRMEDWLTAKLAYEGLPSKTYLSKTLAQYTSKTCSNCGFTITSADYDRVLEKLKKTATGWMTTINGKELKVEGQITYYNRYKRQNVVKDLSVELDRLSEESVNNDISSWTKGRSGEALSLLKKRFSHRPVQEKFVCLNCGFETHADEQAALNIARSWLFLRSQEYKKYQTNKTTGNTDKRAFVETWQSFYRKKLKEVWKPAV

SEQ ID NO: 37060 - protein, 978 aa, synthetic construct
  REGION 1..978: note = engineered CasX variant
QEIKRINKIRRRLVKDSNTKKAGKTGPMKTLLVRVMTPDLRERLENLRKKPENIPQPISNTSRANLNKLLTDYTEMKKAILHVYWEEFQKDPVGLMSRVAQPASKKIDQNKLKPEMDEKGNLTTAGFACSQCGQPLFVYKLEQVSEKGKAYTNYFGRCNVAEHEKLILLAQLKPEKDSDEAVTYSLGKFGQRALDFYSIHVTKESTHPVKPLAQIAGNRYASTPVGKALSDACMGTIASFLSKYQDIIIEHQKVVKGNQKRLESLRELAGKENLEYPSVTLPPQPHTKEGVDAYNEVIARVRMWVNLNLWQKLKLSRDDAKPLLRLKGFPSFPLVERQANEVDWWDMVCNVKKLINEKKEDGKVFWQNLAGYKRQEALRPYLSSEEDRKKGKKFARTQLGDLLLHLEKKHGEDWGKVYDEAWERIDKKVEGLSKHIKLEEERRSEDAQSKAALTDWLRAKASFVIEGLKEADKDEFCRCELKLQKWYGDLRGKPFAIEAENSILDISGFSKQYNCAFIWQKDGVKKLNLYLIINYFKGGKLRFKKIKPEAFEANRFYTVINKKSGEIVPMEVNFNFDDPNLIILPLAFGKRQGREFIWNDLLSLETGSLQLANGRVIEKTLYNRRTRQDEPALFVALTFERREVLDSSNIKPMNLIGVDRGENIPAVIALTDPEGCPLSRFKDSLGNPTHILRIGESYKEKQRTIQAKKEVEQRRAGGYSRKYASKAKNLADDMVRNTARDLLYYAVTQDAMLIFENLSRGFGRQGKRTFMAERQYTRMEDWLTAKLAYEGLPSKTYLSKTLAQYTSKTCSNCGFTITSADYDRVLEKLKKTATGWMTTINGKELKVEGQITYYNRYKRQNVVKDLSVELDRLSEESVNNDISSWTKGRSGEALSLLKKRFSHRPVQEKFVCLNCGFETHADEQAALNIARSWLFLRSQEYKKYQTNKTTGNTDKRAFVETWQSFYRKKLKEVWKPAV

SEQ ID NO: 37061 - protein, 978 aa, synthetic construct
  REGION 1..978: note = engineered CasX variant
QEIKRINKIRRRLVKDSNTKKAGKTGPMKTLLVRVMTPDLRERLENLRKKPENIPQPISNTSRANLNKLLTDYTEMKKAILHVYWEEFQKDPVGLMSRVAQPASKKIDQNKLKPEMDEKGNLTTAGFACSQCGQPLFVYKLEQVSEKGKAYTNYFGRCNVAEHEKLILLAQLKPEKDSDEAVTYSLGKFGQRALDFYSIHVTKESTHPVKPLAQIAGNRYASAPVGKALSDACMGTIASFLSKYQDIIIEHQKVVKGNQKRLESLRELAGKENLEYPSVTLPPQPHTKEGVDAYNEVIARVRMWVNLNLWQKLKLSRDDAKPLLRLKGFPSFPLVERQANEVDWWDMVCNVKKLINEKKEDGKVFWQNLAGYKRQEALRPYLSSEEDRKKGKKFARTQLGDLLLHLEKKHGEDWGKVYDEAWERIDKKVEGLSKHIKLEEERRSEDAQSKAALTDWLRAKASFVIEGLKEADKDEFCRCELKLQKWYGDLRGKPFAIEAENSILDISGFSKQYNCAFIWQKDGVKKLNLYLIINYFKGGKLRFKKIKPEAFEANRFYTVINKKSGEIVPMEVNFNFDDPNLIILPLAFGKRQGREFIWNDLLSLETGSLQLANGRVIEKTLYNRRTRQDEPALFVALTFERREVLDSSNIKPMNLIGVDRGENIPAVIALTDPEGCPLSRFKDSLGNPTHILRIGESYKEKQRTIQAKKEVEQRRAGGYSRKYASKAKNLADDMVRNTARDLLYYAVTQDAMLIFENLSRGFGRQGKRTFMAERQYTRMEDWLTAKLAYEGLPSKTYLSKTLAQYTSKTCSNCGFTITSADYDRVLEKLKKTATGWMTTINGKELKVEGQITYYNRYKRQNVVKDLSVELDRLSEESVNNDISSWTKGRSGEALSLLKKRFSHRPVQEKFVCLNCGFETHADEQAALNIARSWLFLRSQEYKKYQTNKTTGNTDKRAFVETWQSFYRKKLKEVWKPAV

SEQ ID NO: 37062 - protein, 978 aa, synthetic construct
  REGION 1..978: note = engineered CasX variant
QEIKRINKIRRRLVKDSNTKKAGKTGPMKTLLVRVMTPDLRERLENLRKKPENIPQPISNTSRANLNKLLTDYTEMKKAILHVYWEEFQKDPVGLMSRVAQPASKKIDQNKLKPEMDEKGNLTTAGFACSQCGQPLFVYKLEQVSEKGKAYTNYFGRCNVAEHEKLILLAQLKPEKDSDEAVTYSLGKFGQRALDFYSIHVTKESTHPVKPLAQIAGNRYASVPVGKALSDACMGTIASFLSKYQDIIIEHQKVVKGNQKRLESLRELAGKENLEYPSVTLPPQPHTKEGVDAYNEVIARVRMWVNLNLWQKLKLSRDDAKPLLRLKGFPSFPLVERQANEVDWWDMVCNVKKLINEKKEDGKVFWQNLAGYKRQEALRPYLSSEEDRKKGKKFARTQLGDLLLHLEKKHGEDWGKVYDEAWERIDKKVEGLSKHIKLEEERRSEDAQSKAALTDWLRAKASFVIEGLKEADKDEFCRCELKLQKWYGDLRGKPFAIEAENSILDISGFSKQYNCAFIWQKDGVKKLNLYLIINYFKGGKLRFKKIKPEAFEANRFYTVINKKSGEIVPMEVNFNFDDPNLIILPLAFGKRQGREFIWNDLLSLETGSLQLANGRVIEKTLYNRRTRQDEPALFVALTFERREVLDSSNIKPMNLIGVDRGENIPAVIALTDPEGCPLSRFKDSLGNPTHILRIGESYKEKQRTIQAKKEVEQRRAGGYSRKYASKAKNLADDMVRNTARDLLYYAVTQDAMLIFENLSRGFGRQGKRTFMAERQYTRMEDWLTAKLAYEGLPSKTYLSKTLAQYTSKTCSNCGFTITSADYDRVLEKLKKTATGWMTTINGKELKVEGQITYYNRYKRQNVVKDLSVELDRLSEESVNNDISSWTKGRSGEALSLLKKRFSHRPVQEKFVCLNCGFETHADEQAALNIARSWLFLRSQEYKKYQTNKTTGNTDKRAFVETWQSFYRKKLKEVWKPAV

SEQ ID NO: 37063 - protein, 978 aa, synthetic construct
  REGION 1..978: note = engineered CasX variant
QEIKRINKIRRRLVKDSNTKKAGKTGPMKTLLVRVMTPDLRERLENLRKKPENIPQPISNTSRANLNKLLTDYTEMKKAILHVYWEEFQKDPVGLMSRVAQPASKKIDQNKLKPEMDEKGNLTTAGFACSQCGQPLFVYKLEQVSEKGKAYTNYFGRCNVAEHEKLIKLAQLKPEKDSDEAVTYSLGKFGQRALDFYSIHVTKESTHPVKPLAQIAGNRYASGPVGKALSDACMGTIASFLSKYQDIIIEHQKVVKGNQKRLESLRELAGKENLEYPSVTLPPQPHTKEGVDAYNEVIARVRMWVNLNLWQKLKLSRDDAKPLLRLKGFPSFPLVERQANEVDWWDMVCNVKKLINEKKEDGKVFWQNLAGYKRQEALRPYLSSEEDRKKGKKFARTQLGDLLLHLEKKHGEDWGKVYDEAWERIDKKVEGLSKHIKLEEERRSEDAQSKAALTDWLRAKASFVIEGLKEADKDEFCRCELKLQKWYGDLRGKPFAIEAENSILDISGFSKQYNCAFIWQKDGVKKLNLYLIINYFKGGKLRFKKIKPEAFEANRFYTVINKKSGEIVPMEVNFNFDDPNLIILPLAFGKRQGREFIWNDLLSLETGSLQLANGRVIEKTLYNRRTRQDEPALFVALTFERREVLDSSNIKPMNLIGVDRGENIPAVIALTDPEGCPLSRFKDSLGNPTHILRIGESYKEKQRTIQAKKEVEQRRAGGYSRKYASKAKNLADDMVRNTARDLLYYAVTQDAMLIFENLSRGFGRQGKRTFMAERQYTRMEDWLTAKLAYEGLPSKTYLSKTLAQYTSKTCSNCGFTITSADYDRVLEKLKKTATGWMTTINGKELKVEGQITYYNRYKRQNVVKDLSVELDRLSEESVNNDISSWTKGRSGEALSLLKKRFSHRPVQEKFVCLNCGFETHADEQAALNIARSWLFLRSQEYKKYQTNKTTGNTDKRAFVETWQSFYRKKLKEVWKPAV

SEQ ID NO: 37064 - protein, 977 aa, synthetic construct
  REGION 1..977: note = engineered CasX variant
QEIKRINKIRRRLVKDSNTKKAGKTGPMKTLLVRVMTPDLRERLENLRKKPENIPQPISNTSRANLNKLLTDYTEMKKAILHVYWEEFQKDPVGLMSRVAQPASKKIDQNKLKPEMDEKGNLTTAGFACSQCGQPLFVYKLEQVSEKGKAYTNYFGRCNVAEHEKLILLAQLKPEKDSDEAVTYSLGKFGQRALDFYSIHVTKESTHPVKPLAQIAGNRYASPVGKALSDACMGTIASFLSKYQDIIIEHQKVVKGNQKRLESLRELAGKENLEYPSVTLPPQPHTKEGVDAYNEVIARVRMWVNLNLWQKLKLSRDDAKPLLRLKGFPSFPLVERQANEVDWWDMVCNVKKLINEKKEDGKVFWQNLAGYKRQEALRPYLSSEEDRKKGKKFARTQLGDLLLHLEKKHGEDWGKVYDEAWERIDKKVEGLSKHIKLEEERRSEDAQSKAALTDWLRAKASFVIEGLKEADKDEFCRCELKLQKWYGDLRGKPFAIEAENSILDISGFSKQYNCAFIWQKDGVKKLNLYLIINYFKGGKLRFKKIKPEAFEANRFYTVINKKSGEIVPMEVNFNFDDPNLIILPLAFGKRQGREFIWNDLLSLETGSLQLANGRVIEKTLYNRRTRQDEPALFVALTFERREVLDSSNIKPMNLIGVDRGENIPAVIALTDPEGCPLSRFKDSLGNPTHILRIGESYKEKQRTIQAKKEVEQRRAGGYSRKYASKAKNLADDMVRNTARDLLYYAVTQDAMLIFENLSRGFGRQGKRTFMAERQYTRMEDWLTAKLAYEGLPSKTYLSKTLAQYTSKTCSNCGFTITSADYDRVLEKLKKTATGWMTTINGKELKVEGQITYYNRYKRQNVVKDLSVELDRLSEESVNNDISSWTKGRSGEALSLLKKRFSHRPVQEKFVCLNCGFETHADEQAALNIARSWLFLRSQEYKKYQTNKTTGNTDKRAFVETWQSFYRKKLKEVWKPAV

SEQ ID NO: 37065 - protein, 979 aa, synthetic construct
  REGION 1..979: note = engineered CasX variant
QEIKRINKIRRRLVKDSNTKKAGKTGPMKTLLVRVMTPDLRERLENLRKKPENIPQPISNTSRANLNKLLTDYTEMKKAILHVYWEEFQKDPVGLMSRVAQPASKKIDQNKLKPEMDEKGNLTTAGFACSQCGQPLFVYKLEQVSEKGKAYTNYFGRCNVAEHEKLILLAQLKPEKDSDEAVTYSLGKFGQRALDFYSIHVTKESTHPVKPLAQIAGNRYASYPVGKALSDACMGTIASFLSKYQDIIIEHQKVVKGNQKRLESLRELAGKENLEYPSVTLPPQPHTKEGVDAYNEVIARVRMWVNLNLWQKLKLSRDDAKPLLRLKGFPSFPLVERQANEVDWWDMVCNVKKLINEKKEDGKVFWQNLAGYKRQEALRPYLSSEEDRKKGKKFARYQLGDLLLHLEKKHEGEDWGKVYDEAWERIDKKVEGLSKHIKLEEERRSEDAQSKAALTDWLRAKASFVIEGLKEADKDEFCRCDLKLQKWYGDLRGKPFAIEAENSILDISGFSKQYNCAFIWQKDGVKKLNLYLIINYFKGGKLRFKKIKPEAFEANRFYTVINKKSGEIVPMEVNFNFDDPNLIILPLAFGKRQGREFIWNDLLSLETGSLKLANGRVIEKTLYNRRTRQDEPALFVALTFERREVLDSSNIKPMNLIGVDRGENIPAVIALTDPEGCPLSRFKDSLGNPTHILRIGESYKEKQRTIQAKKEVEQRRAGGYSRKYASKAKNLADDMVRNTARDLLYYAVTQDAMLIFENLSRGFGRQGKRTFMAERQYTRMEDWLTAKLAYEGLPSKTYLSKTLAQYTSKTCSNCGFTITSADYDRVLEKLKKTATGWMTTINGKELKVEGQITYYNRYKRQNVVKDLSVELDRLSEESVNNDISSWTKGRSGEALSLLKKRFSHRPVQEKFVCLNCGFETHADEQAALNIARSWLFLRSQEYKKYQTNKTTGNTDKRAFVETWQSFYRKKLKEVWKPAV

SEQ ID NO: 37066 - protein, 979 aa, synthetic construct
  REGION 1..979: note = engineered CasX variant
QEIKRINKIRRRLVKDSNTKKAGKTGPMKTLLVRVMTPDLRERLENLRKKPENIPQPISNTSRANLNKLLTDYTEMKKAILHVYWEEFQKDPVGLMSRVAQPASKKIDQNKLKPEMDEKGNLTTAGFACSQCGQPLFVYKLEQVSEKGKAYTNYFGRCNVAEHEKLILLAQLKPEKDSDEAVTYSLGKFGQRALDFYSIHVTKESTHPVKPLAQIAGNRYASHPVGKALSDACMGTIASFLSKYQDIIIEHQKVVKGNQKRLESLRELAGKENLEYPSVTLPPQPHTKEGVDAYNEVIARVRMWVNLNLWQKLKLSRDDAKPLLRLKGFPSFPLVERQANEVDWWDMVCNVKKLINEKKEDGKVFWQNLAGYKRQEALRPYLSSEEDRKKGKKFARYQLGDLLLHLEKKHEGEDWGKVYDEAWERIDKKVEGLSKHIKLEEERRSEDAQSKAALTDWLRAKASFVIEGLKEADKDEFCRCDLKLQKWYGDLRGKPFAIEAENSILDISGFSKQYNCAFIWQKDGVKKLNLYLIINYFKGGKLRFKKIKPEAFEANRFYTVINKKSGEIVPMEVNFNFDDPNLIILPLAFGKRQGREFIWNDLLSLETGSLKLANGRVIEKTLYNRRTRQDEPALFVALTFERREVLDSSNIKPMNLIGVDRGENIPAVIALTDPEGCPLSRFKDSLGNPTHILRIGESYKEKQRTIQAKKEVEQRRAGGYSRKYASKAKNLADDMVRNTARDLLYYAVTQDAMLIFENLSRGFGRQGKRTFMAERQYTRMEDWLTAKLAYEGLPSKTYLSKTLAQYTSKTCSNCGFTITSADYDRVLEKLKKTATGWMTTINGKELKVEGQITYYNRYKRQNVVKDLSVELDRLSEESVNNDISSWTKGRSGEALSLLKKRFSHRPVQEKFVCLNCGFETHADEQAALNIARSWLFLRSQEYKKYQTNKTTGNTDKRAFVETWQSFYRKKLKEVWKPAV

SEQ ID NO: 37067 - protein, 979 aa, synthetic construct
  REGION 1..979: note = engineered CasX variant
QEIKRINKIRRRLVKDSNTKKAGKTGPMKTLLVRVMTPDLRERLENLRKKPENIPQPISNTSRANLNKLLTDYTEMKKAILHVYWEEFQKDPVGLMSRVAQPASKKIDQNKLKPEMDEKGNLTTAGFACSQCGQPLFVYKLEQVSEKGKAYTNYFGRCNVAEHEKLILLAQLKPEKDSDEAVTYSLGKFGQRALDFYSIHVTKESTHPVKPLAQIAGNRYASSPVGKALSDACMGTIASFLSKYQDIIIEHQKVVKGNQKRLESLRELAGKENLEYPSVTLPPQPHTKEGVDAYNEVIARVRMWVNLNLWQKLKLSRDDAKPLLRLKGFPSFPLVERQANEVDWWDMVCNVKKLINEKKEDGKVFWQNLAGYKRQEALRPYLSSEEDRKKGKKFARYQLGDLLLHLEKKHEGEDWGKVYDEAWERIDKKVEGLSKHIKLEEERRSEDAQSKAALTDWLRAKASFVIEGLKEADKDEFCRCDLKLQKWYGDLRGKPFAIEAENSILDISGFSKQYNCAFIWQKDGVKKLNLYLIINYFKGGKLRFKKIKPEAFEANRFYTVINKKSGEIVPMEVNFNFDDPNLIILPLAFGKRQGREFIWNDLLSLETGSLKLANGRVIEKTLYNRRTRQDEPALFVALTFERREVLDSSNIKPMNLIGVDRGENIPAVIALTDPEGCPLSRFKDSLGNPTHILRIGESYKEKQRTIQAKKEVEQRRAGGYSRKYASKAKNLADDMVRNTARDLLYYAVTQDAMLIFENLSRGFGRQGKRTFMAERQYTRMEDWLTAKLAYEGLPSKTYLSKTLAQYTSKTCSNCGFTITSADYDRVLEKLKKTATGWMTTINGKELKVEGQITYYNRYKRQNVVKDLSVELDRLSEESVNNDISSWTKGRSGEALSLLKKRFSHRPVQEKFVCLNCGFETHADEQAALNIARSWLFLRSQEYKKYQTNKTTGNTDKRAFVETWQSFYRKKLKEVWKPAV

SEQ ID NO: 37068 - protein, 979 aa, synthetic construct
  REGION 1..979: note = engineered CasX variant
QEIKRINKIRRRLVKDSNTKKAGKTGPMKTLLVRVMTPDLRERLENLRKKPENIPQPISNTSRANLNKLLTDYTEMKKAILHVYWEEFQKDPVGLMSRVAQPASKKIDQNKLKPEMDEKGNLTTAGFACSQCGQPLFVYKLEQVSEKGKAYTNYFGRCNVAEHEKLILLAQLKPEKDSDEAVTYSLGKFGQRALDFYSIHVTKESTHPVKPLAQIAGNRYASTPVGKALSDACMGTIASFLSKYQDIIIEHQKVVKGNQKRLESLRELAGKENLEYPSVTLPPQPHTKEGVDAYNEVIARVRMWVNLNLWQKLKLSRDDAKPLLRLKGFPSFPLVERQANEVDWWDMVCNVKKLINEKKEDGKVFWQNLAGYKRQEALRPYLSSEEDRKKGKKFARYQLGDLLLHLEKKHEGEDWGKVYDEAWERIDKKVEGLSKHIKLEEERRSEDAQSKAALTDWLRAKASFVIEGLKEADKDEFCRCDLKLQKWYGDLRGKPFAIEAENSILDISGFSKQYNCAFIWQKDGVKKLNLYLIINYFKGGKLRFKKIKPEAFEANRFYTVINKKSGEIVPMEVNFNFDDPNLIILPLAFGKRQGREFIWNDLLSLETGSLKLANGRVIEKTLYNRRTRQDEPALFVALTFERREVLDSSNIKPMNLIGVDRGENIPAVIALTDPEGCPLSRFKDSLGNPTHILRIGESYKEKQRTIQAKKEVEQRRAGGYSRKYASKAKNLADDMVRNTARDLLYYAVTQDAMLIFENLSRGFGRQGKRTFMAERQYTRMEDWLTAKLAYEGLPSKTYLSKTLAQYTSKTCSNCGFTITSADYDRVLEKLKKTATGWMTTINGKELKVEGQITYYNRYKRQNVVKDLSVELDRLSEESVNNDISSWTKGRSGEALSLLKKRFSHRPVQEKFVCLNCGFETHADEQAALNIARSWLFLRSQEYKKYQTNKTTGNTDKRAFVETWQSFYRKKLKEVWKPAV

SEQ ID NO: 37069 - protein, 979 aa, synthetic construct
  REGION 1..979: note = engineered CasX variant
QEIKRINKIRRRLVKDSNTKKAGKTGPMKTLLVRVMTPDLRERLENLRKKPENIPQPISNTSRANLNKLLTDYTEMKKAILHVYWEEFQKDPVGLMSRVAQPASKKIDQNKLKPEMDEKGNLTTAGFACSQCGQPLFVYKLEQVSEKGKAYTNYFGRCNVAEHEKLILLAQLKPEKDSDEAVTYSLGKFGQRALDFYSIHVTKESTHPVKPLAQIAGNRYASAPVGKALSDACMGTIASFLSKYQDIIIEHQKVVKGNQKRLESLRELAGKENLEYPSVTLPPQPHTKEGVDAYNEVIARVRMWVNLNLWQKLKLSRDDAKPLLRLKGFPSFPLVERQANEVDWWDMVCNVKKLINEKKEDGKVFWQNLAGYKRQEALRPYLSSEEDRKKGKKFARYQLGDLLLHLEKKHEGEDWGKVYDEAWERIDKKVEGLSKHIKLEEERRSEDAQSKAALTDWLRAKASFVIEGLKEADKDEFCRCDLKLQKWYGDLRGKPFAIEAENSILDISGFSKQYNCAFIWQKDGVKKLNLYLIINYFKGGKLRFKKIKPEAFEANRFYTVINKKSGEIVPMEVNFNFDDPNLIILPLAFGKRQGREFIWNDLLSLETGSLKLANGRVIEKTLYNRRTRQDEPALFVALTFERREVLDSSNIKPMNLIGVDRGENIPAVIALTDPEGCPLSRFKDSLGNPTHILRIGESYKEKQRTIQAKKEVEQRRAGGYSRKYASKAKNLADDMVRNTARDLLYYAVTQDAMLIFENLSRGFGRQGKRTFMAERQYTRMEDWLTAKLAYEGLPSKTYLSKTLAQYTSKTCSNCGFTITSADYDRVLEKLKKTATGWMTTINGKELKVEGQITYYNRYKRQNVVKDLSVELDRLSEESVNNDISSWTKGRSGEALSLLKKRFSHRPVQEKFVCLNCGFETHADEQAALNIARSWLFLRSQEYKKYQTNKTTGNTDKRAFVETWQSFYRKKLKEVWKPAV

SEQ ID NO: 37070 - protein, 979 aa, synthetic construct
  REGION 1..979: note = engineered CasX variant
QEIKRINKIRRRLVKDSNTKKAGKTGPMKTLLVRVMTPDLRERLENLRKKPENIPQPISNTSRANLNKLLTDYTEMKKAILHVYWEEFQKDPVGLMSRVAQPASKKIDQNKLKPEMDEKGNLTTAGFACSQCGQPLFVYKLEQVSEKGKAYTNYFGRCNVAEHEKLILLAQLKPEKDSDEAVTYSLGKFGQRALDFYSIHVTKESTHPVKPLAQIAGNRYASVPVGKALSDACMGTIASFLSKYQDIIIEHQKVVKGNQKRLESLRELAGKENLEYPSVTLPPQPHTKEGVDAYNEVIARVRMWVNLNLWQKLKLSRDDAKPLLRLKGFPSFPLVERQANEVDWWDMVCNVKKLINEKKEDGKVFWQNLAGYKRQEALRPYLSSEEDRKKGKKFARYQLGDLLLHLEKKHEGEDWGKVYDEAWERIDKKVEGLSKHIKLEEERRSEDAQSKAALTDWLRAKASFVIEGLKEADKDEFCRCDLKLQKWYGDLRGKPFAIEAENSILDISGFSKQYNCAFIWQKDGVKKLNLYLIINYFKGGKLRFKKIKPEAFEANRFYTVINKKSGEIVPMEVNFNFDDPNLIILPLAFGKRQGREFIWNDLLSLETGSLKLANGRVIEKTLYNRRTRQDEPALFVALTFERREVLDSSNIKPMNLIGVDRGENIPAVIALTDPEGCPLSRFKDSLGNPTHILRIGESYKEKQRTIQAKKEVEQRRAGGYSRKYASKAKNLADDMVRNTARDLLYYAVTQDAMLIFENLSRGFGRQGKRTFMAERQYTRMEDWLTAKLAYEGLPSKTYLSKTLAQYTSKTCSNCGFTITSADYDRVLEKLKKTATGWMTTINGKELKVEGQITYYNRYKRQNVVKDLSVELDRLSEESVNNDISSWTKGRSGEALSLLKKRFSHRPVQEKFVCLNCGFETHADEQAALNIARSWLFLRSQEYKKYQTNKTTGNTDKRAFVETWQSFYRKKLKEVWKPAV

SEQ ID NO: 37071 - protein, 979 aa, synthetic construct
  REGION 1..979: note = engineered CasX variant
QEIKRINKIRRRLVKDSNTKKAGKTGPMKTLLVRVMTPDLRERLENLRKKPENIPQPISNTSRANLNKLLTDYTEMKKAILHVYWEEFQKDPVGLMSRVAQPASKKIDQNKLKPEMDEKGNLTTAGFACSQCGQPLFVYKLEQVSEKGKAYTNYFGRCNVAEHEKLIKLAQLKPEKDSDEAVTYSLGKFGQRALDFYSIHVTKESTHPVKPLAQIAGNRYASGPVGKALSDACMGTIASFLSKYQDIIIEHQKVVKGNQKRLESLRELAGKENLEYPSVTLPPQPHTKEGVDAYNEVIARVRMWVNLNLWQKLKLSRDDAKPLLRLKGFPSFPLVERQANEVDWWDMVCNVKKLINEKKEDGKVFWQNLAGYKRQEALRPYLSSEEDRKKGKKFARYQLGDLLLHLEKKHEGEDWGKVYDEAWERIDKKVEGLSKHIKLEEERRSEDAQSKAALTDWLRAKASFVIEGLKEADKDEFCRCDLKLQKWYGDLRGKPFAIEAENSILDISGFSKQYNCAFIWQKDGVKKLNLYLIINYFKGGKLRFKKIKPEAFEANRFYTVINKKSGEIVPMEVNFNFDDPNLIILPLAFGKRQGREFIWNDLLSLETGSLKLANGRVIEKTLYNRRTRQDEPALFVALTFERREVLDSSNIKPMNLIGVDRGENIPAVIALTDPEGCPLSRFKDSLGNPTHILRIGESYKEKQRTIQAKKEVEQRRAGGYSRKYASKAKNLADDMVRNTARDLLYYAVTQDAMLIFENLSRGFGRQGKRTFMAERQYTRMEDWLTAKLAYEGLPSKTYLSKTLAQYTSKTCSNCGFTITSADYDRVLEKLKKTATGWMTTINGKELKVEGQITYYNRYKRQNVVKDLSVELDRLSEESVNNDISSWTKGRSGEALSLLKKRFSHRPVQEKFVCLNCGFETHADEQAALNIARSWLFLRSQEYKKYQTNKTTGNTDKRAFVETWQSFYRKKLKEVWKPAV

SEQ ID NO: 37072 - protein, 978 aa, synthetic construct
  REGION 1..978: note = engineered CasX variant
QEIKRINKIRRRLVKDSNTKKAGKTGPMKTLLVRVMTPDLRERLENLRKKPENIPQPISNTSRANLNKLLTDYTEMKKAILHVYWEEFQKDPVGLMSRVAQPASKKIDQNKLKPEMDEKGNLTTAGFACSQCGQPLFVYKLEQVSEKGKAYTNYFGRCNVAEHEKLILLAQLKPEKDSDEAVTYSLGKFGQRALDFYSIHVTKESTHPVKPLAQIAGNRYASPVGKALSDACMGTIASFLSKYQDIIIEHQKVVKGNQKRLESLRELAGKENLEYPSVTLPPQPHTKEGVDAYNEVIARVRMWVNLNLWQKLKLSRDDAKPLLRLKGFPSFPLVERQANEVDWWDMVCNVKKLINEKKEDGKVFWQNLAGYKRQEALRPYLSSEEDRKKGKKFARYQLGDLLLHLEKKHEGEDWGKVYDEAWERIDKKVEGLSKHIKLEEERRSEDAQSKAALTDWLRAKASFVIEGLKEADKDEFCRCDLKLQKWYGDLRGKPFAIEAENSILDISGFSKQYNCAFIWQKDGVKKLNLYLIINYFKGGKLRFKKIKPEAFEANRFYTVINKKSGEIVPMEVNFNFDDPNLIILPLAFGKRQGREFIWNDLLSLETGSLKLANGRVIEKTLYNRRTRQDEPALFVALTFERREVLDSSNIKPMNLIGVDRGENIPAVIALTDPEGCPLSRFKDSLGNPTHILRIGESYKEKQRTIQAKKEVEQRRAGGYSRKYASKAKNLADDMVRNTARDLLYYAVTQDAMLIFENLSRGFGRQGKRTFMAERQYTRMEDWLTAKLAYEGLPSKTYLSKTLAQYTSKTCSNCGFTITSADYDRVLEKLKKTATGWMTTINGKELKVEGQITYYNRYKRQNVVKDLSVELDRLSEESVNNDISSWTKGRSGEALSLLKKRFSHRPVQEKFVCLNCGFETHADEQAALNIARSWLFLRSQEYKKYQTNKTTGNTDKRAFVETWQSFYRKKLKEVWKPAV

SEQ ID NO: 37073 - protein, 979 aa, synthetic construct
  REGION 1..979: note = engineered CasX variant
QEIKRINKIRRRLVKDSNTKKAGKTGPMKTLLVRVMTPDLRERLENLRKKPENIPQPISNTSRANLNKLLTDYTEMKKAILHVYWEEFQKDPVGLMSRVAQPASKKIDQNKLKPEMDEKGNLTTAGFACSQCGQPLFVYKLEQVSEKGKAYTNYFGRCNVAEHEKLILLAQLKPEKDSDEAVTYSLGKFGQRALDFYSIHVTKESTHPVKPLAQIAGNRYASYPVGKALSDACMGTIASFLSKYQDIIIEHQKVVKGNQKRLESLRELAGKENLEYPSVTLPPQPHTKEGVDAYNEVIARVRMWVNLNLWQKLKLSRDDAKPLLRLKGFPSFPLVERQANEVDWWDMVCNVKKLINEKKEDGKVFWQNLAGYKRQEALRPYLSSEEDRKKGKKFARYQLGDLLLHLEKKHEGEDWGKVYDEAWERIDKKVEGLSKHIKLEEERRSEDAQSKAALTDWLRAKASFVIEGLKEADKDEFCRCELKLQKWYGDLRGKPFAIEAENSILDISGFSKQYNCAFIWQKDGVKKLNLYLIINYFKGGKLRFKKIKPEAFEANRFYTVINKKSGEIVPMEVNFNFDDPNLIILPLAFGKRFGREFIWNDLLSLETGSLKLANGRVIEKTLYNRRTRQDEPALFVALTFERREVLDSSNIKPMNLIGVDRGENIPAVIALTDPEGCPLSRFKDSLGNPTHILRIGESYKEKQRTIQAKKEVEQRRAGGYSRKYASKAKNLADDMVRNTARDLLYYAVTQDAMLIFENLSRGFGRQGKRTFMAERQYTRMEDWLTAKLAYEGLPSKTYLSKTLAQYTSKTCSNCGFTITSADYDRVLEKLKKTATGWMTTINGKELKVEGQITYYNRYKRQNVVKDLSVELDRLSEESVNNDISSWTKGRSGEALSLLKKRFSHRPVQEKFVCLNCGFETHADEQAALNIARSWLFLRSQEYKKYQTNKTTGNTDKRAFVETWQSFYRKKLKEVWKPAV

SEQ ID NO: 37074 - protein, 979 aa, synthetic construct
  REGION 1..979: note = engineered CasX variant
QEIKRINKIRRRLVKDSNTKKAGKTGPMKTLLVRVMTPDLRERLENLRKKPENIPQPISNTSRANLNKLLTDYTEMKKAILHVYWEEFQKDPVGLMSRVAQPASKKIDQNKLKPEMDEKGNLTTAGFACSQCGQPLFVYKLEQVSEKGKAYTNYFGRCNVAEHEKLILLAQLKPEKDSDEAVTYSLGKFGQRALDFYSIHVTKESTHPVKPLAQIAGNRYASHPVGKALSDACMGTIASFLSKYQDIIIEHQKVVKGNQKRLESLRELAGKENLEYPSVTLPPQPHTKEGVDAYNEVIARVRMWVNLNLWQKLKLSRDDAKPLLRLKGFPSFPLVERQANEVDWWDMVCNVKKLINEKKEDGKVFWQNLAGYKRQEALRPYLSSEEDRKKGKKFARYQLGDLLLHLEKKHEGEDWGKVYDEAWERIDKKVEGLSKHIKLEEERRSEDAQSKAALTDWLRAKASFVIEGLKEADKDEFCRCELKLQKWYGDLRGKPFAIEAENSILDISGFSKQYNCAFIWQKDGVKKLNLYLIINYFKGGKLRFKKIKPEAFEANRFYTVINKKSGEIVPMEVNFNFDDPNLIILPLAFGKRFGREFIWNDLLSLETGSLKLANGRVIEKTLYNRRTRQDEPALFVALTFERREVLDSSNIKPMNLIGVDRGENIPAVIALTDPEGCPLSRFKDSLGNPTHILRIGESYKEKQRTIQAKKEVEQRRAGGYSRKYASKAKNLADDMVRNTARDLLYYAVTQDAMLIFENLSRGFGRQGKRTFMAERQYTRMEDWLTAKLAYEGLPSKTYLSKTLAQYTSKTCSNCGFTITSADYDRVLEKLKKTATGWMTTINGKELKVEGQITYYNRYKRQNVVKDLSVELDRLSEESVNNDISSWTKGRSGEALSLLKKRFSHRPVQEKFVCLNCGFETHADEQAALNIARSWLFLRSQEYKKYQTNKTTGNTDKRAFVETWQSFYRKKLKEVWKPAV

SEQ ID NO: 37075 - protein, 979 aa, synthetic construct
  REGION 1..979: note = engineered CasX variant
QEIKRINKIRRRLVKDSNTKKAGKTGPMKTLLVRVMTPDLRERLENLRKKPENIPQPISNTSRANLNKLLTDYTEMKKAILHVYWEEFQKDPVGLMSRVAQPASKKIDQNKLKPEMDEKGNLTTAGFACSQCGQPLFVYKLEQVSEKGKAYTNYFGRCNVAEHEKLILLAQLKPEKDSDEAVTYSLGKFGQRALDFYSIHVTKESTHPVKPLAQIAGNRYASSPVGKALSDACMGTIASFLSKYQDIIIEHQKVVKGNQKRLESLRELAGKENLEYPSVTLPPQPHTKEGVDAYNEVIARVRMWVNLNLWQKLKLSRDDAKPLLRLKGFPSFPLVERQANEVDWWDMVCNVKKLINEKKEDGKVFWQNLAGYKRQEALRPYLSSEEDRKKGKKFARYQLGDLLLHLEKKHEGEDWGKVYDEAWERIDKKVEGLSKHIKLEEERRSEDAQSKAALTDWLRAKASFVIEGLKEADKDEFCRCELKLQKWYGDLRGKPFAIEAENSILDISGFSKQYNCAFIWQKDGVKKLNLYLIINYFKGGKLRFKKIKPEAFEANRFYTVINKKSGEIVPMEVNFNFDDPNLIILPLAFGKRFGREFIWNDLLSLETGSLKLANGRVIEKTLYNRRTRQDEPALFVALTFERREVLDSSNIKPMNLIGVDRGENIPAVIALTDPEGCPLSRFKDSLGNPTHILRIGESYKEKQRTIQAKKEVEQRRAGGYSRKYASKAKNLADDMVRNTARDLLYYAVTQDAMLIFENLSRGFGRQGKRTFMAERQYTRMEDWLTAKLAYEGLPSKTYLSKTLAQYTSKTCSNCGFTITSADYDRVLEKLKKTATGWMTTINGKELKVEGQITYYNRYKRQNVVKDLSVELDRLSEESVNNDISSWTKGRSGEALSLLKKRFSHRPVQEKFVCLNCGFETHADEQAALNIARSWLFLRSQEYKKYQTNKTTGNTDKRAFVETWQSFYRKKLKEVWKPAV

SEQ ID NO: 37076 - protein, 979 aa, synthetic construct
  REGION 1..979: note = engineered CasX variant
QEIKRINKIRRRLVKDSNTKKAGKTGPMKTLLVRVMTPDLRERLENLRKKPENIPQPISNTSRANLNKLLTDYTEMKKAILHVYWEEFQKDPVGLMSRVAQPASKKIDQNKLKPEMDEKGNLTTAGFACSQCGQPLFVYKLEQVSEKGKAYTNYFGRCNVAEHEKLILLAQLKPEKDSDEAVTYSLGKFGQRALDFYSIHVTKESTHPVKPLAQIAGNRYASTPVGKALSDACMGTIASFLSKYQDIIIEHQKVVKGNQKRLESLRELAGKENLEYPSVTLPPQPHTKEGVDAYNEVIARVRMWVNLNLWQKLKLSRDDAKPLLRLKGFPSFPLVERQANEVDWWDMVCNVKKLINEKKEDGKVFWQNLAGYKRQEALRPYLSSEEDRKKGKKFARYQLGDLLLHLEKKHEGEDWGKVYDEAWERIDKKVEGLSKHIKLEEERRSEDAQSKAALTDWLRAKASFVIEGLKEADKDEFCRCELKLQKWYGDLRGKPFAIEAENSILDISGFSKQYNCAFIWQKDGVKKLNLYLIINYFKGGKLRFKKIKPEAFEANRFYTVINKKSGEIVPMEVNFNFDDPNLIILPLAFGKRFGREFIWNDLLSLETGSLKLANGRVIEKTLYNRRTRQDEPALFVALTFERREVLDSSNIKPMNLIGVDRGENIPAVIALTDPEGCPLSRFKDSLGNPTHILRIGESYKEKQRTIQAKKEVEQRRAGGYSRKYASKAKNLADDMVRNTARDLLYYAVTQDAMLIFENLSRGFGRQGKRTFMAERQYTRMEDWLTAKLAYEGLPSKTYLSKTLAQYTSKTCSNCGFTITSADYDRVLEKLKKTATGWMTTINGKELKVEGQITYYNRYKRQNVVKDLSVELDRLSEESVNNDISSWTKGRSGEALSLLKKRFSHRPVQEKFVCLNCGFETHADEQAALNIARSWLFLRSQEYKKYQTNKTTGNTDKRAFVETWQSFYRKKLKEVWKPAV

SEQ ID NO: 37077 - protein, 979 aa, synthetic construct
  REGION 1..979: note = engineered CasX variant
QEIKRINKIRRRLVKDSNTKKAGKTGPMKTLLVRVMTPDLRERLENLRKKPENIPQPISNTSRANLNKLLTDYTEMKKAILHVYWEEFQKDPVGLMSRVAQPASKKIDQNKLKPEMDEKGNLTTAGFACSQCGQPLFVYKLEQVSEKGKAYTNYFGRCNVAEHEKLILLAQLKPEKDSDEAVTYSLGKFGQRALDFYSIHVTKESTHPVKPLAQIAGNRYASAPVGKALSDACMGTIASFLSKYQDIIIEHQKVVKGNQKRLESLRELAGKENLEYPSVTLPPQPHTKEGVDAYNEVIARVRMWVNLNLWQKLKLSRDDAKPLLRLKGFPSFPLVERQANEVDWWDMVCNVKKLINEKKEDGKVFWQNLAGYKRQEALRPYLSSEEDRKKGKKFARYQLGDLLLHLEKKHEGEDWGKVYDEAWERIDKKVEGLSKHIKLEEERRSEDAQSKAALTDWLRAKASFVIEGLKEADKDEFCRCELKLQKWYGDLRGKPFAIEAENSILDISGFSKQYNCAFIWQKDGVKKLNLYLIINYFKGGKLRFKKIKPEAFEANRFYTVINKKSGEIVPMEVNFNFDDPNLIILPLAFGKRFGREFIWNDLLSLETGSLKLANGRVIEKTLYNRRTRQDEPALFVALTFERREVLDSSNIKPMNLIGVDRGENIPAVIALTDPEGCPLSRFKDSLGNPTHILRIGESYKEKQRTIQAKKEVEQRRAGGYSRKYASKAKNLADDMVRNTARDLLYYAVTQDAMLIFENLSRGFGRQGKRTFMAERQYTRMEDWLTAKLAYEGLPSKTYLSKTLAQYTSKTCSNCGFTITSADYDRVLEKLKKTATGWMTTINGKELKVEGQITYYNRYKRQNVVKDLSVELDRLSEESVNNDISSWTKGRSGEALSLLKKRFSHRPVQEKFVCLNCGFETHADEQAALNIARSWLFLRSQEYKKYQTNKTTGNTDKRAFVETWQSFYRKKLKEVWKPAV

SEQ ID NO: 37078 - protein, 979 aa, synthetic construct
  REGION 1..979: note = engineered CasX variant
QEIKRINKIRRRLVKDSNTKKAGKTGPMKTLLVRVMTPDLRERLENLRKKPENIPQPISNTSRANLNKLLTDYTEMKKAILHVYWEEFQKDPVGLMSRVAQPASKKIDQNKLKPEMDEKGNLTTAGFACSQCGQPLFVYKLEQVSEKGKAYTNYFGRCNVAEHEKLILLAQLKPEKDSDEAVTYSLGKFGQRALDFYSIHVTKESTHPVKPLAQIAGNRYASVPVGKALSDACMGTIASFLSKYQDIIIEHQKVVKGNQKRLESLRELAGKENLEYPSVTLPPQPHTKEGVDAYNEVIARVRMWVNLNLWQKLKLSRDDAKPLLRLKGFPSFPLVERQANEVDWWDMVCNVKKLINEKKEDGKVFWQNLAGYKRQEALRPYLSSEEDRKKGKKFARYQLGDLLLHLEKKHEGEDWGKVYDEAWERIDKKVEGLSKHIKLEEERRSEDAQSKAALTDWLRAKASFVIEGLKEADKDEFCRCELKLQKWYGDLRGKPFAIEAENSILDISGFSKQYNCAFIWQKDGVKKLNLYLIINYFKGGKLRFKKIKPEAFEANRFYTVINKKSGEIVPMEVNFNFDDPNLIILPLAFGKRFGREFIWNDLLSLETGSLKLANGRVIEKTLYNRRTRQDEPALFVALTFERREVLDSSNIKPMNLIGVDRGENIPAVIALTDPEGCPLSRFKDSLGNPTHILRIGESYKEKQRTIQAKKEVEQRRAGGYSRKYASKAKNLADDMVRNTARDLLYYAVTQDAMLIFENLSRGFGRQGKRTFMAERQYTRMEDWLTAKLAYEGLPSKTYLSKTLAQYTSKTCSNCGFTITSADYDRVLEKLKKTATGWMTTINGKELKVEGQITYYNRYKRQNVVKDLSVELDRLSEESVNNDISSWTKGRSGEALSLLKKRFSHRPVQEKFVCLNCGFETHADEQAALNIARSWLFLRSQEYKKYQTNKTTGNTDKRAFVETWQSFYRKKLKEVWKPAV

SEQ ID NO: 37079 - protein, 979 aa, synthetic construct
  REGION 1..979: note = engineered CasX variant
QEIKRINKIRRRLVKDSNTKKAGKTGPMKTLLVRVMTPDLRERLENLRKKPENIPQPISNTSRANLNKLLTDYTEMKKAILHVYWEEFQKDPVGLMSRVAQPASKKIDQNKLKPEMDEKGNLTTAGFACSQCGQPLFVYKLEQVSEKGKAYTNYFGRCNVAEHEKLIKLAQLKPEKDSDEAVTYSLGKFGQRALDFYSIHVTKESTHPVKPLAQIAGNRYASGPVGKALSDACMGTIASFLSKYQDIIIEHQKVVKGNQKRLESLRELAGKENLEYPSVTLPPQPHTKEGVDAYNEVIARVRMWVNLNLWQKLKLSRDDAKPLLRLKGFPSFPLVERQANEVDWWDMVCNVKKLINEKKEDGKVFWQNLAGYKRQEALRPYLSSEEDRKKGKKFARYQLGDLLLHLEKKHEGEDWGKVYDEAWERIDKKVEGLSKHIKLEEERRSEDAQSKAALTDWLRAKASFVIEGLKEADKDEFCRCELKLQKWYGDLRGKPFAIEAENSILDISGFSKQYNCAFIWQKDGVKKLNLYLIINYFKGGKLRFKKIKPEAFEANRFYTVINKKSGEIVPMEVNFNFDDPNLIILPLAFGKRFGREFIWNDLLSLETGSLKLANGRVIEKTLYNRRTRQDEPALFVALTFERREVLDSSNIKPMNLIGVDRGENIPAVIALTDPEGCPLSRFKDSLGNPTHILRIGESYKEKQRTIQAKKEVEQRRAGGYSRKYASKAKNLADDMVRNTARDLLYYAVTQDAMLIFENLSRGFGRQGKRTFMAERQYTRMEDWLTAKLAYEGLPSKTYLSKTLAQYTSKTCSNCGFTITSADYDRVLEKLKKTATGWMTTINGKELKVEGQITYYNRYKRQNVVKDLSVELDRLSEESVNNDISSWTKGRSGEALSLLKKRFSHRPVQEKFVCLNCGFETHADEQAALNIARSWLFLRSQEYKKYQTNKTTGNTDKRAFVETWQSFYRKKLKEVWKPAV

SEQ ID NO: 37080 - protein, 978 aa, synthetic construct
  REGION 1..978: note = engineered CasX variant
QEIKRINKIRRRLVKDSNTKKAGKTGPMKTLLVRVMTPDLRERLENLRKKPENIPQPISNTSRANLNKLLTDYTEMKKAILHVYWEEFQKDPVGLMSRVAQPASKKIDQNKLKPEMDEKGNLTTAGFACSQCGQPLFVYKLEQVSEKGKAYTNYFGRCNVAEHEKLILLAQLKPEKDSDEAVTYSLGKFGQRALDFYSIHVTKESTHPVKPLAQIAGNRYASPVGKALSDACMGTIASFLSKYQDIIIEHQKVVKGNQKRLESLRELAGKENLEYPSVTLPPQPHTKEGVDAYNEVIARVRMWVNLNLWQKLKLSRDDAKPLLRLKGFPSFPLVERQANEVDWWDMVCNVKKLINEKKEDGKVFWQNLAGYKRQEALRPYLSSEEDRKKGKKFARYQLGDLLLHLEKKHEGEDWGKVYDEAWERIDKKVEGLSKHIKLEEERRSEDAQSKAALTDWLRAKASFVIEGLKEADKDEFCRCELKLQKWYGDLRGKPFAIEAENSILDISGFSKQYNCAFIWQKDGVKKLNLYLIINYFKGGKLRFKKIKPEAFEANRFYTVINKKSGEIVPMEVNFNFDDPNLIILPLAFGKRFGREFIWNDLLSLETGSLKLANGRVIEKTLYNRRTRQDEPALFVALTFERREVLDSSNIKPMNLIGVDRGENIPAVIALTDPEGCPLSRFKDSLGNPTHILRIGESYKEKQRTIQAKKEVEQRRAGGYSRKYASKAKNLADDMVRNTARDLLYYAVTQDAMLIFENLSRGFGRQGKRTFMAERQYTRMEDWLTAKLAYEGLPSKTYLSKTLAQYTSKTCSNCGFTITSADYDRVLEKLKKTATGWMTTINGKELKVEGQITYYNRYKRQNVVKDLSVELDRLSEESVNNDISSWTKGRSGEALSLLKKRFSHRPVQEKFVCLNCGFETHADEQAALNIARSWLFLRSQEYKKYQTNKTTGNTDKRAFVETWQSFYRKKLKEVWKPAV

SEQ ID NO: 37081 - protein, 979 aa, synthetic construct
  REGION 1..979: note = engineered CasX variant
QEIKRINKIRRRLVKDSNTKKAGKTGPMKTLLVRVMTPDLRERLENLRKKPENIPQPISNTSRANLNKLLTDYTEMKKAILHVYWEEFQKDPVGLMSRVAQPASKKIDQNKLKPEMDEKGNLTTAGFACSQCGQPLFVYKLEQVSEKGKAYTNYFGRCNVAEHEKLILLAQLKPEKDSDEAVTYSLGKFGQRALDFYSIHVTKESTHPVKPLAQIAGNRYASYPVGKALSDACMGTIASFLSKYQDIIIEHQKVVKGNQKRLESLRELAGKENLEYPSVTLPPQPHTKEGVDAYNEVIARVRMWVNLNLWQKLKLSRDDAKPLLRLKGFPSFPLVERQANEVDWWDMVCNVKKLINEKKEDGKVFWQNLAGYKRQEALRPYLSSEEDRKKGKKFARYQLGDLLLHLEKKHEGEDWGKVYDEAWERIDKKVEGLSKHIKLEEERRSEDAQSKAALTDWLRAKASFVIEGLKEADKDEFCRCELKLQKWYGDLRGKPFAIEAENSILDISGFSKQYNCAFIWQKDGVKKLNLYLIINYFKGGKLRFKKIKPEAFEANRFYTVINKKSGEIVPMEVNFNFDDPNLIILPLAFGKRVGREFIWNDLLSLETGSLKLANGRVIEKTLYNRRTRQDEPALFVALTFERREVLDSSNIKPMNLIGVDRGENIPAVIALTDPEGCPLSRFKDSLGNPTHILRIGESYKEKQRTIQAKKEVEQRRAGGYSRKYASKAKNLADDMVRNTARDLLYYAVTQDAMLIFENLSRGFGRQGKRTFMAERQYTRMEDWLTAKLAYEGLPSKTYLSKTLAQYTSKTCSNCGFTITSADYDRVLEKLKKTATGWMTTINGKELKVEGQITYYNRYKRQNVVKDLSVELDRLSEESVNNDISSWTKGRSGEALSLLKKRFSHRPVQEKFVCLNCGFETHADEQAALNIARSWLFLRSQEYKKYQTNKTTGNTDKRAFVETWQSFYRKKLKEVWKPAV

SEQ ID NO: 37082 - protein, 979 aa, synthetic construct
  REGION 1..979: note = engineered CasX variant
QEIKRINKIRRRLVKDSNTKKAGKTGPMKTLLVRVMTPDLRERLENLRKKPENIPQPISNTSRANLNKLLTDYTEMKKAILHVYWEEFQKDPVGLMSRVAQPASKKIDQNKLKPEMDEKGNLTTAGFACSQCGQPLFVYKLEQVSEKGKAYTNYFGRCNVAEHEKLILLAQLKPEKDSDEAVTYSLGKFGQRALDFYSIHVTKESTHPVKPLAQIAGNRYASHPVGKALSDACMGTIASFLSKYQDIIIEHQKVVKGNQKRLESLRELAGKENLEYPSVTLPPQPHTKEGVDAYNEVIARVRMWVNLNLWQKLKLSRDDAKPLLRLKGFPSFPLVERQANEVDWWDMVCNVKKLINEKKEDGKVFWQNLAGYKRQEALRPYLSSEEDRKKGKKFARYQLGDLLLHLEKKHEGEDWGKVYDEAWERIDKKVEGLSKHIKLEEERRSEDAQSKAALTDWLRAKASFVIEGLKEADKDEFCRCELKLQKWYGDLRGKPFAIEAENSILDISGFSKQYNCAFIWQKDGVKKLNLYLIINYFKGGKLRFKKIKPEAFEANRFYTVINKKSGEIVPMEVNFNFDDPNLIILPLAFGKRVGREFIWNDLLSLETGSLKLANGRVIEKTLYNRRTRQDEPALFVALTFERREVLDSSNIKPMNLIGVDRGENIPAVIALTDPEGCPLSRFKDSLGNPTHILRIGESYKEKQRTIQAKKEVEQRRAGGYSRKYASKAKNLADDMVRNTARDLLYYAVTQDAMLIFENLSRGFGRQGKRTFMAERQYTRMEDWLTAKLAYEGLPSKTYLSKTLAQYTSKTCSNCGFTITSADYDRVLEKLKKTATGWMTTINGKELKVEGQITYYNRYKRQNVVKDLSVELDRLSEESVNNDISSWTKGRSGEALSLLKKRFSHRPVQEKFVCLNCGFETHADEQAALNIARSWLFLRSQEYKKYQTNKTTGNTDKRAFVETWQSFYRKKLKEVWKPAV

SEQ ID NO: 37083 - protein, 979 aa, synthetic construct
  REGION 1..979: note = engineered CasX variant
QEIKRINKIRRRLVKDSNTKKAGKTGPMKTLLVRVMTPDLRERLENLRKKPENIPQPISNTSRANLNKLLTDYTEMKKAILHVYWEEFQKDPVGLMSRVAQPASKKIDQNKLKPEMDEKGNLTTAGFACSQCGQPLFVYKLEQVSEKGKAYTNYFGRCNVAEHEKLILLAQLKPEKDSDEAVTYSLGKFGQRALDFYSIHVTKESTHPVKPLAQIAGNRYASSPVGKALSDACMGTIASFLSKYQDIIIEHQKVVKGNQKRLESLRELAGKENLEYPSVTLPPQPHTKEGVDAYNEVIARVRMWVNLNLWQKLKLSRDDAKPLLRLKGFPSFPLVERQANEVDWWDMVCNVKKLINEKKEDGKVFWQNLAGYKRQEALRPYLSSEEDRKKGKKFARYQLGDLLLHLEKKHEGEDWGKVYDEAWERIDKKVEGLSKHIKLEEERRSEDAQSKAALTDWLRAKASFVIEGLKEADKDEFCRCELKLQKWYGDLRGKPFAIEAENSILDISGFSKQYNCAFIWQKDGVKKLNLYLIINYFKGGKLRFKKIKPEAFEANRFYTVINKKSGEIVPMEVNFNFDDPNLIILPLAFGKRVGREFIWNDLLSLETGSLKLANGRVIEKTLYNRRTRQDEPALFVALTFERREVLDSSNIKPMNLIGVDRGENIPAVIALTDPEGCPLSRFKDSLGNPTHILRIGESYKEKQRTIQAKKEVEQRRAGGYSRKYASKAKNLADDMVRNTARDLLYYAVTQDAMLIFENLSRGFGRQGKRTFMAERQYTRMEDWLTAKLAYEGLPSKTYLSKTLAQYTSKTCSNCGFTITSADYDRVLEKLKKTATGWMTTINGKELKVEGQITYYNRYKRQNVVKDLSVELDRLSEESVNNDISSWTKGRSGEALSLLKKRFSHRPVQEKFVCLNCGFETHADEQAALNIARSWLFLRSQEYKKYQTNKTTGNTDKRAFVETWQSFYRKKLKEVWKPAV

SEQ ID NO: 37084 - protein, 979 aa, synthetic construct
  REGION 1..979: note = engineered CasX variant
QEIKRINKIRRRLVKDSNTKKAGKTGPMKTLLVRVMTPDLRERLENLRKKPENIPQPISNTSRANLNKLLTDYTEMKKAILHVYWEEFQKDPVGLMSRVAQPASKKIDQNKLKPEMDEKGNLTTAGFACSQCGQPLFVYKLEQVSEKGKAYTNYFGRCNVAEHEKLILLAQLKPEKDSDEAVTYSLGKFGQRALDFYSIHVTKESTHPVKPLAQIAGNRYASTPVGKALSDACMGTIASFLSKYQDIIIEHQKVVKGNQKRLESLRELAGKENLEYPSVTLPPQPHTKEGVDAYNEVIARVRMWVNLNLWQKLKLSRDDAKPLLRLKGFPSFPLVERQANEVDWWDMVCNVKKLINEKKEDGKVFWQNLAGYKRQEALRPYLSSEEDRKKGKKFARYQLGDLLLHLEKKHEGEDWGKVYDEAWERIDKKVEGLSKHIKLEEERRSEDAQSKAALTDWLRAKASFVIEGLKEADKDEFCRCELKLQKWYGDLRGKPFAIEAENSILDISGFSKQYNCAFIWQKDGVKKLNLYLIINYFKGGKLRFKKIKPEAFEANRFYTVINKKSGEIVPMEVNFNFDDPNLIILPLAFGKRVGREFIWNDLLSLETGSLKLANGRVIEKTLYNRRTRQDEPALFVALTFERREVLDSSNIKPMNLIGVDRGENIPAVIALTDPEGCPLSRFKDSLGNPTHILRIGESYKEKQRTIQAKKEVEQRRAGGYSRKYASKAKNLADDMVRNTARDLLYYAVTQDAMLIFENLSRGFGRQGKRTFMAERQYTRMEDWLTAKLAYEGLPSKTYLSKTLAQYTSKTCSNCGFTITSADYDRVLEKLKKTATGWMTTINGKELKVEGQITYYNRYKRQNVVKDLSVELDRLSEESVNNDISSWTKGRSGEALSLLKKRFSHRPVQEKFVCLNCGFETHADEQAALNIARSWLFLRSQEYKKYQTNKTTGNTDKRAFVETWQSFYRKKLKEVWKPAV

SEQ ID NO: 37085 - protein, 979 aa, synthetic construct
  REGION 1..979: note = engineered CasX variant
QEIKRINKIRRRLVKDSNTKKAGKTGPMKTLLVRVMTPDLRERLENLRKKPENIPQPISNTSRANLNKLLTDYTEMKKAILHVYWEEFQKDPVGLMSRVAQPASKKIDQNKLKPEMDEKGNLTTAGFACSQCGQPLFVYKLEQVSEKGKAYTNYFGRCNVAEHEKLILLAQLKPEKDSDEAVTYSLGKFGQRALDFYSIHVTKESTHPVKPLAQIAGNRYASAPVGKALSDACMGTIASFLSKYQDIIIEHQKVVKGNQKRLESLRELAGKENLEYPSVTLPPQPHTKEGVDAYNEVIARVRMWVNLNLWQKLKLSRDDAKPLLRLKGFPSFPLVERQANEVDWWDMVCNVKKLINEKKEDGKVFWQNLAGYKRQEALRPYLSSEEDRKKGKKFARYQLGDLLLHLEKKHEGEDWGKVYDEAWERIDKKVEGLSKHIKLEEERRSEDAQSKAALTDWLRAKASFVIEGLKEADKDEFCRCELKLQKWYGDLRGKPFAIEAENSILDISGFSKQYNCAFIWQKDGVKKLNLYLIINYFKGGKLRFKKIKPEAFEANRFYTVINKKSGEIVPMEVNFNFDDPNLIILPLAFGKRVGREFIWNDLLSLETGSLKLANGRVIEKTLYNRRTRQDEPALFVALTFERREVLDSSNIKPMNLIGVDRGENIPAVIALTDPEGCPLSRFKDSLGNPTHILRIGESYKEKQRTIQAKKEVEQRRAGGYSRKYASKAKNLADDMVRNTARDLLYYAVTQDAMLIFENLSRGFGRQGKRTFMAERQYTRMEDWLTAKLAYEGLPSKTYLSKTLAQYTSKTCSNCGFTITSADYDRVLEKLKKTATGWMTTINGKELKVEGQITYYNRYKRQNVVKDLSVELDRLSEESVNNDISSWTKGRSGEALSLLKKRFSHRPVQEKFVCLNCGFETHADEQAALNIARSWLFLRSQEYKKYQTNKTTGNTDKRAFVETWQSFYRKKLKEVWKPAV

SEQ ID NO: 37086 - protein, 979 aa, synthetic construct
  REGION 1..979: note = engineered CasX variant
QEIKRINKIRRRLVKDSNTKKAGKTGPMKTLLVRVMTPDLRERLENLRKKPENIPQPISNTSRANLNKLLTDYTEMKKAILHVYWEEFQKDPVGLMSRVAQPASKKIDQNKLKPEMDEKGNLTTAGFACSQCGQPLFVYKLEQVSEKGKAYTNYFGRCNVAEHEKLILLAQLKPEKDSDEAVTYSLGKFGQRALDFYSIHVTKESTHPVKPLAQIAGNRYASVPVGKALSDACMGTIASFLSKYQDIIIEHQKVVKGNQKRLESLRELAGKENLEYPSVTLPPQPHTKEGVDAYNEVIARVRMWVNLNLWQKLKLSRDDAKPLLRLKGFPSFPLVERQANEVDWWDMVCNVKKLINEKKEDGKVFWQNLAGYKRQEALRPYLSSEEDRKKGKKFARYQLGDLLLHLEKKHEGEDWGKVYDEAWERIDKKVEGLSKHIKLEEERRSEDAQSKAALTDWLRAKASFVIEGLKEADKDEFCRCELKLQKWYGDLRGKPFAIEAENSILDISGFSKQYNCAFIWQKDGVKKLNLYLIINYFKGGKLRFKKIKPEAFEANRFYTVINKKSGEIVPMEVNFNFDDPNLIILPLAFGKRVGREFIWNDLLSLETGSLKLANGRVIEKTLYNRRTRQDEPALFVALTFERREVLDSSNIKPMNLIGVDRGENIPAVIALTDPEGCPLSRFKDSLGNPTHILRIGESYKEKQRTIQAKKEVEQRRAGGYSRKYASKAKNLADDMVRNTARDLLYYAVTQDAMLIFENLSRGFGRQGKRTFMAERQYTRMEDWLTAKLAYEGLPSKTYLSKTLAQYTSKTCSNCGFTITSADYDRVLEKLKKTATGWMTTINGKELKVEGQITYYNRYKRQNVVKDLSVELDRLSEESVNNDISSWTKGRSGEALSLLKKRFSHRPVQEKFVCLNCGFETHADEQAALNIARSWLFLRSQEYKKYQTNKTTGNTDKRAFVETWQSFYRKKLKEVWKPAV

SEQ ID NO: 37087 - protein, 979 aa, synthetic construct
  REGION 1..979: note = engineered CasX variant
QEIKRINKIRRRLVKDSNTKKAGKTGPMKTLLVRVMTPDLRERLENLRKKPENIPQPISNTSRANLNKLLTDYTEMKKAILHVYWEEFQKDPVGLMSRVAQPASKKIDQNKLKPEMDEKGNLTTAGFACSQCGQPLFVYKLEQVSEKGKAYTNYFGRCNVAEHEKLIKLAQLKPEKDSDEAVTYSLGKFGQRALDFYSIHVTKESTHPVKPLAQIAGNRYASGPVGKALSDACMGTIASFLSKYQDIIIEHQKVVKGNQKRLESLRELAGKENLEYPSVTLPPQPHTKEGVDAYNEVIARVRMWVNLNLWQKLKLSRDDAKPLLRLKGFPSFPLVERQANEVDWWDMVCNVKKLINEKKEDGKVFWQNLAGYKRQEALRPYLSSEEDRKKGKKFARYQLGDLLLHLEKKHEGEDWGKVYDEAWERIDKKVEGLSKHIKLEEERRSEDAQSKAALTDWLRAKASFVIEGLKEADKDEFCRCELKLQKWYGDLRGKPFAIEAENSILDISGFSKQYNCAFIWQKDGVKKLNLYLIINYFKGGKLRFKKIKPEAFEANRFYTVINKKSGEIVPMEVNFNFDDPNLIILPLAFGKRVGREFIWNDLLSLETGSLKLANGRVIEKTLYNRRTRQDEPALFVALTFERREVLDSSNIKPMNLIGVDRGENIPAVIALTDPEGCPLSRFKDSLGNPTHILRIGESYKEKQRTIQAKKEVEQRRAGGYSRKYASKAKNLADDMVRNTARDLLYYAVTQDAMLIFENLSRGFGRQGKRTFMAERQYTRMEDWLTAKLAYEGLPSKTYLSKTLAQYTSKTCSNCGFTITSADYDRVLEKLKKTATGWMTTINGKELKVEGQITYYNRYKRQNVVKDLSVELDRLSEESVNNDISSWTKGRSGEALSLLKKRFSHRPVQEKFVCLNCGFETHADEQAALNIARSWLFLRSQEYKKYQTNKTTGNTDKRAFVETWQSFYRKKLKEVWKPAV

SEQ ID NO: 37088 - protein, 978 aa, synthetic construct
  REGION 1..978: note = engineered CasX variant
QEIKRINKIRRRLVKDSNTKKAGKTGPMKTLLVRVMTPDLRERLENLRKKPENIPQPISNTSRANLNKLLTDYTEMKKAILHVYWEEFQKDPVGLMSRVAQPASKKIDQNKLKPEMDEKGNLTTAGFACSQCGQPLFVYKLEQVSEKGKAYTNYFGRCNVAEHEKLILLAQLKPEKDSDEAVTYSLGKFGQRALDFYSIHVTKESTHPVKPLAQIAGNRYASPVGKALSDACMGTIASFLSKYQDIIIEHQKVVKGNQKRLESLRELAGKENLEYPSVTLPPQPHTKEGVDAYNEVIARVRMWVNLNLWQKLKLSRDDAKPLLRLKGFPSFPLVERQANEVDWWDMVCNVKKLINEKKEDGKVFWQNLAGYKRQEALRPYLSSEEDRKKGKKFARYQLGDLLLHLEKKHEGEDWGKVYDEAWERIDKKVEGLSKHIKLEEERRSEDAQSKAALTDWLRAKASFVIEGLKEADKDEFCRCELKLQKWYGDLRGKPFAIEAENSILDISGFSKQYNCAFIWQKDGVKKLNLYLIINYFKGGKLRFKKIKPEAFEANRFYTVINKKSGEIVPMEVNFNFDDPNLIILPLAFGKRVGREFIWNDLLSLETGSLKLANGRVIEKTLYNRRTRQDEPALFVALTFERREVLDSSNIKPMNLIGVDRGENIPAVIALTDPEGCPLSRFKDSLGNPTHILRIGESYKEKQRTIQAKKEVEQRRAGGYSRKYASKAKNLADDMVRNTARDLLYYAVTQDAMLIFENLSRGFGRQGKRTFMAERQYTRMEDWLTAKLAYEGLPSKTYLSKTLAQYTSKTCSNCGFTITSADYDRVLEKLKKTATGWMTTINGKELKVEGQITYYNRYKRQNVVKDLSVELDRLSEESVNNDISSWTKGRSGEALSLLKKRFSHRPVQEKFVCLNCGFETHADEQAALNIARSWLFLRSQEYKKYQTNKTTGNTDKRAFVETWQSFYRKKLKEVWKPAV

SEQ ID NO: 37089 - protein, 980 aa, synthetic construct
  REGION 1..980: note = engineered CasX variant
QEIKRINKIRRRLVKDSNTKKAGKTGPMKTLLVRVMTPDLRERLENLRKKPENIPQPISNTSRANLNKLLTDYTEMKKAILHVYWEEFQKDPVGLMSRVAQPASKKIDQNKLKPEMDEKGNLTTAGFACSQCGQPLFVYKLEQVSEKGKAYTNYFGRCNVAEHEKLILLAQLKPEKDSDEAVTYSLGKFGQRALDFYSIHVTKESTHPVKPLAQIAGNRYASYPVGKALSDACMGTIASFLSKYQDIIIEHQKVVKGNQKRLESLRELAGKENLEYPSVTLPPQPHTKEGVDAYNEVIARVRMWVNLNLWQKLKLSRDDAKPLLRLKGFPSFPLVERQANEVDWWDMVCNVKKLINEKKEDGKVFWQNLAGYKRQEALRPYLSSEEDRKKGKKFARYQLGDLLLHLEKKHEGEDWGKVYDEAWERIDKKVEGLSKHIKLEEERRSEDAQSKAALTDWLRAKASFVIEGLKEADKDEFCRCELKLQKWYGDLRGKPFAIEAENSILDISGFSKQYNCAFIWQKDGVKKLNLYLIINYFKGGKLRFKKIKPEAFEANRFYTVINKKSGEIVPMEVNFNFDDPNLIILPLAFGKRQGREFIWNDLLSLETGSLKLANGRVIEKTLYNRRTRQDEPALFVALTFERREVLDSSNIKTPMNLIGVDRGENIPAVIALTDPEGCPLSRFKDSLGNPTHILRIGESYKEKQRTIQAKKEVEQRRAGGYSRKYASKAKNLADDMVRNTARDLLYYAVTQDAMLIFENLSRGFGRQGKRTFMAERQYTRMEDWLTAKLAYEGLPSKTYLSKTLAQYTSKTCSNCGFTITSADYDRVLEKLKKTATGWMTTINGKELKVEGQITYYNRYKRQNVVKDLSVELDRLSEESVNNDISSWTKGRSGEALSLLKKRFSHRPVQEKFVCLNCGFETHADEQAALNIARSWLFLRSQEYKKYQTNKTTGNTDKRAFVETWQSFYRKKLKEVWKPAV

SEQ ID NO: 37090 - protein, 980 aa, synthetic construct
  REGION 1..980: note = engineered CasX variant
QEIKRINKIRRRLVKDSNTKKAGKTGPMKTLLVRVMTPDLRERLENLRKKPENIPQPISNTSRANLNKLLTDYTEMKKAILHVYWEEFQKDPVGLMSRVAQPASKKIDQNKLKPEMDEKGNLTTAGFACSQCGQPLFVYKLEQVSEKGKAYTNYFGRCNVAEHEKLILLAQLKPEKDSDEAVTYSLGKFGQRALDFYSIHVTKESTHPVKPLAQIAGNRYASHPVGKALSDACMGTIASFLSKYQDIIIEHQKVVKGNQKRLESLRELAGKENLEYPSVTLPPQPHTKEGVDAYNEVIARVRMWVNLNLWQKLKLSRDDAKPLLRLKGFPSFPLVERQANEVDWWDMVCNVKKLINEKKEDGKVFWQNLAGYKRQEALRPYLSSEEDRKKGKKFARYQLGDLLLHLEKKHEGEDWGKVYDEAWERIDKKVEGLSKHIKLEEERRSEDAQSKAALTDWLRAKASFVIEGLKEADKDEFCRCELKLQKWYGDLRGKPFAIEAENSILDISGFSKQYNCAFIWQKDGVKKLNLYLIINYFKGGKLRFKKIKPEAFEANRFYTVINKKSGEIVPMEVNFNFDDPNLIILPLAFGKRQGREFIWNDLLSLETGSLKLANGRVIEKTLYNRRTRQDEPALFVALTFERREVLDSSNIKTPMNLIGVDRGENIPAVIALTDPEGCPLSRFKDSLGNPTHILRIGESYKEKQRTIQAKKEVEQRRAGGYSRKYASKAKNLADDMVRNTARDLLYYAVTQDAMLIFENLSRGFGRQGKRTFMAERQYTRMEDWLTAKLAYEGLPSKTYLSKTLAQYTSKTCSNCGFTITSADYDRVLEKLKKTATGWMTTINGKELKVEGQITYYNRYKRQNVVKDLSVELDRLSEESVNNDISSWTKGRSGEALSLLKKRFSHRPVQEKFVCLNCGFETHADEQAALNIARSWLFLRSQEYKKYQTNKTTGNTDKRAFVETWQSFYRKKLKEVWKPAV

SEQ ID NO: 37091 - protein, 980 aa, synthetic construct
  REGION 1..980: note = engineered CasX variant
QEIKRINKIRRRLVKDSNTKKAGKTGPMKTLLVRVMTPDLRERLENLRKKPENIPQPISNTSRANLNKLLTDYTEMKKAILHVYWEEFQKDPVGLMSRVAQPASKKIDQNKLKPEMDEKGNLTTAGFACSQCGQPLFVYKLEQVSEKGKAYTNYFGRCNVAEHEKLILLAQLKPEKDSDEAVTYSLGKFGQRALDFYSIHVTKESTHPVKPLAQIAGNRYASSPVGKALSDACMGTIASFLSKYQDIIIEHQKVVKGNQKRLESLRELAGKENLEYPSVTLPPQPHTKEGVDAYNEVIARVRMWVNLNLWQKLKLSRDDAKPLLRLKGFPSFPLVERQANEVDWWDMVCNVKKLINEKKEDGKVFWQNLAGYKRQEALRPYLSSEEDRKKGKKFARYQLGDLLLHLEKKHEGEDWGKVYDEAWERIDKKVEGLSKHIKLEEERRSEDAQSKAALTDWLRAKASFVIEGLKEADKDEFCRCELKLQKWYGDLRGKPFAIEAENSILDISGFSKQYNCAFIWQKDGVKKLNLYLIINYFKGGKLRFKKIKPEAFEANRFYTVINKKSGEIVPMEVNFNFDDPNLIILPLAFGKRQGREFIWNDLLSLETGSLKLANGRVIEKTLYNRRTRQDEPALFVALTFERREVLDSSNIKTPMNLIGVDRGENIPAVIALTDPEGCPLSRFKDSLGNPTHILRIGESYKEKQRTIQAKKEVEQRRAGGYSRKYASKAKNLADDMVRNTARDLLYYAVTQDAMLIFENLSRGFGRQGKRTFMAERQYTRMEDWLTAKLAYEGLPSKTYLSKTLAQYTSKTCSNCGFTITSADYDRVLEKLKKTATGWMTTINGKELKVEGQITYYNRYKRQNVVKDLSVELDRLSEESVNNDISSWTKGRSGEALSLLKKRFSHRPVQEKFVCLNCGFETHADEQAALNIARSWLFLRSQEYKKYQTNKTTGNTDKRAFVETWQSFYRKKLKEVWKPAV

SEQ ID NO: 37092 - protein, 980 aa, synthetic construct
  REGION 1..980: note = engineered CasX variant
QEIKRINKIRRRLVKDSNTKKAGKTGPMKTLLVRVMTPDLRERLENLRKKPENIPQPISNTSRANLNKLLTDYTEMKKAILHVYWEEFQKDPVGLMSRVAQPASKKIDQNKLKPEMDEKGNLTTAGFACSQCGQPLFVYKLEQVSEKGKAYTNYFGRCNVAEHEKLILLAQLKPEKDSDEAVTYSLGKFGQRALDFYSIHVTKESTHPVKPLAQIAGNRYASTPVGKALSDACMGTIASFLSKYQDIIIEHQKVVKGNQKRLESLRELAGKENLEYPSVTLPPQPHTKEGVDAYNEVIARVRMWVNLNLWQKLKLSRDDAKPLLRLKGFPSFPLVERQANEVDWWDMVCNVKKLINEKKEDGKVFWQNLAGYKRQEALRPYLSSEEDRKKGKKFARYQLGDLLLHLEKKHEGEDWGKVYDEAWERIDKKVEGLSKHIKLEEERRSEDAQSKAALTDWLRAKASFVIEGLKEADKDEFCRCELKLQKWYGDLRGKPFAIEAENSILDISGFSKQYNCAFIWQKDGVKKLNLYLIINYFKGGKLRFKKIKPEAFEANRFYTVINKKSGEIVPMEVNFNFDDPNLIILPLAFGKRQGREFIWNDLLSLETGSLKLANGRVIEKTLYNRRTRQDEPALFVALTFERREVLDSSNIKTPMNLIGVDRGENIPAVIALTDPEGCPLSRFKDSLGNPTHILRIGESYKEKQRTIQAKKEVEQRRAGGYSRKYASKAKNLADDMVRNTARDLLYYAVTQDAMLIFENLSRGFGRQGKRTFMAERQYTRMEDWLTAKLAYEGLPSKTYLSKTLAQYTSKTCSNCGFTITSADYDRVLEKLKKTATGWMTTINGKELKVEGQITYYNRYKRQNVVKDLSVELDRLSEESVNNDISSWTKGRSGEALSLLKKRFSHRPVQEKFVCLNCGFETHADEQAALNIARSWLFLRSQEYKKYQTNKTTGNTDKRAFVETWQSFYRKKLKEVWKPAV

SEQ ID NO: 37093 - protein, 980 aa, synthetic construct
  REGION 1..980: note = engineered CasX variant
QEIKRINKIRRRLVKDSNTKKAGKTGPMKTLLVRVMTPDLRERLENLRKKPENIPQPISNTSRANLNKLLTDYTEMKKAILHVYWEEFQKDPVGLMSRVAQPASKKIDQNKLKPEMDEKGNLTTAGFACSQCGQPLFVYKLEQVSEKGKAYTNYFGRCNVAEHEKLILLAQLKPEKDSDEAVTYSLGKFGQRALDFYSIHVTKESTHPVKPLAQIAGNRYASAPVGKALSDACMGTIASFLSKYQDIIIEHQKVVKGNQKRLESLRELAGKENLEYPSVTLPPQPHTKEGVDAYNEVIARVRMWVNLNLWQKLKLSRDDAKPLLRLKGFPSFPLVERQANEVDWWDMVCNVKKLINEKKEDGKVFWQNLAGYKRQEALRPYLSSEEDRKKGKKFARYQLGDLLLHLEKKHEGEDWGKVYDEAWERIDKKVEGLSKHIKLEEERRSEDAQSKAALTDWLRAKASFVIEGLKEADKDEFCRCELKLQKWYGDLRGKPFAIEAENSILDISGFSKQYNCAFIWQKDGVKKLNLYLIINYFKGGKLRFKKIKPEAFEANRFYTVINKKSGEIVPMEVNFNFDDPNLIILPLAFGKRQGREFIWNDLLSLETGSLKLANGRVIEKTLYNRRTRQDEPALFVALTFERREVLDSSNIKTPMNLIGVDRGENIPAVIALTDPEGCPLSRFKDSLGNPTHILRIGESYKEKQRTIQAKKEVEQRRAGGYSRKYASKAKNLADDMVRNTARDLLYYAVTQDAMLIFENLSRGFGRQGKRTFMAERQYTRMEDWLTAKLAYEGLPSKTYLSKTLAQYTSKTCSNCGFTITSADYDRVLEKLKKTATGWMTTINGKELKVEGQITYYNRYKRQNVVKDLSVELDRLSEESVNNDISSWTKGRSGEALSLLKKRFSHRPVQEKFVCLNCGFETHADEQAALNIARSWLFLRSQEYKKYQTNKTTGNTDKRAFVETWQSFYRKKLKEVWKPAV

SEQ ID NO: 37094 - protein, 980 aa, synthetic construct
  REGION 1..980: note = engineered CasX variant
QEIKRINKIRRRLVKDSNTKKAGKTGPMKTLLVRVMTPDLRERLENLRKKPENIPQPISNTSRANLNKLLTDYTEMKKAILHVYWEEFQKDPVGLMSRVAQPASKKIDQNKLKPEMDEKGNLTTAGFACSQCGQPLFVYKLEQVSEKGKAYTNYFGRCNVAEHEKLILLAQLKPEKDSDEAVTYSLGKFGQRALDFYSIHVTKESTHPVKPLAQIAGNRYASVPVGKALSDACMGTIASFLSKYQDIIIEHQKVVKGNQKRLESLRELAGKENLEYPSVTLPPQPHTKEGVDAYNEVIARVRMWVNLNLWQKLKLSRDDAKPLLRLKGFPSFPLVERQANEVDWWDMVCNVKKLINEKKEDGKVFWQNLAGYKRQEALRPYLSSEEDRKKGKKFARYQLGDLLLHLEKKHEGEDWGKVYDEAWERIDKKVEGLSKHIKLEEERRSEDAQSKAALTDWLRAKASFVIEGLKEADKDEFCRCELKLQKWYGDLRGKPFAIEAENSILDISGFSKQYNCAFIWQKDGVKKLNLYLIINYFKGGKLRFKKIKPEAFEANRFYTVINKKSGEIVPMEVNFNFDDPNLIILPLAFGKRQGREFIWNDLLSLETGSLKLANGRVIEKTLYNRRTRQDEPALFVALTFERREVLDSSNIKTPMNLIGVDRGENIPAVIALTDPEGCPLSRFKDSLGNPTHILRIGESYKEKQRTIQAKKEVEQRRAGGYSRKYASKAKNLADDMVRNTARDLLYYAVTQDAMLIFENLSRGFGRQGKRTFMAERQYTRMEDWLTAKLAYEGLPSKTYLSKTLAQYTSKTCSNCGFTITSADYDRVLEKLKKTATGWMTTINGKELKVEGQITYYNRYKRQNVVKDLSVELDRLSEESVNNDISSWTKGRSGEALSLLKKRFSHRPVQEKFVCLNCGFETHADEQAALNIARSWLFLRSQEYKKYQTNKTTGNTDKRAFVETWQSFYRKKLKEVWKPAV

SEQ ID NO: 37095 - protein, 980 aa, synthetic construct
  REGION 1..980: note = engineered CasX variant
QEIKRINKIRRRLVKDSNTKKAGKTGPMKTLLVRVMTPDLRERLENLRKKPENIPQPISNTSRANLNKLLTDYTEMKKAILHVYWEEFQKDPVGLMSRVAQPASKKIDQNKLKPEMDEKGNLTTAGFACSQCGQPLFVYKLEQVSEKGKAYTNYFGRCNVAEHEKLIKLAQLKPEKDSDEAVTYSLGKFGQRALDFYSIHVTKESTHPVKPLAQIAGNRYASGPVGKALSDACMGTIASFLSKYQDIIIEHQKVVKGNQKRLESLRELAGKENLEYPSVTLPPQPHTKEGVDAYNEVIARVRMWVNLNLWQKLKLSRDDAKPLLRLKGFPSFPLVERQANEVDWWDMVCNVKKLINEKKEDGKVFWQNLAGYKRQEALRPYLSSEEDRKKGKKFARYQLGDLLLHLEKKHEGEDWGKVYDEAWERIDKKVEGLSKHIKLEEERRSEDAQSKAALTDWLRAKASFVIEGLKEADKDEFCRCELKLQKWYGDLRGKPFAIEAENSILDISGFSKQYNCAFIWQKDGVKKLNLYLIINYFKGGKLRFKKIKPEAFEANRFYTVINKKSGEIVPMEVNFNFDDPNLIILPLAFGKRQGREFIWNDLLSLETGSLKLANGRVIEKTLYNRRTRQDEPALFVALTFERREVLDSSNIKTPMNLIGVDRGENIPAVIALTDPEGCPLSRFKDSLGNPTHILRIGESYKEKQRTIQAKKEVEQRRAGGYSRKYASKAKNLADDMVRNTARDLLYYAVTQDAMLIFENLSRGFGRQGKRTFMAERQYTRMEDWLTAKLAYEGLPSKTYLSKTLAQYTSKTCSNCGFTITSADYDRVLEKLKKTATGWMTTINGKELKVEGQITYYNRYKRQNVVKDLSVELDRLSEESVNNDISSWTKGRSGEALSLLKKRFSHRPVQEKFVCLNCGFETHADEQAALNIARSWLFLRSQEYKKYQTNKTTGNTDKRAFVETWQSFYRKKLKEVWKPAV

SEQ ID NO: 37096 - protein, 979 aa, synthetic construct
  REGION 1..979: note = engineered CasX variant
QEIKRINKIRRRLVKDSNTKKAGKTGPMKTLLVRVMTPDLRERLENLRKKPENIPQPISNTSRANLNKLLTDYTEMKKAILHVYWEEFQKDPVGLMSRVAQPASKKIDQNKLKPEMDEKGNLTTAGFACSQCGQPLFVYKLEQVSEKGKAYTNYFGRCNVAEHEKLILLAQLKPEKDSDEAVTYSLGKFGQRALDFYSIHVTKESTHPVKPLAQIAGNRYASPVGKALSDACMGTIASFLSKYQDIIIEHQKVVKGNQKRLESLRELAGKENLEYPSVTLPPQPHTKEGVDAYNEVIARVRMWVNLNLWQKLKLSRDDAKPLLRLKGFPSFPLVERQANEVDWWDMVCNVKKLINEKKEDGKVFWQNLAGYKRQEALRPYLSSEEDRKKGKKFARYQLGDLLLHLEKKHEGEDWGKVYDEAWERIDKKVEGLSKHIKLEEERRSEDAQSKAALTDWLRAKASFVIEGLKEADKDEFCRCELKLQKWYGDLRGKPFAIEAENSILDISGFSKQYNCAFIWQKDGVKKLNLYLIINYFKGGKLRFKKIKPEAFEANRFYTVINKKSGEIVPMEVNFNFDDPNLIILPLAFGKRQGREFIWNDLLSLETGSLKLANGRVIEKTLYNRRTRQDEPALFVALTFERREVLDSSNIKTPMNLIGVDRGENIPAVIALTDPEGCPLSRFKDSLGNPTHILRIGESYKEKQRTIQAKKEVEQRRAGGYSRKYASKAKNLADDMVRNTARDLLYYAVTQDAMLIFENLSRGFGRQGKRTFMAERQYTRMEDWLTAKLAYEGLPSKTYLSKTLAQYTSKTCSNCGFTITSADYDRVLEKLKKTATGWMTTINGKELKVEGQITYYNRYKRQNVVKDLSVELDRLSEESVNNDISSWTKGRSGEALSLLKKRFSHRPVQEKFVCLNCGFETHADEQAALNIARSWLFLRSQEYKKYQTNKTTGNTDKRAFVETWQSFYRKKLKEVWKPAV

SEQ ID NO: 37097 - protein, 980 aa, synthetic construct
  REGION 1..980: note = engineered CasX variant
QEIKRINKIRRRLVKDSNTKKAGKTGPMKTLLVRVMTPDLRERLENLRKKPENIPQPISNTSRANLNKLLTDYTEMKKAILHVYWEEFQKDPVGLMSRVAQPASKKIDQNKLKPEMDEKGNLTTAGFACSQCGQPLFVYKLEQVSEKGKAYTNYFGRCNVAEHEKLILLAQLKPEKDSDEAVTYSLGKFGQRALDFYSIHVTKESTHPVKPLAQIAGNRYASYPVGKALSDACMGTIASFLSKYQDIIIEHQKVVKGNQKRLESLRELAGKENLEYPSVTLPPQPHTKEGVDAYNEVIARVRMWVNLNLWQKLKLSRDDAKPLLRLKGFPSFPLVERQANEVDWWDMVCNVKKLINEKKEDGKVFWQNLAGYKRQEALRPYLSSEEDRKKGKKFARYQLGDLLLHLEKKHEGEDWGKVYDEAWERIDKKVEGLSKHIKLEEERRSEDAQSKAALTDWLRAKASFVIEGLKEADKDEFCRCELKLQKWYGDLRGKPFAIEAENSILDISGFSKQYNCAFIWQKDGVKKLNLYLIINYFKGGKLRFKKIKPEAFEANRFYTVINKKSGEIVPMEVNFNFDDPNLIILPLAFGKRQGREFIWNDLLSLETGSLKLANGRVIEKTLYNRRTRQDEPALFVALTFERREVLDSSNIKPMSNLIGVDRGENIPAVIALTDPEGCPLSRFKDSLGNPTHILRIGESYKEKQRTIQAKKEVEQRRAGGYSRKYASKAKNLADDMVRNTARDLLYYAVTQDAMLIFENLSRGFGRQGKRTFMAERQYTRMEDWLTAKLAYEGLPSKTYLSKTLAQYTSKTCSNCGFTITSADYDRVLEKLKKTATGWMTTINGKELKVEGQITYYNRYKRQNVVKDLSVELDRLSEESVNNDISSWTKGRSGEALSLLKKRFSHRPVQEKFVCLNCGFETHADEQAALNIARSWLFLRSQEYKKYQTNKTTGNTDKRAFVETWQSFYRKKLKEVWKPAV

SEQ ID NO: 37098 - protein, 980 aa, synthetic construct
  REGION 1..980: note = engineered CasX variant
QEIKRINKIRRRLVKDSNTKKAGKTGPMKTLLVRVMTPDLRERLENLRKKPENIPQPISNTSRANLNKLLTDYTEMKKAILHVYWEEFQKDPVGLMSRVAQPASKKIDQNKLKPEMDEKGNLTTAGFACSQCGQPLFVYKLEQVSEKGKAYTNYFGRCNVAEHEKLILLAQLKPEKDSDEAVTYSLGKFGQRALDFYSIHVTKESTHPVKPLAQIAGNRYASHPVGKALSDACMGTIASFLSKYQDIIIEHQKVVKGNQKRLESLRELAGKENLEYPSVTLPPQPHTKEGVDAYNEVIARVRMWVNLNLWQKLKLSRDDAKPLLRLKGFPSFPLVERQANEVDWWDMVCNVKKLINEKKEDGKVFWQNLAGYKRQEALRPYLSSEEDRKKGKKFARYQLGDLLLHLEKKHEGEDWGKVYDEAWERIDKKVEGLSKHIKLEEERRSEDAQSKAALTDWLRAKASFVIEGLKEADKDEFCRCELKLQKWYGDLRGKPFAIEAENSILDISGFSKQYNCAFIWQKDGVKKLNLYLIINYFKGGKLRFKKIKPEAFEANRFYTVINKKSGEIVPMEVNFNFDDPNLIILPLAFGKRQGREFIWNDLLSLETGSLKLANGRVIEKTLYNRRTRQDEPALFVALTFERREVLDSSNIKPMSNLIGVDRGENIPAVIALTDPEGCPLSRFKDSLGNPTHILRIGESYKEKQRTIQAKKEVEQRRAGGYSRKYASKAKNLADDMVRNTARDLLYYAVTQDAMLIFENLSRGFGRQGKRTFMAERQYTRMEDWLTAKLAYEGLPSKTYLSKTLAQYTSKTCSNCGFTITSADYDRVLEKLKKTATGWMTTINGKELKVEGQITYYNRYKRQNVVKDLSVELDRLSEESVNNDISSWTKGRSGEALSLLKKRFSHRPVQEKFVCLNCGFETHADEQAALNIARSWLFLRSQEYKKYQTNKTTGNTDKRAFVETWQSFYRKKLKEVWKPAV

SEQ ID NO: 37099 - protein, 980 aa, synthetic construct
  REGION 1..980: note = engineered CasX variant
QEIKRINKIRRRLVKDSNTKKAGKTGPMKTLLVRVMTPDLRERLENLRKKPENIPQPISNTSRANLNKLLTDYTEMKKAILHVYWEEFQKDPVGLMSRVAQPASKKIDQNKLKPEMDEKGNLTTAGFACSQCGQPLFVYKLEQVSEKGKAYTNYFGRCNVAEHEKLILLAQLKPEKDSDEAVTYSLGKFGQRALDFYSIHVTKESTHPVKPLAQIAGNRYASSPVGKALSDACMGTIASFLSKYQDIIIEHQKVVKGNQKRLESLRELAGKENLEYPSVTLPPQPHTKEGVDAYNEVIARVRMWVNLNLWQKLKLSRDDAKPLLRLKGFPSFPLVERQANEVDWWDMVCNVKKLINEKKEDGKVFWQNLAGYKRQEALRPYLSSEEDRKKGKKFARYQLGDLLLHLEKKHEGEDWGKVYDEAWERIDKKVEGLSKHIKLEEERRSEDAQSKAALTDWLRAKASFVIEGLKEADKDEFCRCELKLQKWYGDLRGKPFAIEAENSILDISGFSKQYNCAFIWQKDGVKKLNLYLIINYFKGGKLRFKKIKPEAFEANRFYTVINKKSGEIVPMEVNFNFDDPNLIILPLAFGKRQGREFIWNDLLSLETGSLKLANGRVIEKTLYNRRTRQDEPALFVALTFERREVLDSSNIKPMSNLIGVDRGENIPAVIALTDPEGCPLSRFKDSLGNPTHILRIGESYKEKQRTIQAKKEVEQRRAGGYSRKYASKAKNLADDMVRNTARDLLYYAVTQDAMLIFENLSRGFGRQGKRTFMAERQYTRMEDWLTAKLAYEGLPSKTYLSKTLAQYTSKTCSNCGFTITSADYDRVLEKLKKTATGWMTTINGKELKVEGQITYYNRYKRQNVVKDLSVELDRLSEESVNNDISSWTKGRSGEALSLLKKRFSHRPVQEKFVCLNCGFETHADEQAALNIARSWLFLRSQEYKKYQTNKTTGNTDKRAFVETWQSFYRKKLKEVWKPAV

SEQ ID NO: 37100 - protein, 980 aa, synthetic construct
  REGION 1..980: note = engineered CasX variant
QEIKRINKIRRRLVKDSNTKKAGKTGPMKTLLVRVMTPDLRERLENLRKKPENIPQPISNTSRANLNKLLTDYTEMKKAILHVYWEEFQKDPVGLMSRVAQPASKKIDQNKLKPEMDEKGNLTTAGFACSQCGQPLFVYKLEQVSEKGKAYTNYFGRCNVAEHEKLILLAQLKPEKDSDEAVTYSLGKFGQRALDFYSIHVTKESTHPVKPLAQIAGNRYASTPVGKALSDACMGTIASFLSKYQDIIIEHQKVVKGNQKRLESLRELAGKENLEYPSVTLPPQPHTKEGVDAYNEVIARVRMWVNLNLWQKLKLSRDDAKPLLRLKGFPSFPLVERQANEVDWWDMVCNVKKLINEKKEDGKVFWQNLAGYKRQEALRPYLSSEEDRKKGKKFARYQLGDLLLHLEKKHEGEDWGKVYDEAWERIDKKVEGLSKHIKLEEERRSEDAQSKAALTDWLRAKASFVIEGLKEADKDEFCRCELKLQKWYGDLRGKPFAIEAENSILDISGFSKQYNCAFIWQKDGVKKLNLYLIINYFKGGKLRFKKIKPEAFEANRFYTVINKKSGEIVPMEVNFNFDDPNLIILPLAFGKRQGREFIWNDLLSLETGSLKLANGRVIEKTLYNRRTRQDEPALFVALTFERREVLDSSNIKPMSNLIGVDRGENIPAVIALTDPEGCPLSRFKDSLGNPTHILRIGESYKEKQRTIQAKKEVEQRRAGGYSRKYASKAKNLADDMVRNTARDLLYYAVTQDAMLIFENLSRGFGRQGKRTFMAERQYTRMEDWLTAKLAYEGLPSKTYLSKTLAQYTSKTCSNCGFTITSADYDRVLEKLKKTATGWMTTINGKELKVEGQITYYNRYKRQNVVKDLSVELDRLSEESVNNDISSWTKGRSGEALSLLKKRFSHRPVQEKFVCLNCGFETHADEQAALNIARSWLFLRSQEYKKYQTNKTTGNTDKRAFVETWQSFYRKKLKEVWKPAV

SEQ ID NO: 37101 - protein, 980 aa, synthetic construct
  REGION 1..980: note = engineered CasX variant
QEIKRINKIRRRLVKDSNTKKAGKTGPMKTLLVRVMTPDLRERLENLRKKPENIPQPISNTSRANLNKLLTDYTEMKKAILHVYWEEFQKDPVGLMSRVAQPASKKIDQNKLKPEMDEKGNLTTAGFACSQCGQPLFVYKLEQVSEKGKAYTNYFGRCNVAEHEKLILLAQLKPEKDSDEAVTYSLGKFGQRALDFYSIHVTKESTHPVKPLAQIAGNRYASAPVGKALSDACMGTIASFLSKYQDIIIEHQKVVKGNQKRLESLRELAGKENLEYPSVTLPPQPHTKEGVDAYNEVIARVRMWVNLNLWQKLKLSRDDAKPLLRLKGFPSFPLVERQANEVDWWDMVCNVKKLINEKKEDGKVFWQNLAGYKRQEALRPYLSSEEDRKKGKKFARYQLGDLLLHLEKKHEGEDWGKVYDEAWERIDKKVEGLSKHIKLEEERRSEDAQSKAALTDWLRAKASFVIEGLKEADKDEFCRCELKLQKWYGDLRGKPFAIEAENSILDISGFSKQYNCAFIWQKDGVKKLNLYLIINYFKGGKLRFKKIKPEAFEANRFYTVINKKSGEIVPMEVNFNFDDPNLIILPLAFGKRQGREFIWNDLLSLETGSLKLANGRVIEKTLYNRRTRQDEPALFVALTFERREVLDSSNIKPMSNLIGVDRGENIPAVIALTDPEGCPLSRFKDSLGNPTHILRIGESYKEKQRTIQAKKEVEQRRAGGYSRKYASKAKNLADDMVRNTARDLLYYAVTQDAMLIFENLSRGFGRQGKRTFMAERQYTRMEDWLTAKLAYEGLPSKTYLSKTLAQYTSKTCSNCGFTITSADYDRVLEKLKKTATGWMTTINGKELKVEGQITYYNRYKRQNVVKDLSVELDRLSEESVNNDISSWTKGRSGEALSLLKKRFSHRPVQEKFVCLNCGFETHADEQAALNIARSWLFLRSQEYKKYQTNKTTGNTDKRAFVETWQSFYRKKLKEVWKPAV

SEQ ID NO: 37102 - protein, 980 aa, synthetic construct
  REGION 1..980: note = engineered CasX variant
QEIKRINKIRRRLVKDSNTKKAGKTGPMKTLLVRVMTPDLRERLENLRKKPENIPQPISNTSRANLNKLLTDYTEMKKAILHVYWEEFQKDPVGLMSRVAQPASKKIDQNKLKPEMDEKGNLTTAGFACSQCGQPLFVYKLEQVSEKGKAYTNYFGRCNVAEHEKLILLAQLKPEKDSDEAVTYSLGKFGQRALDFYSIHVTKESTHPVKPLAQIAGNRYASVPVGKALSDACMGTIASFLSKYQDIIIEHQKVVKGNQKRLESLRELAGKENLEYPSVTLPPQPHTKEGVDAYNEVIARVRMWVNLNLWQKLKLSRDDAKPLLRLKGFPSFPLVERQANEVDWWDMVCNVKKLINEKKEDGKVFWQNLAGYKRQEALRPYLSSEEDRKKGKKFARYQLGDLLLHLEKKHEGEDWGKVYDEAWERIDKKVEGLSKHIKLEEERRSEDAQSKAALTDWLRAKASFVIEGLKEADKDEFCRCELKLQKWYGDLRGKPFAIEAENSILDISGFSKQYNCAFIWQKDGVKKLNLYLIINYFKGGKLRFKKIKPEAFEANRFYTVINKKSGEIVPMEVNFNFDDPNLIILPLAFGKRQGREFIWNDLLSLETGSLKLANGRVIEKTLYNRRTRQDEPALFVALTFERREVLDSSNIKPMSNLIGVDRGENIPAVIALTDPEGCPLSRFKDSLGNPTHILRIGESYKEKQRTIQAKKEVEQRRAGGYSRKYASKAKNLADDMVRNTARDLLYYAVTQDAMLIFENLSRGFGRQGKRTFMAERQYTRMEDWLTAKLAYEGLPSKTYLSKTLAQYTSKTCSNCGFTITSADYDRVLEKLKKTATGWMTTINGKELKVEGQITYYNRYKRQNVVKDLSVELDRLSEESVNNDISSWTKGRSGEALSLLKKRFSHRPVQEKFVCLNCGFETHADEQAALNIARSWLFLRSQEYKKYQTNKTTGNTDKRAFVETWQSFYRKKLKEVWKPAV

SEQ ID NO: 37103 - protein, 980 aa, synthetic construct
  REGION 1..980: note = engineered CasX variant
QEIKRINKIRRRLVKDSNTKKAGKTGPMKTLLVRVMTPDLRERLENLRKKPENIPQPISNTSRANLNKLLTDYTEMKKAILHVYWEEFQKDPVGLMSRVAQPASKKIDQNKLKPEMDEKGNLTTAGFACSQCGQPLFVYKLEQVSEKGKAYTNYFGRCNVAEHEKLIKLAQLKPEKDSDEAVTYSLGKFGQRALDFYSIHVTKESTHPVKPLAQIAGNRYASGPVGKALSDACMGTIASFLSKYQDIIIEHQKVVKGNQKRLESLRELAGKENLEYPSVTLPPQPHTKEGVDAYNEVIARVRMWVNLNLWQKLKLSRDDAKPLLRLKGFPSFPLVERQANEVDWWDMVCNVKKLINEKKEDGKVFWQNLAGYKRQEALRPYLSSEEDRKKGKKFARYQLGDLLLHLEKKHEGEDWGKVYDEAWERIDKKVEGLSKHIKLEEERRSEDAQSKAALTDWLRAKASFVIEGLKEADKDEFCRCELKLQKWYGDLRGKPFAIEAENSILDISGFSKQYNCAFIWQKDGVKKLNLYLIINYFKGGKLRFKKIKPEAFEANRFYTVINKKSGEIVPMEVNFNFDDPNLIILPLAFGKRQGREFIWNDLLSLETGSLKLANGRVIEKTLYNRRTRQDEPALFVALTFERREVLDSSNIKPMSNLIGVDRGENIPAVIALTDPEGCPLSRFKDSLGNPTHILRIGESYKEKQRTIQAKKEVEQRRAGGYSRKYASKAKNLADDMVRNTARDLLYYAVTQDAMLIFENLSRGFGRQGKRTFMAERQYTRMEDWLTAKLAYEGLPSKTYLSKTLAQYTSKTCSNCGFTITSADYDRVLEKLKKTATGWMTTINGKELKVEGQITYYNRYKRQNVVKDLSVELDRLSEESVNNDISSWTKGRSGEALSLLKKRFSHRPVQEKFVCLNCGFETHADEQAALNIARSWLFLRSQEYKKYQTNKTTGNTDKRAFVETWQSFYRKKLKEVWKPAV

SEQ ID NO: 37104 - protein, 979 aa, synthetic construct
  REGION 1..979: note = engineered CasX variant
QEIKRINKIRRRLVKDSNTKKAGKTGPMKTLLVRVMTPDLRERLENLRKKPENIPQPISNTSRANLNKLLTDYTEMKKAILHVYWEEFQKDPVGLMSRVAQPASKKIDQNKLKPEMDEKGNLTTAGFACSQCGQPLFVYKLEQVSEKGKAYTNYFGRCNVAEHEKLILLAQLKPEKDSDEAVTYSLGKFGQRALDFYSIHVTKESTHPVKPLAQIAGNRYASPVGKALSDACMGTIASFLSKYQDIIIEHQKVVKGNQKRLESLRELAGKENLEYPSVTLPPQPHTKEGVDAYNEVIARVRMWVNLNLWQKLKLSRDDAKPLLRLKGFPSFPLVERQANEVDWWDMVCNVKKLINEKKEDGKVFWQNLAGYKRQEALRPYLSSEEDRKKGKKFARYQLGDLLLHLEKKHEGEDWGKVYDEAWERIDKKVEGLSKHIKLEEERRSEDAQSKAALTDWLRAKASFVIEGLKEADKDEFCRCELKLQKWYGDLRGKPFAIEAENSILDISGFSKQYNCAFIWQKDGVKKLNLYLIINYFKGGKLRFKKIKPEAFEANRFYTVINKKSGEIVPMEVNFNFDDPNLIILPLAFGKRQGREFIWNDLLSLETGSLKLANGRVIEKTLYNRRTRQDEPALFVALTFERREVLDSSNIKPMSNLIGVDRGENIPAVIALTDPEGCPLSRFKDSLGNPTHILRIGESYKEKQRTIQAKKEVEQRRAGGYSRKYASKAKNLADDMVRNTARDLLYYAVTQDAMLIFENLSRGFGRQGKRTFMAERQYTRMEDWLTAKLAYEGLPSKTYLSKTLAQYTSKTCSNCGFTITSADYDRVLEKLKKTATGWMTTINGKELKVEGQITYYNRYKRQNVVKDLSVELDRLSEESVNNDISSWTKGRSGEALSLLKKRFSHRPVQEKFVCLNCGFETHADEQAALNIARSWLFLRSQEYKKYQTNKTTGNTDKRAFVETWQSFYRKKLKEVWKPAV

SEQ ID NO: 37105 - protein, 979 aa, synthetic construct
  REGION 1..979: note = engineered CasX variant
QEIKRINKIRRRLVKDSNTKKAGKTGPMKTLLVRVMTPDLRERLENLRKKPENIPQPISNTSRANLNKLLTDYTEMKKAILHVYWEEFQKDPVGLMSRVAQPASKKIDQNKLKPEMDEKGNLTTAGFACSQCGQPLFVYKLEQVSEKGKAYTNYFGRCNVAEHEKLILLAQLKPEKDSDEAVTYSLGKFGQRALDFYSIHVTKESTHPVKPLAQIAGNRYASYPVGKALSDACMGTIASFLSKYQDIIIEHQKVVKGNQKRLESLRELAGKENLEYPSVTLPPQPHTKEGVDAYNEVIARVRMWVNLNLWQKLKLSRDDAKPLLRLKGFPSFPLVERQANEVDWWDMVCNVKKLINEKKEDGKVFWQNLAGYKRQEALRPYLSSEEDRKKGKKFARYQLGDLLLHLEKKHEGEDWGKVYDEAWERIDKKVEGLSKHIKLEEERRSEDAQSKAALTDWLRAKASFVIEGLKEADKDEFCRCELKLQKWYGDLRGKPFAIEAENSILDISGFSKQYNCAFIWQKDGVKKLNLYLIINYFKGGKLRFKKIKPEAFEANRFYTVINKKSGEIVPMEVNFNFDDPNLIILPLAFGKRQGREFIWNDLLSLETGSLKLANGRVIEKTLYNRRTRQDEPALFVALTFERREVLDSSNIKPMNLIGVDRGENIPAVIALTDPEGCPLSRFKDSLGNPTHILRIRESYKEKQRTIQAKKEVEQRRAGGYSRKYASKAKNLADDMVRNTARDLLYYAVTQDAMLIFENLSRGFGRQGKRTFMAERQYTRMEDWLTAKLAYEGLPSKTYLSKTLAQYTSKTCSNCGFTITSADYDRVLEKLKKTATGWMTTINGKELKVEGQITYYNRYKRQNVVKDLSVELDRLSEESVNNDISSWTKGRSGEALSLLKKRFSHRPVQEKFVCLNCGFETHADEQAALNIARSWLFLRSQEYKKYQTNKTTGNTDKRAFVETWQSFYRKKLKEVWKPAV

SEQ ID NO: 37106 - protein, 979 aa, synthetic construct
  REGION 1..979: note = engineered CasX variant
QEIKRINKIRRRLVKDSNTKKAGKTGPMKTLLVRVMTPDLRERLENLRKKPENIPQPISNTSRANLNKLLTDYTEMKKAILHVYWEEFQKDPVGLMSRVAQPASKKIDQNKLKPEMDEKGNLTTAGFACSQCGQPLFVYKLEQVSEKGKAYTNYFGRCNVAEHEKLILLAQLKPEKDSDEAVTYSLGKFGQRALDFYSIHVTKESTHPVKPLAQIAGNRYASHPVGKALSDACMGTIASFLSKYQDIIIEHQKVVKGNQKRLESLRELAGKENLEYPSVTLPPQPHTKEGVDAYNEVIARVRMWVNLNLWQKLKLSRDDAKPLLRLKGFPSFPLVERQANEVDWWDMVCNVKKLINEKKEDGKVFWQNLAGYKRQEALRPYLSSEEDRKKGKKFARYQLGDLLLHLEKKHEGEDWGKVYDEAWERIDKKVEGLSKHIKLEEERRSEDAQSKAALTDWLRAKASFVIEGLKEADKDEFCRCELKLQKWYGDLRGKPFAIEAENSILDISGFSKQYNCAFIWQKDGVKKLNLYLIINYFKGGKLRFKKIKPEAFEANRFYTVINKKSGEIVPMEVNFNFDDPNLIILPLAFGKRQGREFIWNDLLSLETGSLKLANGRVIEKTLYNRRTRQDEPALFVALTFERREVLDSSNIKPMNLIGVDRGENIPAVIALTDPEGCPLSRFKDSLGNPTHILRIRESYKEKQRTIQAKKEVEQRRAGGYSRKYASKAKNLADDMVRNTARDLLYYAVTQDAMLIFENLSRGFGRQGKRTFMAERQYTRMEDWLTAKLAYEGLPSKTYLSKTLAQYTSKTCSNCGFTITSADYDRVLEKLKKTATGWMTTINGKELKVEGQITYYNRYKRQNVVKDLSVELDRLSEESVNNDISSWTKGRSGEALSLLKKRFSHRPVQEKFVCLNCGFETHADEQAALNIARSWLFLRSQEYKKYQTNKTTGNTDKRAFVETWQSFYRKKLKEVWKPAV

SEQ ID NO: 37107 - protein, 979 aa, synthetic construct
  REGION 1..979: note = engineered CasX variant
QEIKRINKIRRRLVKDSNTKKAGKTGPMKTLLVRVMTPDLRERLENLRKKPENIPQPISNTSRANLNKLLTDYTEMKKAILHVYWEEFQKDPVGLMSRVAQPASKKIDQNKLKPEMDEKGNLTTAGFACSQCGQPLFVYKLEQVSEKGKAYTNYFGRCNVAEHEKLILLAQLKPEKDSDEAVTYSLGKFGQRALDFYSIHVTKESTHPVKPLAQIAGNRYASSPVGKALSDACMGTIASFLSKYQDIIIEHQKVVKGNQKRLESLRELAGKENLEYPSVTLPPQPHTKEGVDAYNEVIARVRMWVNLNLWQKLKLSRDDAKPLLRLKGFPSFPLVERQANEVDWWDMVCNVKKLINEKKEDGKVFWQNLAGYKRQEALRPYLSSEEDRKKGKKFARYQLGDLLLHLEKKHEGEDWGKVYDEAWERIDKKVEGLSKHIKLEEERRSEDAQSKAALTDWLRAKASFVIEGLKEADKDEFCRCELKLQKWYGDLRGKPFAIEAENSILDISGFSKQYNCAFIWQKDGVKKLNLYLIINYFKGGKLRFKKIKPEAFEANRFYTVINKKSGEIVPMEVNFNFDDPNLIILPLAFGKRQGREFIWNDLLSLETGSLKLANGRVIEKTLYNRRTRQDEPALFVALTFERREVLDSSNIKPMNLIGVDRGENIPAVIALTDPEGCPLSRFKDSLGNPTHILRIRESYKEKQRTIQAKKEVEQRRAGGYSRKYASKAKNLADDMVRNTARDLLYYAVTQDAMLIFENLSRGFGRQGKRTFMAERQYTRMEDWLTAKLAYEGLPSKTYLSKTLAQYTSKTCSNCGFTITSADYDRVLEKLKKTATGWMTTINGKELKVEGQITYYNRYKRQNVVKDLSVELDRLSEESVNNDISSWTKGRSGEALSLLKKRFSHRPVQEKFVCLNCGFETHADEQAALNIARSWLFLRSQEYKKYQTNKTTGNTDKRAFVETWQSFYRKKLKEVWKPAV

SEQ ID NO: 37108 - protein, 979 aa, synthetic construct
  REGION 1..979: note = engineered CasX variant
QEIKRINKIRRRLVKDSNTKKAGKTGPMKTLLVRVMTPDLRERLENLRKKPENIPQPISNTSRANLNKLLTDYTEMKKAILHVYWEEFQKDPVGLMSRVAQPASKKIDQNKLKPEMDEKGNLTTAGFACSQCGQPLFVYKLEQVSEKGKAYTNYFGRCNVAEHEKLILLAQLKPEKDSDEAVTYSLGKFGQRALDFYSIHVTKESTHPVKPLAQIAGNRYASTPVGKALSDACMGTIASFLSKYQDIIIEHQKVVKGNQKRLESLRELAGKENLEYPSVTLPPQPHTKEGVDAYNEVIARVRMWVNLNLWQKLKLSRDDAKPLLRLKGFPSFPLVERQANEVDWWDMVCNVKKLINEKKEDGKVFWQNLAGYKRQEALRPYLSSEEDRKKGKKFARYQLGDLLLHLEKKHEGEDWGKVYDEAWERIDKKVEGLSKHIKLEEERRSEDAQSKAALTDWLRAKASFVIEGLKEADKDEFCRCELKLQKWYGDLRGKPFAIEAENSILDISGFSKQYNCAFIWQKDGVKKLNLYLIINYFKGGKLRFKKIKPEAFEANRFYTVINKKSGEIVPMEVNFNFDDPNLIILPLAFGKRQGREFIWNDLLSLETGSLKLANGRVIEKTLYNRRTRQDEPALFVALTFERREVLDSSNIKPMNLIGVDRGENIPAVIALTDPEGCPLSRFKDSLGNPTHILRIRESYKEKQRTIQAKKEVEQRRAGGYSRKYASKAKNLADDMVRNTARDLLYYAVTQDAMLIFENLSRGFGRQGKRTFMAERQYTRMEDWLTAKLAYEGLPSKTYLSKTLAQYTSKTCSNCGFTITSADYDRVLEKLKKTATGWMTTINGKELKVEGQITYYNRYKRQNVVKDLSVELDRLSEESVNNDISSWTKGRSGEALSLLKKRFSHRPVQEKFVCLNCGFETHADEQAALNIARSWLFLRSQEYKKYQTNKTTGNTDKRAFVETWQSFYRKKLKEVWKPAV

SEQ ID NO: 37109 - protein, 979 aa, synthetic construct
  REGION 1..979: note = engineered CasX variant
QEIKRINKIRRRLVKDSNTKKAGKTGPMKTLLVRVMTPDLRERLENLRKKPENIPQPISNTSRANLNKLLTDYTEMKKAILHVYWEEFQKDPVGLMSRVAQPASKKIDQNKLKPEMDEKGNLTTAGFACSQCGQPLFVYKLEQVSEKGKAYTNYFGRCNVAEHEKLILLAQLKPEKDSDEAVTYSLGKFGQRALDFYSIHVTKESTHPVKPLAQIAGNRYASAPVGKALSDACMGTIASFLSKYQDIIIEHQKVVKGNQKRLESLRELAGKENLEYPSVTLPPQPHTKEGVDAYNEVIARVRMWVNLNLWQKLKLSRDDAKPLLRLKGFPSFPLVERQANEVDWWDMVCNVKKLINEKKEDGKVFWQNLAGYKRQEALRPYLSSEEDRKKGKKFARYQLGDLLLHLEKKHEGEDWGKVYDEAWERIDKKVEGLSKHIKLEEERRSEDAQSKAALTDWLRAKASFVIEGLKEADKDEFCRCELKLQKWYGDLRGKPFAIEAENSILDISGFSKQYNCAFIWQKDGVKKLNLYLIINYFKGGKLRFKKIKPEAFEANRFYTVINKKSGEIVPMEVNFNFDDPNLIILPLAFGKRQGREFIWNDLLSLETGSLKLANGRVIEKTLYNRRTRQDEPALFVALTFERREVLDSSNIKPMNLIGVDRGENIPAVIALTDPEGCPLSRFKDSLGNPTHILRIRESYKEKQRTIQAKKEVEQRRAGGYSRKYASKAKNLADDMVRNTARDLLYYAVTQDAMLIFENLSRGFGRQGKRTFMAERQYTRMEDWLTAKLAYEGLPSKTYLSKTLAQYTSKTCSNCGFTITSADYDRVLEKLKKTATGWMTTINGKELKVEGQITYYNRYKRQNVVKDLSVELDRLSEESVNNDISSWTKGRSGEALSLLKKRFSHRPVQEKFVCLNCGFETHADEQAALNIARSWLFLRSQEYKKYQTNKTTGNTDKRAFVETWQSFYRKKLKEVWKPAV

SEQ ID NO: 37110 - protein, 979 aa, synthetic construct
  REGION 1..979: note = engineered CasX variant
QEIKRINKIRRRLVKDSNTKKAGKTGPMKTLLVRVMTPDLRERLENLRKKPENIPQPISNTSRANLNKLLTDYTEMKKAILHVYWEEFQKDPVGLMSRVAQPASKKIDQNKLKPEMDEKGNLTTAGFACSQCGQPLFVYKLEQVSEKGKAYTNYFGRCNVAEHEKLILLAQLKPEKDSDEAVTYSLGKFGQRALDFYSIHVTKESTHPVKPLAQIAGNRYASVPVGKALSDACMGTIASFLSKYQDIIIEHQKVVKGNQKRLESLRELAGKENLEYPSVTLPPQPHTKEGVDAYNEVIARVRMWVNLNLWQKLKLSRDDAKPLLRLKGFPSFPLVERQANEVDWWDMVCNVKKLINEKKEDGKVFWQNLAGYKRQEALRPYLSSEEDRKKGKKFARYQLGDLLLHLEKKHEGEDWGKVYDEAWERIDKKVEGLSKHIKLEEERRSEDAQSKAALTDWLRAKASFVIEGLKEADKDEFCRCELKLQKWYGDLRGKPFAIEAENSILDISGFSKQYNCAFIWQKDGVKKLNLYLIINYFKGGKLRFKKIKPEAFEANRFYTVINKKSGEIVPMEVNFNFDDPNLIILPLAFGKRQGREFIWNDLLSLETGSLKLANGRVIEKTLYNRRTRQDEPALFVALTFERREVLDSSNIKPMNLIGVDRGENIPAVIALTDPEGCPLSRFKDSLGNPTHILRIRESYKEKQRTIQAKKEVEQRRAGGYSRKYASKAKNLADDMVRNTARDLLYYAVTQDAMLIFENLSRGFGRQGKRTFMAERQYTRMEDWLTAKLAYEGLPSKTYLSKTLAQYTSKTCSNCGFTITSADYDRVLEKLKKTATGWMTTINGKELKVEGQITYYNRYKRQNVVKDLSVELDRLSEESVNNDISSWTKGRSGEALSLLKKRFSHRPVQEKFVCLNCGFETHADEQAALNIARSWLFLRSQEYKKYQTNKTTGNTDKRAFVETWQSFYRKKLKEVWKPAV

SEQ ID NO: 37111 - protein, 979 aa, synthetic construct
  REGION 1..979: note = engineered CasX variant
QEIKRINKIRRRLVKDSNTKKAGKTGPMKTLLVRVMTPDLRERLENLRKKPENIPQPISNTSRANLNKLLTDYTEMKKAILHVYWEEFQKDPVGLMSRVAQPASKKIDQNKLKPEMDEKGNLTTAGFACSQCGQPLFVYKLEQVSEKGKAYTNYFGRCNVAEHEKLIKLAQLKPEKDSDEAVTYSLGKFGQRALDFYSIHVTKESTHPVKPLAQIAGNRYASGPVGKALSDACMGTIASFLSKYQDIIIEHQKVVKGNQKRLESLRELAGKENLEYPSVTLPPQPHTKEGVDAYNEVIARVRMWVNLNLWQKLKLSRDDAKPLLRLKGFPSFPLVERQANEVDWWDMVCNVKKLINEKKEDGKVFWQNLAGYKRQEALRPYLSSEEDRKKGKKFARYQLGDLLLHLEKKHEGEDWGKVYDEAWERIDKKVEGLSKHIKLEEERRSEDAQSKAALTDWLRAKASFVIEGLKEADKDEFCRCELKLQKWYGDLRGKPFAIEAENSILDISGFSKQYNCAFIWQKDGVKKLNLYLIINYFKGGKLRFKKIKPEAFEANRFYTVINKKSGEIVPMEVNFNFDDPNLIILPLAFGKRQGREFIWNDLLSLETGSLKLANGRVIEKTLYNRRTRQDEPALFVALTFERREVLDSSNIKPMNLIGVDRGENIPAVIALTDPEGCPLSRFKDSLGNPTHILRIRESYKEKQRTIQAKKEVEQRRAGGYSRKYASKAKNLADDMVRNTARDLLYYAVTQDAMLIFENLSRGFGRQGKRTFMAERQYTRMEDWLTAKLAYEGLPSKTYLSKTLAQYTSKTCSNCGFTITSADYDRVLEKLKKTATGWMTTINGKELKVEGQITYYNRYKRQNVVKDLSVELDRLSEESVNNDISSWTKGRSGEALSLLKKRFSHRPVQEKFVCLNCGFETHADEQAALNIARSWLFLRSQEYKKYQTNKTTGNTDKRAFVETWQSFYRKKLKEVWKPAV

SEQ ID NO: 37112 - protein, 978 aa, synthetic construct
  REGION 1..978: note = engineered CasX variant
QEIKRINKIRRRLVKDSNTKKAGKTGPMKTLLVRVMTPDLRERLENLRKKPENIPQPISNTSRANLNKLLTDYTEMKKAILHVYWEEFQKDPVGLMSRVAQPASKKIDQNKLKPEMDEKGNLTTAGFACSQCGQPLFVYKLEQVSEKGKAYTNYFGRCNVAEHEKLILLAQLKPEKDSDEAVTYSLGKFGQRALDFYSIHVTKESTHPVKPLAQIAGNRYASPVGKALSDACMGTIASFLSKYQDIIIEHQKVVKGNQKRLESLRELAGKENLEYPSVTLPPQPHTKEGVDAYNEVIARVRMWVNLNLWQKLKLSRDDAKPLLRLKGFPSFPLVERQANEVDWWDMVCNVKKLINEKKEDGKVFWQNLAGYKRQEALRPYLSSEEDRKKGKKFARYQLGDLLLHLEKKHEGEDWGKVYDEAWERIDKKVEGLSKHIKLEEERRSEDAQSKAALTDWLRAKASFVIEGLKEADKDEFCRCELKLQKWYGDLRGKPFAIEAENSILDISGFSKQYNCAFIWQKDGVKKLNLYLIINYFKGGKLRFKKIKPEAFEANRFYTVINKKSGEIVPMEVNFNFDDPNLIILPLAFGKRQGREFIWNDLLSLETGSLKLANGRVIEKTLYNRRTRQDEPALFVALTFERREVLDSSNIKPMNLIGVDRGENIPAVIALTDPEGCPLSRFKDSLGNPTHILRIRESYKEKQRTIQAKKEVEQRRAGGYSRKYASKAKNLADDMVRNTARDLLYYAVTQDAMLIFENLSRGFGRQGKRTFMAERQYTRMEDWLTAKLAYEGLPSKTYLSKTLAQYTSKTCSNCGFTITSADYDRVLEKLKKTATGWMTTINGKELKVEGQITYYNRYKRQNVVKDLSVELDRLSEESVNNDISSWTKGRSGEALSLLKKRFSHRPVQEKFVCLNCGFETHADEQAALNIARSWLFLRSQEYKKYQTNKTTGNTDKRAFVETWQSFYRKKLKEVWKPAV

SEQ ID NO: 37113 - protein, 979 aa, synthetic construct
  REGION 1..979: note = engineered CasX variant
QEIKRINKIRRRLVKDSNTKKAGKTGPMKTLLVRVMTPDLRERLENLRKKPENIPQPISNTSRANLNKLLTDYTEMKKAILHVYWEEFQKDPVGLMSRVAQPASKKIDQNKLKPEMDEKGNLTTAGFACSQCGQPLFVYKLEQVSEKGKAYTNYFGRCNVAEHEKLILLAQLKPEKDSDEAVTYSLGKFGQRALDFYSIHVTKESTHPVKPLAQIAGNRYASYPVGKALSDACMGTIASFLSKYQDIIIEHQKVVKGNQKRLESLRELAGKENLEYPSVTLPPQPHTKEGVDAYNEVIARVRMWVNLNLWQKLKLSRDDAKPLLRLKGFPSFPLVERQANEVDWWDMVCNVKKLINEKKEDGKVFWQNLAGYKRQEALRPYLSSEEDRKKGKKFARYQLGDLLLHLEKKHEGEDWGKVYDEAWERIDKKVEGLSKHIKLEEERRSEDAQSKAALTDWLRAKASFVIEGLKEADKDEFCRCELKLQKWYGDLRGKPFAIEAENSILDISGFSKQYNCAFIWQKDGVKKLNLYLIINYFKGGKLRFKKIKPEAFEANRFYTVINKKSGEIVPMEVNFNFDDPNLIILPLAFGKRQGREFIWNDLLSLETGSLKLANGRVIEKTLYNRRTRQDEPALFVALTFERREVLDSSNIKPMNLIGVDRGENIPAVIALTDPEGCPLSRFKDSLGNPTHILRIGESYKEKQRTIQAKKEVEQRRAGGYSRKYASKAKNLADDMVRNTARDLLYYAVTQDAMLIFENLSRGFGRQGKRTFSAERQYTRMEDWLTAKLAYEGLPSKTYLSKTLAQYTSKTCSNCGFTITSADYDRVLEKLKKTATGWMTTINGKELKVEGQITYYNRYKRQNVVKDLSVELDRLSEESVNNDISSWTKGRSGEALSLLKKRFSHRPVQEKFVCLNCGFETHADEQAALNIARSWLFLRSQEYKKYQTNKTTGNTDKRAFVETWQSFYRKKLKEVWKPAV

SEQ ID NO: 37114 - protein, 979 aa, synthetic construct
  REGION 1..979: note = engineered CasX variant
QEIKRINKIRRRLVKDSNTKKAGKTGPMKTLLVRVMTPDLRERLENLRKKPENIPQPISNTSRANLNKLLTDYTEMKKAILHVYWEEFQKDPVGLMSRVAQPASKKIDQNKLKPEMDEKGNLTTAGFACSQCGQPLFVYKLEQVSEKGKAYTNYFGRCNVAEHEKLILLAQLKPEKDSDEAVTYSLGKFGQRALDFYSIHVTKESTHPVKPLAQIAGNRYASHPVGKALSDACMGTIASFLSKYQDIIIEHQKVVKGNQKRLESLRELAGKENLEYPSVTLPPQPHTKEGVDAYNEVIARVRMWVNLNLWQKLKLSRDDAKPLLRLKGFPSFPLVERQANEVDWWDMVCNVKKLINEKKEDGKVFWQNLAGYKRQEALRPYLSSEEDRKKGKKFARYQLGDLLLHLEKKHEGEDWGKVYDEAWERIDKKVEGLSKHIKLEEERRSEDAQSKAALTDWLRAKASFVIEGLKEADKDEFCRCELKLQKWYGDLRGKPFAIEAENSILDISGFSKQYNCAFIWQKDGVKKLNLYLIINYFKGGKLRFKKIKPEAFEANRFYTVINKKSGEIVPMEVNFNFDDPNLIILPLAFGKRQGREFIWNDLLSLETGSLKLANGRVIEKTLYNRRTRQDEPALFVALTFERREVLDSSNIKPMNLIGVDRGENIPAVIALTDPEGCPLSRFKDSLGNPTHILRIGESYKEKQRTIQAKKEVEQRRAGGYSRKYASKAKNLADDMVRNTARDLLYYAVTQDAMLIFENLSRGFGRQGKRTFSAERQYTRMEDWLTAKLAYEGLPSKTYLSKTLAQYTSKTCSNCGFTITSADYDRVLEKLKKTATGWMTTINGKELKVEGQITYYNRYKRQNVVKDLSVELDRLSEESVNNDISSWTKGRSGEALSLLKKRFSHRPVQEKFVCLNCGFETHADEQAALNIARSWLFLRSQEYKKYQTNKTTGNTDKRAFVETWQSFYRKKLKEVWKPAV

SEQ ID NO: 37115 - protein, 979 aa, synthetic construct
  REGION 1..979: note = engineered CasX variant
QEIKRINKIRRRLVKDSNTKKAGKTGPMKTLLVRVMTPDLRERLENLRKKPENIPQPISNTSRANLNKLLTDYTEMKKAILHVYWEEFQKDPVGLMSRVAQPASKKIDQNKLKPEMDEKGNLTTAGFACSQCGQPLFVYKLEQVSEKGKAYTNYFGRCNVAEHEKLILLAQLKPEKDSDEAVTYSLGKFGQRALDFYSIHVTKESTHPVKPLAQIAGNRYASSPVGKALSDACMGTIASFLSKYQDIIIEHQKVVKGNQKRLESLRELAGKENLEYPSVTLPPQPHTKEGVDAYNEVIARVRMWVNLNLWQKLKLSRDDAKPLLRLKGFPSFPLVERQANEVDWWDMVCNVKKLINEKKEDGKVFWQNLAGYKRQEALRPYLSSEEDRKKGKKFARYQLGDLLLHLEKKHEGEDWGKVYDEAWERIDKKVEGLSKHIKLEEERRSEDAQSKAALTDWLRAKASFVIEGLKEADKDEFCRCELKLQKWYGDLRGKPFAIEAENSILDISGFSKQYNCAFIWQKDGVKKLNLYLIINYFKGGKLRFKKIKPEAFEANRFYTVINKKSGEIVPMEVNFNFDDPNLIILPLAFGKRQGREFIWNDLLSLETGSLKLANGRVIEKTLYNRRTRQDEPALFVALTFERREVLDSSNIKPMNLIGVDRGENIPAVIALTDPEGCPLSRFKDSLGNPTHILRIGESYKEKQRTIQAKKEVEQRRAGGYSRKYASKAKNLADDMVRNTARDLLYYAVTQDAMLIFENLSRGFGRQGKRTFSAERQYTRMEDWLTAKLAYEGLPSKTYLSKTLAQYTSKTCSNCGFTITSADYDRVLEKLKKTATGWMTTINGKELKVEGQITYYNRYKRQNVVKDLSVELDRLSEESVNNDISSWTKGRSGEALSLLKKRFSHRPVQEKFVCLNCGFETHADEQAALNIARSWLFLRSQEYKKYQTNKTTGNTDKRAFVETWQSFYRKKLKEVWKPAV

SEQ ID NO: 37116 - protein, 979 aa, synthetic construct
  REGION 1..979: note = engineered CasX variant
QEIKRINKIRRRLVKDSNTKKAGKTGPMKTLLVRVMTPDLRERLENLRKKPENIPQPISNTSRANLNKLLTDYTEMKKAILHVYWEEFQKDPVGLMSRVAQPASKKIDQNKLKPEMDEKGNLTTAGFACSQCGQPLFVYKLEQVSEKGKAYTNYFGRCNVAEHEKLILLAQLKPEKDSDEAVTYSLGKFGQRALDFYSIHVTKESTHPVKPLAQIAGNRYASTPVGKALSDACMGTIASFLSKYQDIIIEHQKVVKGNQKRLESLRELAGKENLEYPSVTLPPQPHTKEGVDAYNEVIARVRMWVNLNLWQKLKLSRDDAKPLLRLKGFPSFPLVERQANEVDWWDMVCNVKKLINEKKEDGKVFWQNLAGYKRQEALRPYLSSEEDRKKGKKFARYQLGDLLLHLEKKHEGEDWGKVYDEAWERIDKKVEGLSKHIKLEEERRSEDAQSKAALTDWLRAKASFVIEGLKEADKDEFCRCELKLQKWYGDLRGKPFAIEAENSILDISGFSKQYNCAFIWQKDGVKKLNLYLIINYFKGGKLRFKKIKPEAFEANRFYTVINKKSGEIVPMEVNFNFDDPNLIILPLAFGKRQGREFIWNDLLSLETGSLKLANGRVIEKTLYNRRTRQDEPALFVALTFERREVLDSSNIKPMNLIGVDRGENIPAVIALTDPEGCPLSRFKDSLGNPTHILRIGESYKEKQRTIQAKKEVEQRRAGGYSRKYASKAKNLADDMVRNTARDLLYYAVTQDAMLIFENLSRGFGRQGKRTFSAERQYTRMEDWLTAKLAYEGLPSKTYLSKTLAQYTSKTCSNCGFTITSADYDRVLEKLKKTATGWMTTINGKELKVEGQITYYNRYKRQNVVKDLSVELDRLSEESVNNDISSWTKGRSGEALSLLKKRFSHRPVQEKFVCLNCGFETHADEQAALNIARSWLFLRSQEYKKYQTNKTTGNTDKRAFVETWQSFYRKKLKEVWKPAV

SEQ ID NO: 37117 - protein, 979 aa, synthetic construct
  REGION 1..979: note = engineered CasX variant
QEIKRINKIRRRLVKDSNTKKAGKTGPMKTLLVRVMTPDLRERLENLRKKPENIPQPISNTSRANLNKLLTDYTEMKKAILHVYWEEFQKDPVGLMSRVAQPASKKIDQNKLKPEMDEKGNLTTAGFACSQCGQPLFVYKLEQVSEKGKAYTNYFGRCNVAEHEKLILLAQLKPEKDSDEAVTYSLGKFGQRALDFYSIHVTKESTHPVKPLAQIAGNRYASAPVGKALSDACMGTIASFLSKYQDIIIEHQKVVKGNQKRLESLRELAGKENLEYPSVTLPPQPHTKEGVDAYNEVIARVRMWVNLNLWQKLKLSRDDAKPLLRLKGFPSFPLVERQANEVDWWDMVCNVKKLINEKKEDGKVFWQNLAGYKRQEALRPYLSSEEDRKKGKKFARYQLGDLLLHLEKKHEGEDWGKVYDEAWERIDKKVEGLSKHIKLEEERRSEDAQSKAALTDWLRAKASFVIEGLKEADKDEFCRCELKLQKWYGDLRGKPFAIEAENSILDISGFSKQYNCAFIWQKDGVKKLNLYLIINYFKGGKLRFKKIKPEAFEANRFYTVINKKSGEIVPMEVNFNFDDPNLIILPLAFGKRQGREFIWNDLLSLETGSLKLANGRVIEKTLYNRRTRQDEPALFVALTFERREVLDSSNIKPMNLIGVDRGENIPAVIALTDPEGCPLSRFKDSLGNPTHILRIGESYKEKQRTIQAKKEVEQRRAGGYSRKYASKAKNLADDMVRNTARDLLYYAVTQDAMLIFENLSRGFGRQGKRTFSAERQYTRMEDWLTAKLAYEGLPSKTYLSKTLAQYTSKTCSNCGFTITSADYDRVLEKLKKTATGWMTTINGKELKVEGQITYYNRYKRQNVVKDLSVELDRLSEESVNNDISSWTKGRSGEALSLLKKRFSHRPVQEKFVCLNCGFETHADEQAALNIARSWLFLRSQEYKKYQTNKTTGNTDKRAFVETWQSFYRKKLKEVWKPAV

SEQ ID NO: 37118 - protein, 979 aa, synthetic construct
  REGION 1..979: note = engineered CasX variant
QEIKRINKIRRRLVKDSNTKKAGKTGPMKTLLVRVMTPDLRERLENLRKKPENIPQPISNTSRANLNKLLTDYTEMKKAILHVYWEEFQKDPVGLMSRVAQPASKKIDQNKLKPEMDEKGNLTTAGFACSQCGQPLFVYKLEQVSEKGKAYTNYFGRCNVAEHEKLILLAQLKPEKDSDEAVTYSLGKFGQRALDFYSIHVTKESTHPVKPLAQIAGNRYASVPVGKALSDACMGTIASFLSKYQDIIIEHQKVVKGNQKRLESLRELAGKENLEYPSVTLPPQPHTKEGVDAYNEVIARVRMWVNLNLWQKLKLSRDDAKPLLRLKGFPSFPLVERQANEVDWWDMVCNVKKLINEKKEDGKVFWQNLAGYKRQEALRPYLSSEEDRKKGKKFARYQLGDLLLHLEKKHEGEDWGKVYDEAWERIDKKVEGLSKHIKLEEERRSEDAQSKAALTDWLRAKASFVIEGLKEADKDEFCRCELKLQKWYGDLRGKPFAIEAENSILDISGFSKQYNCAFIWQKDGVKKLNLYLIINYFKGGKLRFKKIKPEAFEANRFYTVINKKSGEIVPMEVNFNFDDPNLIILPLAFGKRQGREFIWNDLLSLETGSLKLANGRVIEKTLYNRRTRQDEPALFVALTFERREVLDSSNIKPMNLIGVDRGENIPAVIALTDPEGCPLSRFKDSLGNPTHILRIGESYKEKQRTIQAKKEVEQRRAGGYSRKYASKAKNLADDMVRNTARDLLYYAVTQDAMLIFENLSRGFGRQGKRTFSAERQYTRMEDWLTAKLAYEGLPSKTYLSKTLAQYTSKTCSNCGFTITSADYDRVLEKLKKTATGWMTTINGKELKVEGQITYYNRYKRQNVVKDLSVELDRLSEESVNNDISSWTKGRSGEALSLLKKRFSHRPVQEKFVCLNCGFETHADEQAALNIARSWLFLRSQEYKKYQTNKTTGNTDKRAFVETWQSFYRKKLKEVWKPAV

SEQ ID NO: 37119 - protein, 979 aa, synthetic construct
  REGION 1..979: note = engineered CasX variant
QEIKRINKIRRRLVKDSNTKKAGKTGPMKTLLVRVMTPDLRERLENLRKKPENIPQPISNTSRANLNKLLTDYTEMKKAILHVYWEEFQKDPVGLMSRVAQPASKKIDQNKLKPEMDEKGNLTTAGFACSQCGQPLFVYKLEQVSEKGKAYTNYFGRCNVAEHEKLIKLAQLKPEKDSDEAVTYSLGKFGQRALDFYSIHVTKESTHPVKPLAQIAGNRYASGPVGKALSDACMGTIASFLSKYQDIIIEHQKVVKGNQKRLESLRELAGKENLEYPSVTLPPQPHTKEGVDAYNEVIARVRMWVNLNLWQKLKLSRDDAKPLLRLKGFPSFPLVERQANEVDWWDMVCNVKKLINEKKEDGKVFWQNLAGYKRQEALRPYLSSEEDRKKGKKFARYQLGDLLLHLEKKHEGEDWGKVYDEAWERIDKKVEGLSKHIKLEEERRSEDAQSKAALTDWLRAKASFVIEGLKEADKDEFCRCELKLQKWYGDLRGKPFAIEAENSILDISGFSKQYNCAFIWQKDGVKKLNLYLIINYFKGGKLRFKKIKPEAFEANRFYTVINKKSGEIVPMEVNFNFDDPNLIILPLAFGKRQGREFIWNDLLSLETGSLKLANGRVIEKTLYNRRTRQDEPALFVALTFERREVLDSSNIKPMNLIGVDRGENIPAVIALTDPEGCPLSRFKDSLGNPTHILRIGESYKEKQRTIQAKKEVEQRRAGGYSRKYASKAKNLADDMVRNTARDLLYYAVTQDAMLIFENLSRGFGRQGKRTFSAERQYTRMEDWLTAKLAYEGLPSKTYLSKTLAQYTSKTCSNCGFTITSADYDRVLEKLKKTATGWMTTINGKELKVEGQITYYNRYKRQNVVKDLSVELDRLSEESVNNDISSWTKGRSGEALSLLKKRFSHRPVQEKFVCLNCGFETHADEQAALNIARSWLFLRSQEYKKYQTNKTTGNTDKRAFVETWQSFYRKKLKEVWKPAV

SEQ ID NO: 37120 - protein, 978 aa, synthetic construct
  REGION 1..978: note = engineered CasX variant
QEIKRINKIRRRLVKDSNTKKAGKTGPMKTLLVRVMTPDLRERLENLRKKPENIPQPISNTSRANLNKLLTDYTEMKKAILHVYWEEFQKDPVGLMSRVAQPASKKIDQNKLKPEMDEKGNLTTAGFACSQCGQPLFVYKLEQVSEKGKAYTNYFGRCNVAEHEKLILLAQLKPEKDSDEAVTYSLGKFGQRALDFYSIHVTKESTHPVKPLAQIAGNRYASPVGKALSDACMGTIASFLSKYQDIIIEHQKVVKGNQKRLESLRELAGKENLEYPSVTLPPQPHTKEGVDAYNEVIARVRMWVNLNLWQKLKLSRDDAKPLLRLKGFPSFPLVERQANEVDWWDMVCNVKKLINEKKEDGKVFWQNLAGYKRQEALRPYLSSEEDRKKGKKFARYQLGDLLLHLEKKHEGEDWGKVYDEAWERIDKKVEGLSKHIKLEEERRSEDAQSKAALTDWLRAKASFVIEGLKEADKDEFCRCELKLQKWYGDLRGKPFAIEAENSILDISGFSKQYNCAFIWQKDGVKKLNLYLIINYFKGGKLRFKKIKPEAFEANRFYTVINKKSGEIVPMEVNFNFDDPNLIILPLAFGKRQGREFIWNDLLSLETGSLKLANGRVIEKTLYNRRTRQDEPALFVALTFERREVLDSSNIKPMNLIGVDRGENIPAVIALTDPEGCPLSRFKDSLGNPTHILRIGESYKEKQRTIQAKKEVEQRRAGGYSRKYASKAKNLADDMVRNTARDLLYYAVTQDAMLIFENLSRGFGRQGKRTFSAERQYTRMEDWLTAKLAYEGLPSKTYLSKTLAQYTSKTCSNCGFTITSADYDRVLEKLKKTATGWMTTINGKELKVEGQITYYNRYKRQNVVKDLSVELDRLSEESVNNDISSWTKGRSGEALSLLKKRFSHRPVQEKFVCLNCGFETHADEQAALNIARSWLFLRSQEYKKYQTNKTTGNTDKRAFVETWQSFYRKKLKEVWKPAV

SEQ ID NO: 37121 - protein, 979 aa, synthetic construct
  REGION 1..979: note = engineered CasX variant
QEIKRINKIRRRLVKDSNTKKAGKTGPMKTLLVRVMTPDLRERLENLRKKPENIPQPISNTSRANLNKLLTDYTEMKKAILHVYWEEFQKDPVGLMSRVAQPASKKIDQNKLKPEMDEKGNLTTAGFACSQCGQPLFVYKLEQVSEKGKAYTNYFGRCNVAEHEKLILLAQLKPEKDSDEAVTYSLGKFGQRALDFYSIHVTKESTHPVKPLAQIAGNRYASYPVGKALSDACMGTIASFLSKYQDIIIEHQKVVKGNQKRLESLRELAGKENLEYPSVTLPPQPHTKEGVDAYNEVIARVRMWVNLNLWQKLKLSRDDAKPLLRLKGFPSFPLVERQANEVDWWDMVCNVKKLINEKKEDGKVFWQNLAGYKRQEALRPYLSSEEDRKKGKKFARYQLGDLLLHLEKKHEGEDWGKVYDEAWERIDKKVEGLSKHIKLEEERRSEDAQSKAALTDWLRAKASFVIEGLKEADKDEFCRCELKLQKWYGDLRGKPFAIEAENSILDISGFSKQYNCAFIWQKDGVKKLNLYLIINYFKGGKLRFKKIKPEAFEANRFYTVINKKSGEIVPMEVNFNFDDPNLIILPLAFGKRQGREFIWNDLLSLETGSLKLANGRVIEKTLYNRRTRQDEPALFVALTFERREVLDSSNIKPMNLIGVDRGENIPAVIALTDPEGCPLSRFKDSLGNPTHILRIGESYKEKQRTIQAKKEVEQRRAGGYSRKYASKAKNLADDMVRNTARDLLYYAVTQDAMLIFENLSRGFGRQGKRTFMAERQYTRMEDWLTAKLAYEGLPSKTYLSKTLAQYTSKTCSNCGFTITSADYDRVLEKLKKTATGWMTTINGKELKVEGQITYYNRYKRQNVVKDLSVELDRLSEESVNNDISSWDKGRSGEALSLLKKRFSHRPVQEKFVCLNCGFETHADEQAALNIARSWLFLRSQEYKKYQTNKTTGNTDKRAFVETWQSFYRKKLKEVWKPAV

SEQ ID NO: 37122 - protein, 979 aa, synthetic construct
  REGION 1..979: note = engineered CasX variant
QEIKRINKIRRRLVKDSNTKKAGKTGPMKTLLVRVMTPDLRERLENLRKKPENIPQPISNTSRANLNKLLTDYTEMKKAILHVYWEEFQKDPVGLMSRVAQPASKKIDQNKLKPEMDEKGNLTTAGFACSQCGQPLFVYKLEQVSEKGKAYTNYFGRCNVAEHEKLILLAQLKPEKDSDEAVTYSLGKFGQRALDFYSIHVTKESTHPVKPLAQIAGNRYASHPVGKALSDACMGTIASFLSKYQDIIIEHQKVVKGNQKRLESLRELAGKENLEYPSVTLPPQPHTKEGVDAYNEVIARVRMWVNLNLWQKLKLSRDDAKPLLRLKGFPSFPLVERQANEVDWWDMVCNVKKLINEKKEDGKVFWQNLAGYKRQEALRPYLSSEEDRKKGKKFARYQLGDLLLHLEKKHEGEDWGKVYDEAWERIDKKVEGLSKHIKLEEERRSEDAQSKAALTDWLRAKASFVIEGLKEADKDEFCRCELKLQKWYGDLRGKPFAIEAENSILDISGFSKQYNCAFIWQKDGVKKLNLYLIINYFKGGKLRFKKIKPEAFEANRFYTVINKKSGEIVPMEVNFNFDDPNLIILPLAFGKRQGREFIWNDLLSLETGSLKLANGRVIEKTLYNRRTRQDEPALFVALTFERREVLDSSNIKPMNLIGVDRGENIPAVIALTDPEGCPLSRFKDSLGNPTHILRIGESYKEKQRTIQAKKEVEQRRAGGYSRKYASKAKNLADDMVRNTARDLLYYAVTQDAMLIFENLSRGFGRQGKRTFMAERQYTRMEDWLTAKLAYEGLPSKTYLSKTLAQYTSKTCSNCGFTITSADYDRVLEKLKKTATGWMTTINGKELKVEGQITYYNRYKRQNVVKDLSVELDRLSEESVNNDISSWDKGRSGEALSLLKKRFSHRPVQEKFVCLNCGFETHADEQAALNIARSWLFLRSQEYKKYQTNKTTGNTDKRAFVETWQSFYRKKLKEVWKPAV

SEQ ID NO: 37123 - protein, 979 aa, synthetic construct
  REGION 1..979: note = engineered CasX variant
QEIKRINKIRRRLVKDSNTKKAGKTGPMKTLLVRVMTPDLRERLENLRKKPENIPQPISNTSRANLNKLLTDYTEMKKAILHVYWEEFQKDPVGLMSRVAQPASKKIDQNKLKPEMDEKGNLTTAGFACSQCGQPLFVYKLEQVSEKGKAYTNYFGRCNVAEHEKLILLAQLKPEKDSDEAVTYSLGKFGQRALDFYSIHVTKESTHPVKPLAQIAGNRYASSPVGKALSDACMGTIASFLSKYQDIIIEHQKVVKGNQKRLESLRELAGKENLEYPSVTLPPQPHTKEGVDAYNEVIARVRMWVNLNLWQKLKLSRDDAKPLLRLKGFPSFPLVERQANEVDWWDMVCNVKKLINEKKEDGKVFWQNLAGYKRQEALRPYLSSEEDRKKGKKFARYQLGDLLLHLEKKHEGEDWGKVYDEAWERIDKKVEGLSKHIKLEEERRSEDAQSKAALTDWLRAKASFVIEGLKEADKDEFCRCELKLQKWYGDLRGKPFAIEAENSILDISGFSKQYNCAFIWQKDGVKKLNLYLIINYFKGGKLRFKKIKPEAFEANRFYTVINKKSGEIVPMEVNFNFDDPNLIILPLAFGKRQGREFIWNDLLSLETGSLKLANGRVIEKTLYNRRTRQDEPALFVALTFERREVLDSSNIKPMNLIGVDRGENIPAVIALTDPEGCPLSRFKDSLGNPTHILRIGESYKEKQRTIQAKKEVEQRRAGGYSRKYASKAKNLADDMVRNTARDLLYYAVTQDAMLIFENLSRGFGRQGKRTFMAERQYTRMEDWLTAKLAYEGLPSKTYLSKTLAQYTSKTCSNCGFTITSADYDRVLEKLKKTATGWMTTINGKELKVEGQITYYNRYKRQNVVKDLSVELDRLSEESVNNDISSWDKGRSGEALSLLKKRFSHRPVQEKFVCLNCGFETHADEQAALNIARSWLFLRSQEYKKYQTNKTTGNTDKRAFVETWQSFYRKKLKEVWKPAV

SEQ ID NO: 37124 - protein, 979 aa, synthetic construct
  REGION 1..979: note = engineered CasX variant
QEIKRINKIRRRLVKDSNTKKAGKTGPMKTLLVRVMTPDLRERLENLRKKPENIPQPISNTSRANLNKLLTDYTEMKKAILHVYWEEFQKDPVGLMSRVAQPASKKIDQNKLKPEMDEKGNLTTAGFACSQCGQPLFVYKLEQVSEKGKAYTNYFGRCNVAEHEKLILLAQLKPEKDSDEAVTYSLGKFGQRALDFYSIHVTKESTHPVKPLAQIAGNRYASTPVGKALSDACMGTIASFLSKYQDIIIEHQKVVKGNQKRLESLRELAGKENLEYPSVTLPPQPHTKEGVDAYNEVIARVRMWVNLNLWQKLKLSRDDAKPLLRLKGFPSFPLVERQANEVDWWDMVCNVKKLINEKKEDGKVFWQNLAGYKRQEALRPYLSSEEDRKKGKKFARYQLGDLLLHLEKKHEGEDWGKVYDEAWERIDKKVEGLSKHIKLEEERRSEDAQSKAALTDWLRAKASFVIEGLKEADKDEFCRCELKLQKWYGDLRGKPFAIEAENSILDISGFSKQYNCAFIWQKDGVKKLNLYLIINYFKGGKLRFKKIKPEAFEANRFYTVINKKSGEIVPMEVNFNFDDPNLIILPLAFGKRQGREFIWNDLLSLETGSLKLANGRVIEKTLYNRRTRQDEPALFVALTFERREVLDSSNIKPMNLIGVDRGENIPAVIALTDPEGCPLSRFKDSLGNPTHILRIGESYKEKQRTIQAKKEVEQRRAGGYSRKYASKAKNLADDMVRNTARDLLYYAVTQDAMLIFENLSRGFGRQGKRTFMAERQYTRMEDWLTAKLAYEGLPSKTYLSKTLAQYTSKTCSNCGFTITSADYDRVLEKLKKTATGWMTTINGKELKVEGQITYYNRYKRQNVVKDLSVELDRLSEESVNNDISSWDKGRSGEALSLLKKRFSHRPVQEKFVCLNCGFETHADEQAALNIARSWLFLRSQEYKKYQTNKTTGNTDKRAFVETWQSFYRKKLKEVWKPAV

SEQ ID NO: 37125 - protein, 979 aa, synthetic construct
  REGION 1..979: note = engineered CasX variant
QEIKRINKIRRRLVKDSNTKKAGKTGPMKTLLVRVMTPDLRERLENLRKKPENIPQPISNTSRANLNKLLTDYTEMKKAILHVYWEEFQKDPVGLMSRVAQPASKKIDQNKLKPEMDEKGNLTTAGFACSQCGQPLFVYKLEQVSEKGKAYTNYFGRCNVAEHEKLILLAQLKPEKDSDEAVTYSLGKFGQRALDFYSIHVTKESTHPVKPLAQIAGNRYASAPVGKALSDACMGTIASFLSKYQDIIIEHQKVVKGNQKRLESLRELAGKENLEYPSVTLPPQPHTKEGVDAYNEVIARVRMWVNLNLWQKLKLSRDDAKPLLRLKGFPSFPLVERQANEVDWWDMVCNVKKLINEKKEDGKVFWQNLAGYKRQEALRPYLSSEEDRKKGKKFARYQLGDLLLHLEKKHEGEDWGKVYDEAWERIDKKVEGLSKHIKLEEERRSEDAQSKAALTDWLRAKASFVIEGLKEADKDEFCRCELKLQKWYGDLRGKPFAIEAENSILDISGFSKQYNCAFIWQKDGVKKLNLYLIINYFKGGKLRFKKIKPEAFEANRFYTVINKKSGEIVPMEVNFNFDDPNLIILPLAFGKRQGREFIWNDLLSLETGSLKLANGRVIEKTLYNRRTRQDEPALFVALTFERREVLDSSNIKPMNLIGVDRGENIPAVIALTDPEGCPLSRFKDSLGNPTHILRIGESYKEKQRTIQAKKEVEQRRAGGYSRKYASKAKNLADDMVRNTARDLLYYAVTQDAMLIFENLSRGFGRQGKRTFMAERQYTRMEDWLTAKLAYEGLPSKTYLSKTLAQYTSKTCSNCGFTITSADYDRVLEKLKKTATGWMTTINGKELKVEGQITYYNRYKRQNVVKDLSVELDRLSEESVNNDISSWDKGRSGEALSLLKKRFSHRPVQEKFVCLNCGFETHADEQAALNIARSWLFLRSQEYKKYQTNKTTGNTDKRAFVETWQSFYRKKLKEVWKPAV

SEQ ID NO: 37126 - protein, 979 aa, synthetic construct
  REGION 1..979: note = engineered CasX variant
QEIKRINKIRRRLVKDSNTKKAGKTGPMKTLLVRVMTPDLRERLENLRKKPENIPQPISNTSRANLNKLLTDYTEMKKAILHVYWEEFQKDPVGLMSRVAQPASKKIDQNKLKPEMDEKGNLTTAGFACSQCGQPLFVYKLEQVSEKGKAYTNYFGRCNVAEHEKLILLAQLKPEKDSDEAVTYSLGKFGQRALDFYSIHVTKESTHPVKPLAQIAGNRYASVPVGKALSDACMGTIASFLSKYQDIIIEHQKVVKGNQKRLESLRELAGKENLEYPSVTLPPQPHTKEGVDAYNEVIARVRMWVNLNLWQKLKLSRDDAKPLLRLKGFPSFPLVERQANEVDWWDMVCNVKKLINEKKEDGKVFWQNLAGYKRQEALRPYLSSEEDRKKGKKFARYQLGDLLLHLEKKHEGEDWGKVYDEAWERIDKKVEGLSKHIKLEEERRSEDAQSKAALTDWLRAKASFVIEGLKEADKDEFCRCELKLQKWYGDLRGKPFAIEAENSILDISGFSKQYNCAFIWQKDGVKKLNLYLIINYFKGGKLRFKKIKPEAFEANRFYTVINKKSGEIVPMEVNFNFDDPNLIILPLAFGKRQGREFIWNDLLSLETGSLKLANGRVIEKTLYNRRTRQDEPALFVALTFERREVLDSSNIKPMNLIGVDRGENIPAVIALTDPEGCPLSRFKDSLGNPTHILRIGESYKEKQRTIQAKKEVEQRRAGGYSRKYASKAKNLADDMVRNTARDLLYYAVTQDAMLIFENLSRGFGRQGKRTFMAERQYTRMEDWLTAKLAYEGLPSKTYLSKTLAQYTSKTCSNCGFTITSADYDRVLEKLKKTATGWMTTINGKELKVEGQITYYNRYKRQNVVKDLSVELDRLSEESVNNDISSWDKGRSGEALSLLKKRFSHRPVQEKFVCLNCGFETHADEQAALNIARSWLFLRSQEYKKYQTNKTTGNTDKRAFVETWQSFYRKKLKEVWKPAV

SEQ ID NO: 37127 - protein, 979 aa, synthetic construct
  REGION 1..979: note = engineered CasX variant
QEIKRINKIRRRLVKDSNTKKAGKTGPMKTLLVRVMTPDLRERLENLRKKPENIPQPISNTSRANLNKLLTDYTEMKKAILHVYWEEFQKDPVGLMSRVAQPASKKIDQNKLKPEMDEKGNLTTAGFACSQCGQPLFVYKLEQVSEKGKAYTNYFGRCNVAEHEKLIKLAQLKPEKDSDEAVTYSLGKFGQRALDFYSIHVTKESTHPVKPLAQIAGNRYASGPVGKALSDACMGTIASFLSKYQDIIIEHQKVVKGNQKRLESLRELAGKENLEYPSVTLPPQPHTKEGVDAYNEVIARVRMWVNLNLWQKLKLSRDDAKPLLRLKGFPSFPLVERQANEVDWWDMVCNVKKLINEKKEDGKVFWQNLAGYKRQEALRPYLSSEEDRKKGKKFARYQLGDLLLHLEKKHEGEDWGKVYDEAWERIDKKVEGLSKHIKLEEERRSEDAQSKAALTDWLRAKASFVIEGLKEADKDEFCRCELKLQKWYGDLRGKPFAIEAENSILDISGFSKQYNCAFIWQKDGVKKLNLYLIINYFKGGKLRFKKIKPEAFEANRFYTVINKKSGEIVPMEVNFNFDDPNLIILPLAFGKRQGREFIWNDLLSLETGSLKLANGRVIEKTLYNRRTRQDEPALFVALTFERREVLDSSNIKPMNLIGVDRGENIPAVIALTDPEGCPLSRFKDSLGNPTHILRIGESYKEKQRTIQAKKEVEQRRAGGYSRKYASKAKNLADDMVRNTARDLLYYAVTQDAMLIFENLSRGFGRQGKRTFMAERQYTRMEDWLTAKLAYEGLPSKTYLSKTLAQYTSKTCSNCGFTITSADYDRVLEKLKKTATGWMTTINGKELKVEGQITYYNRYKRQNVVKDLSVELDRLSEESVNNDISSWDKGRSGEALSLLKKRFSHRPVQEKFVCLNCGFETHADEQAALNIARSWLFLRSQEYKKYQTNKTTGNTDKRAFVETWQSFYRKKLKEVWKPAV

SEQ ID NO: 37128 - protein, 978 aa, synthetic construct
  REGION 1..978: note = engineered CasX variant
QEIKRINKIRRRLVKDSNTKKAGKTGPMKTLLVRVMTPDLRERLENLRKKPENIPQPISNTSRANLNKLLTDYTEMKKAILHVYWEEFQKDPVGLMSRVAQPASKKIDQNKLKPEMDEKGNLTTAGFACSQCGQPLFVYKLEQVSEKGKAYTNYFGRCNVAEHEKLILLAQLKPEKDSDEAVTYSLGKFGQRALDFYSIHVTKESTHPVKPLAQIAGNRYASPVGKALSDACMGTIASFLSKYQDIIIEHQKVVKGNQKRLESLRELAGKENLEYPSVTLPPQPHTKEGVDAYNEVIARVRMWVNLNLWQKLKLSRDDAKPLLRLKGFPSFPLVERQANEVDWWDMVCNVKKLINEKKEDGKVFWQNLAGYKRQEALRPYLSSEEDRKKGKKFARYQLGDLLLHLEKKHEGEDWGKVYDEAWERIDKKVEGLSKHIKLEEERRSEDAQSKAALTDWLRAKASFVIEGLKEADKDEFCRCELKLQKWYGDLRGKPFAIEAENSILDISGFSKQYNCAFIWQKDGVKKLNLYLIINYFKGGKLRFKKIKPEAFEANRFYTVINKKSGEIVPMEVNFNFDDPNLIILPLAFGKRQGREFIWNDLLSLETGSLKLANGRVIEKTLYNRRTRQDEPALFVALTFERREVLDSSNIKPMNLIGVDRGENIPAVIALTDPEGCPLSRFKDSLGNPTHILRIGESYKEKQRTIQAKKEVEQRRAGGYSRKYASKAKNLADDMVRNTARDLLYYAVTQDAMLIFENLSRGFGRQGKRTFMAERQYTRMEDWLTAKLAYEGLPSKTYLSKTLAQYTSKTCSNCGFTITSADYDRVLEKLKKTATGWMTTINGKELKVEGQITYYNRYKRQNVVKDLSVELDRLSEESVNNDISSWDKGRSGEALSLLKKRFSHRPVQEKFVCLNCGFETHADEQAALNIARSWLFLRSQEYKKYQTNKTTGNTDKRAFVETWQSFYRKKLKEVWKPAV

SEQ ID NO: 37129 - protein, 979 aa, synthetic construct
  REGION 1..979: note = engineered CasX variant
QEIKRINKIRRRLVKDSNTKKAGKTGPMKTLLVRVMTPDLRERLENLRKKPENIPQPISNTSRANLNKLLTDYTEMKKAILHVYWEEFQVDPVGLMSRVAQPASKKIDQNKLKPEMDEKGNLTTAGFACSQCGQPLFVYKLEQVSEKGKAYTNYFGRCNVAEHEKLILLAQLKPEKDSDEAVTYSLGKFGQRALDFYSIHVTKESTHPVKPLAQIAGNRYASYPVGKALSDACMGTIASFLSKYQDIIIEHQKVVKGNQKRLESLRELAGKENLEYPSVTLPPQPHTKEGVDAYNEVIARVRMWVNLNLWQKLKLSRDDAKPLLRLKGFPSFPLVERQANEVDWWDMVCNVKKLINEKKEDGKVFWQNLAGYKRQEALRPYLSSEEDRKKGKKFARYQLGDLLLHLEKKHEGEDWGKVYDEAWERIDKKVEGLSKHIKLEEERRSEDAQSKAALTDWLRAKASFVIEGLKEADKDEFCRCELKLQKWYGDLRGKPFAIEAENSILDISGFSKQYNCAFIWQKDGVKKLNLYLIINYFKGGKLRFKKIKPEAFEANRFYTVINKKSGEIVPMEVNFNFDDPNLIILPLAFGKRQGREFIWNDLLSLETGSLKLANGRVIEKTLYNRRTRQDEPALFVALTFERREVLDSSNIKPMNLIGVDRGENIPAVIALTDPEGCPLSRFKDSLGNPTHILRIGESYKEKQRTIQAKKEVEQRRAGGYSRKYASKAKNLADDMVRNTARDLLYYAVTQDAMLIFENLSRGFGRQGKRTFMAERQYTRMEDWLTAKLAYEGLPSKTYLSKTLAQYTSKTCSNCGFTITSADYDRVLEKLKKTATGWMTTINGKELKVEGQITYYNRYKRQNVVKDLSVELDRLSEESVNNDISSWTKGRSGEALSLLKKRFSHRPVQEKFVCLNCGFETHADEQAALNIARSWLFLRSQEYKKYQTNKTTGNTDKRAFVETWQSFYRKKLKEVWKPAV

SEQ ID NO: 37130 - protein, 979 aa, synthetic construct
  REGION 1..979: note = engineered CasX variant
QEIKRINKIRRRLVKDSNTKKAGKTGPMKTLLVRVMTPDLRERLENLRKKPENIPQPISNTSRANLNKLLTDYTEMKKAILHVYWEEFQVDPVGLMSRVAQPASKKIDQNKLKPEMDEKGNLTTAGFACSQCGQPLFVYKLEQVSEKGKAYTNYFGRCNVAEHEKLILLAQLKPEKDSDEAVTYSLGKFGQRALDFYSIHVTKESTHPVKPLAQIAGNRYASHPVGKALSDACMGTIASFLSKYQDIIIEHQKVVKGNQKRLESLRELAGKENLEYPSVTLPPQPHTKEGVDAYNEVIARVRMWVNLNLWQKLKLSRDDAKPLLRLKGFPSFPLVERQANEVDWWDMVCNVKKLINEKKEDGKVFWQNLAGYKRQEALRPYLSSEEDRKKGKKFARYQLGDLLLHLEKKHEGEDWGKVYDEAWERIDKKVEGLSKHIKLEEERRSEDAQSKAALTDWLRAKASFVIEGLKEADKDEFCRCELKLQKWYGDLRGKPFAIEAENSILDISGFSKQYNCAFIWQKDGVKKLNLYLIINYFKGGKLRFKKIKPEAFEANRFYTVINKKSGEIVPMEVNFNFDDPNLIILPLAFGKRQGREFIWNDLLSLETGSLKLANGRVIEKTLYNRRTRQDEPALFVALTFERREVLDSSNIKPMNLIGVDRGENIPAVIALTDPEGCPLSRFKDSLGNPTHILRIGESYKEKQRTIQAKKEVEQRRAGGYSRKYASKAKNLADDMVRNTARDLLYYAVTQDAMLIFENLSRGFGRQGKRTFMAERQYTRMEDWLTAKLAYEGLPSKTYLSKTLAQYTSKTCSNCGFTITSADYDRVLEKLKKTATGWMTTINGKELKVEGQITYYNRYKRQNVVKDLSVELDRLSEESVNNDISSWTKGRSGEALSLLKKRFSHRPVQEKFVCLNCGFETHADEQAALNIARSWLFLRSQEYKKYQTNKTTGNTDKRAFVETWQSFYRKKLKEVWKPAV

SEQ ID NO: 37131 - protein, 979 aa, synthetic construct
  REGION 1..979: note = engineered CasX variant
QEIKRINKIRRRLVKDSNTKKAGKTGPMKTLLVRVMTPDLRERLENLRKKPENIPQPISNTSRANLNKLLTDYTEMKKAILHVYWEEFQVDPVGLMSRVAQPASKKIDQNKLKPEMDEKGNLTTAGFACSQCGQPLFVYKLEQVSEKGKAYTNYFGRCNVAEHEKLILLAQLKPEKDSDEAVTYSLGKFGQRALDFYSIHVTKESTHPVKPLAQIAGNRYASSPVGKALSDACMGTIASFLSKYQDIIIEHQKVVKGNQKRLESLRELAGKENLEYPSVTLPPQPHTKEGVDAYNEVIARVRMWVNLNLWQKLKLSRDDAKPLLRLKGFPSFPLVERQANEVDWWDMVCNVKKLINEKKEDGKVFWQNLAGYKRQEALRPYLSSEEDRKKGKKFARYQLGDLLLHLEKKHEGEDWGKVYDEAWERIDKKVEGLSKHIKLEEERRSEDAQSKAALTDWLRAKASFVIEGLKEADKDEFCRCELKLQKWYGDLRGKPFAIEAENSILDISGFSKQYNCAFIWQKDGVKKLNLYLIINYFKGGKLRFKKIKPEAFEANRFYTVINKKSGEIVPMEVNFNFDDPNLIILPLAFGKRQGREFIWNDLLSLETGSLKLANGRVIEKTLYNRRTRQDEPALFVALTFERREVLDSSNIKPMNLIGVDRGENIPAVIALTDPEGCPLSRFKDSLGNPTHILRIGESYKEKQRTIQAKKEVEQRRAGGYSRKYASKAKNLADDMVRNTARDLLYYAVTQDAMLIFENLSRGFGRQGKRTFMAERQYTRMEDWLTAKLAYEGLPSKTYLSKTLAQYTSKTCSNCGFTITSADYDRVLEKLKKTATGWMTTINGKELKVEGQITYYNRYKRQNVVKDLSVELDRLSEESVNNDISSWTKGRSGEALSLLKKRFSHRPVQEKFVCLNCGFETHADEQAALNIARSWLFLRSQEYKKYQTNKTTGNTDKRAFVETWQSFYRKKLKEVWKPAV

SEQ ID NO: 37132 - protein, 979 aa, synthetic construct
  REGION 1..979: note = engineered CasX variant
QEIKRINKIRRRLVKDSNTKKAGKTGPMKTLLVRVMTPDLRERLENLRKKPENIPQPISNTSRANLNKLLTDYTEMKKAILHVYWEEFQVDPVGLMSRVAQPASKKIDQNKLKPEMDEKGNLTTAGFACSQCGQPLFVYKLEQVSEKGKAYTNYFGRCNVAEHEKLILLAQLKPEKDSDEAVTYSLGKFGQRALDFYSIHVTKESTHPVKPLAQIAGNRYASTPVGKALSDACMGTIASFLSKYQDIIIEHQKVVKGNQKRLESLRELAGKENLEYPSVTLPPQPHTKEGVDAYNEVIARVRMWVNLNLWQKLKLSRDDAKPLLRLKGFPSFPLVERQANEVDWWDMVCNVKKLINEKKEDGKVFWQNLAGYKRQEALRPYLSSEEDRKKGKKFARYQLGDLLLHLEKKHEGEDWGKVYDEAWERIDKKVEGLSKHIKLEEERRSEDAQSKAALTDWLRAKASFVIEGLKEADKDEFCRCELKLQKWYGDLRGKPFAIEAENSILDISGFSKQYNCAFIWQKDGVKKLNLYLIINYFKGGKLRFKKIKPEAFEANRFYTVINKKSGEIVPMEVNFNFDDPNLIILPLAFGKRQGREFIWNDLLSLETGSLKLANGRVIEKTLYNRRTRQDEPALFVALTFERREVLDSSNIKPMNLIGVDRGENIPAVIALTDPEGCPLSRFKDSLGNPTHILRIGESYKEKQRTIQAKKEVEQRRAGGYSRKYASKAKNLADDMVRNTARDLLYYAVTQDAMLIFENLSRGFGRQGKRTFMAERQYTRMEDWLTAKLAYEGLPSKTYLSKTLAQYTSKTCSNCGFTITSADYDRVLEKLKKTATGWMTTINGKELKVEGQITYYNRYKRQNVVKDLSVELDRLSEESVNNDISSWTKGRSGEALSLLKKRFSHRPVQEKFVCLNCGFETHADEQAALNIARSWLFLRSQEYKKYQTNKTTGNTDKRAFVETWQSFYRKKLKEVWKPAV

SEQ ID NO: 37133 - protein, 979 aa, synthetic construct
  REGION 1..979: note = engineered CasX variant
QEIKRINKIRRRLVKDSNTKKAGKTGPMKTLLVRVMTPDLRERLENLRKKPENIPQPISNTSRANLNKLLTDYTEMKKAILHVYWEEFQVDPVGLMSRVAQPASKKIDQNKLKPEMDEKGNLTTAGFACSQCGQPLFVYKLEQVSEKGKAYTNYFGRCNVAEHEKLILLAQLKPEKDSDEAVTYSLGKFGQRALDFYSIHVTKESTHPVKPLAQIAGNRYASAPVGKALSDACMGTIASFLSKYQDIIIEHQKVVKGNQKRLESLRELAGKENLEYPSVTLPPQPHTKEGVDAYNEVIARVRMWVNLNLWQKLKLSRDDAKPLLRLKGFPSFPLVERQANEVDWWDMVCNVKKLINEKKEDGKVFWQNLAGYKRQEALRPYLSSEEDRKKGKKFARYQLGDLLLHLEKKHEGEDWGKVYDEAWERIDKKVEGLSKHIKLEEERRSEDAQSKAALTDWLRAKASFVIEGLKEADKDEFCRCELKLQKWYGDLRGKPFAIEAENSILDISGFSKQYNCAFIWQKDGVKKLNLYLIINYFKGGKLRFKKIKPEAFEANRFYTVINKKSGEIVPMEVNFNFDDPNLIILPLAFGKRQGREFIWNDLLSLETGSLKLANGRVIEKTLYNRRTRQDEPALFVALTFERREVLDSSNIKPMNLIGVDRGENIPAVIALTDPEGCPLSRFKDSLGNPTHILRIGESYKEKQRTIQAKKEVEQRRAGGYSRKYASKAKNLADDMVRNTARDLLYYAVTQDAMLIFENLSRGFGRQGKRTFMAERQYTRMEDWLTAKLAYEGLPSKTYLSKTLAQYTSKTCSNCGFTITSADYDRVLEKLKKTATGWMTTINGKELKVEGQITYYNRYKRQNVVKDLSVELDRLSEESVNNDISSWTKGRSGEALSLLKKRFSHRPVQEKFVCLNCGFETHADEQAALNIARSWLFLRSQEYKKYQTNKTTGNTDKRAFVETWQSFYRKKLKEVWKPAV

SEQ ID NO: 37134 - protein, 979 aa, synthetic construct
  REGION 1..979: note = engineered CasX variant
QEIKRINKIRRRLVKDSNTKKAGKTGPMKTLLVRVMTPDLRERLENLRKKPENIPQPISNTSRANLNKLLTDYTEMKKAILHVYWEEFQVDPVGLMSRVAQPASKKIDQNKLKPEMDEKGNLTTAGFACSQCGQPLFVYKLEQVSEKGKAYTNYFGRCNVAEHEKLILLAQLKPEKDSDEAVTYSLGKFGQRALDFYSIHVTKESTHPVKPLAQIAGNRYASVPVGKALSDACMGTIASFLSKYQDIIIEHQKVVKGNQKRLESLRELAGKENLEYPSVTLPPQPHTKEGVDAYNEVIARVRMWVNLNLWQKLKLSRDDAKPLLRLKGFPSFPLVERQANEVDWWDMVCNVKKLINEKKEDGKVFWQNLAGYKRQEALRPYLSSEEDRKKGKKFARYQLGDLLLHLEKKHEGEDWGKVYDEAWERIDKKVEGLSKHIKLEEERRSEDAQSKAALTDWLRAKASFVIEGLKEADKDEFCRCELKLQKWYGDLRGKPFAIEAENSILDISGFSKQYNCAFIWQKDGVKKLNLYLIINYFKGGKLRFKKIKPEAFEANRFYTVINKKSGEIVPMEVNFNFDDPNLIILPLAFGKRQGREFIWNDLLSLETGSLKLANGRVIEKTLYNRRTRQDEPALFVALTFERREVLDSSNIKPMNLIGVDRGENIPAVIALTDPEGCPLSRFKDSLGNPTHILRIGESYKEKQRTIQAKKEVEQRRAGGYSRKYASKAKNLADDMVRNTARDLLYYAVTQDAMLIFENLSRGFGRQGKRTFMAERQYTRMEDWLTAKLAYEGLPSKTYLSKTLAQYTSKTCSNCGFTITSADYDRVLEKLKKTATGWMTTINGKELKVEGQITYYNRYKRQNVVKDLSVELDRLSEESVNNDISSWTKGRSGEALSLLKKRFSHRPVQEKFVCLNCGFETHADEQAALNIARSWLFLRSQEYKKYQTNKTTGNTDKRAFVETWQSFYRKKLKEVWKPAV

SEQ ID NO: 37135 - protein, 979 aa, synthetic construct
  REGION 1..979: note = engineered CasX variant
QEIKRINKIRRRLVKDSNTKKAGKTGPMKTLLVRVMTPDLRERLENLRKKPENIPQPISNTSRANLNKLLTDYTEMKKAILHVYWEEFQVDPVGLMSRVAQPASKKIDQNKLKPEMDEKGNLTTAGFACSQCGQPLFVYKLEQVSEKGKAYTNYFGRCNVAEHEKLIKLAQLKPEKDSDEAVTYSLGKFGQRALDFYSIHVTKESTHPVKPLAQIAGNRYASGPVGKALSDACMGTIASFLSKYQDIIIEHQKVVKGNQKRLESLRELAGKENLEYPSVTLPPQPHTKEGVDAYNEVIARVRMWVNLNLWQKLKLSRDDAKPLLRLKGFPSFPLVERQANEVDWWDMVCNVKKLINEKKEDGKVFWQNLAGYKRQEALRPYLSSEEDRKKGKKFARYQLGDLLLHLEKKHEGEDWGKVYDEAWERIDKKVEGLSKHIKLEEERRSEDAQSKAALTDWLRAKASFVIEGLKEADKDEFCRCELKLQKWYGDLRGKPFAIEAENSILDISGFSKQYNCAFIWQKDGVKKLNLYLIINYFKGGKLRFKKIKPEAFEANRFYTVINKKSGEIVPMEVNFNFDDPNLIILPLAFGKRQGREFIWNDLLSLETGSLKLANGRVIEKTLYNRRTRQDEPALFVALTFERREVLDSSNIKPMNLIGVDRGENIPAVIALTDPEGCPLSRFKDSLGNPTHILRIGESYKEKQRTIQAKKEVEQRRAGGYSRKYASKAKNLADDMVRNTARDLLYYAVTQDAMLIFENLSRGFGRQGKRTFMAERQYTRMEDWLTAKLAYEGLPSKTYLSKTLAQYTSKTCSNCGFTITSADYDRVLEKLKKTATGWMTTINGKELKVEGQITYYNRYKRQNVVKDLSVELDRLSEESVNNDISSWTKGRSGEALSLLKKRFSHRPVQEKFVCLNCGFETHADEQAALNIARSWLFLRSQEYKKYQTNKTTGNTDKRAFVETWQSFYRKKLKEVWKPAV

SEQ ID NO: 37136 - protein, 978 aa, synthetic construct
  REGION 1..978: note = engineered CasX variant
QEIKRINKIRRRLVKDSNTKKAGKTGPMKTLLVRVMTPDLRERLENLRKKPENIPQPISNTSRANLNKLLTDYTEMKKAILHVYWEEFQVDPVGLMSRVAQPASKKIDQNKLKPEMDEKGNLTTAGFACSQCGQPLFVYKLEQVSEKGKAYTNYFGRCNVAEHEKLILLAQLKPEKDSDEAVTYSLGKFGQRALDFYSIHVTKESTHPVKPLAQIAGNRYASPVGKALSDACMGTIASFLSKYQDIIIEHQKVVKGNQKRLESLRELAGKENLEYPSVTLPPQPHTKEGVDAYNEVIARVRMWVNLNLWQKLKLSRDDAKPLLRLKGFPSFPLVERQANEVDWWDMVCNVKKLINEKKEDGKVFWQNLAGYKRQEALRPYLSSEEDRKKGKKFARYQLGDLLLHLEKKHEGEDWGKVYDEAWERIDKKVEGLSKHIKLEEERRSEDAQSKAALTDWLRAKASFVIEGLKEADKDEFCRCELKLQKWYGDLRGKPFAIEAENSILDISGFSKQYNCAFIWQKDGVKKLNLYLIINYFKGGKLRFKKIKPEAFEANRFYTVINKKSGEIVPMEVNFNFDDPNLIILPLAFGKRQGREFIWNDLLSLETGSLKLANGRVIEKTLYNRRTRQDEPALFVALTFERREVLDSSNIKPMNLIGVDRGENIPAVIALTDPEGCPLSRFKDSLGNPTHILRIGESYKEKQRTIQAKKEVEQRRAGGYSRKYASKAKNLADDMVRNTARDLLYYAVTQDAMLIFENLSRGFGRQGKRTFMAERQYTRMEDWLTAKLAYEGLPSKTYLSKTLAQYTSKTCSNCGFTITSADYDRVLEKLKKTATGWMTTINGKELKVEGQITYYNRYKRQNVVKDLSVELDRLSEESVNNDISSWTKGRSGEALSLLKKRFSHRPVQEKFVCLNCGFETHADEQAALNIARSWLFLRSQEYKKYQTNKTTGNTDKRAFVETWQSFYRKKLKEVWKPAV

SEQ ID NO: 37137 - protein, 979 aa, synthetic construct
  REGION 1..979: note = engineered CasX variant
QEIKRLNKIRRRLVKDSNTKKAGKTGPMKTLLVRVMTPDLRERLENLRKKPENIPQPISNTSRANLNKLLTDYTEMKKAILHVYWEEFQKDPVGLMSRVAQPASKKIDQNKLKPEMDEKGNLTTAGFACSQCGQPLFVYKLEQVSEKGKAYTNYFGRCNVAEHEKLILLAQLKPEKDSDEAVTYSLGKFGQRALDFYSIHVTKESTHPVKPLAQIAGNRYASYPVGKALSDACMGTIASFLSKYQDIIIEHQKVVKGNQKRLESLRELAGKENLEYPSVTLPPQPHTKEGVDAYNEVIARVRMWVNLNLWQKLKLSRDDAKPLLRLKGFPSFPLVERQANEVDWWDMVCNVKKLINEKKEDGKVFWQNLAGYKRQEALRPYLSSEEDRKKGKKFARYQLGDLLLHLEKKHEGEDWGKVYDEAWERIDKKVEGLSKHIKLEEERRSEDAQSKAALTDWLRAKASFVIEGLKEADKDEFCRCELKLQKWYGDLRGKPFAIEAENSILDISGFSKQYNCAFIWQKDGVKKLNLYLIINYFKGGKLRFKKIKPEAFEANRFYTVINKKSGEIVPMEVNFNFDDPNLIILPLAFGKRQGREFIWNDLLSLETGSLKLANGRVIEKTLYNRRTRQDEPALFVALTFERREVLDSSNIKPMNLIGVDRGENIPAVIALTDPEGCPLSRFKDSLGNPTHILRIGESYKEKQRTIQAKKEVEQRRAGGYSRKYASKAKNLADDMVRNTARDLLYYAVTQDAMLIFENLSRGFGRQGKRTFMAERQYTRMEDWLTAKLAYEGLPSKTYLSKTLAQYTSKTCSNCGFTITSADYDRVLEKLKKTATGWMTTINGKELKVEGQITYYNRYKRQNVVKDLSVELDRLSEESVNNDISSWTKGRSGEALSLLKKRFSHRPVQEKFVCLNCGFETHADEQAALNIARSWLFLRSQEYKKYQTNKTTGNTDKRAFVETWQSFYRKKLKEVWKPAV

SEQ ID NO: 37138 - protein, 979 aa, synthetic construct
  REGION 1..979: note = engineered CasX variant
QEIKRLNKIRRRLVKDSNTKKAGKTGPMKTLLVRVMTPDLRERLENLRKKPENIPQPISNTSRANLNKLLTDYTEMKKAILHVYWEEFQKDPVGLMSRVAQPASKKIDQNKLKPEMDEKGNLTTAGFACSQCGQPLFVYKLEQVSEKGKAYTNYFGRCNVAEHEKLILLAQLKPEKDSDEAVTYSLGKFGQRALDFYSIHVTKESTHPVKPLAQIAGNRYASHPVGKALSDACMGTIASFLSKYQDIIIEHQKVVKGNQKRLESLRELAGKENLEYPSVTLPPQPHTKEGVDAYNEVIARVRMWVNLNLWQKLKLSRDDAKPLLRLKGFPSFPLVERQANEVDWWDMVCNVKKLINEKKEDGKVFWQNLAGYKRQEALRPYLSSEEDRKKGKKFARYQLGDLLLHLEKKHEGEDWGKVYDEAWERIDKKVEGLSKHIKLEEERRSEDAQSKAALTDWLRAKASFVIEGLKEADKDEFCRCELKLQKWYGDLRGKPFAIEAENSILDISGFSKQYNCAFIWQKDGVKKLNLYLIINYFKGGKLRFKKIKPEAFEANRFYTVINKKSGEIVPMEVNFNFDDPNLIILPLAFGKRQGREFIWNDLLSLETGSLKLANGRVIEKTLYNRRTRQDEPALFVALTFERREVLDSSNIKPMNLIGVDRGENIPAVIALTDPEGCPLSRFKDSLGNPTHILRIGESYKEKQRTIQAKKEVEQRRAGGYSRKYASKAKNLADDMVRNTARDLLYYAVTQDAMLIFENLSRGFGRQGKRTFMAERQYTRMEDWLTAKLAYEGLPSKTYLSKTLAQYTSKTCSNCGFTITSADYDRVLEKLKKTATGWMTTINGKELKVEGQITYYNRYKRQNVVKDLSVELDRLSEESVNNDISSWTKGRSGEALSLLKKRFSHRPVQEKFVCLNCGFETHADEQAALNIARSWLFLRSQEYKKYQTNKTTGNTDKRAFVETWQSFYRKKLKEVWKPAV

SEQ ID NO: 37139 - protein, 979 aa, synthetic construct
  REGION 1..979: note = engineered CasX variant
QEIKRLNKIRRRLVKDSNTKKAGKTGPMKTLLVRVMTPDLRERLENLRKKPENIPQPISNTSRANLNKLLTDYTEMKKAILHVYWEEFQKDPVGLMSRVAQPASKKIDQNKLKPEMDEKGNLTTAGFACSQCGQPLFVYKLEQVSEKGKAYTNYFGRCNVAEHEKLILLAQLKPEKDSDEAVTYSLGKFGQRALDFYSIHVTKESTHPVKPLAQIAGNRYASSPVGKALSDACMGTIASFLSKYQDIIIEHQKVVKGNQKRLESLRELAGKENLEYPSVTLPPQPHTKEGVDAYNEVIARVRMWVNLNLWQKLKLSRDDAKPLLRLKGFPSFPLVERQANEVDWWDMVCNVKKLINEKKEDGKVFWQNLAGYKRQEALRPYLSSEEDRKKGKKFARYQLGDLLLHLEKKHEGEDWGKVYDEAWERIDKKVEGLSKHIKLEEERRSEDAQSKAALTDWLRAKASFVIEGLKEADKDEFCRCELKLQKWYGDLRGKPFAIEAENSILDISGFSKQYNCAFIWQKDGVKKLNLYLIINYFKGGKLRFKKIKPEAFEANRFYTVINKKSGEIVPMEVNFNFDDPNLIILPLAFGKRQGREFIWNDLLSLETGSLKLANGRVIEKTLYNRRTRQDEPALFVALTFERREVLDSSNIKPMNLIGVDRGENIPAVIALTDPEGCPLSRFKDSLGNPTHILRIGESYKEKQRTIQAKKEVEQRRAGGYSRKYASKAKNLADDMVRNTARDLLYYAVTQDAMLIFENLSRGFGRQGKRTFMAERQYTRMEDWLTAKLAYEGLPSKTYLSKTLAQYTSKTCSNCGFTITSADYDRVLEKLKKTATGWMTTINGKELKVEGQITYYNRYKRQNVVKDLSVELDRLSEESVNNDISSWTKGRSGEALSLLKKRFSHRPVQEKFVCLNCGFETHADEQAALNIARSWLFLRSQEYKKYQTNKTTGNTDKRAFVETWQSFYRKKLKEVWKPAV

SEQ ID NO: 37140 - protein, 979 aa, synthetic construct
  REGION 1..979: note = engineered CasX variant
QEIKRLNKIRRRLVKDSNTKKAGKTGPMKTLLVRVMTPDLRERLENLRKKPENIPQPISNTSRANLNKLLTDYTEMKKAILHVYWEEFQKDPVGLMSRVAQPASKKIDQNKLKPEMDEKGNLTTAGFACSQCGQPLFVYKLEQVSEKGKAYTNYFGRCNVAEHEKLILLAQLKPEKDSDEAVTYSLGKFGQRALDFYSIHVTKESTHPVKPLAQIAGNRYASTPVGKALSDACMGTIASFLSKYQDIIIEHQKVVKGNQKRLESLRELAGKENLEYPSVTLPPQPHTKEGVDAYNEVIARVRMWVNLNLWQKLKLSRDDAKPLLRLKGFPSFPLVERQANEVDWWDMVCNVKKLINEKKEDGKVFWQNLAGYKRQEALRPYLSSEEDRKKGKKFARYQLGDLLLHLEKKHEGEDWGKVYDEAWERIDKKVEGLSKHIKLEEERRSEDAQSKAALTDWLRAKASFVIEGLKEADKDEFCRCELKLQKWYGDLRGKPFAIEAENSILDISGFSKQYNCAFIWQKDGVKKLNLYLIINYFKGGKLRFKKIKPEAFEANRFYTVINKKSGEIVPMEVNFNFDDPNLIILPLAFGKRQGREFIWNDLLSLETGSLKLANGRVIEKTLYNRRTRQDEPALFVALTFERREVLDSSNIKPMNLIGVDRGENIPAVIALTDPEGCPLSRFKDSLGNPTHILRIGESYKEKQRTIQAKKEVEQRRAGGYSRKYASKAKNLADDMVRNTARDLLYYAVTQDAMLIFENLSRGFGRQGKRTFMAERQYTRMEDWLTAKLAYEGLPSKTYLSKTLAQYTSKTCSNCGFTITSADYDRVLEKLKKTATGWMTTINGKELKVEGQITYYNRYKRQNVVKDLSVELDRLSEESVNNDISSWTKGRSGEALSLLKKRFSHRPVQEKFVCLNCGFETHADEQAALNIARSWLFLRSQEYKKYQTNKTTGNTDKRAFVETWQSFYRKKLKEVWKPAV

SEQ ID NO: 37141 - protein, 979 aa, synthetic construct
  REGION 1..979: note = engineered CasX variant
QEIKRLNKIRRRLVKDSNTKKAGKTGPMKTLLVRVMTPDLRERLENLRKKPENIPQPISNTSRANLNKLLTDYTEMKKAILHVYWEEFQKDPVGLMSRVAQPASKKIDQNKLKPEMDEKGNLTTAGFACSQCGQPLFVYKLEQVSEKGKAYTNYFGRCNVAEHEKLILLAQLKPEKDSDEAVTYSLGKFGQRALDFYSIHVTKESTHPVKPLAQIAGNRYASAPVGKALSDACMGTIASFLSKYQDIIIEHQKVVKGNQKRLESLRELAGKENLEYPSVTLPPQPHTKEGVDAYNEVIARVRMWVNLNLWQKLKLSRDDAKPLLRLKGFPSFPLVERQANEVDWWDMVCNVKKLINEKKEDGKVFWQNLAGYKRQEALRPYLSSEEDRKKGKKFARYQLGDLLLHLEKKHEGEDWGKVYDEAWERIDKKVEGLSKHIKLEEERRSEDAQSKAALTDWLRAKASFVIEGLKEADKDEFCRCELKLQKWYGDLRGKPFAIEAENSILDISGFSKQYNCAFIWQKDGVKKLNLYLIINYFKGGKLRFKKIKPEAFEANRFYTVINKKSGEIVPMEVNFNFDDPNLIILPLAFGKRQGREFIWNDLLSLETGSLKLANGRVIEKTLYNRRTRQDEPALFVALTFERREVLDSSNIKPMNLIGVDRGENIPAVIALTDPEGCPLSRFKDSLGNPTHILRIGESYKEKQRTIQAKKEVEQRRAGGYSRKYASKAKNLADDMVRNTARDLLYYAVTQDAMLIFENLSRGFGRQGKRTFMAERQYTRMEDWLTAKLAYEGLPSKTYLSKTLAQYTSKTCSNCGFTITSADYDRVLEKLKKTATGWMTTINGKELKVEGQITYYNRYKRQNVVKDLSVELDRLSEESVNNDISSWTKGRSGEALSLLKKRFSHRPVQEKFVCLNCGFETHADEQAALNIARSWLFLRSQEYKKYQTNKTTGNTDKRAFVETWQSFYRKKLKEVWKPAV

SEQ ID NO: 37142 - protein, 979 aa, synthetic construct
  REGION 1..979: note = engineered CasX variant
QEIKRLNKIRRRLVKDSNTKKAGKTGPMKTLLVRVMTPDLRERLENLRKKPENIPQPISNTSRANLNKLLTDYTEMKKAILHVYWEEFQKDPVGLMSRVAQPASKKIDQNKLKPEMDEKGNLTTAGFACSQCGQPLFVYKLEQVSEKGKAYTNYFGRCNVAEHEKLILLAQLKPEKDSDEAVTYSLGKFGQRALDFYSIHVTKESTHPVKPLAQIAGNRYASVPVGKALSDACMGTIASFLSKYQDIIIEHQKVVKGNQKRLESLRELAGKENLEYPSVTLPPQPHTKEGVDAYNEVIARVRMWVNLNLWQKLKLSRDDAKPLLRLKGFPSFPLVERQANEVDWWDMVCNVKKLINEKKEDGKVFWQNLAGYKRQEALRPYLSSEEDRKKGKKFARYQLGDLLLHLEKKHEGEDWGKVYDEAWERIDKKVEGLSKHIKLEEERRSEDAQSKAALTDWLRAKASFVIEGLKEADKDEFCRCELKLQKWYGDLRGKPFAIEAENSILDISGFSKQYNCAFIWQKDGVKKLNLYLIINYFKGGKLRFKKIKPEAFEANRFYTVINKKSGEIVPMEVNFNFDDPNLIILPLAFGKRQGREFIWNDLLSLETGSLKLANGRVIEKTLYNRRTRQDEPALFVALTFERREVLDSSNIKPMNLIGVDRGENIPAVIALTDPEGCPLSRFKDSLGNPTHILRIGESYKEKQRTIQAKKEVEQRRAGGYSRKYASKAKNLADDMVRNTARDLLYYAVTQDAMLIFENLSRGFGRQGKRTFMAERQYTRMEDWLTAKLAYEGLPSKTYLSKTLAQYTSKTCSNCGFTITSADYDRVLEKLKKTATGWMTTINGKELKVEGQITYYNRYKRQNVVKDLSVELDRLSEESVNNDISSWTKGRSGEALSLLKKRFSHRPVQEKFVCLNCGFETHADEQAALNIARSWLFLRSQEYKKYQTNKTTGNTDKRAFVETWQSFYRKKLKEVWKPAV

SEQ ID NO: 37143 - protein, 979 aa, synthetic construct
  REGION 1..979: note = engineered CasX variant
QEIKRLNKIRRRLVKDSNTKKAGKTGPMKTLLVRVMTPDLRERLENLRKKPENIPQPISNTSRANLNKLLTDYTEMKKAILHVYWEEFQKDPVGLMSRVAQPASKKIDQNKLKPEMDEKGNLTTAGFACSQCGQPLFVYKLEQVSEKGKAYTNYFGRCNVAEHEKLIKLAQLKPEKDSDEAVTYSLGKFGQRALDFYSIHVTKESTHPVKPLAQIAGNRYASGPVGKALSDACMGTIASFLSKYQDIIIEHQKVVKGNQKRLESLRELAGKENLEYPSVTLPPQPHTKEGVDAYNEVIARVRMWVNLNLWQKLKLSRDDAKPLLRLKGFPSFPLVERQANEVDWWDMVCNVKKLINEKKEDGKVFWQNLAGYKRQEALRPYLSSEEDRKKGKKFARYQLGDLLLHLEKKHEGEDWGKVYDEAWERIDKKVEGLSKHIKLEEERRSEDAQSKAALTDWLRAKASFVIEGLKEADKDEFCRCELKLQKWYGDLRGKPFAIEAENSILDISGFSKQYNCAFIWQKDGVKKLNLYLIINYFKGGKLRFKKIKPEAFEANRFYTVINKKSGEIVPMEVNFNFDDPNLIILPLAFGKRQGREFIWNDLLSLETGSLKLANGRVIEKTLYNRRTRQDEPALFVALTFERREVLDSSNIKPMNLIGVDRGENIPAVIALTDPEGCPLSRFKDSLGNPTHILRIGESYKEKQRTIQAKKEVEQRRAGGYSRKYASKAKNLADDMVRNTARDLLYYAVTQDAMLIFENLSRGFGRQGKRTFMAERQYTRMEDWLTAKLAYEGLPSKTYLSKTLAQYTSKTCSNCGFTITSADYDRVLEKLKKTATGWMTTINGKELKVEGQITYYNRYKRQNVVKDLSVELDRLSEESVNNDISSWTKGRSGEALSLLKKRFSHRPVQEKFVCLNCGFETHADEQAALNIARSWLFLRSQEYKKYQTNKTTGNTDKRAFVETWQSFYRKKLKEVWKPAV

SEQ ID NO: 37144 - protein, 978 aa, synthetic construct
  REGION 1..978: note = engineered CasX variant
QEIKRLNKIRRRLVKDSNTKKAGKTGPMKTLLVRVMTPDLRERLENLRKKPENIPQPISNTSRANLNKLLTDYTEMKKAILHVYWEEFQKDPVGLMSRVAQPASKKIDQNKLKPEMDEKGNLTTAGFACSQCGQPLFVYKLEQVSEKGKAYTNYFGRCNVAEHEKLILLAQLKPEKDSDEAVTYSLGKFGQRALDFYSIHVTKESTHPVKPLAQIAGNRYASPVGKALSDACMGTIASFLSKYQDIIIEHQKVVKGNQKRLESLRELAGKENLEYPSVTLPPQPHTKEGVDAYNEVIARVRMWVNLNLWQKLKLSRDDAKPLLRLKGFPSFPLVERQANEVDWWDMVCNVKKLINEKKEDGKVFWQNLAGYKRQEALRPYLSSEEDRKKGKKFARYQLGDLLLHLEKKHEGEDWGKVYDEAWERIDKKVEGLSKHIKLEEERRSEDAQSKAALTDWLRAKASFVIEGLKEADKDEFCRCELKLQKWYGDLRGKPFAIEAENSILDISGFSKQYNCAFIWQKDGVKKLNLYLIINYFKGGKLRFKKIKPEAFEANRFYTVINKKSGEIVPMEVNFNFDDPNLIILPLAFGKRQGREFIWNDLLSLETGSLKLANGRVIEKTLYNRRTRQDEPALFVALTFERREVLDSSNIKPMNLIGVDRGENIPAVIALTDPEGCPLSRFKDSLGNPTHILRIGESYKEKQRTIQAKKEVEQRRAGGYSRKYASKAKNLADDMVRNTARDLLYYAVTQDAMLIFENLSRGFGRQGKRTFMAERQYTRMEDWLTAKLAYEGLPSKTYLSKTLAQYTSKTCSNCGFTITSADYDRVLEKLKKTATGWMTTINGKELKVEGQITYYNRYKRQNVVKDLSVELDRLSEESVNNDISSWTKGRSGEALSLLKKRFSHRPVQEKFVCLNCGFETHADEQAALNIARSWLFLRSQEYKKYQTNKTTGNTDKRAFVETWQSFYRKKLKEVWKPAV

SEQ ID NO: 37145 - protein, 979 aa, synthetic construct
  REGION 1..979: note = engineered CasX variant
QEIKRINKIRRRLVKDSNTKKAGKTGPMKTLLVRVMTPDLRERLENLRKKPENIPQPISNTSRANLNKLLTDYTEMKKAILHVYWEEFQKDPVGLMSRVAQPASKKIDQNKLKPEMDEKGNLTTAGFACSQCGQPLFVYKLEQVSEKGKAYTNYVGRCNVAEHEKLILLAQLKPEKDSDEAVTYSLGKFGQRALDFYSIHVTKESTHPVKPLAQIAGNRYASYPVGKALSDACMGTIASFLSKYQDIIIEHQKVVKGNQKRLESLRELAGKENLEYPSVTLPPQPHTKEGVDAYNEVIARVRMWVNLNLWQKLKLSRDDAKPLLRLKGFPSFPLVERQANEVDWWDMVCNVKKLINEKKEDGKVFWQNLAGYKRQEALRPYLSSEEDRKKGKKFARYQLGDLLLHLEKKHEGEDWGKVYDEAWERIDKKVEGLSKHIKLEEERRSEDAQSKAALTDWLRAKASFVIEGLKEADKDEFCRCELKLQKWYGDLRGKPFAIEAENSILDISGFSKQYNCAFIWQKDGVKKLNLYLIINYFKGGKLRFKKIKPEAFEANRFYTVINKKSGEIVPMEVNFNFDDPNLIILPLAFGKRQGREFIWNDLLSLETGSLKLANGRVIEKTLYNRRTRQDEPALFVALTFERREVLDSSNIKPMNLIGVDRGENIPAVIALTDPEGCPLSRFKDSLGNPTHILRIGESYKEKQRTIQAKKEVEQRRAGGYSRKYASKAKNLADDMVRNTARDLLYYAVTQDAMLIFENLSRGFGRQGKRTFMAERQYTRMEDWLTAKLAYEGLPSKTYLSKTLAQYTSKTCSNCGFTITSADYDRVLEKLKKTATGWMTTINGKELKVEGQITYYNRYKRQNVVKDLSVELDRLSEESVNNDISSWTKGRSGEALSLLKKRFSHRPVQEKFVCLNCGFETHADEQAALNIARSWLFLRSQEYKKYQTNKTTGNTDKRAFVETWQSFYRKKLKEVWKPAV

SEQ ID NO: 37146 - protein, 979 aa, synthetic construct
  REGION 1..979: note = engineered CasX variant
QEIKRINKIRRRLVKDSNTKKAGKTGPMKTLLVRVMTPDLRERLENLRKKPENIPQPISNTSRANLNKLLTDYTEMKKAILHVYWEEFQKDPVGLMSRVAQPASKKIDQNKLKPEMDEKGNLTTAGFACSQCGQPLFVYKLEQVSEKGKAYTNYVGRCNVAEHEKLILLAQLKPEKDSDEAVTYSLGKFGQRALDFYSIHVTKESTHPVKPLAQIAGNRYASHPVGKALSDACMGTIASFLSKYQDIIIEHQKVVKGNQKRLESLRELAGKENLEYPSVTLPPQPHTKEGVDAYNEVIARVRMWVNLNLWQKLKLSRDDAKPLLRLKGFPSFPLVERQANEVDWWDMVCNVKKLINEKKEDGKVFWQNLAGYKRQEALRPYLSSEEDRKKGKKFARYQLGDLLLHLEKKHEGEDWGKVYDEAWERIDKKVEGLSKHIKLEEERRSEDAQSKAALTDWLRAKASFVIEGLKEADKDEFCRCELKLQKWYGDLRGKPFAIEAENSILDISGFSKQYNCAFIWQKDGVKKLNLYLIINYFKGGKLRFKKIKPEAFEANRFYTVINKKSGEIVPMEVNFNFDDPNLIILPLAFGKRQGREFIWNDLLSLETGSLKLANGRVIEKTLYNRRTRQDEPALFVALTFERREVLDSSNIKPMNLIGVDRGENIPAVIALTDPEGCPLSRFKDSLGNPTHILRIGESYKEKQRTIQAKKEVEQRRAGGYSRKYASKAKNLADDMVRNTARDLLYYAVTQDAMLIFENLSRGFGRQGKRTFMAERQYTRMEDWLTAKLAYEGLPSKTYLSKTLAQYTSKTCSNCGFTITSADYDRVLEKLKKTATGWMTTINGKELKVEGQITYYNRYKRQNVVKDLSVELDRLSEESVNNDISSWTKGRSGEALSLLKKRFSHRPVQEKFVCLNCGFETHADEQAALNIARSWLFLRSQEYKKYQTNKTTGNTDKRAFVETWQSFYRKKLKEVWKPAV

SEQ ID NO: 37147 - protein, 979 aa, synthetic construct
  REGION 1..979: note = engineered CasX variant
QEIKRINKIRRRLVKDSNTKKAGKTGPMKTLLVRVMTPDLRERLENLRKKPENIPQPISNTSRANLNKLLTDYTEMKKAILHVYWEEFQKDPVGLMSRVAQPASKKIDQNKLKPEMDEKGNLTTAGFACSQCGQPLFVYKLEQVSEKGKAYTNYVGRCNVAEHEKLILLAQLKPEKDSDEAVTYSLGKFGQRALDFYSIHVTKESTHPVKPLAQIAGNRYASSPVGKALSDACMGTIASFLSKYQDIIIEHQKVVKGNQKRLESLRELAGKENLEYPSVTLPPQPHTKEGVDAYNEVIARVRMWVNLNLWQKLKLSRDDAKPLLRLKGFPSFPLVERQANEVDWWDMVCNVKKLINEKKEDGKVFWQNLAGYKRQEALRPYLSSEEDRKKGKKFARYQLGDLLLHLEKKHEGEDWGKVYDEAWERIDKKVEGLSKHIKLEEERRSEDAQSKAALTDWLRAKASFVIEGLKEADKDEFCRCELKLQKWYGDLRGKPFAIEAENSILDISGFSKQYNCAFIWQKDGVKKLNLYLIINYFKGGKLRFKKIKPEAFEANRFYTVINKKSGEIVPMEVNFNFDDPNLIILPLAFGKRQGREFIWNDLLSLETGSLKLANGRVIEKTLYNRRTRQDEPALFVALTFERREVLDSSNIKPMNLIGVDRGENIPAVIALTDPEGCPLSRFKDSLGNPTHILRIGESYKEKQRTIQAKKEVEQRRAGGYSRKYASKAKNLADDMVRNTARDLLYYAVTQDAMLIFENLSRGFGRQGKRTFMAERQYTRMEDWLTAKLAYEGLPSKTYLSKTLAQYTSKTCSNCGFTITSADYDRVLEKLKKTATGWMTTINGKELKVEGQITYYNRYKRQNVVKDLSVELDRLSEESVNNDISSWTKGRSGEALSLLKKRFSHRPVQEKFVCLNCGFETHADEQAALNIARSWLFLRSQEYKKYQTNKTTGNTDKRAFVETWQSFYRKKLKEVWKPAV

SEQ ID NO: 37148 - protein, 979 aa, synthetic construct
  REGION 1..979: note = engineered CasX variant
QEIKRINKIRRRLVKDSNTKKAGKTGPMKTLLVRVMTPDLRERLENLRKKPENIPQPISNTSRANLNKLLTDYTEMKKAILHVYWEEFQKDPVGLMSRVAQPASKKIDQNKLKPEMDEKGNLTTAGFACSQCGQPLFVYKLEQVSEKGKAYTNYVGRCNVAEHEKLILLAQLKPEKDSDEAVTYSLGKFGQRALDFYSIHVTKESTHPVKPLAQIAGNRYASTPVGKALSDACMGTIASFLSKYQDIIIEHQKVVKGNQKRLESLRELAGKENLEYPSVTLPPQPHTKEGVDAYNEVIARVRMWVNLNLWQKLKLSRDDAKPLLRLKGFPSFPLVERQANEVDWWDMVCNVKKLINEKKEDGKVFWQNLAGYKRQEALRPYLSSEEDRKKGKKFARYQLGDLLLHLEKKHEGEDWGKVYDEAWERIDKKVEGLSKHIKLEEERRSEDAQSKAALTDWLRAKASFVIEGLKEADKDEFCRCELKLQKWYGDLRGKPFAIEAENSILDISGFSKQYNCAFIWQKDGVKKLNLYLIINYFKGGKLRFKKIKPEAFEANRFYTVINKKSGEIVPMEVNFNFDDPNLIILPLAFGKRQGREFIWNDLLSLETGSLKLANGRVIEKTLYNRRTRQDEPALFVALTFERREVLDSSNIKPMNLIGVDRGENIPAVIALTDPEGCPLSRFKDSLGNPTHILRIGESYKEKQRTIQAKKEVEQRRAGGYSRKYASKAKNLADDMVRNTARDLLYYAVTQDAMLIFENLSRGFGRQGKRTFMAERQYTRMEDWLTAKLAYEGLPSKTYLSKTLAQYTSKTCSNCGFTITSADYDRVLEKLKKTATGWMTTINGKELKVEGQITYYNRYKRQNVVKDLSVELDRLSEESVNNDISSWTKGRSGEALSLLKKRFSHRPVQEKFVCLNCGFETHADEQAALNIARSWLFLRSQEYKKYQTNKTTGNTDKRAFVETWQSFYRKKLKEVWKPAV

SEQ ID NO: 37149 - protein, 979 aa, synthetic construct
  REGION 1..979: note = engineered CasX variant
QEIKRINKIRRRLVKDSNTKKAGKTGPMKTLLVRVMTPDLRERLENLRKKPENIPQPISNTSRANLNKLLTDYTEMKKAILHVYWEEFQKDPVGLMSRVAQPASKKIDQNKLKPEMDEKGNLTTAGFACSQCGQPLFVYKLEQVSEKGKAYTNYVGRCNVAEHEKLILLAQLKPEKDSDEAVTYSLGKFGQRALDFYSIHVTKESTHPVKPLAQIAGNRYASAPVGKALSDACMGTIASFLSKYQDIIIEHQKVVKGNQKRLESLRELAGKENLEYPSVTLPPQPHTKEGVDAYNEVIARVRMWVNLNLWQKLKLSRDDAKPLLRLKGFPSFPLVERQANEVDWWDMVCNVKKLINEKKEDGKVFWQNLAGYKRQEALRPYLSSEEDRKKGKKFARYQLGDLLLHLEKKHEGEDWGKVYDEAWERIDKKVEGLSKHIKLEEERRSEDAQSKAALTDWLRAKASFVIEGLKEADKDEFCRCELKLQKWYGDLRGKPFAIEAENSILDISGFSKQYNCAFIWQKDGVKKLNLYLIINYFKGGKLRFKKIKPEAFEANRFYTVINKKSGEIVPMEVNFNFDDPNLIILPLAFGKRQGREFIWNDLLSLETGSLKLANGRVIEKTLYNRRTRQDEPALFVALTFERREVLDSSNIKPMNLIGVDRGENIPAVIALTDPEGCPLSRFKDSLGNPTHILRIGESYKEKQRTIQAKKEVEQRRAGGYSRKYASKAKNLADDMVRNTARDLLYYAVTQDAMLIFENLSRGFGRQGKRTFMAERQYTRMEDWLTAKLAYEGLPSKTYLSKTLAQYTSKTCSNCGFTITSADYDRVLEKLKKTATGWMTTINGKELKVEGQITYYNRYKRQNVVKDLSVELDRLSEESVNNDISSWTKGRSGEALSLLKKRFSHRPVQEKFVCLNCGFETHADEQAALNIARSWLFLRSQEYKKYQTNKTTGNTDKRAFVETWQSFYRKKLKEVWKPAV

SEQ ID NO: 37150 - protein, 979 aa, synthetic construct
  REGION 1..979: note = engineered CasX variant
QEIKRINKIRRRLVKDSNTKKAGKTGPMKTLLVRVMTPDLRERLENLRKKPENIPQPISNTSRANLNKLLTDYTEMKKAILHVYWEEFQKDPVGLMSRVAQPASKKIDQNKLKPEMDEKGNLTTAGFACSQCGQPLFVYKLEQVSEKGKAYTNYVGRCNVAEHEKLILLAQLKPEKDSDEAVTYSLGKFGQRALDFYSIHVTKESTHPVKPLAQIAGNRYASVPVGKALSDACMGTIASFLSKYQDIIIEHQKVVKGNQKRLESLRELAGKENLEYPSVTLPPQPHTKEGVDAYNEVIARVRMWVNLNLWQKLKLSRDDAKPLLRLKGFPSFPLVERQANEVDWWDMVCNVKKLINEKKEDGKVFWQNLAGYKRQEALRPYLSSEEDRKKGKKFARYQLGDLLLHLEKKHEGEDWGKVYDEAWERIDKKVEGLSKHIKLEEERRSEDAQSKAALTDWLRAKASFVIEGLKEADKDEFCRCELKLQKWYGDLRGKPFAIEAENSILDISGFSKQYNCAFIWQKDGVKKLNLYLIINYFKGGKLRFKKIKPEAFEANRFYTVINKKSGEIVPMEVNFNFDDPNLIILPLAFGKRQGREFIWNDLLSLETGSLKLANGRVIEKTLYNRRTRQDEPALFVALTFERREVLDSSNIKPMNLIGVDRGENIPAVIALTDPEGCPLSRFKDSLGNPTHILRIGESYKEKQRTIQAKKEVEQRRAGGYSRKYASKAKNLADDMVRNTARDLLYYAVTQDAMLIFENLSRGFGRQGKRTFMAERQYTRMEDWLTAKLAYEGLPSKTYLSKTLAQYTSKTCSNCGFTITSADYDRVLEKLKKTATGWMTTINGKELKVEGQITYYNRYKRQNVVKDLSVELDRLSEESVNNDISSWTKGRSGEALSLLKKRFSHRPVQEKFVCLNCGFETHADEQAALNIARSWLFLRSQEYKKYQTNKTTGNTDKRAFVETWQSFYRKKLKEVWKPAV

SEQ ID NO: 37151 - protein, 979 aa, synthetic construct
  REGION 1..979: note = engineered CasX variant
QEIKRINKIRRRLVKDSNTKKAGKTGPMKTLLVRVMTPDLRERLENLRKKPENIPQPISNTSRANLNKLLTDYTEMKKAILHVYWEEFQKDPVGLMSRVAQPASKKIDQNKLKPEMDEKGNLTTAGFACSQCGQPLFVYKLEQVSEKGKAYTNYVGRCNVAEHEKLIKLAQLKPEKDSDEAVTYSLGKFGQRALDFYSIHVTKESTHPVKPLAQIAGNRYASGPVGKALSDACMGTIASFLSKYQDIIIEHQKVVKGNQKRLESLRELAGKENLEYPSVTLPPQPHTKEGVDAYNEVIARVRMWVNLNLWQKLKLSRDDAKPLLRLKGFPSFPLVERQANEVDWWDMVCNVKKLINEKKEDGKVFWQNLAGYKRQEALRPYLSSEEDRKKGKKFARYQLGDLLLHLEKKHEGEDWGKVYDEAWERIDKKVEGLSKHIKLEEERRSEDAQSKAALTDWLRAKASFVIEGLKEADKDEFCRCELKLQKWYGDLRGKPFAIEAENSILDISGFSKQYNCAFIWQKDGVKKLNLYLIINYFKGGKLRFKKIKPEAFEANRFYTVINKKSGEIVPMEVNFNFDDPNLIILPLAFGKRQGREFIWNDLLSLETGSLKLANGRVIEKTLYNRRTRQDEPALFVALTFERREVLDSSNIKPMNLIGVDRGENIPAVIALTDPEGCPLSRFKDSLGNPTHILRIGESYKEKQRTIQAKKEVEQRRAGGYSRKYASKAKNLADDMVRNTARDLLYYAVTQDAMLIFENLSRGFGRQGKRTFMAERQYTRMEDWLTAKLAYEGLPSKTYLSKTLAQYTSKTCSNCGFTITSADYDRVLEKLKKTATGWMTTINGKELKVEGQITYYNRYKRQNVVKDLSVELDRLSEESVNNDISSWTKGRSGEALSLLKKRFSHRPVQEKFVCLNCGFETHADEQAALNIARSWLFLRSQEYKKYQTNKTTGNTDKRAFVETWQSFYRKKLKEVWKPAV

SEQ ID NO: 37152 - protein, 978 aa, synthetic construct
  REGION 1..978: note = engineered CasX variant
QEIKRINKIRRRLVKDSNTKKAGKTGPMKTLLVRVMTPDLRERLENLRKKPENIPQPISNTSRANLNKLLTDYTEMKKAILHVYWEEFQKDPVGLMSRVAQPASKKIDQNKLKPEMDEKGNLTTAGFACSQCGQPLFVYKLEQVSEKGKAYTNYVGRCNVAEHEKLILLAQLKPEKDSDEAVTYSLGKFGQRALDFYSIHVTKESTHPVKPLAQIAGNRYASPVGKALSDACMGTIASFLSKYQDIIIEHQKVVKGNQKRLESLRELAGKENLEYPSVTLPPQPHTKEGVDAYNEVIARVRMWVNLNLWQKLKLSRDDAKPLLRLKGFPSFPLVERQANEVDWWDMVCNVKKLINEKKEDGKVFWQNLAGYKRQEALRPYLSSEEDRKKGKKFARYQLGDLLLHLEKKHEGEDWGKVYDEAWERIDKKVEGLSKHIKLEEERRSEDAQSKAALTDWLRAKASFVIEGLKEADKDEFCRCELKLQKWYGDLRGKPFAIEAENSILDISGFSKQYNCAFIWQKDGVKKLNLYLIINYFKGGKLRFKKIKPEAFEANRFYTVINKKSGEIVPMEVNFNFDDPNLIILPLAFGKRQGREFIWNDLLSLETGSLKLANGRVIEKTLYNRRTRQDEPALFVALTFERREVLDSSNIKPMNLIGVDRGENIPAVIALTDPEGCPLSRFKDSLGNPTHILRIGESYKEKQRTIQAKKEVEQRRAGGYSRKYASKAKNLADDMVRNTARDLLYYAVTQDAMLIFENLSRGFGRQGKRTFMAERQYTRMEDWLTAKLAYEGLPSKTYLSKTLAQYTSKTCSNCGFTITSADYDRVLEKLKKTATGWMTTINGKELKVEGQITYYNRYKRQNVVKDLSVELDRLSEESVNNDISSWTKGRSGEALSLLKKRFSHRPVQEKFVCLNCGFETHADEQAALNIARSWLFLRSQEYKKYQTNKTTGNTDKRAFVETWQSFYRKKLKEVWKPAV

SEQ ID NO: 37153 - protein, 979 aa, synthetic construct
  REGION 1..979: note = engineered CasX variant
QEIKRINKIRRRLVKDSNTKKAGKTGPMKTLLVRVMTPDLRERLENLRKKPENIPQPISNTSRANLNKLLTDYTEMKKAILHVYWEEFQKDPVGLMSRVAQPASKKIDQNKLKPEMDEKGNLTTAGFACSQCGQPLFVYKLEQVSEKGKAYTNYFGRCNVAEHEKLILLAQLKPEKDSDEAVTYSLGKFGQRALDFYSIHVTKESTHPVKPLAQIAGNRYASYPVGKALSDACMGTIASFLSKYQDIIIEHQKVVKGNQKRLESLRELAGKENLEYPSVTLPPQPHTKEGVDAYNEVIARVRMWVNLNLWQKLKLSRDDAKPLLRLKGFPSFPLVERQANEVDWWDMVCNVKKLINEKKEDGKVFWQNLAGYKRQEALRPYLSSEEDRKKGKKFARYQLGDLLLHLEKKHEGEDWGKVYDEAWERIDKKVEGLSKHIKLEEERRSEDAQSKAALTDWLRAKASFVIEGLKEADKDEFCRCELKLQKWYGDLRGKPFAIEAENSILDISGFSKQYNCAFIWQKDGVKKLNLYLIINYFKGGKLRFKKIKPEAFEANRFYTVINKKSGEIVPMEVNFNFDDPNLIILPLAFGKRQGREFIWNDLLSLETGSLKLANGRVIEKTLYNRRTRQDEPALFVALTFERREVLDSSNIKPMNLIGVDRGENIPAVIALTDPEGCPLSRFKDSLGNPTHILRIGESYKEKQRTIQAKKEVEQRRAGGYSRKYASKAKNLADDMVRNTARDLLYYAVTQDAMLIFENLSRGFGRQGKRTFMAERQYTRMEDWLTAKLAYEGLASKTYLSKTLAQYTSKTCSNCGFTITSADYDRVLEKLKKTATGWMTTINGKELKVEGQITYYNRYKRQNVVKDLSVELDRLSEESVNNDISSWTKGRSGEALSLLKKRFSHRPVQEKFVCLNCGFETHADEQAALNIARSWLFLRSQEYKKYQTNKTTGNTDKRAFVETWQSFYRKKLKEVWKPAV

SEQ ID NO: 37154 - protein, 979 aa, synthetic construct
  REGION 1..979: note = engineered CasX variant
QEIKRINKIRRRLVKDSNTKKAGKTGPMKTLLVRVMTPDLRERLENLRKKPENIPQPISNTSRANLNKLLTDYTEMKKAILHVYWEEFQKDPVGLMSRVAQPASKKIDQNKLKPEMDEKGNLTTAGFACSQCGQPLFVYKLEQVSEKGKAYTNYFGRCNVAEHEKLILLAQLKPEKDSDEAVTYSLGKFGQRALDFYSIHVTKESTHPVKPLAQIAGNRYASHPVGKALSDACMGTIASFLSKYQDIIIEHQKVVKGNQKRLESLRELAGKENLEYPSVTLPPQPHTKEGVDAYNEVIARVRMWVNLNLWQKLKLSRDDAKPLLRLKGFPSFPLVERQANEVDWWDMVCNVKKLINEKKEDGKVFWQNLAGYKRQEALRPYLSSEEDRKKGKKFARYQLGDLLLHLEKKHEGEDWGKVYDEAWERIDKKVEGLSKHIKLEEERRSEDAQSKAALTDWLRAKASFVIEGLKEADKDEFCRCELKLQKWYGDLRGKPFAIEAENSILDISGFSKQYNCAFIWQKDGVKKLNLYLIINYFKGGKLRFKKIKPEAFEANRFYTVINKKSGEIVPMEVNFNFDDPNLIILPLAFGKRQGREFIWNDLLSLETGSLKLANGRVIEKTLYNRRTRQDEPALFVALTFERREVLDSSNIKPMNLIGVDRGENIPAVIALTDPEGCPLSRFKDSLGNPTHILRIGESYKEKQRTIQAKKEVEQRRAGGYSRKYASKAKNLADDMVRNTARDLLYYAVTQDAMLIFENLSRGFGRQGKRTFMAERQYTRMEDWLTAKLAYEGLASKTYLSKTLAQYTSKTCSNCGFTITSADYDRVLEKLKKTATGWMTTINGKELKVEGQITYYNRYKRQNVVKDLSVELDRLSEESVNNDISSWTKGRSGEALSLLKKRFSHRPVQEKFVCLNCGFETHADEQAALNIARSWLFLRSQEYKKYQTNKTTGNTDKRAFVETWQSFYRKKLKEVWKPAV

SEQ ID NO: 37155 - protein, 979 aa, synthetic construct
  REGION 1..979: note = engineered CasX variant
QEIKRINKIRRRLVKDSNTKKAGKTGPMKTLLVRVMTPDLRERLENLRKKPENIPQPISNTSRANLNKLLTDYTEMKKAILHVYWEEFQKDPVGLMSRVAQPASKKIDQNKLKPEMDEKGNLTTAGFACSQCGQPLFVYKLEQVSEKGKAYTNYFGRCNVAEHEKLILLAQLKPEKDSDEAVTYSLGKFGQRALDFYSIHVTKESTHPVKPLAQIAGNRYASSPVGKALSDACMGTIASFLSKYQDIIIEHQKVVKGNQKRLESLRELAGKENLEYPSVTLPPQPHTKEGVDAYNEVIARVRMWVNLNLWQKLKLSRDDAKPLLRLKGFPSFPLVERQANEVDWWDMVCNVKKLINEKKEDGKVFWQNLAGYKRQEALRPYLSSEEDRKKGKKFARYQLGDLLLHLEKKHEGEDWGKVYDEAWERIDKKVEGLSKHIKLEEERRSEDAQSKAALTDWLRAKASFVIEGLKEADKDEFCRCELKLQKWYGDLRGKPFAIEAENSILDISGFSKQYNCAFIWQKDGVKKLNLYLIINYFKGGKLRFKKIKPEAFEANRFYTVINKKSGEIVPMEVNFNFDDPNLIILPLAFGKRQGREFIWNDLLSLETGSLKLANGRVIEKTLYNRRTRQDEPALFVALTFERREVLDSSNIKPMNLIGVDRGENIPAVIALTDPEGCPLSRFKDSLGNPTHILRIGESYKEKQRTIQAKKEVEQRRAGGYSRKYASKAKNLADDMVRNTARDLLYYAVTQDAMLIFENLSRGFGRQGKRTFMAERQYTRMEDWLTAKLAYEGLASKTYLSKTLAQYTSKTCSNCGFTITSADYDRVLEKLKKTATGWMTTINGKELKVEGQITYYNRYKRQNVVKDLSVELDRLSEESVNNDISSWTKGRSGEALSLLKKRFSHRPVQEKFVCLNCGFETHADEQAALNIARSWLFLRSQEYKKYQTNKTTGNTDKRAFVETWQSFYRKKLKEVWKPAV

SEQ ID NO: 37156 - protein, 979 aa, synthetic construct
  REGION 1..979: note = engineered CasX variant
QEIKRINKIRRRLVKDSNTKKAGKTGPMKTLLVRVMTPDLRERLENLRKKPENIPQPISNTSRANLNKLLTDYTEMKKAILHVYWEEFQKDPVGLMSRVAQPASKKIDQNKLKPEMDEKGNLTTAGFACSQCGQPLFVYKLEQVSEKGKAYTNYFGRCNVAEHEKLILLAQLKPEKDSDEAVTYSLGKFGQRALDFYSIHVTKESTHPVKPLAQIAGNRYASTPVGKALSDACMGTIASFLSKYQDIIIEHQKVVKGNQKRLESLRELAGKENLEYPSVTLPPQPHTKEGVDAYNEVIARVRMWVNLNLWQKLKLSRDDAKPLLRLKGFPSFPLVERQANEVDWWDMVCNVKKLINEKKEDGKVFWQNLAGYKRQEALRPYLSSEEDRKKGKKFARYQLGDLLLHLEKKHEGEDWGKVYDEAWERIDKKVEGLSKHIKLEEERRSEDAQSKAALTDWLRAKASFVIEGLKEADKDEFCRCELKLQKWYGDLRGKPFAIEAENSILDISGFSKQYNCAFIWQKDGVKKLNLYLIINYFKGGKLRFKKIKPEAFEANRFYTVINKKSGEIVPMEVNFNFDDPNLIILPLAFGKRQGREFIWNDLLSLETGSLKLANGRVIEKTLYNRRTRQDEPALFVALTFERREVLDSSNIKPMNLIGVDRGENIPAVIALTDPEGCPLSRFKDSLGNPTHILRIGESYKEKQRTIQAKKEVEQRRAGGYSRKYASKAKNLADDMVRNTARDLLYYAVTQDAMLIFENLSRGFGRQGKRTFMAERQYTRMEDWLTAKLAYEGLASKTYLSKTLAQYTSKTCSNCGFTITSADYDRVLEKLKKTATGWMTTINGKELKVEGQITYYNRYKRQNVVKDLSVELDRLSEESVNNDISSWTKGRSGEALSLLKKRFSHRPVQEKFVCLNCGFETHADEQAALNIARSWLFLRSQEYKKYQTNKTTGNTDKRAFVETWQSFYRKKLKEVWKPAV

SEQ ID NO: 37157 - protein, 979 aa, synthetic construct
  REGION 1..979: note = engineered CasX variant
QEIKRINKIRRRLVKDSNTKKAGKTGPMKTLLVRVMTPDLRERLENLRKKPENIPQPISNTSRANLNKLLTDYTEMKKAILHVYWEEFQKDPVGLMSRVAQPASKKIDQNKLKPEMDEKGNLTTAGFACSQCGQPLFVYKLEQVSEKGKAYTNYFGRCNVAEHEKLILLAQLKPEKDSDEAVTYSLGKFGQRALDFYSIHVTKESTHPVKPLAQIAGNRYASAPVGKALSDACMGTIASFLSKYQDIIIEHQKVVKGNQKRLESLRELAGKENLEYPSVTLPPQPHTKEGVDAYNEVIARVRMWVNLNLWQKLKLSRDDAKPLLRLKGFPSFPLVERQANEVDWWDMVCNVKKLINEKKEDGKVFWQNLAGYKRQEALRPYLSSEEDRKKGKKFARYQLGDLLLHLEKKHEGEDWGKVYDEAWERIDKKVEGLSKHIKLEEERRSEDAQSKAALTDWLRAKASFVIEGLKEADKDEFCRCELKLQKWYGDLRGKPFAIEAENSILDISGFSKQYNCAFIWQKDGVKKLNLYLIINYFKGGKLRFKKIKPEAFEANRFYTVINKKSGEIVPMEVNFNFDDPNLIILPLAFGKRQGREFIWNDLLSLETGSLKLANGRVIEKTLYNRRTRQDEPALFVALTFERREVLDSSNIKPMNLIGVDRGENIPAVIALTDPEGCPLSRFKDSLGNPTHILRIGESYKEKQRTIQAKKEVEQRRAGGYSRKYASKAKNLADDMVRNTARDLLYYAVTQDAMLIFENLSRGFGRQGKRTFMAERQYTRMEDWLTAKLAYEGLASKTYLSKTLAQYTSKTCSNCGFTITSADYDRVLEKLKKTATGWMTTINGKELKVEGQITYYNRYKRQNVVKDLSVELDRLSEESVNNDISSWTKGRSGEALSLLKKRFSHRPVQEKFVCLNCGFETHADEQAALNIARSWLFLRSQEYKKYQTNKTTGNTDKRAFVETWQSFYRKKLKEVWKPAV

SEQ ID NO: 37158 - protein, 979 aa, synthetic construct
  REGION 1..979: note = engineered CasX variant
QEIKRINKIRRRLVKDSNTKKAGKTGPMKTLLVRVMTPDLRERLENLRKKPENIPQPISNTSRANLNKLLTDYTEMKKAILHVYWEEFQKDPVGLMSRVAQPASKKIDQNKLKPEMDEKGNLTTAGFACSQCGQPLFVYKLEQVSEKGKAYTNYFGRCNVAEHEKLILLAQLKPEKDSDEAVTYSLGKFGQRALDFYSIHVTKESTHPVKPLAQIAGNRYASVPVGKALSDACMGTIASFLSKYQDIIIEHQKVVKGNQKRLESLRELAGKENLEYPSVTLPPQPHTKEGVDAYNEVIARVRMWVNLNLWQKLKLSRDDAKPLLRLKGFPSFPLVERQANEVDWWDMVCNVKKLINEKKEDGKVFWQNLAGYKRQEALRPYLSSEEDRKKGKKFARYQLGDLLLHLEKKHEGEDWGKVYDEAWERIDKKVEGLSKHIKLEEERRSEDAQSKAALTDWLRAKASFVIEGLKEADKDEFCRCELKLQKWYGDLRGKPFAIEAENSILDISGFSKQYNCAFIWQKDGVKKLNLYLIINYFKGGKLRFKKIKPEAFEANRFYTVINKKSGEIVPMEVNFNFDDPNLIILPLAFGKRQGREFIWNDLLSLETGSLKLANGRVIEKTLYNRRTRQDEPALFVALTFERREVLDSSNIKPMNLIGVDRGENIPAVIALTDPEGCPLSRFKDSLGNPTHILRIGESYKEKQRTIQAKKEVEQRRAGGYSRKYASKAKNLADDMVRNTARDLLYYAVTQDAMLIFENLSRGFGRQGKRTFMAERQYTRMEDWLTAKLAYEGLASKTYLSKTLAQYTSKTCSNCGFTITSADYDRVLEKLKKTATGWMTTINGKELKVEGQITYYNRYKRQNVVKDLSVELDRLSEESVNNDISSWTKGRSGEALSLLKKRFSHRPVQEKFVCLNCGFETHADEQAALNIARSWLFLRSQEYKKYQTNKTTGNTDKRAFVETWQSFYRKKLKEVWKPAV

SEQ ID NO: 37159 - protein, 979 aa, synthetic construct
  REGION 1..979: note = engineered CasX variant
QEIKRINKIRRRLVKDSNTKKAGKTGPMKTLLVRVMTPDLRERLENLRKKPENIPQPISNTSRANLNKLLTDYTEMKKAILHVYWEEFQKDPVGLMSRVAQPASKKIDQNKLKPEMDEKGNLTTAGFACSQCGQPLFVYKLEQVSEKGKAYTNYFGRCNVAEHEKLIKLAQLKPEKDSDEAVTYSLGKFGQRALDFYSIHVTKESTHPVKPLAQIAGNRYASGPVGKALSDACMGTIASFLSKYQDIIIEHQKVVKGNQKRLESLRELAGKENLEYPSVTLPPQPHTKEGVDAYNEVIARVRMWVNLNLWQKLKLSRDDAKPLLRLKGFPSFPLVERQANEVDWWDMVCNVKKLINEKKEDGKVFWQNLAGYKRQEALRPYLSSEEDRKKGKKFARYQLGDLLLHLEKKHEGEDWGKVYDEAWERIDKKVEGLSKHIKLEEERRSEDAQSKAALTDWLRAKASFVIEGLKEADKDEFCRCELKLQKWYGDLRGKPFAIEAENSILDISGFSKQYNCAFIWQKDGVKKLNLYLIINYFKGGKLRFKKIKPEAFEANRFYTVINKKSGEIVPMEVNFNFDDPNLIILPLAFGKRQGREFIWNDLLSLETGSLKLANGRVIEKTLYNRRTRQDEPALFVALTFERREVLDSSNIKPMNLIGVDRGENIPAVIALTDPEGCPLSRFKDSLGNPTHILRIGESYKEKQRTIQAKKEVEQRRAGGYSRKYASKAKNLADDMVRNTARDLLYYAVTQDAMLIFENLSRGFGRQGKRTFMAERQYTRMEDWLTAKLAYEGLASKTYLSKTLAQYTSKTCSNCGFTITSADYDRVLEKLKKTATGWMTTINGKELKVEGQITYYNRYKRQNVVKDLSVELDRLSEESVNNDISSWTKGRSGEALSLLKKRFSHRPVQEKFVCLNCGFETHADEQAALNIARSWLFLRSQEYKKYQTNKTTGNTDKRAFVETWQSFYRKKLKEVWKPAV

SEQ ID NO: 37160 - protein, 978 aa, synthetic construct
  REGION 1..978: note = engineered CasX variant
QEIKRINKIRRRLVKDSNTKKAGKTGPMKTLLVRVMTPDLRERLENLRKKPENIPQPISNTSRANLNKLLTDYTEMKKAILHVYWEEFQKDPVGLMSRVAQPASKKIDQNKLKPEMDEKGNLTTAGFACSQCGQPLFVYKLEQVSEKGKAYTNYFGRCNVAEHEKLILLAQLKPEKDSDEAVTYSLGKFGQRALDFYSIHVTKESTHPVKPLAQIAGNRYASPVGKALSDACMGTIASFLSKYQDIIIEHQKVVKGNQKRLESLRELAGKENLEYPSVTLPPQPHTKEGVDAYNEVIARVRMWVNLNLWQKLKLSRDDAKPLLRLKGFPSFPLVERQANEVDWWDMVCNVKKLINEKKEDGKVFWQNLAGYKRQEALRPYLSSEEDRKKGKKFARYQLGDLLLHLEKKHEGEDWGKVYDEAWERIDKKVEGLSKHIKLEEERRSEDAQSKAALTDWLRAKASFVIEGLKEADKDEFCRCELKLQKWYGDLRGKPFAIEAENSILDISGFSKQYNCAFIWQKDGVKKLNLYLIINYFKGGKLRFKKIKPEAFEANRFYTVINKKSGEIVPMEVNFNFDDPNLIILPLAFGKRQGREFIWNDLLSLETGSLKLANGRVIEKTLYNRRTRQDEPALFVALTFERREVLDSSNIKPMNLIGVDRGENIPAVIALTDPEGCPLSRFKDSLGNPTHILRIGESYKEKQRTIQAKKEVEQRRAGGYSRKYASKAKNLADDMVRNTARDLLYYAVTQDAMLIFENLSRGFGRQGKRTFMAERQYTRMEDWLTAKLAYEGLASKTYLSKTLAQYTSKTCSNCGFTITSADYDRVLEKLKKTATGWMTTINGKELKVEGQITYYNRYKRQNVVKDLSVELDRLSEESVNNDISSWTKGRSGEALSLLKKRFSHRPVQEKFVCLNCGFETHADEQAALNIARSWLFLRSQEYKKYQTNKTTGNTDKRAFVETWQSFYRKKLKEVWKPAV

SEQ ID NO: 37161 - protein, 979 aa, synthetic construct
  REGION 1..979: note = engineered CasX variant
QEIKRINKIRRRLVKDSNTKKAGKTGPMKTLLVRVMTPDLRERLENLRKKPENIPQPISNTSRANLNKLLTDYTEMKKAILHVYWEEFQKDPVGLMSRVAQPASKKIDQNKLKPEMDEKGNLTTAGFACSQCGQPLFVYKLEQVSEKGKAYTNYFGRCNVAEHEKLILLAQLKPEKDSDEAVTYSLGKFGQRALDFYSIHVTKESTHPVKPLAQIAGNRYASYPVGKALSDACMGTIASFLSKYQDIIIEHQKVVKGNQKRLESLRELAGKENLEYPSVTLPPQPHTKEGVDAYNEVIARVRMWVNLNLWQKLKLSRDDAKPLLRLKGFPSFPLVERQANEVDWWDMVCNVKKLINEKKEDGKVFWQNLAGYKRQEALRPYLSSEEDRKKGKKFARYQLGDLLLHLEKKHEGEDWGKVYDEAWERIDKKVEGLSKHIKLEEERRSEDAQSKAALTDWLRAKASFVIEGLKEADKDEFCRCELKLQKWYGDLRGKPFAIEAENSILDISGFSKQYNCAFIWQKDGVKKLNLYLIINYFKGGKLRFKKIKPEAFEANRFYTVINKKSGEIVPMEVNFNFDDPNLIILPLAFGKRQGREFIWNDLLSLETGSLKLANGRVIEKTLYNRRTRQDEPALFVALTFERREVLDSSNIKPMNLIGVDRGENIPAVIALTDPEGCPLSRFKDSLGNPTHILRIGESYKEKQRTIQAKKEVEQRRAGGYSRKYASKAKNLADDMVRNTARDLLYYAVTQDAMLIFENLSRGFGRQGKRTFMAERQYTRMEDWLTAKLAYEGLPSKVYLSKTLAQYTSKTCSNCGFTITSADYDRVLEKLKKTATGWMTTINGKELKVEGQITYYNRYKRQNVVKDLSVELDRLSEESVNNDISSWTKGRSGEALSLLKKRFSHRPVQEKFVCLNCGFETHADEQAALNIARSWLFLRSQEYKKYQTNKTTGNTDKRAFVETWQSFYRKKLKEVWKPAV

SEQ ID NO: 37162 - protein, 979 aa, synthetic construct
  REGION 1..979: note = engineered CasX variant
QEIKRINKIRRRLVKDSNTKKAGKTGPMKTLLVRVMTPDLRERLENLRKKPENIPQPISNTSRANLNKLLTDYTEMKKAILHVYWEEFQKDPVGLMSRVAQPASKKIDQNKLKPEMDEKGNLTTAGFACSQCGQPLFVYKLEQVSEKGKAYTNYFGRCNVAEHEKLILLAQLKPEKDSDEAVTYSLGKFGQRALDFYSIHVTKESTHPVKPLAQIAGNRYASHPVGKALSDACMGTIASFLSKYQDIIIEHQKVVKGNQKRLESLRELAGKENLEYPSVTLPPQPHTKEGVDAYNEVIARVRMWVNLNLWQKLKLSRDDAKPLLRLKGFPSFPLVERQANEVDWWDMVCNVKKLINEKKEDGKVFWQNLAGYKRQEALRPYLSSEEDRKKGKKFARYQLGDLLLHLEKKHEGEDWGKVYDEAWERIDKKVEGLSKHIKLEEERRSEDAQSKAALTDWLRAKASFVIEGLKEADKDEFCRCELKLQKWYGDLRGKPFAIEAENSILDISGFSKQYNCAFIWQKDGVKKLNLYLIINYFKGGKLRFKKIKPEAFEANRFYTVINKKSGEIVPMEVNFNFDDPNLIILPLAFGKRQGREFIWNDLLSLETGSLKLANGRVIEKTLYNRRTRQDEPALFVALTFERREVLDSSNIKPMNLIGVDRGENIPAVIALTDPEGCPLSRFKDSLGNPTHILRIGESYKEKQRTIQAKKEVEQRRAGGYSRKYASKAKNLADDMVRNTARDLLYYAVTQDAMLIFENLSRGFGRQGKRTFMAERQYTRMEDWLTAKLAYEGLPSKVYLSKTLAQYTSKTCSNCGFTITSADYDRVLEKLKKTATGWMTTINGKELKVEGQITYYNRYKRQNVVKDLSVELDRLSEESVNNDISSWTKGRSGEALSLLKKRFSHRPVQEKFVCLNCGFETHADEQAALNIARSWLFLRSQEYKKYQTNKTTGNTDKRAFVETWQSFYRKKLKEVWKPAV

SEQ ID NO: 37163 - protein, 979 aa, synthetic construct
  REGION 1..979: note = engineered CasX variant
QEIKRINKIRRRLVKDSNTKKAGKTGPMKTLLVRVMTPDLRERLENLRKKPENIPQPISNTSRANLNKLLTDYTEMKKAILHVYWEEFQKDPVGLMSRVAQPASKKIDQNKLKPEMDEKGNLTTAGFACSQCGQPLFVYKLEQVSEKGKAYTNYFGRCNVAEHEKLILLAQLKPEKDSDEAVTYSLGKFGQRALDFYSIHVTKESTHPVKPLAQIAGNRYASSPVGKALSDACMGTIASFLSKYQDIIIEHQKVVKGNQKRLESLRELAGKENLEYPSVTLPPQPHTKEGVDAYNEVIARVRMWVNLNLWQKLKLSRDDAKPLLRLKGFPSFPLVERQANEVDWWDMVCNVKKLINEKKEDGKVFWQNLAGYKRQEALRPYLSSEEDRKKGKKFARYQLGDLLLHLEKKHEGEDWGKVYDEAWERIDKKVEGLSKHIKLEEERRSEDAQSKAALTDWLRAKASFVIEGLKEADKDEFCRCELKLQKWYGDLRGKPFAIEAENSILDISGFSKQYNCAFIWQKDGVKKLNLYLIINYFKGGKLRFKKIKPEAFEANRFYTVINKKSGEIVPMEVNFNFDDPNLIILPLAFGKRQGREFIWNDLLSLETGSLKLANGRVIEKTLYNRRTRQDEPALFVALTFERREVLDSSNIKPMNLIGVDRGENIPAVIALTDPEGCPLSRFKDSLGNPTHILRIGESYKEKQRTIQAKKEVEQRRAGGYSRKYASKAKNLADDMVRNTARDLLYYAVTQDAMLIFENLSRGFGRQGKRTFMAERQYTRMEDWLTAKLAYEGLPSKVYLSKTLAQYTSKTCSNCGFTITSADYDRVLEKLKKTATGWMTTINGKELKVEGQITYYNRYKRQNVVKDLSVELDRLSEESVNNDISSWTKGRSGEALSLLKKRFSHRPVQEKFVCLNCGFETHADEQAALNIARSWLFLRSQEYKKYQTNKTTGNTDKRAFVETWQSFYRKKLKEVWKPAV

SEQ ID NO: 37164 - protein, 979 aa, synthetic construct
  REGION 1..979: note = engineered CasX variant
QEIKRINKIRRRLVKDSNTKKAGKTGPMKTLLVRVMTPDLRERLENLRKKPENIPQPISNTSRANLNKLLTDYTEMKKAILHVYWEEFQKDPVGLMSRVAQPASKKIDQNKLKPEMDEKGNLTTAGFACSQCGQPLFVYKLEQVSEKGKAYTNYFGRCNVAEHEKLILLAQLKPEKDSDEAVTYSLGKFGQRALDFYSIHVTKESTHPVKPLAQIAGNRYASTPVGKALSDACMGTIASFLSKYQDIIIEHQKVVKGNQKRLESLRELAGKENLEYPSVTLPPQPHTKEGVDAYNEVIARVRMWVNLNLWQKLKLSRDDAKPLLRLKGFPSFPLVERQANEVDWWDMVCNVKKLINEKKEDGKVFWQNLAGYKRQEALRPYLSSEEDRKKGKKFARYQLGDLLLHLEKKHEGEDWGKVYDEAWERIDKKVEGLSKHIKLEEERRSEDAQSKAALTDWLRAKASFVIEGLKEADKDEFCRCELKLQKWYGDLRGKPFAIEAENSILDISGFSKQYNCAFIWQKDGVKKLNLYLIINYFKGGKLRFKKIKPEAFEANRFYTVINKKSGEIVPMEVNFNFDDPNLIILPLAFGKRQGREFIWNDLLSLETGSLKLANGRVIEKTLYNRRTRQDEPALFVALTFERREVLDSSNIKPMNLIGVDRGENIPAVIALTDPEGCPLSRFKDSLGNPTHILRIGESYKEKQRTIQAKKEVEQRRAGGYSRKYASKAKNLADDMVRNTARDLLYYAVTQDAMLIFENLSRGFGRQGKRTFMAERQYTRMEDWLTAKLAYEGLPSKVYLSKTLAQYTSKTCSNCGFTITSADYDRVLEKLKKTATGWMTTINGKELKVEGQITYYNRYKRQNVVKDLSVELDRLSEESVNNDISSWTKGRSGEALSLLKKRFSHRPVQEKFVCLNCGFETHADEQAALNIARSWLFLRSQEYKKYQTNKTTGNTDKRAFVETWQSFYRKKLKEVWKPAV

SEQ ID NO: 37165 - protein, 979 aa, synthetic construct
  REGION 1..979: note = engineered CasX variant
QEIKRINKIRRRLVKDSNTKKAGKTGPMKTLLVRVMTPDLRERLENLRKKPENIPQPISNTSRANLNKLLTDYTEMKKAILHVYWEEFQKDPVGLMSRVAQPASKKIDQNKLKPEMDEKGNLTTAGFACSQCGQPLFVYKLEQVSEKGKAYTNYFGRCNVAEHEKLILLAQLKPEKDSDEAVTYSLGKFGQRALDFYSIHVTKESTHPVKPLAQIAGNRYASAPVGKALSDACMGTIASFLSKYQDIIIEHQKVVKGNQKRLESLRELAGKENLEYPSVTLPPQPHTKEGVDAYNEVIARVRMWVNLNLWQKLKLSRDDAKPLLRLKGFPSFPLVERQANEVDWWDMVCNVKKLINEKKEDGKVFWQNLAGYKRQEALRPYLSSEEDRKKGKKFARYQLGDLLLHLEKKHEGEDWGKVYDEAWERIDKKVEGLSKHIKLEEERRSEDAQSKAALTDWLRAKASFVIEGLKEADKDEFCRCELKLQKWYGDLRGKPFAIEAENSILDISGFSKQYNCAFIWQKDGVKKLNLYLIINYFKGGKLRFKKIKPEAFEANRFYTVINKKSGEIVPMEVNFNFDDPNLIILPLAFGKRQGREFIWNDLLSLETGSLKLANGRVIEKTLYNRRTRQDEPALFVALTFERREVLDSSNIKPMNLIGVDRGENIPAVIALTDPEGCPLSRFKDSLGNPTHILRIGESYKEKQRTIQAKKEVEQRRAGGYSRKYASKAKNLADDMVRNTARDLLYYAVTQDAMLIFENLSRGFGRQGKRTFMAERQYTRMEDWLTAKLAYEGLPSKVYLSKTLAQYTSKTCSNCGFTITSADYDRVLEKLKKTATGWMTTINGKELKVEGQITYYNRYKRQNVVKDLSVELDRLSEESVNNDISSWTKGRSGEALSLLKKRFSHRPVQEKFVCLNCGFETHADEQAALNIARSWLFLRSQEYKKYQTNKTTGNTDKRAFVETWQSFYRKKLKEVWKPAV

SEQ ID NO: 37166 - protein, 979 aa, synthetic construct
  REGION 1..979: note = engineered CasX variant
QEIKRINKIRRRLVKDSNTKKAGKTGPMKTLLVRVMTPDLRERLENLRKKPENIPQPISNTSRANLNKLLTDYTEMKKAILHVYWEEFQKDPVGLMSRVAQPASKKIDQNKLKPEMDEKGNLTTAGFACSQCGQPLFVYKLEQVSEKGKAYTNYFGRCNVAEHEKLILLAQLKPEKDSDEAVTYSLGKFGQRALDFYSIHVTKESTHPVKPLAQIAGNRYASVPVGKALSDACMGTIASFLSKYQDIIIEHQKVVKGNQKRLESLRELAGKENLEYPSVTLPPQPHTKEGVDAYNEVIARVRMWVNLNLWQKLKLSRDDAKPLLRLKGFPSFPLVERQANEVDWWDMVCNVKKLINEKKEDGKVFWQNLAGYKRQEALRPYLSSEEDRKKGKKFARYQLGDLLLHLEKKHEGEDWGKVYDEAWERIDKKVEGLSKHIKLEEERRSEDAQSKAALTDWLRAKASFVIEGLKEADKDEFCRCELKLQKWYGDLRGKPFAIEAENSILDISGFSKQYNCAFIWQKDGVKKLNLYLIINYFKGGKLRFKKIKPEAFEANRFYTVINKKSGEIVPMEVNFNFDDPNLIILPLAFGKRQGREFIWNDLLSLETGSLKLANGRVIEKTLYNRRTRQDEPALFVALTFERREVLDSSNIKPMNLIGVDRGENIPAVIALTDPEGCPLSRFKDSLGNPTHILRIGESYKEKQRTIQAKKEVEQRRAGGYSRKYASKAKNLADDMVRNTARDLLYYAVTQDAMLIFENLSRGFGRQGKRTFMAERQYTRMEDWLTAKLAYEGLPSKVYLSKTLAQYTSKTCSNCGFTITSADYDRVLEKLKKTATGWMTTINGKELKVEGQITYYNRYKRQNVVKDLSVELDRLSEESVNNDISSWTKGRSGEALSLLKKRFSHRPVQEKFVCLNCGFETHADEQAALNIARSWLFLRSQEYKKYQTNKTTGNTDKRAFVETWQSFYRKKLKEVWKPAV

SEQ ID NO: 37167 - protein, 979 aa, synthetic construct
  REGION 1..979: note = engineered CasX variant
QEIKRINKIRRRLVKDSNTKKAGKTGPMKTLLVRVMTPDLRERLENLRKKPENIPQPISNTSRANLNKLLTDYTEMKKAILHVYWEEFQKDPVGLMSRVAQPASKKIDQNKLKPEMDEKGNLTTAGFACSQCGQPLFVYKLEQVSEKGKAYTNYFGRCNVAEHEKLIKLAQLKPEKDSDEAVTYSLGKFGQRALDFYSIHVTKESTHPVKPLAQIAGNRYASGPVGKALSDACMGTIASFLSKYQDIIIEHQKVVKGNQKRLESLRELAGKENLEYPSVTLPPQPHTKEGVDAYNEVIARVRMWVNLNLWQKLKLSRDDAKPLLRLKGFPSFPLVERQANEVDWWDMVCNVKKLINEKKEDGKVFWQNLAGYKRQEALRPYLSSEEDRKKGKKFARYQLGDLLLHLEKKHEGEDWGKVYDEAWERIDKKVEGLSKHIKLEEERRSEDAQSKAALTDWLRAKASFVIEGLKEADKDEFCRCELKLQKWYGDLRGKPFAIEAENSILDISGFSKQYNCAFIWQKDGVKKLNLYLIINYFKGGKLRFKKIKPEAFEANRFYTVINKKSGEIVPMEVNFNFDDPNLIILPLAFGKRQGREFIWNDLLSLETGSLKLANGRVIEKTLYNRRTRQDEPALFVALTFERREVLDSSNIKPMNLIGVDRGENIPAVIALTDPEGCPLSRFKDSLGNPTHILRIGESYKEKQRTIQAKKEVEQRRAGGYSRKYASKAKNLADDMVRNTARDLLYYAVTQDAMLIFENLSRGFGRQGKRTFMAERQYTRMEDWLTAKLAYEGLPSKVYLSKTLAQYTSKTCSNCGFTITSADYDRVLEKLKKTATGWMTTINGKELKVEGQITYYNRYKRQNVVKDLSVELDRLSEESVNNDISSWTKGRSGEALSLLKKRFSHRPVQEKFVCLNCGFETHADEQAALNIARSWLFLRSQEYKKYQTNKTTGNTDKRAFVETWQSFYRKKLKEVWKPAV

SEQ ID NO: 37168 - protein, 978 aa, synthetic construct
  REGION 1..978: note = engineered CasX variant
QEIKRINKIRRRLVKDSNTKKAGKTGPMKTLLVRVMTPDLRERLENLRKKPENIPQPISNTSRANLNKLLTDYTEMKKAILHVYWEEFQKDPVGLMSRVAQPASKKIDQNKLKPEMDEKGNLTTAGFACSQCGQPLFVYKLEQVSEKGKAYTNYFGRCNVAEHEKLILLAQLKPEKDSDEAVTYSLGKFGQRALDFYSIHVTKESTHPVKPLAQIAGNRYASPVGKALSDACMGTIASFLSKYQDIIIEHQKVVKGNQKRLESLRELAGKENLEYPSVTLPPQPHTKEGVDAYNEVIARVRMWVNLNLWQKLKLSRDDAKPLLRLKGFPSFPLVERQANEVDWWDMVCNVKKLINEKKEDGKVFWQNLAGYKRQEALRPYLSSEEDRKKGKKFARYQLGDLLLHLEKKHEGEDWGKVYDEAWERIDKKVEGLSKHIKLEEERRSEDAQSKAALTDWLRAKASFVIEGLKEADKDEFCRCELKLQKWYGDLRGKPFAIEAENSILDISGFSKQYNCAFIWQKDGVKKLNLYLIINYFKGGKLRFKKIKPEAFEANRFYTVINKKSGEIVPMEVNFNFDDPNLIILPLAFGKRQGREFIWNDLLSLETGSLKLANGRVIEKTLYNRRTRQDEPALFVALTFERREVLDSSNIKPMNLIGVDRGENIPAVIALTDPEGCPLSRFKDSLGNPTHILRIGESYKEKQRTIQAKKEVEQRRAGGYSRKYASKAKNLADDMVRNTARDLLYYAVTQDAMLIFENLSRGFGRQGKRTFMAERQYTRMEDWLTAKLAYEGLPSKVYLSKTLAQYTSKTCSNCGFTITSADYDRVLEKLKKTATGWMTTINGKELKVEGQITYYNRYKRQNVVKDLSVELDRLSEESVNNDISSWTKGRSGEALSLLKKRFSHRPVQEKFVCLNCGFETHADEQAALNIARSWLFLRSQEYKKYQTNKTTGNTDKRAFVETWQSFYRKKLKEVWKPAV

SEQ ID NO: 37169 - protein, 980 aa, synthetic construct
  REGION 1..980: note = engineered CasX variant
QEIKRINKIRRRLVKDSNTKKAGKTGPMKTLLVRVMTPDLRERLENLRKKPENIPQPISNTSRANLNKLLTDYTEMKKAILHVYWEEFQKDPVGLMSRVAQPASKKIDQNKLKPEMDEKGNLTTAGFACSQCGQPLFVYKLEQVSEKGKAYTNYFGRCNVAEHEKLILLAQLKPEKDSDEAVTYSLGKFGQRALDFYSIHVTKESTHPVKPLAQIAGNRYASYPVGKALSDACMGTIASFLSKYQDIIIEHQKVVKGNQKRLESLRELAGKENLEYPSVTLPPQPHTKEGVDAYNEVIARVRMWVNLNLWQKLKLSRDDAKPLLRLKGFPSFPLVERQANEVDWWDMVCNVKKLINEKKEDGKVFWQNLAGYKRQEALRPYLSSEEDRKKGKKFARYQLGDLLLHLEKKHEGEDWGKVYDEAWERIDKKVEGLSKHIKLEEERRSEDAQSKAALTDWLRAKASFVIEGLKEADKDEFCRCELKLQKWYGDLRGKPFAIEAENSILDISGFSKQYNCAFIWQKDGVKKLNLYLIINYFKGGKLRFKKIKPEAFEANRFYTVINKKSGEIVPMEVNFNFDDPNLIILPLAFGKRQGREFIWNDLLSLETGSLKLANGRVIEKTLYNRRTRQDEPALFVALTFERREVLDSSNIKPMNLIGVDRGENIPAVIALTDPEGCPLSRFKDSLGNPTHILRIGESYKEKQRTIQAKKEVEQRRAGGYSRKYASKAKNLADDMVRNTARDLLYYAVTQDAMLIFENLSRGFGRQGKRTFMAERQYTRMEDWLTAKLAYEGPLPSKTYLSKTLAQYTSKTCSNCGFTITSADYDRVLEKLKKTATGWMTTINGKELKVEGQITYYNRYKRQNVVKDLSVELDRLSEESVNNDISSWTKGRSGEALSLLKKRFSHRPVQEKFVCLNCGFETHADEQAALNIARSWLFLRSQEYKKYQTNKTTGNTDKRAFVETWQSFYRKKLKEVWKPAV

SEQ ID NO: 37170 - protein, 980 aa, synthetic construct
  REGION 1..980: note = engineered CasX variant
QEIKRINKIRRRLVKDSNTKKAGKTGPMKTLLVRVMTPDLRERLENLRKKPENIPQPISNTSRANLNKLLTDYTEMKKAILHVYWEEFQKDPVGLMSRVAQPASKKIDQNKLKPEMDEKGNLTTAGFACSQCGQPLFVYKLEQVSEKGKAYTNYFGRCNVAEHEKLILLAQLKPEKDSDEAVTYSLGKFGQRALDFYSIHVTKESTHPVKPLAQIAGNRYASHPVGKALSDACMGTIASFLSKYQDIIIEHQKVVKGNQKRLESLRELAGKENLEYPSVTLPPQPHTKEGVDAYNEVIARVRMWVNLNLWQKLKLSRDDAKPLLRLKGFPSFPLVERQANEVDWWDMVCNVKKLINEKKEDGKVFWQNLAGYKRQEALRPYLSSEEDRKKGKKFARYQLGDLLLHLEKKHEGEDWGKVYDEAWERIDKKVEGLSKHIKLEEERRSEDAQSKAALTDWLRAKASFVIEGLKEADKDEFCRCELKLQKWYGDLRGKPFAIEAENSILDISGFSKQYNCAFIWQKDGVKKLNLYLIINYFKGGKLRFKKIKPEAFEANRFYTVINKKSGEIVPMEVNFNFDDPNLIILPLAFGKRQGREFIWNDLLSLETGSLKLANGRVIEKTLYNRRTRQDEPALFVALTFERREVLDSSNIKPMNLIGVDRGENIPAVIALTDPEGCPLSRFKDSLGNPTHILRIGESYKEKQRTIQAKKEVEQRRAGGYSRKYASKAKNLADDMVRNTARDLLYYAVTQDAMLIFENLSRGFGRQGKRTFMAERQYTRMEDWLTAKLAYEGPLPSKTYLSKTLAQYTSKTCSNCGFTITSADYDRVLEKLKKTATGWMTTINGKELKVEGQITYYNRYKRQNVVKDLSVELDRLSEESVNNDISSWTKGRSGEALSLLKKRFSHRPVQEKFVCLNCGFETHADEQAALNIARSWLFLRSQEYKKYQTNKTTGNTDKRAFVETWQSFYRKKLKEVWKPAV

SEQ ID NO: 37171 - protein, 980 aa, synthetic construct
  REGION 1..980: note = engineered CasX variant
QEIKRINKIRRRLVKDSNTKKAGKTGPMKTLLVRVMTPDLRERLENLRKKPENIPQPISNTSRANLNKLLTDYTEMKKAILHVYWEEFQKDPVGLMSRVAQPASKKIDQNKLKPEMDEKGNLTTAGFACSQCGQPLFVYKLEQVSEKGKAYTNYFGRCNVAEHEKLILLAQLKPEKDSDEAVTYSLGKFGQRALDFYSIHVTKESTHPVKPLAQIAGNRYASSPVGKALSDACMGTIASFLSKYQDIIIEHQKVVKGNQKRLESLRELAGKENLEYPSVTLPPQPHTKEGVDAYNEVIARVRMWVNLNLWQKLKLSRDDAKPLLRLKGFPSFPLVERQANEVDWWDMVCNVKKLINEKKEDGKVFWQNLAGYKRQEALRPYLSSEEDRKKGKKFARYQLGDLLLHLEKKHEGEDWGKVYDEAWERIDKKVEGLSKHIKLEEERRSEDAQSKAALTDWLRAKASFVIEGLKEADKDEFCRCELKLQKWYGDLRGKPFAIEAENSILDISGFSKQYNCAFIWQKDGVKKLNLYLIINYFKGGKLRFKKIKPEAFEANRFYTVINKKSGEIVPMEVNFNFDDPNLIILPLAFGKRQGREFIWNDLLSLETGSLKLANGRVIEKTLYNRRTRQDEPALFVALTFERREVLDSSNIKPMNLIGVDRGENIPAVIALTDPEGCPLSRFKDSLGNPTHILRIGESYKEKQRTIQAKKEVEQRRAGGYSRKYASKAKNLADDMVRNTARDLLYYAVTQDAMLIFENLSRGFGRQGKRTFMAERQYTRMEDWLTAKLAYEGPLPSKTYLSKTLAQYTSKTCSNCGFTITSADYDRVLEKLKKTATGWMTTINGKELKVEGQITYYNRYKRQNVVKDLSVELDRLSEESVNNDISSWTKGRSGEALSLLKKRFSHRPVQEKFVCLNCGFETHADEQAALNIARSWLFLRSQEYKKYQTNKTTGNTDKRAFVETWQSFYRKKLKEVWKPAV

SEQ ID NO: 37172 - protein, 980 aa, synthetic construct
  REGION 1..980: note = engineered CasX variant
QEIKRINKIRRRLVKDSNTKKAGKTGPMKTLLVRVMTPDLRERLENLRKKPENIPQPISNTSRANLNKLLTDYTEMKKAILHVYWEEFQKDPVGLMSRVAQPASKKIDQNKLKPEMDEKGNLTTAGFACSQCGQPLFVYKLEQVSEKGKAYTNYFGRCNVAEHEKLILLAQLKPEKDSDEAVTYSLGKFGQRALDFYSIHVTKESTHPVKPLAQIAGNRYASTPVGKALSDACMGTIASFLSKYQDIIIEHQKVVKGNQKRLESLRELAGKENLEYPSVTLPPQPHTKEGVDAYNEVIARVRMWVNLNLWQKLKLSRDDAKPLLRLKGFPSFPLVERQANEVDWWDMVCNVKKLINEKKEDGKVFWQNLAGYKRQEALRPYLSSEEDRKKGKKFARYQLGDLLLHLEKKHEGEDWGKVYDEAWERIDKKVEGLSKHIKLEEERRSEDAQSKAALTDWLRAKASFVIEGLKEADKDEFCRCELKLQKWYGDLRGKPFAIEAENSILDISGFSKQYNCAFIWQKDGVKKLNLYLIINYFKGGKLRFKKIKPEAFEANRFYTVINKKSGEIVPMEVNFNFDDPNLIILPLAFGKRQGREFIWNDLLSLETGSLKLANGRVIEKTLYNRRTRQDEPALFVALTFERREVLDSSNIKPMNLIGVDRGENIPAVIALTDPEGCPLSRFKDSLGNPTHILRIGESYKEKQRTIQAKKEVEQRRAGGYSRKYASKAKNLADDMVRNTARDLLYYAVTQDAMLIFENLSRGFGRQGKRTFMAERQYTRMEDWLTAKLAYEGPLPSKTYLSKTLAQYTSKTCSNCGFTITSADYDRVLEKLKKTATGWMTTINGKELKVEGQITYYNRYKRQNVVKDLSVELDRLSEESVNNDISSWTKGRSGEALSLLKKRFSHRPVQEKFVCLNCGFETHADEQAALNIARSWLFLRSQEYKKYQTNKTTGNTDKRAFVETWQSFYRKKLKEVWKPAV

SEQ ID NO: 37173 - protein, 980 aa, synthetic construct
  REGION 1..980: note = engineered CasX variant
QEIKRINKIRRRLVKDSNTKKAGKTGPMKTLLVRVMTPDLRERLENLRKKPENIPQPISNTSRANLNKLLTDYTEMKKAILHVYWEEFQKDPVGLMSRVAQPASKKIDQNKLKPEMDEKGNLTTAGFACSQCGQPLFVYKLEQVSEKGKAYTNYFGRCNVAEHEKLILLAQLKPEKDSDEAVTYSLGKFGQRALDFYSIHVTKESTHPVKPLAQIAGNRYASAPVGKALSDACMGTIASFLSKYQDIIIEHQKVVKGNQKRLESLRELAGKENLEYPSVTLPPQPHTKEGVDAYNEVIARVRMWVNLNLWQKLKLSRDDAKPLLRLKGFPSFPLVERQANEVDWWDMVCNVKKLINEKKEDGKVFWQNLAGYKRQEALRPYLSSEEDRKKGKKFARYQLGDLLLHLEKKHEGEDWGKVYDEAWERIDKKVEGLSKHIKLEEERRSEDAQSKAALTDWLRAKASFVIEGLKEADKDEFCRCELKLQKWYGDLRGKPFAIEAENSILDISGFSKQYNCAFIWQKDGVKKLNLYLIINYFKGGKLRFKKIKPEAFEANRFYTVINKKSGEIVPMEVNFNFDDPNLIILPLAFGKRQGREFIWNDLLSLETGSLKLANGRVIEKTLYNRRTRQDEPALFVALTFERREVLDSSNIKPMNLIGVDRGENIPAVIALTDPEGCPLSRFKDSLGNPTHILRIGESYKEKQRTIQAKKEVEQRRAGGYSRKYASKAKNLADDMVRNTARDLLYYAVTQDAMLIFENLSRGFGRQGKRTFMAERQYTRMEDWLTAKLAYEGPLPSKTYLSKTLAQYTSKTCSNCGFTITSADYDRVLEKLKKTATGWMTTINGKELKVEGQITYYNRYKRQNVVKDLSVELDRLSEESVNNDISSWTKGRSGEALSLLKKRFSHRPVQEKFVCLNCGFETHADEQAALNIARSWLFLRSQEYKKYQTNKTTGNTDKRAFVETWQSFYRKKLKEVWKPAV

SEQ ID NO: 37174 - protein, 980 aa, synthetic construct
  REGION 1..980: note = engineered CasX variant
QEIKRINKIRRRLVKDSNTKKAGKTGPMKTLLVRVMTPDLRERLENLRKKPENIPQPISNTSRANLNKLLTDYTEMKKAILHVYWEEFQKDPVGLMSRVAQPASKKIDQNKLKPEMDEKGNLTTAGFACSQCGQPLFVYKLEQVSEKGKAYTNYFGRCNVAEHEKLILLAQLKPEKDSDEAVTYSLGKFGQRALDFYSIHVTKESTHPVKPLAQIAGNRYASVPVGKALSDACMGTIASFLSKYQDIIIEHQKVVKGNQKRLESLRELAGKENLEYPSVTLPPQPHTKEGVDAYNEVIARVRMWVNLNLWQKLKLSRDDAKPLLRLKGFPSFPLVERQANEVDWWDMVCNVKKLINEKKEDGKVFWQNLAGYKRQEALRPYLSSEEDRKKGKKFARYQLGDLLLHLEKKHEGEDWGKVYDEAWERIDKKVEGLSKHIKLEEERRSEDAQSKAALTDWLRAKASFVIEGLKEADKDEFCRCELKLQKWYGDLRGKPFAIEAENSILDISGFSKQYNCAFIWQKDGVKKLNLYLIINYFKGGKLRFKKIKPEAFEANRFYTVINKKSGEIVPMEVNFNFDDPNLIILPLAFGKRQGREFIWNDLLSLETGSLKLANGRVIEKTLYNRRTRQDEPALFVALTFERREVLDSSNIKPMNLIGVDRGENIPAVIALTDPEGCPLSRFKDSLGNPTHILRIGESYKEKQRTIQAKKEVEQRRAGGYSRKYASKAKNLADDMVRNTARDLLYYAVTQDAMLIFENLSRGFGRQGKRTFMAERQYTRMEDWLTAKLAYEGPLPSKTYLSKTLAQYTSKTCSNCGFTITSADYDRVLEKLKKTATGWMTTINGKELKVEGQITYYNRYKRQNVVKDLSVELDRLSEESVNNDISSWTKGRSGEALSLLKKRFSHRPVQEKFVCLNCGFETHADEQAALNIARSWLFLRSQEYKKYQTNKTTGNTDKRAFVETWQSFYRKKLKEVWKPAV

SEQ ID NO: 37175 - protein, 980 aa, synthetic construct
  REGION 1..980: note = engineered CasX variant
QEIKRINKIRRRLVKDSNTKKAGKTGPMKTLLVRVMTPDLRERLENLRKKPENIPQPISNTSRANLNKLLTDYTEMKKAILHVYWEEFQKDPVGLMSRVAQPASKKIDQNKLKPEMDEKGNLTTAGFACSQCGQPLFVYKLEQVSEKGKAYTNYFGRCNVAEHEKLIKLAQLKPEKDSDEAVTYSLGKFGQRALDFYSIHVTKESTHPVKPLAQIAGNRYASGPVGKALSDACMGTIASFLSKYQDIIIEHQKVVKGNQKRLESLRELAGKENLEYPSVTLPPQPHTKEGVDAYNEVIARVRMWVNLNLWQKLKLSRDDAKPLLRLKGFPSFPLVERQANEVDWWDMVCNVKKLINEKKEDGKVFWQNLAGYKRQEALRPYLSSEEDRKKGKKFARYQLGDLLLHLEKKHEGEDWGKVYDEAWERIDKKVEGLSKHIKLEEERRSEDAQSKAALTDWLRAKASFVIEGLKEADKDEFCRCELKLQKWYGDLRGKPFAIEAENSILDISGFSKQYNCAFIWQKDGVKKLNLYLIINYFKGGKLRFKKIKPEAFEANRFYTVINKKSGEIVPMEVNFNFDDPNLIILPLAFGKRQGREFIWNDLLSLETGSLKLANGRVIEKTLYNRRTRQDEPALFVALTFERREVLDSSNIKPMNLIGVDRGENIPAVIALTDPEGCPLSRFKDSLGNPTHILRIGESYKEKQRTIQAKKEVEQRRAGGYSRKYASKAKNLADDMVRNTARDLLYYAVTQDAMLIFENLSRGFGRQGKRTFMAERQYTRMEDWLTAKLAYEGPLPSKTYLSKTLAQYTSKTCSNCGFTITSADYDRVLEKLKKTATGWMTTINGKELKVEGQITYYNRYKRQNVVKDLSVELDRLSEESVNNDISSWTKGRSGEALSLLKKRFSHRPVQEKFVCLNCGFETHADEQAALNIARSWLFLRSQEYKKYQTNKTTGNTDKRAFVETWQSFYRKKLKEVWKPAV

SEQ ID NO: 37176 - protein, 979 aa, synthetic construct
  REGION 1..979: note = engineered CasX variant
QEIKRINKIRRRLVKDSNTKKAGKTGPMKTLLVRVMTPDLRERLENLRKKPENIPQPISNTSRANLNKLLTDYTEMKKAILHVYWEEFQKDPVGLMSRVAQPASKKIDQNKLKPEMDEKGNLTTAGFACSQCGQPLFVYKLEQVSEKGKAYTNYFGRCNVAEHEKLILLAQLKPEKDSDEAVTYSLGKFGQRALDFYSIHVTKESTHPVKPLAQIAGNRYASPVGKALSDACMGTIASFLSKYQDIIIEHQKVVKGNQKRLESLRELAGKENLEYPSVTLPPQPHTKEGVDAYNEVIARVRMWVNLNLWQKLKLSRDDAKPLLRLKGFPSFPLVERQANEVDWWDMVCNVKKLINEKKEDGKVFWQNLAGYKRQEALRPYLSSEEDRKKGKKFARYQLGDLLLHLEKKHEGEDWGKVYDEAWERIDKKVEGLSKHIKLEEERRSEDAQSKAALTDWLRAKASFVIEGLKEADKDEFCRCELKLQKWYGDLRGKPFAIEAENSILDISGFSKQYNCAFIWQKDGVKKLNLYLIINYFKGGKLRFKKIKPEAFEANRFYTVINKKSGEIVPMEVNFNFDDPNLIILPLAFGKRQGREFIWNDLLSLETGSLKLANGRVIEKTLYNRRTRQDEPALFVALTFERREVLDSSNIKPMNLIGVDRGENIPAVIALTDPEGCPLSRFKDSLGNPTHILRIGESYKEKQRTIQAKKEVEQRRAGGYSRKYASKAKNLADDMVRNTARDLLYYAVTQDAMLIFENLSRGFGRQGKRTFMAERQYTRMEDWLTAKLAYEGPLPSKTYLSKTLAQYTSKTCSNCGFTITSADYDRVLEKLKKTATGWMTTINGKELKVEGQITYYNRYKRQNVVKDLSVELDRLSEESVNNDISSWTKGRSGEALSLLKKRFSHRPVQEKFVCLNCGFETHADEQAALNIARSWLFLRSQEYKKYQTNKTTGNTDKRAFVETWQSFYRKKLKEVWKPAV

SEQ ID NO: 37177 - protein, 980 aa, synthetic construct
  REGION 1..980: note = engineered CasX variant
QEIKRINKIRRRLVKDSNTKKAGKTGPMKTLLVRVMTPDLRERLENLRKKPENIPQPISNTSRANLNKLLTDYTEMKKAILHVYWEEFQKDPVGLMSRVAQPASKKIDQNKLKPEMDEKGNLTTAGFACSQCGQPLFVYKLEQVSEKGKAYTNYFGRCNVAEHEKLILLAQLKPEKDSDEAVTYSLGKFGQRALDFYSIHVTKESTHPVKPLAQIAGNRYASYPVGKALSDACMGTIASFLSKYQDIIIEHQKVVKGNQKRLESLRELAGKENLEYPSVTLPPQPHTKEGVDAYNEVIARVRMWVNLNLWQKLKLSRDDAKPLLRLKGFPSFPLVERQANEVDWWDMVCNVKKLINEKKEDGKVFWQNLAGYKRQEALRPYLSSEEDVRKKGKKFARYQLGDLLLHLEKKHEGEDWGKVYDEAWERIDKKVEGLSKHIKLEEERRSEDAQSKAALTDWLRAKASFVIEGLKEADKDEFCRCELKLQKWYGDLRGKPFAIEAENSILDISGFSKQYNCAFIWQKDGVKKLNLYLIINYFKGGKLRFKKIKPEAFEANRFYTVINKKSGEIVPMEVNFNFDDPNLIILPLAFGKRQGREFIWNDLLSLETGSLKLANGRVIEKTLYNRRTRQDEPALFVALTFERREVLDSSNIKPMNLIGVDRGENIPAVIALTDPEGCPLSRFKDSLGNPTHILRIGESYKEKQRTIQAKKEVEQRRAGGYSRKYASKAKNLADDMVRNTARDLLYYAVTQDAMLIFENLSRGFGRQGKRTFMAERQYTRMEDWLTAKLAYEGLPSKTYLSKTLAQYTSKTCSNCGFTITSADYDRVLEKLKKTATGWMTTINGKELKVEGQITYYNRYKRQNVVKDLSVELDRLSEESVNNDISSWTKGRSGEALSLLKKRFSHRPVQEKFVCLNCGFETHADEQAALNIARSWLFLRSQEYKKYQTNKTTGNTDKRAFVETWQSFYRKKLKEVWKPAV

SEQ ID NO: 37178 - protein, 980 aa, synthetic construct
  REGION 1..980: note = engineered CasX variant
QEIKRINKIRRRLVKDSNTKKAGKTGPMKTLLVRVMTPDLRERLENLRKKPENIPQPISNTSRANLNKLLTDYTEMKKAILHVYWEEFQKDPVGLMSRVAQPASKKIDQNKLKPEMDEKGNLTTAGFACSQCGQPLFVYKLEQVSEKGKAYTNYFGRCNVAEHEKLILLAQLKPEKDSDEAVTYSLGKFGQRALDFYSIHVTKESTHPVKPLAQIAGNRYASHPVGKALSDACMGTIASFLSKYQDIIIEHQKVVKGNQKRLESLRELAGKENLEYPSVTLPPQPHTKEGVDAYNEVIARVRMWVNLNLWQKLKLSRDDAKPLLRLKGFPSFPLVERQANEVDWWDMVCNVKKLINEKKEDGKVFWQNLAGYKRQEALRPYLSSEEDVRKKGKKFARYQLGDLLLHLEKKHEGEDWGKVYDEAWERIDKKVEGLSKHIKLEEERRSEDAQSKAALTDWLRAKASFVIEGLKEADKDEFCRCELKLQKWYGDLRGKPFAIEAENSILDISGFSKQYNCAFIWQKDGVKKLNLYLIINYFKGGKLRFKKIKPEAFEANRFYTVINKKSGEIVPMEVNFNFDDPNLIILPLAFGKRQGREFIWNDLLSLETGSLKLANGRVIEKTLYNRRTRQDEPALFVALTFERREVLDSSNIKPMNLIGVDRGENIPAVIALTDPEGCPLSRFKDSLGNPTHILRIGESYKEKQRTIQAKKEVEQRRAGGYSRKYASKAKNLADDMVRNTARDLLYYAVTQDAMLIFENLSRGFGRQGKRTFMAERQYTRMEDWLTAKLAYEGLPSKTYLSKTLAQYTSKTCSNCGFTITSADYDRVLEKLKKTATGWMTTINGKELKVEGQITYYNRYKRQNVVKDLSVELDRLSEESVNNDISSWTKGRSGEALSLLKKRFSHRPVQEKFVCLNCGFETHADEQAALNIARSWLFLRSQEYKKYQTNKTTGNTDKRAFVETWQSFYRKKLKEVWKPAV

SEQ ID NO: 37179 - protein, 980 aa, synthetic construct
  REGION 1..980: note = engineered CasX variant
QEIKRINKIRRRLVKDSNTKKAGKTGPMKTLLVRVMTPDLRERLENLRKKPENIPQPISNTSRANLNKLLTDYTEMKKAILHVYWEEFQKDPVGLMSRVAQPASKKIDQNKLKPEMDEKGNLTTAGFACSQCGQPLFVYKLEQVSEKGKAYTNYFGRCNVAEHEKLILLAQLKPEKDSDEAVTYSLGKFGQRALDFYSIHVTKESTHPVKPLAQIAGNRYASSPVGKALSDACMGTIASFLSKYQDIIIEHQKVVKGNQKRLESLRELAGKENLEYPSVTLPPQPHTKEGVDAYNEVIARVRMWVNLNLWQKLKLSRDDAKPLLRLKGFPSFPLVERQANEVDWWDMVCNVKKLINEKKEDGKVFWQNLAGYKRQEALRPYLSSEEDVRKKGKKFARYQLGDLLLHLEKKHEGEDWGKVYDEAWERIDKKVEGLSKHIKLEEERRSEDAQSKAALTDWLRAKASFVIEGLKEADKDEFCRCELKLQKWYGDLRGKPFAIEAENSILDISGFSKQYNCAFIWQKDGVKKLNLYLIINYFKGGKLRFKKIKPEAFEANRFYTVINKKSGEIVPMEVNFNFDDPNLIILPLAFGKRQGREFIWNDLLSLETGSLKLANGRVIEKTLYNRRTRQDEPALFVALTFERREVLDSSNIKPMNLIGVDRGENIPAVIALTDPEGCPLSRFKDSLGNPTHILRIGESYKEKQRTIQAKKEVEQRRAGGYSRKYASKAKNLADDMVRNTARDLLYYAVTQDAMLIFENLSRGFGRQGKRTFMAERQYTRMEDWLTAKLAYEGLPSKTYLSKTLAQYTSKTCSNCGFTITSADYDRVLEKLKKTATGWMTTINGKELKVEGQITYYNRYKRQNVVKDLSVELDRLSEESVNNDISSWTKGRSGEALSLLKKRFSHRPVQEKFVCLNCGFETHADEQAALNIARSWLFLRSQEYKKYQTNKTTGNTDKRAFVETWQSFYRKKLKEVWKPAV

SEQ ID NO: 37180 - protein, 980 aa, synthetic construct
  REGION 1..980: note = engineered CasX variant
QEIKRINKIRRRLVKDSNTKKAGKTGPMKTLLVRVMTPDLRERLENLRKKPENIPQPISNTSRANLNKLLTDYTEMKKAILHVYWEEFQKDPVGLMSRVAQPASKKIDQNKLKPEMDEKGNLTTAGFACSQCGQPLFVYKLEQVSEKGKAYTNYFGRCNVAEHEKLILLAQLKPEKDSDEAVTYSLGKFGQRALDFYSIHVTKESTHPVKPLAQIAGNRYASTPVGKALSDACMGTIASFLSKYQDIIIEHQKVVKGNQKRLESLRELAGKENLEYPSVTLPPQPHTKEGVDAYNEVIARVRMWVNLNLWQKLKLSRDDAKPLLRLKGFPSFPLVERQANEVDWWDMVCNVKKLINEKKEDGKVFWQNLAGYKRQEALRPYLSSEEDVRKKGKKFARYQLGDLLLHLEKKHEGEDWGKVYDEAWERIDKKVEGLSKHIKLEEERRSEDAQSKAALTDWLRAKASFVIEGLKEADKDEFCRCELKLQKWYGDLRGKPFAIEAENSILDISGFSKQYNCAFIWQKDGVKKLNLYLIINYFKGGKLRFKKIKPEAFEANRFYTVINKKSGEIVPMEVNFNFDDPNLIILPLAFGKRQGREFIWNDLLSLETGSLKLANGRVIEKTLYNRRTRQDEPALFVALTFERREVLDSSNIKPMNLIGVDRGENIPAVIALTDPEGCPLSRFKDSLGNPTHILRIGESYKEKQRTIQAKKEVEQRRAGGYSRKYASKAKNLADDMVRNTARDLLYYAVTQDAMLIFENLSRGFGRQGKRTFMAERQYTRMEDWLTAKLAYEGLPSKTYLSKTLAQYTSKTCSNCGFTITSADYDRVLEKLKKTATGWMTTINGKELKVEGQITYYNRYKRQNVVKDLSVELDRLSEESVNNDISSWTKGRSGEALSLLKKRFSHRPVQEKFVCLNCGFETHADEQAALNIARSWLFLRSQEYKKYQTNKTTGNTDKRAFVETWQSFYRKKLKEVWKPAV

SEQ ID NO: 37181 - protein, 980 aa, synthetic construct
  REGION 1..980: note = engineered CasX variant
QEIKRINKIRRRLVKDSNTKKAGKTGPMKTLLVRVMTPDLRERLENLRKKPENIPQPISNTSRANLNKLLTDYTEMKKAILHVYWEEFQKDPVGLMSRVAQPASKKIDQNKLKPEMDEKGNLTTAGFACSQCGQPLFVYKLEQVSEKGKAYTNYFGRCNVAEHEKLILLAQLKPEKDSDEAVTYSLGKFGQRALDFYSIHVTKESTHPVKPLAQIAGNRYASAPVGKALSDACMGTIASFLSKYQDIIIEHQKVVKGNQKRLESLRELAGKENLEYPSVTLPPQPHTKEGVDAYNEVIARVRMWVNLNLWQKLKLSRDDAKPLLRLKGFPSFPLVERQANEVDWWDMVCNVKKLINEKKEDGKVFWQNLAGYKRQEALRPYLSSEEDVRKKGKKFARYQLGDLLLHLEKKHEGEDWGKVYDEAWERIDKKVEGLSKHIKLEEERRSEDAQSKAALTDWLRAKASFVIEGLKEADKDEFCRCELKLQKWYGDLRGKPFAIEAENSILDISGFSKQYNCAFIWQKDGVKKLNLYLIINYFKGGKLRFKKIKPEAFEANRFYTVINKKSGEIVPMEVNFNFDDPNLIILPLAFGKRQGREFIWNDLLSLETGSLKLANGRVIEKTLYNRRTRQDEPALFVALTFERREVLDSSNIKPMNLIGVDRGENIPAVIALTDPEGCPLSRFKDSLGNPTHILRIGESYKEKQRTIQAKKEVEQRRAGGYSRKYASKAKNLADDMVRNTARDLLYYAVTQDAMLIFENLSRGFGRQGKRTFMAERQYTRMEDWLTAKLAYEGLPSKTYLSKTLAQYTSKTCSNCGFTITSADYDRVLEKLKKTATGWMTTINGKELKVEGQITYYNRYKRQNVVKDLSVELDRLSEESVNNDISSWTKGRSGEALSLLKKRFSHRPVQEKFVCLNCGFETHADEQAALNIARSWLFLRSQEYKKYQTNKTTGNTDKRAFVETWQSFYRKKLKEVWKPAV

SEQ ID NO: 37182 - protein, 980 aa, synthetic construct
  REGION 1..980: note = engineered CasX variant
QEIKRINKIRRRLVKDSNTKKAGKTGPMKTLLVRVMTPDLRERLENLRKKPENIPQPISNTSRANLNKLLTDYTEMKKAILHVYWEEFQKDPVGLMSRVAQPASKKIDQNKLKPEMDEKGNLTTAGFACSQCGQPLFVYKLEQVSEKGKAYTNYFGRCNVAEHEKLILLAQLKPEKDSDEAVTYSLGKFGQRALDFYSIHVTKESTHPVKPLAQIAGNRYASVPVGKALSDACMGTIASFLSKYQDIIIEHQKVVKGNQKRLESLRELAGKENLEYPSVTLPPQPHTKEGVDAYNEVIARVRMWVNLNLWQKLKLSRDDAKPLLRLKGFPSFPLVERQANEVDWWDMVCNVKKLINEKKEDGKVFWQNLAGYKRQEALRPYLSSEEDVRKKGKKFARYQLGDLLLHLEKKHEGEDWGKVYDEAWERIDKKVEGLSKHIKLEEERRSEDAQSKAALTDWLRAKASFVIEGLKEADKDEFCRCELKLQKWYGDLRGKPFAIEAENSILDISGFSKQYNCAFIWQKDGVKKLNLYLIINYFKGGKLRFKKIKPEAFEANRFYTVINKKSGEIVPMEVNFNFDDPNLIILPLAFGKRQGREFIWNDLLSLETGSLKLANGRVIEKTLYNRRTRQDEPALFVALTFERREVLDSSNIKPMNLIGVDRGENIPAVIALTDPEGCPLSRFKDSLGNPTHILRIGESYKEKQRTIQAKKEVEQRRAGGYSRKYASKAKNLADDMVRNTARDLLYYAVTQDAMLIFENLSRGFGRQGKRTFMAERQYTRMEDWLTAKLAYEGLPSKTYLSKTLAQYTSKTCSNCGFTITSADYDRVLEKLKKTATGWMTTINGKELKVEGQITYYNRYKRQNVVKDLSVELDRLSEESVNNDISSWTKGRSGEALSLLKKRFSHRPVQEKFVCLNCGFETHADEQAALNIARSWLFLRSQEYKKYQTNKTTGNTDKRAFVETWQSFYRKKLKEVWKPAV

SEQ ID NO: 37183 - protein, 980 aa, synthetic construct
  REGION 1..980: note = engineered CasX variant
QEIKRINKIRRRLVKDSNTKKAGKTGPMKTLLVRVMTPDLRERLENLRKKPENIPQPISNTSRANLNKLLTDYTEMKKAILHVYWEEFQKDPVGLMSRVAQPASKKIDQNKLKPEMDEKGNLTTAGFACSQCGQPLFVYKLEQVSEKGKAYTNYFGRCNVAEHEKLIKLAQLKPEKDSDEAVTYSLGKFGQRALDFYSIHVTKESTHPVKPLAQIAGNRYASGPVGKALSDACMGTIASFLSKYQDIIIEHQKVVKGNQKRLESLRELAGKENLEYPSVTLPPQPHTKEGVDAYNEVIARVRMWVNLNLWQKLKLSRDDAKPLLRLKGFPSFPLVERQANEVDWWDMVCNVKKLINEKKEDGKVFWQNLAGYKRQEALRPYLSSEEDVRKKGKKFARYQLGDLLLHLEKKHEGEDWGKVYDEAWERIDKKVEGLSKHIKLEEERRSEDAQSKAALTDWLRAKASFVIEGLKEADKDEFCRCELKLQKWYGDLRGKPFAIEAENSILDISGFSKQYNCAFIWQKDGVKKLNLYLIINYFKGGKLRFKKIKPEAFEANRFYTVINKKSGEIVPMEVNFNFDDPNLIILPLAFGKRQGREFIWNDLLSLETGSLKLANGRVIEKTLYNRRTRQDEPALFVALTFERREVLDSSNIKPMNLIGVDRGENIPAVIALTDPEGCPLSRFKDSLGNPTHILRIGESYKEKQRTIQAKKEVEQRRAGGYSRKYASKAKNLADDMVRNTARDLLYYAVTQDAMLIFENLSRGFGRQGKRTFMAERQYTRMEDWLTAKLAYEGLPSKTYLSKTLAQYTSKTCSNCGFTITSADYDRVLEKLKKTATGWMTTINGKELKVEGQITYYNRYKRQNVVKDLSVELDRLSEESVNNDISSWTKGRSGEALSLLKKRFSHRPVQEKFVCLNCGFETHADEQAALNIARSWLFLRSQEYKKYQTNKTTGNTDKRAFVETWQSFYRKKLKEVWKPAV

SEQ ID NO: 37184 - protein, 979 aa, synthetic construct
  REGION 1..979: note = engineered CasX variant
QEIKRINKIRRRLVKDSNTKKAGKTGPMKTLLVRVMTPDLRERLENLRKKPENIPQPISNTSRANLNKLLTDYTEMKKAILHVYWEEFQKDPVGLMSRVAQPASKKIDQNKLKPEMDEKGNLTTAGFACSQCGQPLFVYKLEQVSEKGKAYTNYFGRCNVAEHEKLILLAQLKPEKDSDEAVTYSLGKFGQRALDFYSIHVTKESTHPVKPLAQIAGNRYASPVGKALSDACMGTIASFLSKYQDIIIEHQKVVKGNQKRLESLRELAGKENLEYPSVTLPPQPHTKEGVDAYNEVIARVRMWVNLNLWQKLKLSRDDAKPLLRLKGFPSFPLVERQANEVDWWDMVCNVKKLINEKKEDGKVFWQNLAGYKRQEALRPYLSSEEDVRKKGKKFARYQLGDLLLHLEKKHEGEDWGKVYDEAWERIDKKVEGLSKHIKLEEERRSEDAQSKAALTDWLRAKASFVIEGLKEADKDEFCRCELKLQKWYGDLRGKPFAIEAENSILDISGFSKQYNCAFIWQKDGVKKLNLYLIINYFKGGKLRFKKIKPEAFEANRFYTVINKKSGEIVPMEVNFNFDDPNLIILPLAFGKRQGREFIWNDLLSLETGSLKLANGRVIEKTLYNRRTRQDEPALFVALTFERREVLDSSNIKPMNLIGVDRGENIPAVIALTDPEGCPLSRFKDSLGNPTHILRIGESYKEKQRTIQAKKEVEQRRAGGYSRKYASKAKNLADDMVRNTARDLLYYAVTQDAMLIFENLSRGFGRQGKRTFMAERQYTRMEDWLTAKLAYEGLPSKTYLSKTLAQYTSKTCSNCGFTITSADYDRVLEKLKKTATGWMTTINGKELKVEGQITYYNRYKRQNVVKDLSVELDRLSEESVNNDISSWTKGRSGEALSLLKKRFSHRPVQEKFVCLNCGFETHADEQAALNIARSWLFLRSQEYKKYQTNKTTGNTDKRAFVETWQSFYRKKLKEVWKPAV

SEQ ID NO: 37185 - protein, 979 aa, synthetic construct
  REGION 1..979: note = engineered CasX variant
QEIKRINKIRRRLVKDSNTKKAGKTGPMKTLLVRVMTPDLRERLENLRKKPENIPQPISNTSRANLNKLLTDYTEMKKAILHVYWEEFQKDPVGLMSRVAQPASKKIDQNKLKPEMDEKGNLTTAGFACSQCGQPLFVYKLEQVSEKGKAYTNYFGRCNVAEHEKLILLAQLKPEKDSDEAVTYSLGKFGQRALDFYSIHVTKESTHPVKPLAQIAGNRYASYPVGKALSDACMGTIASFLSKYQDIIIEHQKVVKGNQKRLESLRELAGKENLEYPSVTLPPQPHTKEGVDAYNEVIARVRMWVNLNLWQKLKLSRDDAKPLLRLKGFPSFPLVERQANEVDWWDMVCNVKKLINEKKEDGKVFWQNLAGYKRQEALRPYLSSEEDRKKGKKFARYQLGDLLLHLEKKHEGEDWGKVYDEAWERIDKKVEGLSKHIKLEEERRSEDAQSKAALTDWLRAKASFVIEGLKEADKDEFCRCELKLQKWYGDLRGKPFAIEAENSILDISGFSKQYNCAFIWQKDGVKKLNLYLIINYFKGGKLRFKKIKPEAFEANRFYTVINKKSGEIVPMEVNFNFDDPNLIILPLAFGKRQGREFIWNDLLSLETGSLKLANGRVIEKTLYNRRTRQDEPALFVALTFERREVLDSSNIKPMNLIGVDRGENIPAVIALTDPEGCPLSRFKDSLGNPTHILRIGESYKEKQRTIQAKKEVEQRRAGGYSRKYASKAKNLADDMVRNTARDLLYYAVTQDAMLIFENLSRGFGRQGKRTFMAERQYTRMEDWLTAKLAYEGLPSKTYLSKTLAQYTSKTCSNCGFTITSADYDRMLEKLKKTATGWMTTINGKELKVEGQITYYNRYKRQNVVKDLSVELDRLSEESVNNDISSWTKGRSGEALSLLKKRFSHRPVQEKFVCLNCGFETHADEQAALNIARSWLFLRSQEYKKYQTNKTTGNTDKRAFVETWQSFYRKKLKEVWKPAV

SEQ ID NO: 37186 - protein, 979 aa, synthetic construct
  REGION 1..979: note = engineered CasX variant
QEIKRINKIRRRLVKDSNTKKAGKTGPMKTLLVRVMTPDLRERLENLRKKPENIPQPISNTSRANLNKLLTDYTEMKKAILHVYWEEFQKDPVGLMSRVAQPASKKIDQNKLKPEMDEKGNLTTAGFACSQCGQPLFVYKLEQVSEKGKAYTNYFGRCNVAEHEKLILLAQLKPEKDSDEAVTYSLGKFGQRALDFYSIHVTKESTHPVKPLAQIAGNRYASHPVGKALSDACMGTIASFLSKYQDIIIEHQKVVKGNQKRLESLRELAGKENLEYPSVTLPPQPHTKEGVDAYNEVIARVRMWVNLNLWQKLKLSRDDAKPLLRLKGFPSFPLVERQANEVDWWDMVCNVKKLINEKKEDGKVFWQNLAGYKRQEALRPYLSSEEDRKKGKKFARYQLGDLLLHLEKKHEGEDWGKVYDEAWERIDKKVEGLSKHIKLEEERRSEDAQSKAALTDWLRAKASFVIEGLKEADKDEFCRCELKLQKWYGDLRGKPFAIEAENSILDISGFSKQYNCAFIWQKDGVKKLNLYLIINYFKGGKLRFKKIKPEAFEANRFYTVINKKSGEIVPMEVNFNFDDPNLIILPLAFGKRQGREFIWNDLLSLETGSLKLANGRVIEKTLYNRRTRQDEPALFVALTFERREVLDSSNIKPMNLIGVDRGENIPAVIALTDPEGCPLSRFKDSLGNPTHILRIGESYKEKQRTIQAKKEVEQRRAGGYSRKYASKAKNLADDMVRNTARDLLYYAVTQDAMLIFENLSRGFGRQGKRTFMAERQYTRMEDWLTAKLAYEGLPSKTYLSKTLAQYTSKTCSNCGFTITSADYDRMLEKLKKTATGWMTTINGKELKVEGQITYYNRYKRQNVVKDLSVELDRLSEESVNNDISSWTKGRSGEALSLLKKRFSHRPVQEKFVCLNCGFETHADEQAALNIARSWLFLRSQEYKKYQTNKTTGNTDKRAFVETWQSFYRKKLKEVWKPAV

SEQ ID NO: 37187 - protein, 979 aa, synthetic construct
  REGION 1..979: note = engineered CasX variant
QEIKRINKIRRRLVKDSNTKKAGKTGPMKTLLVRVMTPDLRERLENLRKKPENIPQPISNTSRANLNKLLTDYTEMKKAILHVYWEEFQKDPVGLMSRVAQPASKKIDQNKLKPEMDEKGNLTTAGFACSQCGQPLFVYKLEQVSEKGKAYTNYFGRCNVAEHEKLILLAQLKPEKDSDEAVTYSLGKFGQRALDFYSIHVTKESTHPVKPLAQIAGNRYASSPVGKALSDACMGTIASFLSKYQDIIIEHQKVVKGNQKRLESLRELAGKENLEYPSVTLPPQPHTKEGVDAYNEVIARVRMWVNLNLWQKLKLSRDDAKPLLRLKGFPSFPLVERQANEVDWWDMVCNVKKLINEKKEDGKVFWQNLAGYKRQEALRPYLSSEEDRKKGKKFARYQLGDLLLHLEKKHEGEDWGKVYDEAWERIDKKVEGLSKHIKLEEERRSEDAQSKAALTDWLRAKASFVIEGLKEADKDEFCRCELKLQKWYGDLRGKPFAIEAENSILDISGFSKQYNCAFIWQKDGVKKLNLYLIINYFKGGKLRFKKIKPEAFEANRFYTVINKKSGEIVPMEVNFNFDDPNLIILPLAFGKRQGREFIWNDLLSLETGSLKLANGRVIEKTLYNRRTRQDEPALFVALTFERREVLDSSNIKPMNLIGVDRGENIPAVIALTDPEGCPLSRFKDSLGNPTHILRIGESYKEKQRTIQAKKEVEQRRAGGYSRKYASKAKNLADDMVRNTARDLLYYAVTQDAMLIFENLSRGFGRQGKRTFMAERQYTRMEDWLTAKLAYEGLPSKTYLSKTLAQYTSKTCSNCGFTITSADYDRMLEKLKKTATGWMTTINGKELKVEGQITYYNRYKRQNVVKDLSVELDRLSEESVNNDISSWTKGRSGEALSLLKKRFSHRPVQEKFVCLNCGFETHADEQAALNIARSWLFLRSQEYKKYQTNKTTGNTDKRAFVETWQSFYRKKLKEVWKPAV

SEQ ID NO: 37188 - protein, 979 aa, synthetic construct
  REGION 1..979: note = engineered CasX variant
QEIKRINKIRRRLVKDSNTKKAGKTGPMKTLLVRVMTPDLRERLENLRKKPENIPQPISNTSRANLNKLLTDYTEMKKAILHVYWEEFQKDPVGLMSRVAQPASKKIDQNKLKPEMDEKGNLTTAGFACSQCGQPLFVYKLEQVSEKGKAYTNYFGRCNVAEHEKLILLAQLKPEKDSDEAVTYSLGKFGQRALDFYSIHVTKESTHPVKPLAQIAGNRYASTPVGKALSDACMGTIASFLSKYQDIIIEHQKVVKGNQKRLESLRELAGKENLEYPSVTLPPQPHTKEGVDAYNEVIARVRMWVNLNLWQKLKLSRDDAKPLLRLKGFPSFPLVERQANEVDWWDMVCNVKKLINEKKEDGKVFWQNLAGYKRQEALRPYLSSEEDRKKGKKFARYQLGDLLLHLEKKHEGEDWGKVYDEAWERIDKKVEGLSKHIKLEEERRSEDAQSKAALTDWLRAKASFVIEGLKEADKDEFCRCELKLQKWYGDLRGKPFAIEAENSILDISGFSKQYNCAFIWQKDGVKKLNLYLIINYFKGGKLRFKKIKPEAFEANRFYTVINKKSGEIVPMEVNFNFDDPNLIILPLAFGKRQGREFIWNDLLSLETGSLKLANGRVIEKTLYNRRTRQDEPALFVALTFERREVLDSSNIKPMNLIGVDRGENIPAVIALTDPEGCPLSRFKDSLGNPTHILRIGESYKEKQRTIQAKKEVEQRRAGGYSRKYASKAKNLADDMVRNTARDLLYYAVTQDAMLIFENLSRGFGRQGKRTFMAERQYTRMEDWLTAKLAYEGLPSKTYLSKTLAQYTSKTCSNCGFTITSADYDRMLEKLKKTATGWMTTINGKELKVEGQITYYNRYKRQNVVKDLSVELDRLSEESVNNDISSWTKGRSGEALSLLKKRFSHRPVQEKFVCLNCGFETHADEQAALNIARSWLFLRSQEYKKYQTNKTTGNTDKRAFVETWQSFYRKKLKEVWKPAV

SEQ ID NO: 37189 - protein, 979 aa, synthetic construct
  REGION 1..979: note = engineered CasX variant
QEIKRINKIRRRLVKDSNTKKAGKTGPMKTLLVRVMTPDLRERLENLRKKPENIPQPISNTSRANLNKLLTDYTEMKKAILHVYWEEFQKDPVGLMSRVAQPASKKIDQNKLKPEMDEKGNLTTAGFACSQCGQPLFVYKLEQVSEKGKAYTNYFGRCNVAEHEKLILLAQLKPEKDSDEAVTYSLGKFGQRALDFYSIHVTKESTHPVKPLAQIAGNRYASAPVGKALSDACMGTIASFLSKYQDIIIEHQKVVKGNQKRLESLRELAGKENLEYPSVTLPPQPHTKEGVDAYNEVIARVRMWVNLNLWQKLKLSRDDAKPLLRLKGFPSFPLVERQANEVDWWDMVCNVKKLINEKKEDGKVFWQNLAGYKRQEALRPYLSSEEDRKKGKKFARYQLGDLLLHLEKKHEGEDWGKVYDEAWERIDKKVEGLSKHIKLEEERRSEDAQSKAALTDWLRAKASFVIEGLKEADKDEFCRCELKLQKWYGDLRGKPFAIEAENSILDISGFSKQYNCAFIWQKDGVKKLNLYLIINYFKGGKLRFKKIKPEAFEANRFYTVINKKSGEIVPMEVNFNFDDPNLIILPLAFGKRQGREFIWNDLLSLETGSLKLANGRVIEKTLYNRRTRQDEPALFVALTFERREVLDSSNIKPMNLIGVDRGENIPAVIALTDPEGCPLSRFKDSLGNPTHILRIGESYKEKQRTIQAKKEVEQRRAGGYSRKYASKAKNLADDMVRNTARDLLYYAVTQDAMLIFENLSRGFGRQGKRTFMAERQYTRMEDWLTAKLAYEGLPSKTYLSKTLAQYTSKTCSNCGFTITSADYDRMLEKLKKTATGWMTTINGKELKVEGQITYYNRYKRQNVVKDLSVELDRLSEESVNNDISSWTKGRSGEALSLLKKRFSHRPVQEKFVCLNCGFETHADEQAALNIARSWLFLRSQEYKKYQTNKTTGNTDKRAFVETWQSFYRKKLKEVWKPAV

SEQ ID NO: 37190 - protein, 979 aa, synthetic construct
  REGION 1..979: note = engineered CasX variant
QEIKRINKIRRRLVKDSNTKKAGKTGPMKTLLVRVMTPDLRERLENLRKKPENIPQPISNTSRANLNKLLTDYTEMKKAILHVYWEEFQKDPVGLMSRVAQPASKKIDQNKLKPEMDEKGNLTTAGFACSQCGQPLFVYKLEQVSEKGKAYTNYFGRCNVAEHEKLILLAQLKPEKDSDEAVTYSLGKFGQRALDFYSIHVTKESTHPVKPLAQIAGNRYASVPVGKALSDACMGTIASFLSKYQDIIIEHQKVVKGNQKRLESLRELAGKENLEYPSVTLPPQPHTKEGVDAYNEVIARVRMWVNLNLWQKLKLSRDDAKPLLRLKGFPSFPLVERQANEVDWWDMVCNVKKLINEKKEDGKVFWQNLAGYKRQEALRPYLSSEEDRKKGKKFARYQLGDLLLHLEKKHEGEDWGKVYDEAWERIDKKVEGLSKHIKLEEERRSEDAQSKAALTDWLRAKASFVIEGLKEADKDEFCRCELKLQKWYGDLRGKPFAIEAENSILDISGFSKQYNCAFIWQKDGVKKLNLYLIINYFKGGKLRFKKIKPEAFEANRFYTVINKKSGEIVPMEVNFNFDDPNLIILPLAFGKRQGREFIWNDLLSLETGSLKLANGRVIEKTLYNRRTRQDEPALFVALTFERREVLDSSNIKPMNLIGVDRGENIPAVIALTDPEGCPLSRFKDSLGNPTHILRIGESYKEKQRTIQAKKEVEQRRAGGYSRKYASKAKNLADDMVRNTARDLLYYAVTQDAMLIFENLSRGFGRQGKRTFMAERQYTRMEDWLTAKLAYEGLPSKTYLSKTLAQYTSKTCSNCGFTITSADYDRMLEKLKKTATGWMTTINGKELKVEGQITYYNRYKRQNVVKDLSVELDRLSEESVNNDISSWTKGRSGEALSLLKKRFSHRPVQEKFVCLNCGFETHADEQAALNIARSWLFLRSQEYKKYQTNKTTGNTDKRAFVETWQSFYRKKLKEVWKPAV

SEQ ID NO: 37191 - protein, 979 aa, synthetic construct
  REGION 1..979: note = engineered CasX variant
QEIKRINKIRRRLVKDSNTKKAGKTGPMKTLLVRVMTPDLRERLENLRKKPENIPQPISNTSRANLNKLLTDYTEMKKAILHVYWEEFQKDPVGLMSRVAQPASKKIDQNKLKPEMDEKGNLTTAGFACSQCGQPLFVYKLEQVSEKGKAYTNYFGRCNVAEHEKLIKLAQLKPEKDSDEAVTYSLGKFGQRALDFYSIHVTKESTHPVKPLAQIAGNRYASGPVGKALSDACMGTIASFLSKYQDIIIEHQKVVKGNQKRLESLRELAGKENLEYPSVTLPPQPHTKEGVDAYNEVIARVRMWVNLNLWQKLKLSRDDAKPLLRLKGFPSFPLVERQANEVDWWDMVCNVKKLINEKKEDGKVFWQNLAGYKRQEALRPYLSSEEDRKKGKKFARYQLGDLLLHLEKKHEGEDWGKVYDEAWERIDKKVEGLSKHIKLEEERRSEDAQSKAALTDWLRAKASFVIEGLKEADKDEFCRCELKLQKWYGDLRGKPFAIEAENSILDISGFSKQYNCAFIWQKDGVKKLNLYLIINYFKGGKLRFKKIKPEAFEANRFYTVINKKSGEIVPMEVNFNFDDPNLIILPLAFGKRQGREFIWNDLLSLETGSLKLANGRVIEKTLYNRRTRQDEPALFVALTFERREVLDSSNIKPMNLIGVDRGENIPAVIALTDPEGCPLSRFKDSLGNPTHILRIGESYKEKQRTIQAKKEVEQRRAGGYSRKYASKAKNLADDMVRNTARDLLYYAVTQDAMLIFENLSRGFGRQGKRTFMAERQYTRMEDWLTAKLAYEGLPSKTYLSKTLAQYTSKTCSNCGFTITSADYDRMLEKLKKTATGWMTTINGKELKVEGQITYYNRYKRQNVVKDLSVELDRLSEESVNNDISSWTKGRSGEALSLLKKRFSHRPVQEKFVCLNCGFETHADEQAALNIARSWLFLRSQEYKKYQTNKTTGNTDKRAFVETWQSFYRKKLKEVWKPAV

SEQ ID NO: 37192 - protein, 978 aa, synthetic construct
  REGION 1..978: note = engineered CasX variant
QEIKRINKIRRRLVKDSNTKKAGKTGPMKTLLVRVMTPDLRERLENLRKKPENIPQPISNTSRANLNKLLTDYTEMKKAILHVYWEEFQKDPVGLMSRVAQPASKKIDQNKLKPEMDEKGNLTTAGFACSQCGQPLFVYKLEQVSEKGKAYTNYFGRCNVAEHEKLILLAQLKPEKDSDEAVTYSLGKFGQRALDFYSIHVTKESTHPVKPLAQIAGNRYASPVGKALSDACMGTIASFLSKYQDIIIEHQKVVKGNQKRLESLRELAGKENLEYPSVTLPPQPHTKEGVDAYNEVIARVRMWVNLNLWQKLKLSRDDAKPLLRLKGFPSFPLVERQANEVDWWDMVCNVKKLINEKKEDGKVFWQNLAGYKRQEALRPYLSSEEDRKKGKKFARYQLGDLLLHLEKKHEGEDWGKVYDEAWERIDKKVEGLSKHIKLEEERRSEDAQSKAALTDWLRAKASFVIEGLKEADKDEFCRCELKLQKWYGDLRGKPFAIEAENSILDISGFSKQYNCAFIWQKDGVKKLNLYLIINYFKGGKLRFKKIKPEAFEANRFYTVINKKSGEIVPMEVNFNFDDPNLIILPLAFGKRQGREFIWNDLLSLETGSLKLANGRVIEKTLYNRRTRQDEPALFVALTFERREVLDSSNIKPMNLIGVDRGENIPAVIALTDPEGCPLSRFKDSLGNPTHILRIGESYKEKQRTIQAKKEVEQRRAGGYSRKYASKAKNLADDMVRNTARDLLYYAVTQDAMLIFENLSRGFGRQGKRTFMAERQYTRMEDWLTAKLAYEGLPSKTYLSKTLAQYTSKTCSNCGFTITSADYDRMLEKLKKTATGWMTTINGKELKVEGQITYYNRYKRQNVVKDLSVELDRLSEESVNNDISSWTKGRSGEALSLLKKRFSHRPVQEKFVCLNCGFETHADEQAALNIARSWLFLRSQEYKKYQTNKTTGNTDKRAFVETWQSFYRKKLKEVWKPAV

SEQ ID NO: 37193 - protein, 979 aa, synthetic construct
  REGION 1..979: note = engineered CasX variant
QEIKRINKIRRRLVKDSNTKKAGKTGPMKTLLVRVMTPDLRERLENLRKKPENIPQPISNTSRANLNKLLTDYTEMKKAILHVYWEEFQKDPVGLMSRVAQPASKKIDQNKLKPEMDEKGNLTTAGFACSQCGQPLFVYKLEQVSEKGKAYTNYFGRCNVAEHEKLILLAQLKPEKDSDEAVTYSLGKFGQRALDFYSIHVTKESTHPVKPLAQIAGNRYASYPVGKALSDACMGTIASFLSKYQDIIIEHQKVVKGNQKRLESLRELAGKENLEYPSVTLPPQPHTKEGVDAYNEVIARVRMWVNLNLWQKLKLSRDDAKPLLRLKGFPSFPLVERQANEVDWWDMVCNVKKLINEKKEDGKVFWQNLAGYKRQEALRPYLSSEEDRKKGKKFARYQLGDLLLHLEKKHEGEDWGKVYDEAWERIDKKVEGLSKHIKLEEERRSEDAQSKAALTDWLRAKASFVIEGLKEADKDEFCRCELKLQKWYGDLRGKPFAIEAENSILDISGFSKQYNCAFIWQKDGVKKLNLYLIINYFKGGKLRFKKIKPEAFEANRFYTVINKKSGEIVPMEVNFNFDDPNLIILPLAFGKRQGREFIWNDLLSLETGSLKLANGRVIEKTLYNRRTRQDEPALFVALTFERREVLDSSNIKPMNLIGVDRGENIPAVIALTDPEGCPLSRFKDSLGNPTHILRIGESYKEKQRTIQAKKEVEQRRAGGYSRKYASKAKNLADDMVRNTARDLLYYAVTQDAMLIFENLSRGFGRQGKRTFMAERQYTRMEDWLTAKLAYEGLPSKTYLSKTLAQYTSKTCSNCGFTITSADYDRVLEKLKKTATGWMTTINGKELKVEGQITYYNRYKRQNVVKDLSVELDRLSEESVNNDISSWTKGRQGEALSLLKKRFSHRPVQEKFVCLNCGFETHADEQAALNIARSWLFLRSQEYKKYQTNKTTGNTDKRAFVETWQSFYRKKLKEVWKPAV

SEQ ID NO: 37194 - protein, 979 aa, synthetic construct
  REGION 1..979: note = engineered CasX variant
QEIKRINKIRRRLVKDSNTKKAGKTGPMKTLLVRVMTPDLRERLENLRKKPENIPQPISNTSRANLNKLLTDYTEMKKAILHVYWEEFQKDPVGLMSRVAQPASKKIDQNKLKPEMDEKGNLTTAGFACSQCGQPLFVYKLEQVSEKGKAYTNYFGRCNVAEHEKLILLAQLKPEKDSDEAVTYSLGKFGQRALDFYSIHVTKESTHPVKPLAQIAGNRYASHPVGKALSDACMGTIASFLSKYQDIIIEHQKVVKGNQKRLESLRELAGKENLEYPSVTLPPQPHTKEGVDAYNEVIARVRMWVNLNLWQKLKLSRDDAKPLLRLKGFPSFPLVERQANEVDWWDMVCNVKKLINEKKEDGKVFWQNLAGYKRQEALRPYLSSEEDRKKGKKFARYQLGDLLLHLEKKHEGEDWGKVYDEAWERIDKKVEGLSKHIKLEEERRSEDAQSKAALTDWLRAKASFVIEGLKEADKDEFCRCELKLQKWYGDLRGKPFAIEAENSILDISGFSKQYNCAFIWQKDGVKKLNLYLIINYFKGGKLRFKKIKPEAFEANRFYTVINKKSGEIVPMEVNFNFDDPNLIILPLAFGKRQGREFIWNDLLSLETGSLKLANGRVIEKTLYNRRTRQDEPALFVALTFERREVLDSSNIKPMNLIGVDRGENIPAVIALTDPEGCPLSRFKDSLGNPTHILRIGESYKEKQRTIQAKKEVEQRRAGGYSRKYASKAKNLADDMVRNTARDLLYYAVTQDAMLIFENLSRGFGRQGKRTFMAERQYTRMEDWLTAKLAYEGLPSKTYLSKTLAQYTSKTCSNCGFTITSADYDRVLEKLKKTATGWMTTINGKELKVEGQITYYNRYKRQNVVKDLSVELDRLSEESVNNDISSWTKGRQGEALSLLKKRFSHRPVQEKFVCLNCGFETHADEQAALNIARSWLFLRSQEYKKYQTNKTTGNTDKRAFVETWQSFYRKKLKEVWKPAV

SEQ ID NO: 37195 - protein, 979 aa, synthetic construct
  REGION 1..979: note = engineered CasX variant
QEIKRINKIRRRLVKDSNTKKAGKTGPMKTLLVRVMTPDLRERLENLRKKPENIPQPISNTSRANLNKLLTDYTEMKKAILHVYWEEFQKDPVGLMSRVAQPASKKIDQNKLKPEMDEKGNLTTAGFACSQCGQPLFVYKLEQVSEKGKAYTNYFGRCNVAEHEKLILLAQLKPEKDSDEAVTYSLGKFGQRALDFYSIHVTKESTHPVKPLAQIAGNRYASSPVGKALSDACMGTIASFLSKYQDIIIEHQKVVKGNQKRLESLRELAGKENLEYPSVTLPPQPHTKEGVDAYNEVIARVRMWVNLNLWQKLKLSRDDAKPLLRLKGFPSFPLVERQANEVDWWDMVCNVKKLINEKKEDGKVFWQNLAGYKRQEALRPYLSSEEDRKKGKKFARYQLGDLLLHLEKKHEGEDWGKVYDEAWERIDKKVEGLSKHIKLEEERRSEDAQSKAALTDWLRAKASFVIEGLKEADKDEFCRCELKLQKWYGDLRGKPFAIEAENSILDISGFSKQYNCAFIWQKDGVKKLNLYLIINYFKGGKLRFKKIKPEAFEANRFYTVINKKSGEIVPMEVNFNFDDPNLIILPLAFGKRQGREFIWNDLLSLETGSLKLANGRVIEKTLYNRRTRQDEPALFVALTFERREVLDSSNIKPMNLIGVDRGENIPAVIALTDPEGCPLSRFKDSLGNPTHILRIGESYKEKQRTIQAKKEVEQRRAGGYSRKYASKAKNLADDMVRNTARDLLYYAVTQDAMLIFENLSRGFGRQGKRTFMAERQYTRMEDWLTAKLAYEGLPSKTYLSKTLAQYTSKTCSNCGFTITSADYDRVLEKLKKTATGWMTTINGKELKVEGQITYYNRYKRQNVVKDLSVELDRLSEESVNNDISSWTKGRQGEALSLLKKRFSHRPVQEKFVCLNCGFETHADEQAALNIARSWLFLRSQEYKKYQTNKTTGNTDKRAFVETWQSFYRKKLKEVWKPAV

SEQ ID NO: 37196 - protein, 979 aa, synthetic construct
  REGION 1..979: note = engineered CasX variant
QEIKRINKIRRRLVKDSNTKKAGKTGPMKTLLVRVMTPDLRERLENLRKKPENIPQPISNTSRANLNKLLTDYTEMKKAILHVYWEEFQKDPVGLMSRVAQPASKKIDQNKLKPEMDEKGNLTTAGFACSQCGQPLFVYKLEQVSEKGKAYTNYFGRCNVAEHEKLILLAQLKPEKDSDEAVTYSLGKFGQRALDFYSIHVTKESTHPVKPLAQIAGNRYASTPVGKALSDACMGTIASFLSKYQDIIIEHQKVVKGNQKRLESLRELAGKENLEYPSVTLPPQPHTKEGVDAYNEVIARVRMWVNLNLWQKLKLSRDDAKPLLRLKGFPSFPLVERQANEVDWWDMVCNVKKLINEKKEDGKVFWQNLAGYKRQEALRPYLSSEEDRKKGKKFARYQLGDLLLHLEKKHEGEDWGKVYDEAWERIDKKVEGLSKHIKLEEERRSEDAQSKAALTDWLRAKASFVIEGLKEADKDEFCRCELKLQKWYGDLRGKPFAIEAENSILDISGFSKQYNCAFIWQKDGVKKLNLYLIINYFKGGKLRFKKIKPEAFEANRFYTVINKKSGEIVPMEVNFNFDDPNLIILPLAFGKRQGREFIWNDLLSLETGSLKLANGRVIEKTLYNRRTRQDEPALFVALTFERREVLDSSNIKPMNLIGVDRGENIPAVIALTDPEGCPLSRFKDSLGNPTHILRIGESYKEKQRTIQAKKEVEQRRAGGYSRKYASKAKNLADDMVRNTARDLLYYAVTQDAMLIFENLSRGFGRQGKRTFMAERQYTRMEDWLTAKLAYEGLPSKTYLSKTLAQYTSKTCSNCGFTITSADYDRVLEKLKKTATGWMTTINGKELKVEGQITYYNRYKRQNVVKDLSVELDRLSEESVNNDISSWTKGRQGEALSLLKKRFSHRPVQEKFVCLNCGFETHADEQAALNIARSWLFLRSQEYKKYQTNKTTGNTDKRAFVETWQSFYRKKLKEVWKPAV

SEQ ID NO: 37197 - protein, 979 aa, synthetic construct
  REGION 1..979: note = engineered CasX variant
QEIKRINKIRRRLVKDSNTKKAGKTGPMKTLLVRVMTPDLRERLENLRKKPENIPQPISNTSRANLNKLLTDYTEMKKAILHVYWEEFQKDPVGLMSRVAQPASKKIDQNKLKPEMDEKGNLTTAGFACSQCGQPLFVYKLEQVSEKGKAYTNYFGRCNVAEHEKLILLAQLKPEKDSDEAVTYSLGKFGQRALDFYSIHVTKESTHPVKPLAQIAGNRYASAPVGKALSDACMGTIASFLSKYQDIIIEHQKVVKGNQKRLESLRELAGKENLEYPSVTLPPQPHTKEGVDAYNEVIARVRMWVNLNLWQKLKLSRDDAKPLLRLKGFPSFPLVERQANEVDWWDMVCNVKKLINEKKEDGKVFWQNLAGYKRQEALRPYLSSEEDRKKGKKFARYQLGDLLLHLEKKHEGEDWGKVYDEAWERIDKKVEGLSKHIKLEEERRSEDAQSKAALTDWLRAKASFVIEGLKEADKDEFCRCELKLQKWYGDLRGKPFAIEAENSILDISGFSKQYNCAFIWQKDGVKKLNLYLIINYFKGGKLRFKKIKPEAFEANRFYTVINKKSGEIVPMEVNFNFDDPNLIILPLAFGKRQGREFIWNDLLSLETGSLKLANGRVIEKTLYNRRTRQDEPALFVALTFERREVLDSSNIKPMNLIGVDRGENIPAVIALTDPEGCPLSRFKDSLGNPTHILRIGESYKEKQRTIQAKKEVEQRRAGGYSRKYASKAKNLADDMVRNTARDLLYYAVTQDAMLIFENLSRGFGRQGKRTFMAERQYTRMEDWLTAKLAYEGLPSKTYLSKTLAQYTSKTCSNCGFTITSADYDRVLEKLKKTATGWMTTINGKELKVEGQITYYNRYKRQNVVKDLSVELDRLSEESVNNDISSWTKGRQGEALSLLKKRFSHRPVQEKFVCLNCGFETHADEQAALNIARSWLFLRSQEYKKYQTNKTTGNTDKRAFVETWQSFYRKKLKEVWKPAV

SEQ ID NO: 37198 - protein, 979 aa, synthetic construct
  REGION 1..979: note = engineered CasX variant
QEIKRINKIRRRLVKDSNTKKAGKTGPMKTLLVRVMTPDLRERLENLRKKPENIPQPISNTSRANLNKLLTDYTEMKKAILHVYWEEFQKDPVGLMSRVAQPASKKIDQNKLKPEMDEKGNLTTAGFACSQCGQPLFVYKLEQVSEKGKAYTNYFGRCNVAEHEKLILLAQLKPEKDSDEAVTYSLGKFGQRALDFYSIHVTKESTHPVKPLAQIAGNRYASVPVGKALSDACMGTIASFLSKYQDIIIEHQKVVKGNQKRLESLRELAGKENLEYPSVTLPPQPHTKEGVDAYNEVIARVRMWVNLNLWQKLKLSRDDAKPLLRLKGFPSFPLVERQANEVDWWDMVCNVKKLINEKKEDGKVFWQNLAGYKRQEALRPYLSSEEDRKKGKKFARYQLGDLLLHLEKKHEGEDWGKVYDEAWERIDKKVEGLSKHIKLEEERRSEDAQSKAALTDWLRAKASFVIEGLKEADKDEFCRCELKLQKWYGDLRGKPFAIEAENSILDISGFSKQYNCAFIWQKDGVKKLNLYLIINYFKGGKLRFKKIKPEAFEANRFYTVINKKSGEIVPMEVNFNFDDPNLIILPLAFGKRQGREFIWNDLLSLETGSLKLANGRVIEKTLYNRRTRQDEPALFVALTFERREVLDSSNIKPMNLIGVDRGENIPAVIALTDPEGCPLSRFKDSLGNPTHILRIGESYKEKQRTIQAKKEVEQRRAGGYSRKYASKAKNLADDMVRNTARDLLYYAVTQDAMLIFENLSRGFGRQGKRTFMAERQYTRMEDWLTAKLAYEGLPSKTYLSKTLAQYTSKTCSNCGFTITSADYDRVLEKLKKTATGWMTTINGKELKVEGQITYYNRYKRQNVVKDLSVELDRLSEESVNNDISSWTKGRQGEALSLLKKRFSHRPVQEKFVCLNCGFETHADEQAALNIARSWLFLRSQEYKKYQTNKTTGNTDKRAFVETWQSFYRKKLKEVWKPAV

SEQ ID NO: 37199 - protein, 979 aa, synthetic construct
  REGION 1..979: note = engineered CasX variant
QEIKRINKIRRRLVKDSNTKKAGKTGPMKTLLVRVMTPDLRERLENLRKKPENIPQPISNTSRANLNKLLTDYTEMKKAILHVYWEEFQKDPVGLMSRVAQPASKKIDQNKLKPEMDEKGNLTTAGFACSQCGQPLFVYKLEQVSEKGKAYTNYFGRCNVAEHEKLIKLAQLKPEKDSDEAVTYSLGKFGQRALDFYSIHVTKESTHPVKPLAQIAGNRYASGPVGKALSDACMGTIASFLSKYQDIIIEHQKVVKGNQKRLESLRELAGKENLEYPSVTLPPQPHTKEGVDAYNEVIARVRMWVNLNLWQKLKLSRDDAKPLLRLKGFPSFPLVERQANEVDWWDMVCNVKKLINEKKEDGKVFWQNLAGYKRQEALRPYLSSEEDRKKGKKFARYQLGDLLLHLEKKHEGEDWGKVYDEAWERIDKKVEGLSKHIKLEEERRSEDAQSKAALTDWLRAKASFVIEGLKEADKDEFCRCELKLQKWYGDLRGKPFAIEAENSILDISGFSKQYNCAFIWQKDGVKKLNLYLIINYFKGGKLRFKKIKPEAFEANRFYTVINKKSGEIVPMEVNFNFDDPNLIILPLAFGKRQGREFIWNDLLSLETGSLKLANGRVIEKTLYNRRTRQDEPALFVALTFERREVLDSSNIKPMNLIGVDRGENIPAVIALTDPEGCPLSRFKDSLGNPTHILRIGESYKEKQRTIQAKKEVEQRRAGGYSRKYASKAKNLADDMVRNTARDLLYYAVTQDAMLIFENLSRGFGRQGKRTFMAERQYTRMEDWLTAKLAYEGLPSKTYLSKTLAQYTSKTCSNCGFTITSADYDRVLEKLKKTATGWMTTINGKELKVEGQITYYNRYKRQNVVKDLSVELDRLSEESVNNDISSWTKGRQGEALSLLKKRFSHRPVQEKFVCLNCGFETHADEQAALNIARSWLFLRSQEYKKYQTNKTTGNTDKRAFVETWQSFYRKKLKEVWKPAV

SEQ ID NO: 37200 - protein, 978 aa, synthetic construct
  REGION 1..978: note = engineered CasX variant
QEIKRINKIRRRLVKDSNTKKAGKTGPMKTLLVRVMTPDLRERLENLRKKPENIPQPISNTSRANLNKLLTDYTEMKKAILHVYWEEFQKDPVGLMSRVAQPASKKIDQNKLKPEMDEKGNLTTAGFACSQCGQPLFVYKLEQVSEKGKAYTNYFGRCNVAEHEKLILLAQLKPEKDSDEAVTYSLGKFGQRALDFYSIHVTKESTHPVKPLAQIAGNRYASPVGKALSDACMGTIASFLSKYQDIIIEHQKVVKGNQKRLESLRELAGKENLEYPSVTLPPQPHTKEGVDAYNEVIARVRMWVNLNLWQKLKLSRDDAKPLLRLKGFPSFPLVERQANEVDWWDMVCNVKKLINEKKEDGKVFWQNLAGYKRQEALRPYLSSEEDRKKGKKFARYQLGDLLLHLEKKHEGEDWGKVYDEAWERIDKKVEGLSKHIKLEEERRSEDAQSKAALTDWLRAKASFVIEGLKEADKDEFCRCELKLQKWYGDLRGKPFAIEAENSILDISGFSKQYNCAFIWQKDGVKKLNLYLIINYFKGGKLRFKKIKPEAFEANRFYTVINKKSGEIVPMEVNFNFDDPNLIILPLAFGKRQGREFIWNDLLSLETGSLKLANGRVIEKTLYNRRTRQDEPALFVALTFERREVLDSSNIKPMNLIGVDRGENIPAVIALTDPEGCPLSRFKDSLGNPTHILRIGESYKEKQRTIQAKKEVEQRRAGGYSRKYASKAKNLADDMVRNTARDLLYYAVTQDAMLIFENLSRGFGRQGKRTFMAERQYTRMEDWLTAKLAYEGLPSKTYLSKTLAQYTSKTCSNCGFTITSADYDRVLEKLKKTATGWMTTINGKELKVEGQITYYNRYKRQNVVKDLSVELDRLSEESVNNDISSWTKGRQGEALSLLKKRFSHRPVQEKFVCLNCGFETHADEQAALNIARSWLFLRSQEYKKYQTNKTTGNTDKRAFVETWQSFYRKKLKEVWKPAV

SEQ ID NO: 37201 - protein, 979 aa, synthetic construct
  REGION 1..979: note = engineered CasX variant
QEIKRINKIRRRLVKDSNTKKAGKTGPMKTLLVRVMTPDLRERLENLRKKPENIPQPISNTSRANLNKLLTDYTEMKKAILHVYWEEFQKDPVGLMSRVAQPASKKIDQNKLKPEMDEKGNLTTAGFACSQCGQPLFVYKLEQVSEKGKAYTNYFGRCNVAEHEKLILLAQLKPEKDSDEAVTYSLGKFGQRALDFYSIHVTKESTHPVKPLAQIAGNRYASYPVGKALSDACMGTIASFLSKYQDIIIEHQKVVKGNQKRLESLRELAGKENLEYPSVTLPPQPHTKEGVDAYNEVIARVRMWVNLNLWQKLKLSRDDAKPLLRLKGFPSFPLVERQANEVDWWDMVCNVKKLINEKKEDGKVFWQNLAGYKRQEALRPYLSSEEDRKKGKKFARYQLGDLLLHLEKKHEGEDWGKVYDEAWERIDKKVEGLSKHIKLEEERRSEDAQSKAALTDWLRAKASFVIEGLKEADKDEFCRCELKLQKWYGDLRGKPFAIEAENSILDISGFSKQYNCAFIWQKDGVKKLNLYLIINYFKGGKLRFKKIKPEAFEANRFYTVINKKSGEIVPMEVNFNFDDPNLIILPLAFGKRQGREFIWNDLLSLETGSLKLANGRVIEKTLYNRRTRQDEPALFVALTFERREVLDSSNIKPMNLIGVDRGENIPAVIALTDPEGCPLSRFKDSLGNPTHILRIGESYKEKQRTIQAKKEVEQRRAGGYSRKYASKAKNLADDMVRNTARDLLYYAVTQDAMLIFENLSRGFGRQGKRTFMAERQYTRMEDWLTAKLAYEGLPSKTYLSKTLAQYTSKTCSNCGFTITSADYDRVLEKLKKTATGWMTTINGKELKVEGQITYYNRYKRQNVVKDLSVELDRLSEESVNNDISSWTKGRSGEALSLLKKRFSHRPVQEKFVCLNCEFETHADEQAALNIARSWLFLRSQEYKKYQTNKTTGNTDKRAFVETWQSFYRKKLKEVWKPAV

SEQ ID NO: 37202 - protein, 979 aa, synthetic construct
  REGION 1..979: note = engineered CasX variant
QEIKRINKIRRRLVKDSNTKKAGKTGPMKTLLVRVMTPDLRERLENLRKKPENIPQPISNTSRANLNKLLTDYTEMKKAILHVYWEEFQKDPVGLMSRVAQPASKKIDQNKLKPEMDEKGNLTTAGFACSQCGQPLFVYKLEQVSEKGKAYTNYFGRCNVAEHEKLILLAQLKPEKDSDEAVTYSLGKFGQRALDFYSIHVTKESTHPVKPLAQIAGNRYASHPVGKALSDACMGTIASFLSKYQDIIIEHQKVVKGNQKRLESLRELAGKENLEYPSVTLPPQPHTKEGVDAYNEVIARVRMWVNLNLWQKLKLSRDDAKPLLRLKGFPSFPLVERQANEVDWWDMVCNVKKLINEKKEDGKVFWQNLAGYKRQEALRPYLSSEEDRKKGKKFARYQLGDLLLHLEKKHEGEDWGKVYDEAWERIDKKVEGLSKHIKLEEERRSEDAQSKAALTDWLRAKASFVIEGLKEADKDEFCRCELKLQKWYGDLRGKPFAIEAENSILDISGFSKQYNCAFIWQKDGVKKLNLYLIINYFKGGKLRFKKIKPEAFEANRFYTVINKKSGEIVPMEVNFNFDDPNLIILPLAFGKRQGREFIWNDLLSLETGSLKLANGRVIEKTLYNRRTRQDEPALFVALTFERREVLDSSNIKPMNLIGVDRGENIPAVIALTDPEGCPLSRFKDSLGNPTHILRIGESYKEKQRTIQAKKEVEQRRAGGYSRKYASKAKNLADDMVRNTARDLLYYAVTQDAMLIFENLSRGFGRQGKRTFMAERQYTRMEDWLTAKLAYEGLPSKTYLSKTLAQYTSKTCSNCGFTITSADYDRVLEKLKKTATGWMTTINGKELKVEGQITYYNRYKRQNVVKDLSVELDRLSEESVNNDISSWTKGRSGEALSLLKKRFSHRPVQEKFVCLNCEFETHADEQAALNIARSWLFLRSQEYKKYQTNKTTGNTDKRAFVETWQSFYRKKLKEVWKPAV

SEQ ID NO: 37203 - protein, 979 aa, synthetic construct
  REGION 1..979: note = engineered CasX variant
QEIKRINKIRRRLVKDSNTKKAGKTGPMKTLLVRVMTPDLRERLENLRKKPENIPQPISNTSRANLNKLLTDYTEMKKAILHVYWEEFQKDPVGLMSRVAQPASKKIDQNKLKPEMDEKGNLTTAGFACSQCGQPLFVYKLEQVSEKGKAYTNYFGRCNVAEHEKLILLAQLKPEKDSDEAVTYSLGKFGQRALDFYSIHVTKESTHPVKPLAQIAGNRYASSPVGKALSDACMGTIASFLSKYQDIIIEHQKVVKGNQKRLESLRELAGKENLEYPSVTLPPQPHTKEGVDAYNEVIARVRMWVNLNLWQKLKLSRDDAKPLLRLKGFPSFPLVERQANEVDWWDMVCNVKKLINEKKEDGKVFWQNLAGYKRQEALRPYLSSEEDRKKGKKFARYQLGDLLLHLEKKHEGEDWGKVYDEAWERIDKKVEGLSKHIKLEEERRSEDAQSKAALTDWLRAKASFVIEGLKEADKDEFCRCELKLQKWYGDLRGKPFAIEAENSILDISGFSKQYNCAFIWQKDGVKKLNLYLIINYFKGGKLRFKKIKPEAFEANRFYTVINKKSGEIVPMEVNFNFDDPNLIILPLAFGKRQGREFIWNDLLSLETGSLKLANGRVIEKTLYNRRTRQDEPALFVALTFERREVLDSSNIKPMNLIGVDRGENIPAVIALTDPEGCPLSRFKDSLGNPTHILRIGESYKEKQRTIQAKKEVEQRRAGGYSRKYASKAKNLADDMVRNTARDLLYYAVTQDAMLIFENLSRGFGRQGKRTFMAERQYTRMEDWLTAKLAYEGLPSKTYLSKTLAQYTSKTCSNCGFTITSADYDRVLEKLKKTATGWMTTINGKELKVEGQITYYNRYKRQNVVKDLSVELDRLSEESVNNDISSWTKGRSGEALSLLKKRFSHRPVQEKFVCLNCEFETHADEQAALNIARSWLFLRSQEYKKYQTNKTTGNTDKRAFVETWQSFYRKKLKEVWKPAV

SEQ ID NO: 37204 - protein, 979 aa, synthetic construct
  REGION 1..979: note = engineered CasX variant
QEIKRINKIRRRLVKDSNTKKAGKTGPMKTLLVRVMTPDLRERLENLRKKPENIPQPISNTSRANLNKLLTDYTEMKKAILHVYWEEFQKDPVGLMSRVAQPASKKIDQNKLKPEMDEKGNLTTAGFACSQCGQPLFVYKLEQVSEKGKAYTNYFGRCNVAEHEKLILLAQLKPEKDSDEAVTYSLGKFGQRALDFYSIHVTKESTHPVKPLAQIAGNRYASTPVGKALSDACMGTIASFLSKYQDIIIEHQKVVKGNQKRLESLRELAGKENLEYPSVTLPPQPHTKEGVDAYNEVIARVRMWVNLNLWQKLKLSRDDAKPLLRLKGFPSFPLVERQANEVDWWDMVCNVKKLINEKKEDGKVFWQNLAGYKRQEALRPYLSSEEDRKKGKKFARYQLGDLLLHLEKKHEGEDWGKVYDEAWERIDKKVEGLSKHIKLEEERRSEDAQSKAALTDWLRAKASFVIEGLKEADKDEFCRCELKLQKWYGDLRGKPFAIEAENSILDISGFSKQYNCAFIWQKDGVKKLNLYLIINYFKGGKLRFKKIKPEAFEANRFYTVINKKSGEIVPMEVNFNFDDPNLIILPLAFGKRQGREFIWNDLLSLETGSLKLANGRVIEKTLYNRRTRQDEPALFVALTFERREVLDSSNIKPMNLIGVDRGENIPAVIALTDPEGCPLSRFKDSLGNPTHILRIGESYKEKQRTIQAKKEVEQRRAGGYSRKYASKAKNLADDMVRNTARDLLYYAVTQDAMLIFENLSRGFGRQGKRTFMAERQYTRMEDWLTAKLAYEGLPSKTYLSKTLAQYTSKTCSNCGFTITSADYDRVLEKLKKTATGWMTTINGKELKVEGQITYYNRYKRQNVVKDLSVELDRLSEESVNNDISSWTKGRSGEALSLLKKRFSHRPVQEKFVCLNCEFETHADEQAALNIARSWLFLRSQEYKKYQTNKTTGNTDKRAFVETWQSFYRKKLKEVWKPAV

SEQ ID NO: 37205 - protein, 979 aa, synthetic construct
  REGION 1..979: note = engineered CasX variant
QEIKRINKIRRRLVKDSNTKKAGKTGPMKTLLVRVMTPDLRERLENLRKKPENIPQPISNTSRANLNKLLTDYTEMKKAILHVYWEEFQKDPVGLMSRVAQPASKKIDQNKLKPEMDEKGNLTTAGFACSQCGQPLFVYKLEQVSEKGKAYTNYFGRCNVAEHEKLILLAQLKPEKDSDEAVTYSLGKFGQRALDFYSIHVTKESTHPVKPLAQIAGNRYASAPVGKALSDACMGTIASFLSKYQDIIIEHQKVVKGNQKRLESLRELAGKENLEYPSVTLPPQPHTKEGVDAYNEVIARVRMWVNLNLWQKLKLSRDDAKPLLRLKGFPSFPLVERQANEVDWWDMVCNVKKLINEKKEDGKVFWQNLAGYKRQEALRPYLSSEEDRKKGKKFARYQLGDLLLHLEKKHEGEDWGKVYDEAWERIDKKVEGLSKHIKLEEERRSEDAQSKAALTDWLRAKASFVIEGLKEADKDEFCRCELKLQKWYGDLRGKPFAIEAENSILDISGFSKQYNCAFIWQKDGVKKLNLYLIINYFKGGKLRFKKIKPEAFEANRFYTVINKKSGEIVPMEVNFNFDDPNLIILPLAFGKRQGREFIWNDLLSLETGSLKLANGRVIEKTLYNRRTRQDEPALFVALTFERREVLDSSNIKPMNLIGVDRGENIPAVIALTDPEGCPLSRFKDSLGNPTHILRIGESYKEKQRTIQAKKEVEQRRAGGYSRKYASKAKNLADDMVRNTARDLLYYAVTQDAMLIFENLSRGFGRQGKRTFMAERQYTRMEDWLTAKLAYEGLPSKTYLSKTLAQYTSKTCSNCGFTITSADYDRVLEKLKKTATGWMTTINGKELKVEGQITYYNRYKRQNVVKDLSVELDRLSEESVNNDISSWTKGRSGEALSLLKKRFSHRPVQEKFVCLNCEFETHADEQAALNIARSWLFLRSQEYKKYQTNKTTGNTDKRAFVETWQSFYRKKLKEVWKPAV

SEQ ID NO: 37206 - protein, 979 aa, synthetic construct
  REGION 1..979: note = engineered CasX variant
QEIKRINKIRRRLVKDSNTKKAGKTGPMKTLLVRVMTPDLRERLENLRKKPENIPQPISNTSRANLNKLLTDYTEMKKAILHVYWEEFQKDPVGLMSRVAQPASKKIDQNKLKPEMDEKGNLTTAGFACSQCGQPLFVYKLEQVSEKGKAYTNYFGRCNVAEHEKLILLAQLKPEKDSDEAVTYSLGKFGQRALDFYSIHVTKESTHPVKPLAQIAGNRYASVPVGKALSDACMGTIASFLSKYQDIIIEHQKVVKGNQKRLESLRELAGKENLEYPSVTLPPQPHTKEGVDAYNEVIARVRMWVNLNLWQKLKLSRDDAKPLLRLKGFPSFPLVERQANEVDWWDMVCNVKKLINEKKEDGKVFWQNLAGYKRQEALRPYLSSEEDRKKGKKFARYQLGDLLLHLEKKHEGEDWGKVYDEAWERIDKKVEGLSKHIKLEEERRSEDAQSKAALTDWLRAKASFVIEGLKEADKDEFCRCELKLQKWYGDLRGKPFAIEAENSILDISGFSKQYNCAFIWQKDGVKKLNLYLIINYFKGGKLRFKKIKPEAFEANRFYTVINKKSGEIVPMEVNFNFDDPNLIILPLAFGKRQGREFIWNDLLSLETGSLKLANGRVIEKTLYNRRTRQDEPALFVALTFERREVLDSSNIKPMNLIGVDRGENIPAVIALTDPEGCPLSRFKDSLGNPTHILRIGESYKEKQRTIQAKKEVEQRRAGGYSRKYASKAKNLADDMVRNTARDLLYYAVTQDAMLIFENLSRGFGRQGKRTFMAERQYTRMEDWLTAKLAYEGLPSKTYLSKTLAQYTSKTCSNCGFTITSADYDRVLEKLKKTATGWMTTINGKELKVEGQITYYNRYKRQNVVKDLSVELDRLSEESVNNDISSWTKGRSGEALSLLKKRFSHRPVQEKFVCLNCEFETHADEQAALNIARSWLFLRSQEYKKYQTNKTTGNTDKRAFVETWQSFYRKKLKEVWKPAV

SEQ ID NO: 37207 - protein, 979 aa, synthetic construct
  REGION 1..979: note = engineered CasX variant
QEIKRINKIRRRLVKDSNTKKAGKTGPMKTLLVRVMTPDLRERLENLRKKPENIPQPISNTSRANLNKLLTDYTEMKKAILHVYWEEFQKDPVGLMSRVAQPASKKIDQNKLKPEMDEKGNLTTAGFACSQCGQPLFVYKLEQVSEKGKAYTNYFGRCNVAEHEKLIKLAQLKPEKDSDEAVTYSLGKFGQRALDFYSIHVTKESTHPVKPLAQIAGNRYASGPVGKALSDACMGTIASFLSKYQDIIIEHQKVVKGNQKRLESLRELAGKENLEYPSVTLPPQPHTKEGVDAYNEVIARVRMWVNLNLWQKLKLSRDDAKPLLRLKGFPSFPLVERQANEVDWWDMVCNVKKLINEKKEDGKVFWQNLAGYKRQEALRPYLSSEEDRKKGKKFARYQLGDLLLHLEKKHEGEDWGKVYDEAWERIDKKVEGLSKHIKLEEERRSEDAQSKAALTDWLRAKASFVIEGLKEADKDEFCRCELKLQKWYGDLRGKPFAIEAENSILDISGFSKQYNCAFIWQKDGVKKLNLYLIINYFKGGKLRFKKIKPEAFEANRFYTVINKKSGEIVPMEVNFNFDDPNLIILPLAFGKRQGREFIWNDLLSLETGSLKLANGRVIEKTLYNRRTRQDEPALFVALTFERREVLDSSNIKPMNLIGVDRGENIPAVIALTDPEGCPLSRFKDSLGNPTHILRIGESYKEKQRTIQAKKEVEQRRAGGYSRKYASKAKNLADDMVRNTARDLLYYAVTQDAMLIFENLSRGFGRQGKRTFMAERQYTRMEDWLTAKLAYEGLPSKTYLSKTLAQYTSKTCSNCGFTITSADYDRVLEKLKKTATGWMTTINGKELKVEGQITYYNRYKRQNVVKDLSVELDRLSEESVNNDISSWTKGRSGEALSLLKKRFSHRPVQEKFVCLNCEFETHADEQAALNIARSWLFLRSQEYKKYQTNKTTGNTDKRAFVETWQSFYRKKLKEVWKPAV

SEQ ID NO: 37208 - protein, 978 aa, synthetic construct
  REGION 1..978: note = engineered CasX variant
QEIKRINKIRRRLVKDSNTKKAGKTGPMKTLLVRVMTPDLRERLENLRKKPENIPQPISNTSRANLNKLLTDYTEMKKAILHVYWEEFQKDPVGLMSRVAQPASKKIDQNKLKPEMDEKGNLTTAGFACSQCGQPLFVYKLEQVSEKGKAYTNYFGRCNVAEHEKLILLAQLKPEKDSDEAVTYSLGKFGQRALDFYSIHVTKESTHPVKPLAQIAGNRYASPVGKALSDACMGTIASFLSKYQDIIIEHQKVVKGNQKRLESLRELAGKENLEYPSVTLPPQPHTKEGVDAYNEVIARVRMWVNLNLWQKLKLSRDDAKPLLRLKGFPSFPLVERQANEVDWWDMVCNVKKLINEKKEDGKVFWQNLAGYKRQEALRPYLSSEEDRKKGKKFARYQLGDLLLHLEKKHEGEDWGKVYDEAWERIDKKVEGLSKHIKLEEERRSEDAQSKAALTDWLRAKASFVIEGLKEADKDEFCRCELKLQKWYGDLRGKPFAIEAENSILDISGFSKQYNCAFIWQKDGVKKLNLYLIINYFKGGKLRFKKIKPEAFEANRFYTVINKKSGEIVPMEVNFNFDDPNLIILPLAFGKRQGREFIWNDLLSLETGSLKLANGRVIEKTLYNRRTRQDEPALFVALTFERREVLDSSNIKPMNLIGVDRGENIPAVIALTDPEGCPLSRFKDSLGNPTHILRIGESYKEKQRTIQAKKEVEQRRAGGYSRKYASKAKNLADDMVRNTARDLLYYAVTQDAMLIFENLSRGFGRQGKRTFMAERQYTRMEDWLTAKLAYEGLPSKTYLSKTLAQYTSKTCSNCGFTITSADYDRVLEKLKKTATGWMTTINGKELKVEGQITYYNRYKRQNVVKDLSVELDRLSEESVNNDISSWTKGRSGEALSLLKKRFSHRPVQEKFVCLNCEFETHADEQAALNIARSWLFLRSQEYKKYQTNKTTGNTDKRAFVETWQSFYRKKLKEVWKPAV

SEQ ID NO: 37209 - protein, 980 aa, synthetic construct
  REGION 1..980: note = engineered CasX variant
QEIKRINKIRRRLVKDSNTKKAGKTGPMKTLLVRVMTPDLRERLENLRKKPENIPQPISNTSRANLNKLLTDYTEMKKAILHVYWEEFQKDPVGLMSRVAQPASKKIDQNKLKPEMDEKGNLTTAGFACSQCGQPLFVYKLEQVSEKGKAYTNYFGRCNVAEHEKLILLAQLKPEKDSDEAVTYSLGKFGQRALDFYSIHVTKESTHPVKPLAQIAGNRYASYPVGKALSDACMGTIASFLSKYQDIIIEHQKVVKGNQKRLESLRELAGKENLEYPSVTLPPQPHTKEGVDAYNEVIARVRMWVNLNLWQKLKLSRDDAKPLLRLKGFPSFPLVERQANEVDWWDMVCNVKKLINEKKEDGKVFWQNLAGYKRQEALRPYLSSEEDRKKGKKFARYQLGDLLLHLEKKHEGEDWGKVYDEAWERIDKKVEGLSKHIKLEEERRSEDAQSKAALTDWLRAKASFVIEGLKEADKDEFCRCELKLQKWYGDLRGKPFAIEAENSILDISGFSKQYNCAFIWQKDGVKKLNLYLIINYFKGGKLRFKKIKPEAFEANRFYTVINKKSGEIVPMEVNFNFDDPNLIILPLAFGKRQGREFIWNDLLSLETGSLKLANGRVIEKTLYNRRTRQDEPALFVALTFERREVLDSSNIKPMNLIGVDRGENIPAVIALTDPEGCPLSRFKDSLGNPTHILRIGESYKEKQRTIQAKKEVEQRRAGGYSRKYASKAKNLADDMVRNTARDLLYYAVTQDAMLIFENLSRGFGRQGKRTFMAERQYTRMEDWLTAKLAYEGLPSKTYLSKTLAQYTSKTCSNCGFTITSADYDRVLEKLKKTATGWMTTINGKELKVEGQITYYNRYKRQNVVKDLSVELDRLSEESVNNDISSWTKGRSGEALSLLKKRFSHRPVQEKFVCLNCGFETHADEQAALNIARSWLFLRSQEYKKYQTNKTSTGNTDKRAFVETWQSFYRKKLKEVWKPAV

SEQ ID NO: 37210 - protein, 980 aa, synthetic construct
  REGION 1..980: note = engineered CasX variant
QEIKRINKIRRRLVKDSNTKKAGKTGPMKTLLVRVMTPDLRERLENLRKKPENIPQPISNTSRANLNKLLTDYTEMKKAILHVYWEEFQKDPVGLMSRVAQPASKKIDQNKLKPEMDEKGNLTTAGFACSQCGQPLFVYKLEQVSEKGKAYTNYFGRCNVAEHEKLILLAQLKPEKDSDEAVTYSLGKFGQRALDFYSIHVTKESTHPVKPLAQIAGNRYASHPVGKALSDACMGTIASFLSKYQDIIIEHQKVVKGNQKRLESLRELAGKENLEYPSVTLPPQPHTKEGVDAYNEVIARVRMWVNLNLWQKLKLSRDDAKPLLRLKGFPSFPLVERQANEVDWWDMVCNVKKLINEKKEDGKVFWQNLAGYKRQEALRPYLSSEEDRKKGKKFARYQLGDLLLHLEKKHEGEDWGKVYDEAWERIDKKVEGLSKHIKLEEERRSEDAQSKAALTDWLRAKASFVIEGLKEADKDEFCRCELKLQKWYGDLRGKPFAIEAENSILDISGFSKQYNCAFIWQKDGVKKLNLYLIINYFKGGKLRFKKIKPEAFEANRFYTVINKKSGEIVPMEVNFNFDDPNLIILPLAFGKRQGREFIWNDLLSLETGSLKLANGRVIEKTLYNRRTRQDEPALFVALTFERREVLDSSNIKPMNLIGVDRGENIPAVIALTDPEGCPLSRFKDSLGNPTHILRIGESYKEKQRTIQAKKEVEQRRAGGYSRKYASKAKNLADDMVRNTARDLLYYAVTQDAMLIFENLSRGFGRQGKRTFMAERQYTRMEDWLTAKLAYEGLPSKTYLSKTLAQYTSKTCSNCGFTITSADYDRVLEKLKKTATGWMTTINGKELKVEGQITYYNRYKRQNVVKDLSVELDRLSEESVNNDISSWTKGRSGEALSLLKKRFSHRPVQEKFVCLNCGFETHADEQAALNIARSWLFLRSQEYKKYQTNKTSTGNTDKRAFVETWQSFYRKKLKEVWKPAV

SEQ ID NO: 37211 - protein, 980 aa, synthetic construct
  REGION 1..980: note = engineered CasX variant
QEIKRINKIRRRLVKDSNTKKAGKTGPMKTLLVRVMTPDLRERLENLRKKPENIPQPISNTSRANLNKLLTDYTEMKKAILHVYWEEFQKDPVGLMSRVAQPASKKIDQNKLKPEMDEKGNLTTAGFACSQCGQPLFVYKLEQVSEKGKAYTNYFGRCNVAEHEKLILLAQLKPEKDSDEAVTYSLGKFGQRALDFYSIHVTKESTHPVKPLAQIAGNRYASSPVGKALSDACMGTIASFLSKYQDIIIEHQKVVKGNQKRLESLRELAGKENLEYPSVTLPPQPHTKEGVDAYNEVIARVRMWVNLNLWQKLKLSRDDAKPLLRLKGFPSFPLVERQANEVDWWDMVCNVKKLINEKKEDGKVFWQNLAGYKRQEALRPYLSSEEDRKKGKKFARYQLGDLLLHLEKKHEGEDWGKVYDEAWERIDKKVEGLSKHIKLEEERRSEDAQSKAALTDWLRAKASFVIEGLKEADKDEFCRCELKLQKWYGDLRGKPFAIEAENSILDISGFSKQYNCAFIWQKDGVKKLNLYLIINYFKGGKLRFKKIKPEAFEANRFYTVINKKSGEIVPMEVNFNFDDPNLIILPLAFGKRQGREFIWNDLLSLETGSLKLANGRVIEKTLYNRRTRQDEPALFVALTFERREVLDSSNIKPMNLIGVDRGENIPAVIALTDPEGCPLSRFKDSLGNPTHILRIGESYKEKQRTIQAKKEVEQRRAGGYSRKYASKAKNLADDMVRNTARDLLYYAVTQDAMLIFENLSRGFGRQGKRTFMAERQYTRMEDWLTAKLAYEGLPSKTYLSKTLAQYTSKTCSNCGFTITSADYDRVLEKLKKTATGWMTTINGKELKVEGQITYYNRYKRQNVVKDLSVELDRLSEESVNNDISSWTKGRSGEALSLLKKRFSHRPVQEKFVCLNCGFETHADEQAALNIARSWLFLRSQEYKKYQTNKTSTGNTDKRAFVETWQSFYRKKLKEVWKPAV

SEQ ID NO: 37212 - protein, 980 aa, synthetic construct
  REGION 1..980: note = engineered CasX variant
QEIKRINKIRRRLVKDSNTKKAGKTGPMKTLLVRVMTPDLRERLENLRKKPENIPQPISNTSRANLNKLLTDYTEMKKAILHVYWEEFQKDPVGLMSRVAQPASKKIDQNKLKPEMDEKGNLTTAGFACSQCGQPLFVYKLEQVSEKGKAYTNYFGRCNVAEHEKLILLAQLKPEKDSDEAVTYSLGKFGQRALDFYSIHVTKESTHPVKPLAQIAGNRYASTPVGKALSDACMGTIASFLSKYQDIIIEHQKVVKGNQKRLESLRELAGKENLEYPSVTLPPQPHTKEGVDAYNEVIARVRMWVNLNLWQKLKLSRDDAKPLLRLKGFPSFPLVERQANEVDWWDMVCNVKKLINEKKEDGKVFWQNLAGYKRQEALRPYLSSEEDRKKGKKFARYQLGDLLLHLEKKHEGEDWGKVYDEAWERIDKKVEGLSKHIKLEEERRSEDAQSKAALTDWLRAKASFVIEGLKEADKDEFCRCELKLQKWYGDLRGKPFAIEAENSILDISGFSKQYNCAFIWQKDGVKKLNLYLIINYFKGGKLRFKKIKPEAFEANRFYTVINKKSGEIVPMEVNFNFDDPNLIILPLAFGKRQGREFIWNDLLSLETGSLKLANGRVIEKTLYNRRTRQDEPALFVALTFERREVLDSSNIKPMNLIGVDRGENIPAVIALTDPEGCPLSRFKDSLGNPTHILRIGESYKEKQRTIQAKKEVEQRRAGGYSRKYASKAKNLADDMVRNTARDLLYYAVTQDAMLIFENLSRGFGRQGKRTFMAERQYTRMEDWLTAKLAYEGLPSKTYLSKTLAQYTSKTCSNCGFTITSADYDRVLEKLKKTATGWMTTINGKELKVEGQITYYNRYKRQNVVKDLSVELDRLSEESVNNDISSWTKGRSGEALSLLKKRFSHRPVQEKFVCLNCGFETHADEQAALNIARSWLFLRSQEYKKYQTNKTSTGNTDKRAFVETWQSFYRKKLKEVWKPAV

SEQ ID NO: 37213 - protein, 980 aa, synthetic construct
  REGION 1..980: note = engineered CasX variant
QEIKRINKIRRRLVKDSNTKKAGKTGPMKTLLVRVMTPDLRERLENLRKKPENIPQPISNTSRANLNKLLTDYTEMKKAILHVYWEEFQKDPVGLMSRVAQPASKKIDQNKLKPEMDEKGNLTTAGFACSQCGQPLFVYKLEQVSEKGKAYTNYFGRCNVAEHEKLILLAQLKPEKDSDEAVTYSLGKFGQRALDFYSIHVTKESTHPVKPLAQIAGNRYASAPVGKALSDACMGTIASFLSKYQDIIIEHQKVVKGNQKRLESLRELAGKENLEYPSVTLPPQPHTKEGVDAYNEVIARVRMWVNLNLWQKLKLSRDDAKPLLRLKGFPSFPLVERQANEVDWWDMVCNVKKLINEKKEDGKVFWQNLAGYKRQEALRPYLSSEEDRKKGKKFARYQLGDLLLHLEKKHEGEDWGKVYDEAWERIDKKVEGLSKHIKLEEERRSEDAQSKAALTDWLRAKASFVIEGLKEADKDEFCRCELKLQKWYGDLRGKPFAIEAENSILDISGFSKQYNCAFIWQKDGVKKLNLYLIINYFKGGKLRFKKIKPEAFEANRFYTVINKKSGEIVPMEVNFNFDDPNLIILPLAFGKRQGREFIWNDLLSLETGSLKLANGRVIEKTLYNRRTRQDEPALFVALTFERREVLDSSNIKPMNLIGVDRGENIPAVIALTDPEGCPLSRFKDSLGNPTHILRIGESYKEKQRTIQAKKEVEQRRAGGYSRKYASKAKNLADDMVRNTARDLLYYAVTQDAMLIFENLSRGFGRQGKRTFMAERQYTRMEDWLTAKLAYEGLPSKTYLSKTLAQYTSKTCSNCGFTITSADYDRVLEKLKKTATGWMTTINGKELKVEGQITYYNRYKRQNVVKDLSVELDRLSEESVNNDISSWTKGRSGEALSLLKKRFSHRPVQEKFVCLNCGFETHADEQAALNIARSWLFLRSQEYKKYQTNKTSTGNTDKRAFVETWQSFYRKKLKEVWKPAV

SEQ ID NO: 37214 - protein, 980 aa, synthetic construct
  REGION 1..980: note = engineered CasX variant
QEIKRINKIRRRLVKDSNTKKAGKTGPMKTLLVRVMTPDLRERLENLRKKPENIPQPISNTSRANLNKLLTDYTEMKKAILHVYWEEFQKDPVGLMSRVAQPASKKIDQNKLKPEMDEKGNLTTAGFACSQCGQPLFVYKLEQVSEKGKAYTNYFGRCNVAEHEKLILLAQLKPEKDSDEAVTYSLGKFGQRALDFYSIHVTKESTHPVKPLAQIAGNRYASVPVGKALSDACMGTIASFLSKYQDIIIEHQKVVKGNQKRLESLRELAGKENLEYPSVTLPPQPHTKEGVDAYNEVIARVRMWVNLNLWQKLKLSRDDAKPLLRLKGFPSFPLVERQANEVDWWDMVCNVKKLINEKKEDGKVFWQNLAGYKRQEALRPYLSSEEDRKKGKKFARYQLGDLLLHLEKKHEGEDWGKVYDEAWERIDKKVEGLSKHIKLEEERRSEDAQSKAALTDWLRAKASFVIEGLKEADKDEFCRCELKLQKWYGDLRGKPFAIEAENSILDISGFSKQYNCAFIWQKDGVKKLNLYLIINYFKGGKLRFKKIKPEAFEANRFYTVINKKSGEIVPMEVNFNFDDPNLIILPLAFGKRQGREFIWNDLLSLETGSLKLANGRVIEKTLYNRRTRQDEPALFVALTFERREVLDSSNIKPMNLIGVDRGENIPAVIALTDPEGCPLSRFKDSLGNPTHILRIGESYKEKQRTIQAKKEVEQRRAGGYSRKYASKAKNLADDMVRNTARDLLYYAVTQDAMLIFENLSRGFGRQGKRTFMAERQYTRMEDWLTAKLAYEGLPSKTYLSKTLAQYTSKTCSNCGFTITSADYDRVLEKLKKTATGWMTTINGKELKVEGQITYYNRYKRQNVVKDLSVELDRLSEESVNNDISSWTKGRSGEALSLLKKRFSHRPVQEKFVCLNCGFETHADEQAALNIARSWLFLRSQEYKKYQTNKTSTGNTDKRAFVETWQSFYRKKLKEVWKPAV

SEQ ID NO: 37215 - protein, 980 aa, synthetic construct
  REGION 1..980: note = engineered CasX variant
QEIKRINKIRRRLVKDSNTKKAGKTGPMKTLLVRVMTPDLRERLENLRKKPENIPQPISNTSRANLNKLLTDYTEMKKAILHVYWEEFQKDPVGLMSRVAQPASKKIDQNKLKPEMDEKGNLTTAGFACSQCGQPLFVYKLEQVSEKGKAYTNYFGRCNVAEHEKLIKLAQLKPEKDSDEAVTYSLGKFGQRALDFYSIHVTKESTHPVKPLAQIAGNRYASGPVGKALSDACMGTIASFLSKYQDIIIEHQKVVKGNQKRLESLRELAGKENLEYPSVTLPPQPHTKEGVDAYNEVIARVRMWVNLNLWQKLKLSRDDAKPLLRLKGFPSFPLVERQANEVDWWDMVCNVKKLINEKKEDGKVFWQNLAGYKRQEALRPYLSSEEDRKKGKKFARYQLGDLLLHLEKKHEGEDWGKVYDEAWERIDKKVEGLSKHIKLEEERRSEDAQSKAALTDWLRAKASFVIEGLKEADKDEFCRCELKLQKWYGDLRGKPFAIEAENSILDISGFSKQYNCAFIWQKDGVKKLNLYLIINYFKGGKLRFKKIKPEAFEANRFYTVINKKSGEIVPMEVNFNFDDPNLIILPLAFGKRQGREFIWNDLLSLETGSLKLANGRVIEKTLYNRRTRQDEPALFVALTFERREVLDSSNIKPMNLIGVDRGENIPAVIALTDPEGCPLSRFKDSLGNPTHILRIGESYKEKQRTIQAKKEVEQRRAGGYSRKYASKAKNLADDMVRNTARDLLYYAVTQDAMLIFENLSRGFGRQGKRTFMAERQYTRMEDWLTAKLAYEGLPSKTYLSKTLAQYTSKTCSNCGFTITSADYDRVLEKLKKTATGWMTTINGKELKVEGQITYYNRYKRQNVVKDLSVELDRLSEESVNNDISSWTKGRSGEALSLLKKRFSHRPVQEKFVCLNCGFETHADEQAALNIARSWLFLRSQEYKKYQTNKTSTGNTDKRAFVETWQSFYRKKLKEVWKPAV

SEQ ID NO: 37216 - protein, 979 aa, synthetic construct
  REGION 1..979: note = engineered CasX variant
QEIKRINKIRRRLVKDSNTKKAGKTGPMKTLLVRVMTPDLRERLENLRKKPENIPQPISNTSRANLNKLLTDYTEMKKAILHVYWEEFQKDPVGLMSRVAQPASKKIDQNKLKPEMDEKGNLTTAGFACSQCGQPLFVYKLEQVSEKGKAYTNYFGRCNVAEHEKLILLAQLKPEKDSDEAVTYSLGKFGQRALDFYSIHVTKESTHPVKPLAQIAGNRYASPVGKALSDACMGTIASFLSKYQDIIIEHQKVVKGNQKRLESLRELAGKENLEYPSVTLPPQPHTKEGVDAYNEVIARVRMWVNLNLWQKLKLSRDDAKPLLRLKGFPSFPLVERQANEVDWWDMVCNVKKLINEKKEDGKVFWQNLAGYKRQEALRPYLSSEEDRKKGKKFARYQLGDLLLHLEKKHEGEDWGKVYDEAWERIDKKVEGLSKHIKLEEERRSEDAQSKAALTDWLRAKASFVIEGLKEADKDEFCRCELKLQKWYGDLRGKPFAIEAENSILDISGFSKQYNCAFIWQKDGVKKLNLYLIINYFKGGKLRFKKIKPEAFEANRFYTVINKKSGEIVPMEVNFNFDDPNLIILPLAFGKRQGREFIWNDLLSLETGSLKLANGRVIEKTLYNRRTRQDEPALFVALTFERREVLDSSNIKPMNLIGVDRGENIPAVIALTDPEGCPLSRFKDSLGNPTHILRIGESYKEKQRTIQAKKEVEQRRAGGYSRKYASKAKNLADDMVRNTARDLLYYAVTQDAMLIFENLSRGFGRQGKRTFMAERQYTRMEDWLTAKLAYEGLPSKTYLSKTLAQYTSKTCSNCGFTITSADYDRVLEKLKKTATGWMTTINGKELKVEGQITYYNRYKRQNVVKDLSVELDRLSEESVNNDISSWTKGRSGEALSLLKKRFSHRPVQEKFVCLNCGFETHADEQAALNIARSWLFLRSQEYKKYQTNKTSTGNTDKRAFVETWQSFYRKKLKEVWKPAV

SEQ ID NO: 37217 - protein, 980 aa, synthetic construct
  REGION 1..980: note = engineered CasX variant
QEIKRINKIRRRLVKDSNTKKAGKTGPMKTLLVRVMTPDLRERLENLRKKPENIPQPISNTSRANLNKLLTDYTEMKKAILHVYWEEFQKDPVGLMSRVAQPASKKIDQNKLKPEMDEKGNLTTAGFACSQCGQPLFVYKLEQVSEKGKAYTNYFGRCNVAEHEKLILLAQLKPEKDSDEAVTYSLGKFGQRALDFYSIHVTKESTHPVKPLAQIAGNRYASYPVGKALSDACMGTIASFLSKYQDIIIEHQKVVKGNQKRLESLRELAGKENLEYPSVTLPPQPHTKEGVDAYNEVIARVRMWVNLNLWQKLKLSRDDAKPLLRLKGFPSFPLVERQANEVDWWDMVCNVKKLINEKKEDGKVFWQNLAGYKRQEALRPYLSSEEDRKKGKKFARYQLGDLLLHLEKKHEGEDWGKVYDEAWERIDKKVEGLSKHIKLEEERRSEDAQSKAALTDWLRAKASFVIEGLKEADKDEFCRCELKLQKWYGDLRGKPFAIEAENSILDISGFSKQYNCAFIWQKDGVKKLNLYLIINYFKGGKLRFKKIKPEAFEANRFYTVINKKSGEIVPMEVNFNFDDPNLIILPLAFGKRQGREFIWNDLLSLETGSLKLANGRVIEKTLYNRRTRQDEPALFVALTFERREVLDSSNIKPMNLIGVDRGENIPAVIALTDPEGCPLSRFKDSLGNPTHILRIGESYKEKQRTIQAKKEVEQRRAGGYSRKYASKAKNLADDMVRNTARDLLYYAVTQDAMLIFENLSRGFGRQGKRTFMAERQYTRMEDWLTAKLAYEGLPSKTYLSKTLAQYTSKTCSNCGFTITSADYDRVLEKLKKTATGWMTTINGKELKVEGQITYYNRYKRQNVVKDLSVELDRLSEESVNNDISSWTKGRSGEALSLLKKRFSHRPVQEKFVCLNCGFETHADEQAALNIARSWLFLRSQEYKKYQTNKTTGKNTDKRAFVETWQSFYRKKLKEVWKPAV

SEQ ID NO: 37218 - protein, 980 aa, synthetic construct
  REGION 1..980: note = engineered CasX variant
QEIKRINKIRRRLVKDSNTKKAGKTGPMKTLLVRVMTPDLRERLENLRKKPENIPQPISNTSRANLNKLLTDYTEMKKAILHVYWEEFQKDPVGLMSRVAQPASKKIDQNKLKPEMDEKGNLTTAGFACSQCGQPLFVYKLEQVSEKGKAYTNYFGRCNVAEHEKLILLAQLKPEKDSDEAVTYSLGKFGQRALDFYSIHVTKESTHPVKPLAQIAGNRYASHPVGKALSDACMGTIASFLSKYQDIIIEHQKVVKGNQKRLESLRELAGKENLEYPSVTLPPQPHTKEGVDAYNEVIARVRMWVNLNLWQKLKLSRDDAKPLLRLKGFPSFPLVERQANEVDWWDMVCNVKKLINEKKEDGKVFWQNLAGYKRQEALRPYLSSEEDRKKGKKFARYQLGDLLLHLEKKHEGEDWGKVYDEAWERIDKKVEGLSKHIKLEEERRSEDAQSKAALTDWLRAKASFVIEGLKEADKDEFCRCELKLQKWYGDLRGKPFAIEAENSILDISGFSKQYNCAFIWQKDGVKKLNLYLIINYFKGGKLRFKKIKPEAFEANRFYTVINKKSGEIVPMEVNFNFDDPNLIILPLAFGKRQGREFIWNDLLSLETGSLKLANGRVIEKTLYNRRTRQDEPALFVALTFERREVLDSSNIKPMNLIGVDRGENIPAVIALTDPEGCPLSRFKDSLGNPTHILRIGESYKEKQRTIQAKKEVEQRRAGGYSRKYASKAKNLADDMVRNTARDLLYYAVTQDAMLIFENLSRGFGRQGKRTFMAERQYTRMEDWLTAKLAYEGLPSKTYLSKTLAQYTSKTCSNCGFTITSADYDRVLEKLKKTATGWMTTINGKELKVEGQITYYNRYKRQNVVKDLSVELDRLSEESVNNDISSWTKGRSGEALSLLKKRFSHRPVQEKFVCLNCGFETHADEQAALNIARSWLFLRSQEYKKYQTNKTTGKNTDKRAFVETWQSFYRKKLKEVWKPAV

SEQ ID NO: 37219 - protein, 980 aa, synthetic construct
  REGION 1..980: note = engineered CasX variant
QEIKRINKIRRRLVKDSNTKKAGKTGPMKTLLVRVMTPDLRERLENLRKKPENIPQPISNTSRANLNKLLTDYTEMKKAILHVYWEEFQKDPVGLMSRVAQPASKKIDQNKLKPEMDEKGNLTTAGFACSQCGQPLFVYKLEQVSEKGKAYTNYFGRCNVAEHEKLILLAQLKPEKDSDEAVTYSLGKFGQRALDFYSIHVTKESTHPVKPLAQIAGNRYASSPVGKALSDACMGTIASFLSKYQDIIIEHQKVVKGNQKRLESLRELAGKENLEYPSVTLPPQPHTKEGVDAYNEVIARVRMWVNLNLWQKLKLSRDDAKPLLRLKGFPSFPLVERQANEVDWWDMVCNVKKLINEKKEDGKVFWQNLAGYKRQEALRPYLSSEEDRKKGKKFARYQLGDLLLHLEKKHEGEDWGKVYDEAWERIDKKVEGLSKHIKLEEERRSEDAQSKAALTDWLRAKASFVIEGLKEADKDEFCRCELKLQKWYGDLRGKPFAIEAENSILDISGFSKQYNCAFIWQKDGVKKLNLYLIINYFKGGKLRFKKIKPEAFEANRFYTVINKKSGEIVPMEVNFNFDDPNLIILPLAFGKRQGREFIWNDLLSLETGSLKLANGRVIEKTLYNRRTRQDEPALFVALTFERREVLDSSNIKPMNLIGVDRGENIPAVIALTDPEGCPLSRFKDSLGNPTHILRIGESYKEKQRTIQAKKEVEQRRAGGYSRKYASKAKNLADDMVRNTARDLLYYAVTQDAMLIFENLSRGFGRQGKRTFMAERQYTRMEDWLTAKLAYEGLPSKTYLSKTLAQYTSKTCSNCGFTITSADYDRVLEKLKKTATGWMTTINGKELKVEGQITYYNRYKRQNVVKDLSVELDRLSEESVNNDISSWTKGRSGEALSLLKKRFSHRPVQEKFVCLNCGFETHADEQAALNIARSWLFLRSQEYKKYQTNKTTGKNTDKRAFVETWQSFYRKKLKEVWKPAV

SEQ ID NO: 37220 - protein, 980 aa, synthetic construct
  REGION 1..980: note = engineered CasX variant
QEIKRINKIRRRLVKDSNTKKAGKTGPMKTLLVRVMTPDLRERLENLRKKPENIPQPISNTSRANLNKLLTDYTEMKKAILHVYWEEFQKDPVGLMSRVAQPASKKIDQNKLKPEMDEKGNLTTAGFACSQCGQPLFVYKLEQVSEKGKAYTNYFGRCNVAEHEKLILLAQLKPEKDSDEAVTYSLGKFGQRALDFYSIHVTKESTHPVKPLAQIAGNRYASTPVGKALSDACMGTIASFLSKYQDIIIEHQKVVKGNQKRLESLRELAGKENLEYPSVTLPPQPHTKEGVDAYNEVIARVRMWVNLNLWQKLKLSRDDAKPLLRLKGFPSFPLVERQANEVDWWDMVCNVKKLINEKKEDGKVFWQNLAGYKRQEALRPYLSSEEDRKKGKKFARYQLGDLLLHLEKKHEGEDWGKVYDEAWERIDKKVEGLSKHIKLEEERRSEDAQSKAALTDWLRAKASFVIEGLKEADKDEFCRCELKLQKWYGDLRGKPFAIEAENSILDISGFSKQYNCAFIWQKDGVKKLNLYLIINYFKGGKLRFKKIKPEAFEANRFYTVINKKSGEIVPMEVNFNFDDPNLIILPLAFGKRQGREFIWNDLLSLETGSLKLANGRVIEKTLYNRRTRQDEPALFVALTFERREVLDSSNIKPMNLIGVDRGENIPAVIALTDPEGCPLSRFKDSLGNPTHILRIGESYKEKQRTIQAKKEVEQRRAGGYSRKYASKAKNLADDMVRNTARDLLYYAVTQDAMLIFENLSRGFGRQGKRTFMAERQYTRMEDWLTAKLAYEGLPSKTYLSKTLAQYTSKTCSNCGFTITSADYDRVLEKLKKTATGWMTTINGKELKVEGQITYYNRYKRQNVVKDLSVELDRLSEESVNNDISSWTKGRSGEALSLLKKRFSHRPVQEKFVCLNCGFETHADEQAALNIARSWLFLRSQEYKKYQTNKTTGKNTDKRAFVETWQSFYRKKLKEVWKPAV

SEQ ID NO: 37221 - protein, 980 aa, synthetic construct
  REGION 1..980: note = engineered CasX variant
QEIKRINKIRRRLVKDSNTKKAGKTGPMKTLLVRVMTPDLRERLENLRKKPENIPQPISNTSRANLNKLLTDYTEMKKAILHVYWEEFQKDPVGLMSRVAQPASKKIDQNKLKPEMDEKGNLTTAGFACSQCGQPLFVYKLEQVSEKGKAYTNYFGRCNVAEHEKLILLAQLKPEKDSDEAVTYSLGKFGQRALDFYSIHVTKESTHPVKPLAQIAGNRYASAPVGKALSDACMGTIASFLSKYQDIIIEHQKVVKGNQKRLESLRELAGKENLEYPSVTLPPQPHTKEGVDAYNEVIARVRMWVNLNLWQKLKLSRDDAKPLLRLKGFPSFPLVERQANEVDWWDMVCNVKKLINEKKEDGKVFWQNLAGYKRQEALRPYLSSEEDRKKGKKFARYQLGDLLLHLEKKHEGEDWGKVYDEAWERIDKKVEGLSKHIKLEEERRSEDAQSKAALTDWLRAKASFVIEGLKEADKDEFCRCELKLQKWYGDLRGKPFAIEAENSILDISGFSKQYNCAFIWQKDGVKKLNLYLIINYFKGGKLRFKKIKPEAFEANRFYTVINKKSGEIVPMEVNFNFDDPNLIILPLAFGKRQGREFIWNDLLSLETGSLKLANGRVIEKTLYNRRTRQDEPALFVALTFERREVLDSSNIKPMNLIGVDRGENIPAVIALTDPEGCPLSRFKDSLGNPTHILRIGESYKEKQRTIQAKKEVEQRRAGGYSRKYASKAKNLADDMVRNTARDLLYYAVTQDAMLIFENLSRGFGRQGKRTFMAERQYTRMEDWLTAKLAYEGLPSKTYLSKTLAQYTSKTCSNCGFTITSADYDRVLEKLKKTATGWMTTINGKELKVEGQITYYNRYKRQNVVKDLSVELDRLSEESVNNDISSWTKGRSGEALSLLKKRFSHRPVQEKFVCLNCGFETHADEQAALNIARSWLFLRSQEYKKYQTNKTTGKNTDKRAFVETWQSFYRKKLKEVWKPAV

SEQ ID NO: 37222 - protein, 980 aa, synthetic construct
  REGION 1..980: note = engineered CasX variant
QEIKRINKIRRRLVKDSNTKKAGKTGPMKTLLVRVMTPDLRERLENLRKKPENIPQPISNTSRANLNKLLTDYTEMKKAILHVYWEEFQKDPVGLMSRVAQPASKKIDQNKLKPEMDEKGNLTTAGFACSQCGQPLFVYKLEQVSEKGKAYTNYFGRCNVAEHEKLILLAQLKPEKDSDEAVTYSLGKFGQRALDFYSIHVTKESTHPVKPLAQIAGNRYASVPVGKALSDACMGTIASFLSKYQDIIIEHQKVVKGNQKRLESLRELAGKENLEYPSVTLPPQPHTKEGVDAYNEVIARVRMWVNLNLWQKLKLSRDDAKPLLRLKGFPSFPLVERQANEVDWWDMVCNVKKLINEKKEDGKVFWQNLAGYKRQEALRPYLSSEEDRKKGKKFARYQLGDLLLHLEKKHEGEDWGKVYDEAWERIDKKVEGLSKHIKLEEERRSEDAQSKAALTDWLRAKASFVIEGLKEADKDEFCRCELKLQKWYGDLRGKPFAIEAENSILDISGFSKQYNCAFIWQKDGVKKLNLYLIINYFKGGKLRFKKIKPEAFEANRFYTVINKKSGEIVPMEVNFNFDDPNLIILPLAFGKRQGREFIWNDLLSLETGSLKLANGRVIEKTLYNRRTRQDEPALFVALTFERREVLDSSNIKPMNLIGVDRGENIPAVIALTDPEGCPLSRFKDSLGNPTHILRIGESYKEKQRTIQAKKEVEQRRAGGYSRKYASKAKNLADDMVRNTARDLLYYAVTQDAMLIFENLSRGFGRQGKRTFMAERQYTRMEDWLTAKLAYEGLPSKTYLSKTLAQYTSKTCSNCGFTITSADYDRVLEKLKKTATGWMTTINGKELKVEGQITYYNRYKRQNVVKDLSVELDRLSEESVNNDISSWTKGRSGEALSLLKKRFSHRPVQEKFVCLNCGFETHADEQAALNIARSWLFLRSQEYKKYQTNKTTGKNTDKRAFVETWQSFYRKKLKEVWKPAV

SEQ ID NO: 37223 - protein, 980 aa, synthetic construct
  REGION 1..980: note = engineered CasX variant
QEIKRINKIRRRLVKDSNTKKAGKTGPMKTLLVRVMTPDLRERLENLRKKPENIPQPISNTSRANLNKLLTDYTEMKKAILHVYWEEFQKDPVGLMSRVAQPASKKIDQNKLKPEMDEKGNLTTAGFACSQCGQPLFVYKLEQVSEKGKAYTNYFGRCNVAEHEKLIKLAQLKPEKDSDEAVTYSLGKFGQRALDFYSIHVTKESTHPVKPLAQIAGNRYASGPVGKALSDACMGTIASFLSKYQDIIIEHQKVVKGNQKRLESLRELAGKENLEYPSVTLPPQPHTKEGVDAYNEVIARVRMWVNLNLWQKLKLSRDDAKPLLRLKGFPSFPLVERQANEVDWWDMVCNVKKLINEKKEDGKVFWQNLAGYKRQEALRPYLSSEEDRKKGKKFARYQLGDLLLHLEKKHEGEDWGKVYDEAWERIDKKVEGLSKHIKLEEERRSEDAQSKAALTDWLRAKASFVIEGLKEADKDEFCRCELKLQKWYGDLRGKPFAIEAENSILDISGFSKQYNCAFIWQKDGVKKLNLYLIINYFKGGKLRFKKIKPEAFEANRFYTVINKKSGEIVPMEVNFNFDDPNLIILPLAFGKRQGREFIWNDLLSLETGSLKLANGRVIEKTLYNRRTRQDEPALFVALTFERREVLDSSNIKPMNLIGVDRGENIPAVIALTDPEGCPLSRFKDSLGNPTHILRIGESYKEKQRTIQAKKEVEQRRAGGYSRKYASKAKNLADDMVRNTARDLLYYAVTQDAMLIFENLSRGFGRQGKRTFMAERQYTRMEDWLTAKLAYEGLPSKTYLSKTLAQYTSKTCSNCGFTITSADYDRVLEKLKKTATGWMTTINGKELKVEGQITYYNRYKRQNVVKDLSVELDRLSEESVNNDISSWTKGRSGEALSLLKKRFSHRPVQEKFVCLNCGFETHADEQAALNIARSWLFLRSQEYKKYQTNKTTGKNTDKRAFVETWQSFYRKKLKEVWKPAV

SEQ ID NO: 37224 - protein, 979 aa, synthetic construct
  REGION 1..979: note = engineered CasX variant
QEIKRINKIRRRLVKDSNTKKAGKTGPMKTLLVRVMTPDLRERLENLRKKPENIPQPISNTSRANLNKLLTDYTEMKKAILHVYWEEFQKDPVGLMSRVAQPASKKIDQNKLKPEMDEKGNLTTAGFACSQCGQPLFVYKLEQVSEKGKAYTNYFGRCNVAEHEKLILLAQLKPEKDSDEAVTYSLGKFGQRALDFYSIHVTKESTHPVKPLAQIAGNRYASPVGKALSDACMGTIASFLSKYQDIIIEHQKVVKGNQKRLESLRELAGKENLEYPSVTLPPQPHTKEGVDAYNEVIARVRMWVNLNLWQKLKLSRDDAKPLLRLKGFPSFPLVERQANEVDWWDMVCNVKKLINEKKEDGKVFWQNLAGYKRQEALRPYLSSEEDRKKGKKFARYQLGDLLLHLEKKHEGEDWGKVYDEAWERIDKKVEGLSKHIKLEEERRSEDAQSKAALTDWLRAKASFVIEGLKEADKDEFCRCELKLQKWYGDLRGKPFAIEAENSILDISGFSKQYNCAFIWQKDGVKKLNLYLIINYFKGGKLRFKKIKPEAFEANRFYTVINKKSGEIVPMEVNFNFDDPNLIILPLAFGKRQGREFIWNDLLSLETGSLKLANGRVIEKTLYNRRTRQDEPALFVALTFERREVLDSSNIKPMNLIGVDRGENIPAVIALTDPEGCPLSRFKDSLGNPTHILRIGESYKEKQRTIQAKKEVEQRRAGGYSRKYASKAKNLADDMVRNTARDLLYYAVTQDAMLIFENLSRGFGRQGKRTFMAERQYTRMEDWLTAKLAYEGLPSKTYLSKTLAQYTSKTCSNCGFTITSADYDRVLEKLKKTATGWMTTINGKELKVEGQITYYNRYKRQNVVKDLSVELDRLSEESVNNDISSWTKGRSGEALSLLKKRFSHRPVQEKFVCLNCGFETHADEQAALNIARSWLFLRSQEYKKYQTNKTTGKNTDKRAFVETWQSFYRKKLKEVWKPAV

SEQ ID NO: 37225 - protein, 979 aa, synthetic construct
  REGION 1..979: note = engineered CasX variant
QEIKRINKIRRRLVKDSNTKKAGKTGPMKTLLVRVMTPDLRERLENLRKKPENIPQPISNTSRANLNKLLTDYTEMKKAILHVYWEEFQKDPVGLMSRVAQPASKKIDQNKLKPEMDEKGNLTTAGFACSQCGQPLFVYKLEQVSEKGKAYTNYFGRCNVAEHEKLILLAQLKPEKDSDEAVTYSLGKFGQRALDFYSIHVTKESTHPVKPLAQIAGNRYASYPVGKALSDACMGTIASFLSKYQDIIIEHQKVVKGNQKRLESLRELAGKENLEYPSVTLPPQPHTKEGVDAYNEVIARVRMWVNLNLWQKLKLSRDDAKPLLRLKKFPSFPLVERQANEVDWWDMVCNVKKLINEKKEDGKVFWQNLAGYKRQEALRPYLSSEEDRKKGKKFARYQLGDLLLHLEKKHEGEDWGKVYDEAWERIDKKVEGLSKHIKLEEERRSEDAQSKAALTDWLRAKASFVIEGLKEADKDEFCRCELKLQKWYGDLRGKPFAIEAENSILDISGFSKQYNCAFIWQKDGVKKLNLYLIINYFKGGKLRFKKIKPEAFEANRFYTVINKKSGEIVPMEVNFNFDDPNLIILPLAFGKRQGREFIWNDLLSLETGSLKLANGRVIEKTLYNRRTRQDEPALFVALTFERREVLDSSNIKPMNLIGVDRGENIPAVIALTDPEGCPLSRFKDSLGNPTHILRIGESYKEKQRTIQAKKEVEQRRAGGYSRKYASKAKNLADDMVRNTARDLLYYAVTQDAMLIFENLSRGFGRQGKRTFMAERQYTRMEDWLTAKLAYEGLPSKTYLSKTLAQYTSKTCSNCGFTITSADYDRVLEKLKKTATGWMTTINGKELKVEGQITYYNRYKRQNVVKDLSVELDRLSEESVNNDISSWTKGRSGEALSLLKKRFSHRPVQEKFVCLNCGFETHADEQAALNIARSWLFLRSQEYKKYQTNKTTGNTDKRAFVETWQSFYRKKLKEVWKPAV

SEQ ID NO: 37226 - protein, 979 aa, synthetic construct
  REGION 1..979: note = engineered CasX variant
QEIKRINKIRRRLVKDSNTKKAGKTGPMKTLLVRVMTPDLRERLENLRKKPENIPQPISNTSRANLNKLLTDYTEMKKAILHVYWEEFQKDPVGLMSRVAQPASKKIDQNKLKPEMDEKGNLTTAGFACSQCGQPLFVYKLEQVSEKGKAYTNYFGRCNVAEHEKLILLAQLKPEKDSDEAVTYSLGKFGQRALDFYSIHVTKESTHPVKPLAQIAGNRYASHPVGKALSDACMGTIASFLSKYQDIIIEHQKVVKGNQKRLESLRELAGKENLEYPSVTLPPQPHTKEGVDAYNEVIARVRMWVNLNLWQKLKLSRDDAKPLLRLKKFPSFPLVERQANEVDWWDMVCNVKKLINEKKEDGKVFWQNLAGYKRQEALRPYLSSEEDRKKGKKFARYQLGDLLLHLEKKHEGEDWGKVYDEAWERIDKKVEGLSKHIKLEEERRSEDAQSKAALTDWLRAKASFVIEGLKEADKDEFCRCELKLQKWYGDLRGKPFAIEAENSILDISGFSKQYNCAFIWQKDGVKKLNLYLIINYFKGGKLRFKKIKPEAFEANRFYTVINKKSGEIVPMEVNFNFDDPNLIILPLAFGKRQGREFIWNDLLSLETGSLKLANGRVIEKTLYNRRTRQDEPALFVALTFERREVLDSSNIKPMNLIGVDRGENIPAVIALTDPEGCPLSRFKDSLGNPTHILRIGESYKEKQRTIQAKKEVEQRRAGGYSRKYASKAKNLADDMVRNTARDLLYYAVTQDAMLIFENLSRGFGRQGKRTFMAERQYTRMEDWLTAKLAYEGLPSKTYLSKTLAQYTSKTCSNCGFTITSADYDRVLEKLKKTATGWMTTINGKELKVEGQITYYNRYKRQNVVKDLSVELDRLSEESVNNDISSWTKGRSGEALSLLKKRFSHRPVQEKFVCLNCGFETHADEQAALNIARSWLFLRSQEYKKYQTNKTTGNTDKRAFVETWQSFYRKKLKEVWKPAV

SEQ ID NO: 37227 - protein, 979 aa, synthetic construct
  REGION 1..979: note = engineered CasX variant
QEIKRINKIRRRLVKDSNTKKAGKTGPMKTLLVRVMTPDLRERLENLRKKPENIPQPISNTSRANLNKLLTDYTEMKKAILHVYWEEFQKDPVGLMSRVAQPASKKIDQNKLKPEMDEKGNLTTAGFACSQCGQPLFVYKLEQVSEKGKAYTNYFGRCNVAEHEKLILLAQLKPEKDSDEAVTYSLGKFGQRALDFYSIHVTKESTHPVKPLAQIAGNRYASSPVGKALSDACMGTIASFLSKYQDIIIEHQKVVKGNQKRLESLRELAGKENLEYPSVTLPPQPHTKEGVDAYNEVIARVRMWVNLNLWQKLKLSRDDAKPLLRLKKFPSFPLVERQANEVDWWDMVCNVKKLINEKKEDGKVFWQNLAGYKRQEALRPYLSSEEDRKKGKKFARYQLGDLLLHLEKKHEGEDWGKVYDEAWERIDKKVEGLSKHIKLEEERRSEDAQSKAALTDWLRAKASFVIEGLKEADKDEFCRCELKLQKWYGDLRGKPFAIEAENSILDISGFSKQYNCAFIWQKDGVKKLNLYLIINYFKGGKLRFKKIKPEAFEANRFYTVINKKSGEIVPMEVNFNFDDPNLIILPLAFGKRQGREFIWNDLLSLETGSLKLANGRVIEKTLYNRRTRQDEPALFVALTFERREVLDSSNIKPMNLIGVDRGENIPAVIALTDPEGCPLSRFKDSLGNPTHILRIGESYKEKQRTIQAKKEVEQRRAGGYSRKYASKAKNLADDMVRNTARDLLYYAVTQDAMLIFENLSRGFGRQGKRTFMAERQYTRMEDWLTAKLAYEGLPSKTYLSKTLAQYTSKTCSNCGFTITSADYDRVLEKLKKTATGWMTTINGKELKVEGQITYYNRYKRQNVVKDLSVELDRLSEESVNNDISSWTKGRSGEALSLLKKRFSHRPVQEKFVCLNCGFETHADEQAALNIARSWLFLRSQEYKKYQTNKTTGNTDKRAFVETWQSFYRKKLKEVWKPAV

SEQ ID NO: 37228 - protein, 979 aa, synthetic construct
  REGION 1..979: note = engineered CasX variant
QEIKRINKIRRRLVKDSNTKKAGKTGPMKTLLVRVMTPDLRERLENLRKKPENIPQPISNTSRANLNKLLTDYTEMKKAILHVYWEEFQKDPVGLMSRVAQPASKKIDQNKLKPEMDEKGNLTTAGFACSQCGQPLFVYKLEQVSEKGKAYTNYFGRCNVAEHEKLILLAQLKPEKDSDEAVTYSLGKFGQRALDFYSIHVTKESTHPVKPLAQIAGNRYASTPVGKALSDACMGTIASFLSKYQDIIIEHQKVVKGNQKRLESLRELAGKENLEYPSVTLPPQPHTKEGVDAYNEVIARVRMWVNLNLWQKLKLSRDDAKPLLRLKKFPSFPLVERQANEVDWWDMVCNVKKLINEKKEDGKVFWQNLAGYKRQEALRPYLSSEEDRKKGKKFARYQLGDLLLHLEKKHEGEDWGKVYDEAWERIDKKVEGLSKHIKLEEERRSEDAQSKAALTDWLRAKASFVIEGLKEADKDEFCRCELKLQKWYGDLRGKPFAIEAENSILDISGFSKQYNCAFIWQKDGVKKLNLYLIINYFKGGKLRFKKIKPEAFEANRFYTVINKKSGEIVPMEVNFNFDDPNLIILPLAFGKRQGREFIWNDLLSLETGSLKLANGRVIEKTLYNRRTRQDEPALFVALTFERREVLDSSNIKPMNLIGVDRGENIPAVIALTDPEGCPLSRFKDSLGNPTHILRIGESYKEKQRTIQAKKEVEQRRAGGYSRKYASKAKNLADDMVRNTARDLLYYAVTQDAMLIFENLSRGFGRQGKRTFMAERQYTRMEDWLTAKLAYEGLPSKTYLSKTLAQYTSKTCSNCGFTITSADYDRVLEKLKKTATGWMTTINGKELKVEGQITYYNRYKRQNVVKDLSVELDRLSEESVNNDISSWTKGRSGEALSLLKKRFSHRPVQEKFVCLNCGFETHADEQAALNIARSWLFLRSQEYKKYQTNKTTGNTDKRAFVETWQSFYRKKLKEVWKPAV

SEQ ID NO: 37229 - protein, 979 aa, synthetic construct
  REGION 1..979: note = engineered CasX variant
QEIKRINKIRRRLVKDSNTKKAGKTGPMKTLLVRVMTPDLRERLENLRKKPENIPQPISNTSRANLNKLLTDYTEMKKAILHVYWEEFQKDPVGLMSRVAQPASKKIDQNKLKPEMDEKGNLTTAGFACSQCGQPLFVYKLEQVSEKGKAYTNYFGRCNVAEHEKLILLAQLKPEKDSDEAVTYSLGKFGQRALDFYSIHVTKESTHPVKPLAQIAGNRYASAPVGKALSDACMGTIASFLSKYQDIIIEHQKVVKGNQKRLESLRELAGKENLEYPSVTLPPQPHTKEGVDAYNEVIARVRMWVNLNLWQKLKLSRDDAKPLLRLKKFPSFPLVERQANEVDWWDMVCNVKKLINEKKEDGKVFWQNLAGYKRQEALRPYLSSEEDRKKGKKFARYQLGDLLLHLEKKHEGEDWGKVYDEAWERIDKKVEGLSKHIKLEEERRSEDAQSKAALTDWLRAKASFVIEGLKEADKDEFCRCELKLQKWYGDLRGKPFAIEAENSILDISGFSKQYNCAFIWQKDGVKKLNLYLIINYFKGGKLRFKKIKPEAFEANRFYTVINKKSGEIVPMEVNFNFDDPNLIILPLAFGKRQGREFIWNDLLSLETGSLKLANGRVIEKTLYNRRTRQDEPALFVALTFERREVLDSSNIKPMNLIGVDRGENIPAVIALTDPEGCPLSRFKDSLGNPTHILRIGESYKEKQRTIQAKKEVEQRRAGGYSRKYASKAKNLADDMVRNTARDLLYYAVTQDAMLIFENLSRGFGRQGKRTFMAERQYTRMEDWLTAKLAYEGLPSKTYLSKTLAQYTSKTCSNCGFTITSADYDRVLEKLKKTATGWMTTINGKELKVEGQITYYNRYKRQNVVKDLSVELDRLSEESVNNDISSWTKGRSGEALSLLKKRFSHRPVQEKFVCLNCGFETHADEQAALNIARSWLFLRSQEYKKYQTNKTTGNTDKRAFVETWQSFYRKKLKEVWKPAV

SEQ ID NO: 37230 - protein, 979 aa, synthetic construct
  REGION 1..979: note = engineered CasX variant
QEIKRINKIRRRLVKDSNTKKAGKTGPMKTLLVRVMTPDLRERLENLRKKPENIPQPISNTSRANLNKLLTDYTEMKKAILHVYWEEFQKDPVGLMSRVAQPASKKIDQNKLKPEMDEKGNLTTAGFACSQCGQPLFVYKLEQVSEKGKAYTNYFGRCNVAEHEKLILLAQLKPEKDSDEAVTYSLGKFGQRALDFYSIHVTKESTHPVKPLAQIAGNRYASVPVGKALSDACMGTIASFLSKYQDIIIEHQKVVKGNQKRLESLRELAGKENLEYPSVTLPPQPHTKEGVDAYNEVIARVRMWVNLNLWQKLKLSRDDAKPLLRLKKFPSFPLVERQANEVDWWDMVCNVKKLINEKKEDGKVFWQNLAGYKRQEALRPYLSSEEDRKKGKKFARYQLGDLLLHLEKKHEGEDWGKVYDEAWERIDKKVEGLSKHIKLEEERRSEDAQSKAALTDWLRAKASFVIEGLKEADKDEFCRCELKLQKWYGDLRGKPFAIEAENSILDISGFSKQYNCAFIWQKDGVKKLNLYLIINYFKGGKLRFKKIKPEAFEANRFYTVINKKSGEIVPMEVNFNFDDPNLIILPLAFGKRQGREFIWNDLLSLETGSLKLANGRVIEKTLYNRRTRQDEPALFVALTFERREVLDSSNIKPMNLIGVDRGENIPAVIALTDPEGCPLSRFKDSLGNPTHILRIGESYKEKQRTIQAKKEVEQRRAGGYSRKYASKAKNLADDMVRNTARDLLYYAVTQDAMLIFENLSRGFGRQGKRTFMAERQYTRMEDWLTAKLAYEGLPSKTYLSKTLAQYTSKTCSNCGFTITSADYDRVLEKLKKTATGWMTTINGKELKVEGQITYYNRYKRQNVVKDLSVELDRLSEESVNNDISSWTKGRSGEALSLLKKRFSHRPVQEKFVCLNCGFETHADEQAALNIARSWLFLRSQEYKKYQTNKTTGNTDKRAFVETWQSFYRKKLKEVWKPAV

SEQ ID NO: 37231 - protein, 979 aa, synthetic construct
  REGION 1..979: note = engineered CasX variant
QEIKRINKIRRRLVKDSNTKKAGKTGPMKTLLVRVMTPDLRERLENLRKKPENIPQPISNTSRANLNKLLTDYTEMKKAILHVYWEEFQKDPVGLMSRVAQPASKKIDQNKLKPEMDEKGNLTTAGFACSQCGQPLFVYKLEQVSEKGKAYTNYFGRCNVAEHEKLIKLAQLKPEKDSDEAVTYSLGKFGQRALDFYSIHVTKESTHPVKPLAQIAGNRYASGPVGKALSDACMGTIASFLSKYQDIIIEHQKVVKGNQKRLESLRELAGKENLEYPSVTLPPQPHTKEGVDAYNEVIARVRMWVNLNLWQKLKLSRDDAKPLLRLKKFPSFPLVERQANEVDWWDMVCNVKKLINEKKEDGKVFWQNLAGYKRQEALRPYLSSEEDRKKGKKFARYQLGDLLLHLEKKHEGEDWGKVYDEAWERIDKKVEGLSKHIKLEEERRSEDAQSKAALTDWLRAKASFVIEGLKEADKDEFCRCELKLQKWYGDLRGKPFAIEAENSILDISGFSKQYNCAFIWQKDGVKKLNLYLIINYFKGGKLRFKKIKPEAFEANRFYTVINKKSGEIVPMEVNFNFDDPNLIILPLAFGKRQGREFIWNDLLSLETGSLKLANGRVIEKTLYNRRTRQDEPALFVALTFERREVLDSSNIKPMNLIGVDRGENIPAVIALTDPEGCPLSRFKDSLGNPTHILRIGESYKEKQRTIQAKKEVEQRRAGGYSRKYASKAKNLADDMVRNTARDLLYYAVTQDAMLIFENLSRGFGRQGKRTFMAERQYTRMEDWLTAKLAYEGLPSKTYLSKTLAQYTSKTCSNCGFTITSADYDRVLEKLKKTATGWMTTINGKELKVEGQITYYNRYKRQNVVKDLSVELDRLSEESVNNDISSWTKGRSGEALSLLKKRFSHRPVQEKFVCLNCGFETHADEQAALNIARSWLFLRSQEYKKYQTNKTTGNTDKRAFVETWQSFYRKKLKEVWKPAV

SEQ ID NO: 37232 - protein, 978 aa, synthetic construct
  REGION 1..978: note = engineered CasX variant
QEIKRINKIRRRLVKDSNTKKAGKTGPMKTLLVRVMTPDLRERLENLRKKPENIPQPISNTSRANLNKLLTDYTEMKKAILHVYWEEFQKDPVGLMSRVAQPASKKIDQNKLKPEMDEKGNLTTAGFACSQCGQPLFVYKLEQVSEKGKAYTNYFGRCNVAEHEKLILLAQLKPEKDSDEAVTYSLGKFGQRALDFYSIHVTKESTHPVKPLAQIAGNRYASPVGKALSDACMGTIASFLSKYQDIIIEHQKVVKGNQKRLESLRELAGKENLEYPSVTLPPQPHTKEGVDAYNEVIARVRMWVNLNLWQKLKLSRDDAKPLLRLKKFPSFPLVERQANEVDWWDMVCNVKKLINEKKEDGKVFWQNLAGYKRQEALRPYLSSEEDRKKGKKFARYQLGDLLLHLEKKHEGEDWGKVYDEAWERIDKKVEGLSKHIKLEEERRSEDAQSKAALTDWLRAKASFVIEGLKEADKDEFCRCELKLQKWYGDLRGKPFAIEAENSILDISGFSKQYNCAFIWQKDGVKKLNLYLIINYFKGGKLRFKKIKPEAFEANRFYTVINKKSGEIVPMEVNFNFDDPNLIILPLAFGKRQGREFIWNDLLSLETGSLKLANGRVIEKTLYNRRTRQDEPALFVALTFERREVLDSSNIKPMNLIGVDRGENIPAVIALTDPEGCPLSRFKDSLGNPTHILRIGESYKEKQRTIQAKKEVEQRRAGGYSRKYASKAKNLADDMVRNTARDLLYYAVTQDAMLIFENLSRGFGRQGKRTFMAERQYTRMEDWLTAKLAYEGLPSKTYLSKTLAQYTSKTCSNCGFTITSADYDRVLEKLKKTATGWMTTINGKELKVEGQITYYNRYKRQNVVKDLSVELDRLSEESVNNDISSWTKGRSGEALSLLKKRFSHRPVQEKFVCLNCGFETHADEQAALNIARSWLFLRSQEYKKYQTNKTTGNTDKRAFVETWQSFYRKKLKEVWKPAV

SEQ ID NO: 37233 - protein, 979 aa, synthetic construct
  REGION 1..979: note = engineered CasX variant
QEIKRINKIRRRLVKDSNTKKAGKTGPMKTLLVRVMTPDLRERLENLRKKPENIPQPISNTSRANLNKLLTDYTEMKKAILHVYWEEFQKDPVGLMSRVAQPASKKIDQNKLKPEMDEKGNLTTAGFACSQCGQPLFVYKLEQVSEKGKAYTNYFGRCNVAEHEKLILLAQLKPEKDSDEAVTYSLGKFGQRALDFYSIHVTKESTHPVKPLAQIAGNRYASYPVGKALSDACMGTIASFLSKYQDIIIEHQKVVKGNQKRLESLRELAGKENLEYPSVTLPPQPHTKEGVDAYNEVIARVRMWVNLNLWQKLKLSRDDAKPLLRLKGFPSFPLVERQANEVDWWDMVCNVKKLINEKKEDGKVFWQNLAGYKRQEALRPYLSSEEDRKKGKKFARYQLGDLLLHLEKKHEGEDWGKVYDEAWERIDKKVEGLSKHIKLEEERRSEDAQSKAALTDWLRAKASFVIEGLKEADKDEFCRCELKLQKWYGDLRGKPFAIEAENSILDISGFSKQYNCAFIWQKDGVKKLNLYLIINYFKGGKLRFKKIKPEAFEANRFYTVINKKSGEIVPMEVNFNFDDPNLIILPLAFGKRQGREFIWNDLLSLETGSLKLANGRVIEKTLYNRRTRQDEPALFVALTFERREVLDSSNIKPMNLIGVDRGENIPAVIALTDPEGCPLSRFKDSLGNPTHILRIGERYKEKQRTIQAKKEVEQRRAGGYSRKYASKAKNLADDMVRNTARDLLYYAVTQDAMLIFENLSRGFGRQGKRTFMAERQYTRMEDWLTAKLAYEGLPSKTYLSKTLAQYTSKTCSNCGFTITSADYDRVLEKLKKTATGWMTTINGKELKVEGQITYYNRYKRQNVVKDLSVELDRLSEESVNNDISSWTKGRSGEALSLLKKRFSHRPVQEKFVCLNCGFETHADEQAALNIARSWLFLRSQEYKKYQTNKTTGNTDKRAFVETWQSFYRKKLKEVWKPAV

SEQ ID NO: 37234 - protein, 979 aa, synthetic construct
  REGION 1..979: note = engineered CasX variant
QEIKRINKIRRRLVKDSNTKKAGKTGPMKTLLVRVMTPDLRERLENLRKKPENIPQPISNTSRANLNKLLTDYTEMKKAILHVYWEEFQKDPVGLMSRVAQPASKKIDQNKLKPEMDEKGNLTTAGFACSQCGQPLFVYKLEQVSEKGKAYTNYFGRCNVAEHEKLILLAQLKPEKDSDEAVTYSLGKFGQRALDFYSIHVTKESTHPVKPLAQIAGNRYASHPVGKALSDACMGTIASFLSKYQDIIIEHQKVVKGNQKRLESLRELAGKENLEYPSVTLPPQPHTKEGVDAYNEVIARVRMWVNLNLWQKLKLSRDDAKPLLRLKGFPSFPLVERQANEVDWWDMVCNVKKLINEKKEDGKVFWQNLAGYKRQEALRPYLSSEEDRKKGKKFARYQLGDLLLHLEKKHEGEDWGKVYDEAWERIDKKVEGLSKHIKLEEERRSEDAQSKAALTDWLRAKASFVIEGLKEADKDEFCRCELKLQKWYGDLRGKPFAIEAENSILDISGFSKQYNCAFIWQKDGVKKLNLYLIINYFKGGKLRFKKIKPEAFEANRFYTVINKKSGEIVPMEVNFNFDDPNLIILPLAFGKRQGREFIWNDLLSLETGSLKLANGRVIEKTLYNRRTRQDEPALFVALTFERREVLDSSNIKPMNLIGVDRGENIPAVIALTDPEGCPLSRFKDSLGNPTHILRIGERYKEKQRTIQAKKEVEQRRAGGYSRKYASKAKNLADDMVRNTARDLLYYAVTQDAMLIFENLSRGFGRQGKRTFMAERQYTRMEDWLTAKLAYEGLPSKTYLSKTLAQYTSKTCSNCGFTITSADYDRVLEKLKKTATGWMTTINGKELKVEGQITYYNRYKRQNVVKDLSVELDRLSEESVNNDISSWTKGRSGEALSLLKKRFSHRPVQEKFVCLNCGFETHADEQAALNIARSWLFLRSQEYKKYQTNKTTGNTDKRAFVETWQSFYRKKLKEVWKPAV

SEQ ID NO: 37235 - protein, 979 aa, synthetic construct
  REGION 1..979: note = engineered CasX variant
QEIKRINKIRRRLVKDSNTKKAGKTGPMKTLLVRVMTPDLRERLENLRKKPENIPQPISNTSRANLNKLLTDYTEMKKAILHVYWEEFQKDPVGLMSRVAQPASKKIDQNKLKPEMDEKGNLTTAGFACSQCGQPLFVYKLEQVSEKGKAYTNYFGRCNVAEHEKLILLAQLKPEKDSDEAVTYSLGKFGQRALDFYSIHVTKESTHPVKPLAQIAGNRYASSPVGKALSDACMGTIASFLSKYQDIIIEHQKVVKGNQKRLESLRELAGKENLEYPSVTLPPQPHTKEGVDAYNEVIARVRMWVNLNLWQKLKLSRDDAKPLLRLKGFPSFPLVERQANEVDWWDMVCNVKKLINEKKEDGKVFWQNLAGYKRQEALRPYLSSEEDRKKGKKFARYQLGDLLLHLEKKHEGEDWGKVYDEAWERIDKKVEGLSKHIKLEEERRSEDAQSKAALTDWLRAKASFVIEGLKEADKDEFCRCELKLQKWYGDLRGKPFAIEAENSILDISGFSKQYNCAFIWQKDGVKKLNLYLIINYFKGGKLRFKKIKPEAFEANRFYTVINKKSGEIVPMEVNFNFDDPNLIILPLAFGKRQGREFIWNDLLSLETGSLKLANGRVIEKTLYNRRTRQDEPALFVALTFERREVLDSSNIKPMNLIGVDRGENIPAVIALTDPEGCPLSRFKDSLGNPTHILRIGERYKEKQRTIQAKKEVEQRRAGGYSRKYASKAKNLADDMVRNTARDLLYYAVTQDAMLIFENLSRGFGRQGKRTFMAERQYTRMEDWLTAKLAYEGLPSKTYLSKTLAQYTSKTCSNCGFTITSADYDRVLEKLKKTATGWMTTINGKELKVEGQITYYNRYKRQNVVKDLSVELDRLSEESVNNDISSWTKGRSGEALSLLKKRFSHRPVQEKFVCLNCGFETHADEQAALNIARSWLFLRSQEYKKYQTNKTTGNTDKRAFVETWQSFYRKKLKEVWKPAV

SEQ ID NO: 37236 - protein, 979 aa, synthetic construct
  REGION 1..979: note = engineered CasX variant
QEIKRINKIRRRLVKDSNTKKAGKTGPMKTLLVRVMTPDLRERLENLRKKPENIPQPISNTSRANLNKLLTDYTEMKKAILHVYWEEFQKDPVGLMSRVAQPASKKIDQNKLKPEMDEKGNLTTAGFACSQCGQPLFVYKLEQVSEKGKAYTNYFGRCNVAEHEKLILLAQLKPEKDSDEAVTYSLGKFGQRALDFYSIHVTKESTHPVKPLAQIAGNRYASTPVGKALSDACMGTIASFLSKYQDIIIEHQKVVKGNQKRLESLRELAGKENLEYPSVTLPPQPHTKEGVDAYNEVIARVRMWVNLNLWQKLKLSRDDAKPLLRLKGFPSFPLVERQANEVDWWDMVCNVKKLINEKKEDGKVFWQNLAGYKRQEALRPYLSSEEDRKKGKKFARYQLGDLLLHLEKKHEGEDWGKVYDEAWERIDKKVEGLSKHIKLEEERRSEDAQSKAALTDWLRAKASFVIEGLKEADKDEFCRCELKLQKWYGDLRGKPFAIEAENSILDISGFSKQYNCAFIWQKDGVKKLNLYLIINYFKGGKLRFKKIKPEAFEANRFYTVINKKSGEIVPMEVNFNFDDPNLIILPLAFGKRQGREFIWNDLLSLETGSLKLANGRVIEKTLYNRRTRQDEPALFVALTFERREVLDSSNIKPMNLIGVDRGENIPAVIALTDPEGCPLSRFKDSLGNPTHILRIGERYKEKQRTIQAKKEVEQRRAGGYSRKYASKAKNLADDMVRNTARDLLYYAVTQDAMLIFENLSRGFGRQGKRTFMAERQYTRMEDWLTAKLAYEGLPSKTYLSKTLAQYTSKTCSNCGFTITSADYDRVLEKLKKTATGWMTTINGKELKVEGQITYYNRYKRQNVVKDLSVELDRLSEESVNNDISSWTKGRSGEALSLLKKRFSHRPVQEKFVCLNCGFETHADEQAALNIARSWLFLRSQEYKKYQTNKTTGNTDKRAFVETWQSFYRKKLKEVWKPAV

SEQ ID NO: 37237 - protein, 979 aa, synthetic construct
  REGION 1..979: note = engineered CasX variant
QEIKRINKIRRRLVKDSNTKKAGKTGPMKTLLVRVMTPDLRERLENLRKKPENIPQPISNTSRANLNKLLTDYTEMKKAILHVYWEEFQKDPVGLMSRVAQPASKKIDQNKLKPEMDEKGNLTTAGFACSQCGQPLFVYKLEQVSEKGKAYTNYFGRCNVAEHEKLILLAQLKPEKDSDEAVTYSLGKFGQRALDFYSIHVTKESTHPVKPLAQIAGNRYASAPVGKALSDACMGTIASFLSKYQDIIIEHQKVVKGNQKRLESLRELAGKENLEYPSVTLPPQPHTKEGVDAYNEVIARVRMWVNLNLWQKLKLSRDDAKPLLRLKGFPSFPLVERQANEVDWWDMVCNVKKLINEKKEDGKVFWQNLAGYKRQEALRPYLSSEEDRKKGKKFARYQLGDLLLHLEKKHEGEDWGKVYDEAWERIDKKVEGLSKHIKLEEERRSEDAQSKAALTDWLRAKASFVIEGLKEADKDEFCRCELKLQKWYGDLRGKPFAIEAENSILDISGFSKQYNCAFIWQKDGVKKLNLYLIINYFKGGKLRFKKIKPEAFEANRFYTVINKKSGEIVPMEVNFNFDDPNLIILPLAFGKRQGREFIWNDLLSLETGSLKLANGRVIEKTLYNRRTRQDEPALFVALTFERREVLDSSNIKPMNLIGVDRGENIPAVIALTDPEGCPLSRFKDSLGNPTHILRIGERYKEKQRTIQAKKEVEQRRAGGYSRKYASKAKNLADDMVRNTARDLLYYAVTQDAMLIFENLSRGFGRQGKRTFMAERQYTRMEDWLTAKLAYEGLPSKTYLSKTLAQYTSKTCSNCGFTITSADYDRVLEKLKKTATGWMTTINGKELKVEGQITYYNRYKRQNVVKDLSVELDRLSEESVNNDISSWTKGRSGEALSLLKKRFSHRPVQEKFVCLNCGFETHADEQAALNIARSWLFLRSQEYKKYQTNKTTGNTDKRAFVETWQSFYRKKLKEVWKPAV

SEQ ID NO: 37238 - protein, 979 aa, synthetic construct
  REGION 1..979: note = engineered CasX variant
QEIKRINKIRRRLVKDSNTKKAGKTGPMKTLLVRVMTPDLRERLENLRKKPENIPQPISNTSRANLNKLLTDYTEMKKAILHVYWEEFQKDPVGLMSRVAQPASKKIDQNKLKPEMDEKGNLTTAGFACSQCGQPLFVYKLEQVSEKGKAYTNYFGRCNVAEHEKLILLAQLKPEKDSDEAVTYSLGKFGQRALDFYSIHVTKESTHPVKPLAQIAGNRYASVPVGKALSDACMGTIASFLSKYQDIIIEHQKVVKGNQKRLESLRELAGKENLEYPSVTLPPQPHTKEGVDAYNEVIARVRMWVNLNLWQKLKLSRDDAKPLLRLKGFPSFPLVERQANEVDWWDMVCNVKKLINEKKEDGKVFWQNLAGYKRQEALRPYLSSEEDRKKGKKFARYQLGDLLLHLEKKHEGEDWGKVYDEAWERIDKKVEGLSKHIKLEEERRSEDAQSKAALTDWLRAKASFVIEGLKEADKDEFCRCELKLQKWYGDLRGKPFAIEAENSILDISGFSKQYNCAFIWQKDGVKKLNLYLIINYFKGGKLRFKKIKPEAFEANRFYTVINKKSGEIVPMEVNFNFDDPNLIILPLAFGKRQGREFIWNDLLSLETGSLKLANGRVIEKTLYNRRTRQDEPALFVALTFERREVLDSSNIKPMNLIGVDRGENIPAVIALTDPEGCPLSRFKDSLGNPTHILRIGERYKEKQRTIQAKKEVEQRRAGGYSRKYASKAKNLADDMVRNTARDLLYYAVTQDAMLIFENLSRGFGRQGKRTFMAERQYTRMEDWLTAKLAYEGLPSKTYLSKTLAQYTSKTCSNCGFTITSADYDRVLEKLKKTATGWMTTINGKELKVEGQITYYNRYKRQNVVKDLSVELDRLSEESVNNDISSWTKGRSGEALSLLKKRFSHRPVQEKFVCLNCGFETHADEQAALNIARSWLFLRSQEYKKYQTNKTTGNTDKRAFVETWQSFYRKKLKEVWKPAV

SEQ ID NO: 37239 - protein, 979 aa, synthetic construct
  REGION 1..979: note = engineered CasX variant
QEIKRINKIRRRLVKDSNTKKAGKTGPMKTLLVRVMTPDLRERLENLRKKPENIPQPISNTSRANLNKLLTDYTEMKKAILHVYWEEFQKDPVGLMSRVAQPASKKIDQNKLKPEMDEKGNLTTAGFACSQCGQPLFVYKLEQVSEKGKAYTNYFGRCNVAEHEKLIKLAQLKPEKDSDEAVTYSLGKFGQRALDFYSIHVTKESTHPVKPLAQIAGNRYASGPVGKALSDACMGTIASFLSKYQDIIIEHQKVVKGNQKRLESLRELAGKENLEYPSVTLPPQPHTKEGVDAYNEVIARVRMWVNLNLWQKLKLSRDDAKPLLRLKGFPSFPLVERQANEVDWWDMVCNVKKLINEKKEDGKVFWQNLAGYKRQEALRPYLSSEEDRKKGKKFARYQLGDLLLHLEKKHEGEDWGKVYDEAWERIDKKVEGLSKHIKLEEERRSEDAQSKAALTDWLRAKASFVIEGLKEADKDEFCRCELKLQKWYGDLRGKPFAIEAENSILDISGFSKQYNCAFIWQKDGVKKLNLYLIINYFKGGKLRFKKIKPEAFEANRFYTVINKKSGEIVPMEVNFNFDDPNLIILPLAFGKRQGREFIWNDLLSLETGSLKLANGRVIEKTLYNRRTRQDEPALFVALTFERREVLDSSNIKPMNLIGVDRGENIPAVIALTDPEGCPLSRFKDSLGNPTHILRIGERYKEKQRTIQAKKEVEQRRAGGYSRKYASKAKNLADDMVRNTARDLLYYAVTQDAMLIFENLSRGFGRQGKRTFMAERQYTRMEDWLTAKLAYEGLPSKTYLSKTLAQYTSKTCSNCGFTITSADYDRVLEKLKKTATGWMTTINGKELKVEGQITYYNRYKRQNVVKDLSVELDRLSEESVNNDISSWTKGRSGEALSLLKKRFSHRPVQEKFVCLNCGFETHADEQAALNIARSWLFLRSQEYKKYQTNKTTGNTDKRAFVETWQSFYRKKLKEVWKPAV

SEQ ID NO: 37240 - protein, 978 aa, synthetic construct
  REGION 1..978: note = engineered CasX variant
QEIKRINKIRRRLVKDSNTKKAGKTGPMKTLLVRVMTPDLRERLENLRKKPENIPQPISNTSRANLNKLLTDYTEMKKAILHVYWEEFQKDPVGLMSRVAQPASKKIDQNKLKPEMDEKGNLTTAGFACSQCGQPLFVYKLEQVSEKGKAYTNYFGRCNVAEHEKLILLAQLKPEKDSDEAVTYSLGKFGQRALDFYSIHVTKESTHPVKPLAQIAGNRYASPVGKALSDACMGTIASFLSKYQDIIIEHQKVVKGNQKRLESLRELAGKENLEYPSVTLPPQPHTKEGVDAYNEVIARVRMWVNLNLWQKLKLSRDDAKPLLRLKGFPSFPLVERQANEVDWWDMVCNVKKLINEKKEDGKVFWQNLAGYKRQEALRPYLSSEEDRKKGKKFARYQLGDLLLHLEKKHEGEDWGKVYDEAWERIDKKVEGLSKHIKLEEERRSEDAQSKAALTDWLRAKASFVIEGLKEADKDEFCRCELKLQKWYGDLRGKPFAIEAENSILDISGFSKQYNCAFIWQKDGVKKLNLYLIINYFKGGKLRFKKIKPEAFEANRFYTVINKKSGEIVPMEVNFNFDDPNLIILPLAFGKRQGREFIWNDLLSLETGSLKLANGRVIEKTLYNRRTRQDEPALFVALTFERREVLDSSNIKPMNLIGVDRGENIPAVIALTDPEGCPLSRFKDSLGNPTHILRIGERYKEKQRTIQAKKEVEQRRAGGYSRKYASKAKNLADDMVRNTARDLLYYAVTQDAMLIFENLSRGFGRQGKRTFMAERQYTRMEDWLTAKLAYEGLPSKTYLSKTLAQYTSKTCSNCGFTITSADYDRVLEKLKKTATGWMTTINGKELKVEGQITYYNRYKRQNVVKDLSVELDRLSEESVNNDISSWTKGRSGEALSLLKKRFSHRPVQEKFVCLNCGFETHADEQAALNIARSWLFLRSQEYKKYQTNKTTGNTDKRAFVETWQSFYRKKLKEVWKPAV

SEQ ID NO: 37241 - protein, 979 aa, synthetic construct
  REGION 1..979: note = engineered CasX variant
QEIKRINKIRRRLVKDSNTKKAGKTGPMKTLLVRVMTPDLRERLENLRKKPENIPQPISNTSRANLNKLLTDYTEMKKAILHVYWEEFQKDPVGLMSRVAQPASKKIDQNKLKPEMDEKGNLTTAGFACSQCGQPLFVYKLEQVSEKGKAYTNYFGRCNVAEHEKLILLAQLKPEKDSDEAVTYSLGKFGQRALDFYSIHVTKESTHPVKPLAQIAGNRYASYPVGKALSDACMGTIASFLSKYQDIIIEHQKVVKGNQKRLESLRELAGKENLEYPSVTLPPQPHTKEGVDAYNEVIARVRMWVNLNLWQKLKLSRDDAKPLLRLKGFPSFPLVERQANEVDWWDMVCNVKKLINEKKEDGKVFWQNLAGYKRQEALRPYLSSEEDRKKGKKFARYQLGDLLLHLEKKHEGEDWGKVYDEAWERIDKKVEGLSKHIKLEEERRSEDAQSKAALTDWLRAKASFVIEGLKEADKDEFCRCELKLQKWYGDLRGKPFAIEAENSILDISGFSKQYNCAFIWQKDGVKKLNLYLIINYFKGGKLRFKKIKPEAFEANRFYTVINKKSGEIVPMEVNFNFDDPNLIILPLAFGKRQGREFIWNDLLSLETGSLQLANGRVIEKTLYNRRTRQDEPALFVALTFERREVLDSSNIKPMNLIGVDRGENIPAVIALTDPEGCPLSRFKDSLGNPTHILRIGESYKEKQRTIQAKKEVEQRRAGGYSRKYASKAKNLADDMVRNTARDLLYYAVTQDAMLIFENLSRGFGRQGKRTFMAERQYTRMEDWLTAKLAYEGLPSKTYLSKTLAQYTSKTCSNCGFTITSADYDRVLEKLKKTATGWMTTINGKELKVEGQITYYNRYKRQNVVKDLSVELDRLSEESVNNDISSWTKGRSGEALSLLKKRFSHRPVQEKFVCLNCGFETHADEQAALNIARSWLFLRSQEYKKYQTNKTTGNTDKRAFVETWQSFYRKKLKEVWKPAV

SEQ ID NO: 37242 - protein, 979 aa, synthetic construct
  REGION 1..979: note = engineered CasX variant
QEIKRINKIRRRLVKDSNTKKAGKTGPMKTLLVRVMTPDLRERLENLRKKPENIPQPISNTSRANLNKLLTDYTEMKKAILHVYWEEFQKDPVGLMSRVAQPASKKIDQNKLKPEMDEKGNLTTAGFACSQCGQPLFVYKLEQVSEKGKAYTNYFGRCNVAEHEKLILLAQLKPEKDSDEAVTYSLGKFGQRALDFYSIHVTKESTHPVKPLAQIAGNRYASHPVGKALSDACMGTIASFLSKYQDIIIEHQKVVKGNQKRLESLRELAGKENLEYPSVTLPPQPHTKEGVDAYNEVIARVRMWVNLNLWQKLKLSRDDAKPLLRLKGFPSFPLVERQANEVDWWDMVCNVKKLINEKKEDGKVFWQNLAGYKRQEALRPYLSSEEDRKKGKKFARYQLGDLLLHLEKKHEGEDWGKVYDEAWERIDKKVEGLSKHIKLEEERRSEDAQSKAALTDWLRAKASFVIEGLKEADKDEFCRCELKLQKWYGDLRGKPFAIEAENSILDISGFSKQYNCAFIWQKDGVKKLNLYLIINYFKGGKLRFKKIKPEAFEANRFYTVINKKSGEIVPMEVNFNFDDPNLIILPLAFGKRQGREFIWNDLLSLETGSLQLANGRVIEKTLYNRRTRQDEPALFVALTFERREVLDSSNIKPMNLIGVDRGENIPAVIALTDPEGCPLSRFKDSLGNPTHILRIGESYKEKQRTIQAKKEVEQRRAGGYSRKYASKAKNLADDMVRNTARDLLYYAVTQDAMLIFENLSRGFGRQGKRTFMAERQYTRMEDWLTAKLAYEGLPSKTYLSKTLAQYTSKTCSNCGFTITSADYDRVLEKLKKTATGWMTTINGKELKVEGQITYYNRYKRQNVVKDLSVELDRLSEESVNNDISSWTKGRSGEALSLLKKRFSHRPVQEKFVCLNCGFETHADEQAALNIARSWLFLRSQEYKKYQTNKTTGNTDKRAFVETWQSFYRKKLKEVWKPAV

SEQ ID NO: 37243 - protein, 979 aa, synthetic construct
  REGION 1..979: note = engineered CasX variant
QEIKRINKIRRRLVKDSNTKKAGKTGPMKTLLVRVMTPDLRERLENLRKKPENIPQPISNTSRANLNKLLTDYTEMKKAILHVYWEEFQKDPVGLMSRVAQPASKKIDQNKLKPEMDEKGNLTTAGFACSQCGQPLFVYKLEQVSEKGKAYTNYFGRCNVAEHEKLILLAQLKPEKDSDEAVTYSLGKFGQRALDFYSIHVTKESTHPVKPLAQIAGNRYASSPVGKALSDACMGTIASFLSKYQDIIIEHQKVVKGNQKRLESLRELAGKENLEYPSVTLPPQPHTKEGVDAYNEVIARVRMWVNLNLWQKLKLSRDDAKPLLRLKGFPSFPLVERQANEVDWWDMVCNVKKLINEKKEDGKVFWQNLAGYKRQEALRPYLSSEEDRKKGKKFARYQLGDLLLHLEKKHEGEDWGKVYDEAWERIDKKVEGLSKHIKLEEERRSEDAQSKAALTDWLRAKASFVIEGLKEADKDEFCRCELKLQKWYGDLRGKPFAIEAENSILDISGFSKQYNCAFIWQKDGVKKLNLYLIINYFKGGKLRFKKIKPEAFEANRFYTVINKKSGEIVPMEVNFNFDDPNLIILPLAFGKRQGREFIWNDLLSLETGSLQLANGRVIEKTLYNRRTRQDEPALFVALTFERREVLDSSNIKPMNLIGVDRGENIPAVIALTDPEGCPLSRFKDSLGNPTHILRIGESYKEKQRTIQAKKEVEQRRAGGYSRKYASKAKNLADDMVRNTARDLLYYAVTQDAMLIFENLSRGFGRQGKRTFMAERQYTRMEDWLTAKLAYEGLPSKTYLSKTLAQYTSKTCSNCGFTITSADYDRVLEKLKKTATGWMTTINGKELKVEGQITYYNRYKRQNVVKDLSVELDRLSEESVNNDISSWTKGRSGEALSLLKKRFSHRPVQEKFVCLNCGFETHADEQAALNIARSWLFLRSQEYKKYQTNKTTGNTDKRAFVETWQSFYRKKLKEVWKPAV

SEQ ID NO: 37244 - protein, 979 aa, synthetic construct
  REGION 1..979: note = engineered CasX variant
QEIKRINKIRRRLVKDSNTKKAGKTGPMKTLLVRVMTPDLRERLENLRKKPENIPQPISNTSRANLNKLLTDYTEMKKAILHVYWEEFQKDPVGLMSRVAQPASKKIDQNKLKPEMDEKGNLTTAGFACSQCGQPLFVYKLEQVSEKGKAYTNYFGRCNVAEHEKLILLAQLKPEKDSDEAVTYSLGKFGQRALDFYSIHVTKESTHPVKPLAQIAGNRYASTPVGKALSDACMGTIASFLSKYQDIIIEHQKVVKGNQKRLESLRELAGKENLEYPSVTLPPQPHTKEGVDAYNEVIARVRMWVNLNLWQKLKLSRDDAKPLLRLKGFPSFPLVERQANEVDWWDMVCNVKKLINEKKEDGKVFWQNLAGYKRQEALRPYLSSEEDRKKGKKFARYQLGDLLLHLEKKHEGEDWGKVYDEAWERIDKKVEGLSKHIKLEEERRSEDAQSKAALTDWLRAKASFVIEGLKEADKDEFCRCELKLQKWYGDLRGKPFAIEAENSILDISGFSKQYNCAFIWQKDGVKKLNLYLIINYFKGGKLRFKKIKPEAFEANRFYTVINKKSGEIVPMEVNFNFDDPNLIILPLAFGKRQGREFIWNDLLSLETGSLQLANGRVIEKTLYNRRTRQDEPALFVALTFERREVLDSSNIKPMNLIGVDRGENIPAVIALTDPEGCPLSRFKDSLGNPTHILRIGESYKEKQRTIQAKKEVEQRRAGGYSRKYASKAKNLADDMVRNTARDLLYYAVTQDAMLIFENLSRGFGRQGKRTFMAERQYTRMEDWLTAKLAYEGLPSKTYLSKTLAQYTSKTCSNCGFTITSADYDRVLEKLKKTATGWMTTINGKELKVEGQITYYNRYKRQNVVKDLSVELDRLSEESVNNDISSWTKGRSGEALSLLKKRFSHRPVQEKFVCLNCGFETHADEQAALNIARSWLFLRSQEYKKYQTNKTTGNTDKRAFVETWQSFYRKKLKEVWKPAV

SEQ ID NO: 37245 - protein, 979 aa, synthetic construct
  REGION 1..979: note = engineered CasX variant
QEIKRINKIRRRLVKDSNTKKAGKTGPMKTLLVRVMTPDLRERLENLRKKPENIPQPISNTSRANLNKLLTDYTEMKKAILHVYWEEFQKDPVGLMSRVAQPASKKIDQNKLKPEMDEKGNLTTAGFACSQCGQPLFVYKLEQVSEKGKAYTNYFGRCNVAEHEKLILLAQLKPEKDSDEAVTYSLGKFGQRALDFYSIHVTKESTHPVKPLAQIAGNRYASAPVGKALSDACMGTIASFLSKYQDIIIEHQKVVKGNQKRLESLRELAGKENLEYPSVTLPPQPHTKEGVDAYNEVIARVRMWVNLNLWQKLKLSRDDAKPLLRLKGFPSFPLVERQANEVDWWDMVCNVKKLINEKKEDGKVFWQNLAGYKRQEALRPYLSSEEDRKKGKKFARYQLGDLLLHLEKKHEGEDWGKVYDEAWERIDKKVEGLSKHIKLEEERRSEDAQSKAALTDWLRAKASFVIEGLKEADKDEFCRCELKLQKWYGDLRGKPFAIEAENSILDISGFSKQYNCAFIWQKDGVKKLNLYLIINYFKGGKLRFKKIKPEAFEANRFYTVINKKSGEIVPMEVNFNFDDPNLIILPLAFGKRQGREFIWNDLLSLETGSLQLANGRVIEKTLYNRRTRQDEPALFVALTFERREVLDSSNIKPMNLIGVDRGENIPAVIALTDPEGCPLSRFKDSLGNPTHILRIGESYKEKQRTIQAKKEVEQRRAGGYSRKYASKAKNLADDMVRNTARDLLYYAVTQDAMLIFENLSRGFGRQGKRTFMAERQYTRMEDWLTAKLAYEGLPSKTYLSKTLAQYTSKTCSNCGFTITSADYDRVLEKLKKTATGWMTTINGKELKVEGQITYYNRYKRQNVVKDLSVELDRLSEESVNNDISSWTKGRSGEALSLLKKRFSHRPVQEKFVCLNCGFETHADEQAALNIARSWLFLRSQEYKKYQTNKTTGNTDKRAFVETWQSFYRKKLKEVWKPAV

SEQ ID NO: 37246 - protein, 979 aa, synthetic construct
  REGION 1..979: note = engineered CasX variant
QEIKRINKIRRRLVKDSNTKKAGKTGPMKTLLVRVMTPDLRERLENLRKKPENIPQPISNTSRANLNKLLTDYTEMKKAILHVYWEEFQKDPVGLMSRVAQPASKKIDQNKLKPEMDEKGNLTTAGFACSQCGQPLFVYKLEQVSEKGKAYTNYFGRCNVAEHEKLILLAQLKPEKDSDEAVTYSLGKFGQRALDFYSIHVTKESTHPVKPLAQIAGNRYASVPVGKALSDACMGTIASFLSKYQDIIIEHQKVVKGNQKRLESLRELAGKENLEYPSVTLPPQPHTKEGVDAYNEVIARVRMWVNLNLWQKLKLSRDDAKPLLRLKGFPSFPLVERQANEVDWWDMVCNVKKLINEKKEDGKVFWQNLAGYKRQEALRPYLSSEEDRKKGKKFARYQLGDLLLHLEKKHEGEDWGKVYDEAWERIDKKVEGLSKHIKLEEERRSEDAQSKAALTDWLRAKASFVIEGLKEADKDEFCRCELKLQKWYGDLRGKPFAIEAENSILDISGFSKQYNCAFIWQKDGVKKLNLYLIINYFKGGKLRFKKIKPEAFEANRFYTVINKKSGEIVPMEVNFNFDDPNLIILPLAFGKRQGREFIWNDLLSLETGSLQLANGRVIEKTLYNRRTRQDEPALFVALTFERREVLDSSNIKPMNLIGVDRGENIPAVIALTDPEGCPLSRFKDSLGNPTHILRIGESYKEKQRTIQAKKEVEQRRAGGYSRKYASKAKNLADDMVRNTARDLLYYAVTQDAMLIFENLSRGFGRQGKRTFMAERQYTRMEDWLTAKLAYEGLPSKTYLSKTLAQYTSKTCSNCGFTITSADYDRVLEKLKKTATGWMTTINGKELKVEGQITYYNRYKRQNVVKDLSVELDRLSEESVNNDISSWTKGRSGEALSLLKKRFSHRPVQEKFVCLNCGFETHADEQAALNIARSWLFLRSQEYKKYQTNKTTGNTDKRAFVETWQSFYRKKLKEVWKPAV

SEQ ID NO: 37247 - protein, 979 aa, synthetic construct
  REGION 1..979: note = engineered CasX variant
QEIKRINKIRRRLVKDSNTKKAGKTGPMKTLLVRVMTPDLRERLENLRKKPENIPQPISNTSRANLNKLLTDYTEMKKAILHVYWEEFQKDPVGLMSRVAQPASKKIDQNKLKPEMDEKGNLTTAGFACSQCGQPLFVYKLEQVSEKGKAYTNYFGRCNVAEHEKLIKLAQLKPEKDSDEAVTYSLGKFGQRALDFYSIHVTKESTHPVKPLAQIAGNRYASGPVGKALSDACMGTIASFLSKYQDIIIEHQKVVKGNQKRLESLRELAGKENLEYPSVTLPPQPHTKEGVDAYNEVIARVRMWVNLNLWQKLKLSRDDAKPLLRLKGFPSFPLVERQANEVDWWDMVCNVKKLINEKKEDGKVFWQNLAGYKRQEALRPYLSSEEDRKKGKKFARYQLGDLLLHLEKKHEGEDWGKVYDEAWERIDKKVEGLSKHIKLEEERRSEDAQSKAALTDWLRAKASFVIEGLKEADKDEFCRCELKLQKWYGDLRGKPFAIEAENSILDISGFSKQYNCAFIWQKDGVKKLNLYLIINYFKGGKLRFKKIKPEAFEANRFYTVINKKSGEIVPMEVNFNFDDPNLIILPLAFGKRQGREFIWNDLLSLETGSLQLANGRVIEKTLYNRRTRQDEPALFVALTFERREVLDSSNIKPMNLIGVDRGENIPAVIALTDPEGCPLSRFKDSLGNPTHILRIGESYKEKQRTIQAKKEVEQRRAGGYSRKYASKAKNLADDMVRNTARDLLYYAVTQDAMLIFENLSRGFGRQGKRTFMAERQYTRMEDWLTAKLAYEGLPSKTYLSKTLAQYTSKTCSNCGFTITSADYDRVLEKLKKTATGWMTTINGKELKVEGQITYYNRYKRQNVVKDLSVELDRLSEESVNNDISSWTKGRSGEALSLLKKRFSHRPVQEKFVCLNCGFETHADEQAALNIARSWLFLRSQEYKKYQTNKTTGNTDKRAFVETWQSFYRKKLKEVWKPAV

SEQ ID NO: 37248 - protein, 978 aa, synthetic construct
  REGION 1..978: note = engineered CasX variant
QEIKRINKIRRRLVKDSNTKKAGKTGPMKTLLVRVMTPDLRERLENLRKKPENIPQPISNTSRANLNKLLTDYTEMKKAILHVYWEEFQKDPVGLMSRVAQPASKKIDQNKLKPEMDEKGNLTTAGFACSQCGQPLFVYKLEQVSEKGKAYTNYFGRCNVAEHEKLILLAQLKPEKDSDEAVTYSLGKFGQRALDFYSIHVTKESTHPVKPLAQIAGNRYASPVGKALSDACMGTIASFLSKYQDIIIEHQKVVKGNQKRLESLRELAGKENLEYPSVTLPPQPHTKEGVDAYNEVIARVRMWVNLNLWQKLKLSRDDAKPLLRLKGFPSFPLVERQANEVDWWDMVCNVKKLINEKKEDGKVFWQNLAGYKRQEALRPYLSSEEDRKKGKKFARYQLGDLLLHLEKKHEGEDWGKVYDEAWERIDKKVEGLSKHIKLEEERRSEDAQSKAALTDWLRAKASFVIEGLKEADKDEFCRCELKLQKWYGDLRGKPFAIEAENSILDISGFSKQYNCAFIWQKDGVKKLNLYLIINYFKGGKLRFKKIKPEAFEANRFYTVINKKSGEIVPMEVNFNFDDPNLIILPLAFGKRQGREFIWNDLLSLETGSLQLANGRVIEKTLYNRRTRQDEPALFVALTFERREVLDSSNIKPMNLIGVDRGENIPAVIALTDPEGCPLSRFKDSLGNPTHILRIGESYKEKQRTIQAKKEVEQRRAGGYSRKYASKAKNLADDMVRNTARDLLYYAVTQDAMLIFENLSRGFGRQGKRTFMAERQYTRMEDWLTAKLAYEGLPSKTYLSKTLAQYTSKTCSNCGFTITSADYDRVLEKLKKTATGWMTTINGKELKVEGQITYYNRYKRQNVVKDLSVELDRLSEESVNNDISSWTKGRSGEALSLLKKRFSHRPVQEKFVCLNCGFETHADEQAALNIARSWLFLRSQEYKKYQTNKTTGNTDKRAFVETWQSFYRKKLKEVWKPAV

SEQ ID NO: 37249 - protein, 978 aa, synthetic construct
  REGION 1..978: note = engineered CasX variant
QEIKRINKIRRRLVKDSNTKKAGKTGPMKTLLVRVMTPDLRERLENLRKKPENIPQPISNTSRANLNKLLTDYTEMKKAILHVYWEEFQKDPVGLMSRVAQPASKKIDQNKLKPEMDEKGNLTTAGFACSQCGQPLFVYKLEQVSEKGKAYTNYFGRCNVAEHEKLILLAQLKPEKDSDEAVTYSLGKFGQRALDFYSIHVTKESTHPVKPLAQIAGNRYASYPVGKALSDACMGTIASFLSKYQDIIIEHQKVVKGNQKRLESLRELAGKENLEYPSVTLPPQPHTKEGVDAYNEVIARVRMWVNLNLWQKLKLSRDDAKPLLRLKGFPSFPLVERQANEVDWWDMVCNVKKLINEKKEDGKVFWQNLAGYKRQEALRPYLSSEEDRKKGKKFARYQLGDLLLHLEKKHGEDWGKVYDEAWERIDKKVEGLSKHIKLEEERRSEDAQSKAALTDWLRAKASFVIEGLKEADKDEFCRCDLKLQKWYGDLRGKPFAIEAENSILDISGFSKQYNCAFIWQKDGVKKLNLYLIINYFKGGKLRFKKIKPEAFEANRFYTVINKKSGEIVPMEVNFNFDDPNLIILPLAFGKRFGREFIWNDLLSLETGSLKLANGRVIEKTLYNRRTRQDEPALFVALTFERREVLDSSNIKPMNLIGVDRGENIPAVIALTDPEGCPLSRFKDSLGNPTHILRIGESYKEKQRTIQAKKEVEQRRAGGYSRKYASKAKNLADDMVRNTARDLLYYAVTQDAMLIFENLSRGFGRQGKRTFMAERQYTRMEDWLTAKLAYEGLPSKTYLSKTLAQYTSKTCSNCGFTITSADYDRVLEKLKKTATGWMTTINGKELKVEGQITYYNRYKRQNVVKDLSVELDRLSEESVNNDISSWTKGRSGEALSLLKKRFSHRPVQEKFVCLNCGFETHADEQAALNIARSWLFLRSQEYKKYQTNKTTGNTDKRAFVETWQSFYRKKLKEVWKPAV

SEQ ID NO: 37250 - protein, 978 aa, synthetic construct
  REGION 1..978: note = engineered CasX variant
QEIKRINKIRRRLVKDSNTKKAGKTGPMKTLLVRVMTPDLRERLENLRKKPENIPQPISNTSRANLNKLLTDYTEMKKAILHVYWEEFQKDPVGLMSRVAQPASKKIDQNKLKPEMDEKGNLTTAGFACSQCGQPLFVYKLEQVSEKGKAYTNYFGRCNVAEHEKLILLAQLKPEKDSDEAVTYSLGKFGQRALDFYSIHVTKESTHPVKPLAQIAGNRYASHPVGKALSDACMGTIASFLSKYQDIIIEHQKVVKGNQKRLESLRELAGKENLEYPSVTLPPQPHTKEGVDAYNEVIARVRMWVNLNLWQKLKLSRDDAKPLLRLKGFPSFPLVERQANEVDWWDMVCNVKKLINEKKEDGKVFWQNLAGYKRQEALRPYLSSEEDRKKGKKFARYQLGDLLLHLEKKHGEDWGKVYDEAWERIDKKVEGLSKHIKLEEERRSEDAQSKAALTDWLRAKASFVIEGLKEADKDEFCRCDLKLQKWYGDLRGKPFAIEAENSILDISGFSKQYNCAFIWQKDGVKKLNLYLIINYFKGGKLRFKKIKPEAFEANRFYTVINKKSGEIVPMEVNFNFDDPNLIILPLAFGKRFGREFIWNDLLSLETGSLKLANGRVIEKTLYNRRTRQDEPALFVALTFERREVLDSSNIKPMNLIGVDRGENIPAVIALTDPEGCPLSRFKDSLGNPTHILRIGESYKEKQRTIQAKKEVEQRRAGGYSRKYASKAKNLADDMVRNTARDLLYYAVTQDAMLIFENLSRGFGRQGKRTFMAERQYTRMEDWLTAKLAYEGLPSKTYLSKTLAQYTSKTCSNCGFTITSADYDRVLEKLKKTATGWMTTINGKELKVEGQITYYNRYKRQNVVKDLSVELDRLSEESVNNDISSWTKGRSGEALSLLKKRFSHRPVQEKFVCLNCGFETHADEQAALNIARSWLFLRSQEYKKYQTNKTTGNTDKRAFVETWQSFYRKKLKEVWKPAV

SEQ ID NO: 37251 - protein, 978 aa, synthetic construct
  REGION 1..978: note = engineered CasX variant
QEIKRINKIRRRLVKDSNTKKAGKTGPMKTLLVRVMTPDLRERLENLRKKPENIPQPISNTSRANLNKLLTDYTEMKKAILHVYWEEFQKDPVGLMSRVAQPASKKIDQNKLKPEMDEKGNLTTAGFACSQCGQPLFVYKLEQVSEKGKAYTNYFGRCNVAEHEKLILLAQLKPEKDSDEAVTYSLGKFGQRALDFYSIHVTKESTHPVKPLAQIAGNRYASSPVGKALSDACMGTIASFLSKYQDIIIEHQKVVKGNQKRLESLRELAGKENLEYPSVTLPPQPHTKEGVDAYNEVIARVRMWVNLNLWQKLKLSRDDAKPLLRLKGFPSFPLVERQANEVDWWDMVCNVKKLINEKKEDGKVFWQNLAGYKRQEALRPYLSSEEDRKKGKKFARYQLGDLLLHLEKKHGEDWGKVYDEAWERIDKKVEGLSKHIKLEEERRSEDAQSKAALTDWLRAKASFVIEGLKEADKDEFCRCDLKLQKWYGDLRGKPFAIEAENSILDISGFSKQYNCAFIWQKDGVKKLNLYLIINYFKGGKLRFKKIKPEAFEANRFYTVINKKSGEIVPMEVNFNFDDPNLIILPLAFGKRFGREFIWNDLLSLETGSLKLANGRVIEKTLYNRRTRQDEPALFVALTFERREVLDSSNIKPMNLIGVDRGENIPAVIALTDPEGCPLSRFKDSLGNPTHILRIGESYKEKQRTIQAKKEVEQRRAGGYSRKYASKAKNLADDMVRNTARDLLYYAVTQDAMLIFENLSRGFGRQGKRTFMAERQYTRMEDWLTAKLAYEGLPSKTYLSKTLAQYTSKTCSNCGFTITSADYDRVLEKLKKTATGWMTTINGKELKVEGQITYYNRYKRQNVVKDLSVELDRLSEESVNNDISSWTKGRSGEALSLLKKRFSHRPVQEKFVCLNCGFETHADEQAALNIARSWLFLRSQEYKKYQTNKTTGNTDKRAFVETWQSFYRKKLKEVWKPAV

SEQ ID NO: 37252 - protein, 978 aa, synthetic construct
  REGION 1..978: note = engineered CasX variant
QEIKRINKIRRRLVKDSNTKKAGKTGPMKTLLVRVMTPDLRERLENLRKKPENIPQPISNTSRANLNKLLTDYTEMKKAILHVYWEEFQKDPVGLMSRVAQPASKKIDQNKLKPEMDEKGNLTTAGFACSQCGQPLFVYKLEQVSEKGKAYTNYFGRCNVAEHEKLILLAQLKPEKDSDEAVTYSLGKFGQRALDFYSIHVTKESTHPVKPLAQIAGNRYASTPVGKALSDACMGTIASFLSKYQDIIIEHQKVVKGNQKRLESLRELAGKENLEYPSVTLPPQPHTKEGVDAYNEVIARVRMWVNLNLWQKLKLSRDDAKPLLRLKGFPSFPLVERQANEVDWWDMVCNVKKLINEKKEDGKVFWQNLAGYKRQEALRPYLSSEEDRKKGKKFARYQLGDLLLHLEKKHGEDWGKVYDEAWERIDKKVEGLSKHIKLEEERRSEDAQSKAALTDWLRAKASFVIEGLKEADKDEFCRCDLKLQKWYGDLRGKPFAIEAENSILDISGFSKQYNCAFIWQKDGVKKLNLYLIINYFKGGKLRFKKIKPEAFEANRFYTVINKKSGEIVPMEVNFNFDDPNLIILPLAFGKRFGREFIWNDLLSLETGSLKLANGRVIEKTLYNRRTRQDEPALFVALTFERREVLDSSNIKPMNLIGVDRGENIPAVIALTDPEGCPLSRFKDSLGNPTHILRIGESYKEKQRTIQAKKEVEQRRAGGYSRKYASKAKNLADDMVRNTARDLLYYAVTQDAMLIFENLSRGFGRQGKRTFMAERQYTRMEDWLTAKLAYEGLPSKTYLSKTLAQYTSKTCSNCGFTITSADYDRVLEKLKKTATGWMTTINGKELKVEGQITYYNRYKRQNVVKDLSVELDRLSEESVNNDISSWTKGRSGEALSLLKKRFSHRPVQEKFVCLNCGFETHADEQAALNIARSWLFLRSQEYKKYQTNKTTGNTDKRAFVETWQSFYRKKLKEVWKPAV

SEQ ID NO: 37253 - protein, 978 aa, synthetic construct
  REGION 1..978: note = engineered CasX variant
QEIKRINKIRRRLVKDSNTKKAGKTGPMKTLLVRVMTPDLRERLENLRKKPENIPQPISNTSRANLNKLLTDYTEMKKAILHVYWEEFQKDPVGLMSRVAQPASKKIDQNKLKPEMDEKGNLTTAGFACSQCGQPLFVYKLEQVSEKGKAYTNYFGRCNVAEHEKLILLAQLKPEKDSDEAVTYSLGKFGQRALDFYSIHVTKESTHPVKPLAQIAGNRYASAPVGKALSDACMGTIASFLSKYQDIIIEHQKVVKGNQKRLESLRELAGKENLEYPSVTLPPQPHTKEGVDAYNEVIARVRMWVNLNLWQKLKLSRDDAKPLLRLKGFPSFPLVERQANEVDWWDMVCNVKKLINEKKEDGKVFWQNLAGYKRQEALRPYLSSEEDRKKGKKFARYQLGDLLLHLEKKHGEDWGKVYDEAWERIDKKVEGLSKHIKLEEERRSEDAQSKAALTDWLRAKASFVIEGLKEADKDEFCRCDLKLQKWYGDLRGKPFAIEAENSILDISGFSKQYNCAFIWQKDGVKKLNLYLIINYFKGGKLRFKKIKPEAFEANRFYTVINKKSGEIVPMEVNFNFDDPNLIILPLAFGKRFGREFIWNDLLSLETGSLKLANGRVIEKTLYNRRTRQDEPALFVALTFERREVLDSSNIKPMNLIGVDRGENIPAVIALTDPEGCPLSRFKDSLGNPTHILRIGESYKEKQRTIQAKKEVEQRRAGGYSRKYASKAKNLADDMVRNTARDLLYYAVTQDAMLIFENLSRGFGRQGKRTFMAERQYTRMEDWLTAKLAYEGLPSKTYLSKTLAQYTSKTCSNCGFTITSADYDRVLEKLKKTATGWMTTINGKELKVEGQITYYNRYKRQNVVKDLSVELDRLSEESVNNDISSWTKGRSGEALSLLKKRFSHRPVQEKFVCLNCGFETHADEQAALNIARSWLFLRSQEYKKYQTNKTTGNTDKRAFVETWQSFYRKKLKEVWKPAV

SEQ ID NO: 37254 - protein, 978 aa, synthetic construct
  REGION 1..978: note = engineered CasX variant
QEIKRINKIRRRLVKDSNTKKAGKTGPMKTLLVRVMTPDLRERLENLRKKPENIPQPISNTSRANLNKLLTDYTEMKKAILHVYWEEFQKDPVGLMSRVAQPASKKIDQNKLKPEMDEKGNLTTAGFACSQCGQPLFVYKLEQVSEKGKAYTNYFGRCNVAEHEKLILLAQLKPEKDSDEAVTYSLGKFGQRALDFYSIHVTKESTHPVKPLAQIAGNRYASVPVGKALSDACMGTIASFLSKYQDIIIEHQKVVKGNQKRLESLRELAGKENLEYPSVTLPPQPHTKEGVDAYNEVIARVRMWVNLNLWQKLKLSRDDAKPLLRLKGFPSFPLVERQANEVDWWDMVCNVKKLINEKKEDGKVFWQNLAGYKRQEALRPYLSSEEDRKKGKKFARYQLGDLLLHLEKKHGEDWGKVYDEAWERIDKKVEGLSKHIKLEEERRSEDAQSKAALTDWLRAKASFVIEGLKEADKDEFCRCDLKLQKWYGDLRGKPFAIEAENSILDISGFSKQYNCAFIWQKDGVKKLNLYLIINYFKGGKLRFKKIKPEAFEANRFYTVINKKSGEIVPMEVNFNFDDPNLIILPLAFGKRFGREFIWNDLLSLETGSLKLANGRVIEKTLYNRRTRQDEPALFVALTFERREVLDSSNIKPMNLIGVDRGENIPAVIALTDPEGCPLSRFKDSLGNPTHILRIGESYKEKQRTIQAKKEVEQRRAGGYSRKYASKAKNLADDMVRNTARDLLYYAVTQDAMLIFENLSRGFGRQGKRTFMAERQYTRMEDWLTAKLAYEGLPSKTYLSKTLAQYTSKTCSNCGFTITSADYDRVLEKLKKTATGWMTTINGKELKVEGQITYYNRYKRQNVVKDLSVELDRLSEESVNNDISSWTKGRSGEALSLLKKRFSHRPVQEKFVCLNCGFETHADEQAALNIARSWLFLRSQEYKKYQTNKTTGNTDKRAFVETWQSFYRKKLKEVWKPAV

SEQ ID NO: 37255 - protein, 978 aa, synthetic construct
  REGION 1..978: note = engineered CasX variant
QEIKRINKIRRRLVKDSNTKKAGKTGPMKTLLVRVMTPDLRERLENLRKKPENIPQPISNTSRANLNKLLTDYTEMKKAILHVYWEEFQKDPVGLMSRVAQPASKKIDQNKLKPEMDEKGNLTTAGFACSQCGQPLFVYKLEQVSEKGKAYTNYFGRCNVAEHEKLIKLAQLKPEKDSDEAVTYSLGKFGQRALDFYSIHVTKESTHPVKPLAQIAGNRYASGPVGKALSDACMGTIASFLSKYQDIIIEHQKVVKGNQKRLESLRELAGKENLEYPSVTLPPQPHTKEGVDAYNEVIARVRMWVNLNLWQKLKLSRDDAKPLLRLKGFPSFPLVERQANEVDWWDMVCNVKKLINEKKEDGKVFWQNLAGYKRQEALRPYLSSEEDRKKGKKFARYQLGDLLLHLEKKHGEDWGKVYDEAWERIDKKVEGLSKHIKLEEERRSEDAQSKAALTDWLRAKASFVIEGLKEADKDEFCRCDLKLQKWYGDLRGKPFAIEAENSILDISGFSKQYNCAFIWQKDGVKKLNLYLIINYFKGGKLRFKKIKPEAFEANRFYTVINKKSGEIVPMEVNFNFDDPNLIILPLAFGKRFGREFIWNDLLSLETGSLKLANGRVIEKTLYNRRTRQDEPALFVALTFERREVLDSSNIKPMNLIGVDRGENIPAVIALTDPEGCPLSRFKDSLGNPTHILRIGESYKEKQRTIQAKKEVEQRRAGGYSRKYASKAKNLADDMVRNTARDLLYYAVTQDAMLIFENLSRGFGRQGKRTFMAERQYTRMEDWLTAKLAYEGLPSKTYLSKTLAQYTSKTCSNCGFTITSADYDRVLEKLKKTATGWMTTINGKELKVEGQITYYNRYKRQNVVKDLSVELDRLSEESVNNDISSWTKGRSGEALSLLKKRFSHRPVQEKFVCLNCGFETHADEQAALNIARSWLFLRSQEYKKYQTNKTTGNTDKRAFVETWQSFYRKKLKEVWKPAV

SEQ ID NO: 37256 - protein, 977 aa, synthetic construct
  REGION 1..977: note = engineered CasX variant
QEIKRINKIRRRLVKDSNTKKAGKTGPMKTLLVRVMTPDLRERLENLRKKPENIPQPISNTSRANLNKLLTDYTEMKKAILHVYWEEFQKDPVGLMSRVAQPASKKIDQNKLKPEMDEKGNLTTAGFACSQCGQPLFVYKLEQVSEKGKAYTNYFGRCNVAEHEKLILLAQLKPEKDSDEAVTYSLGKFGQRALDFYSIHVTKESTHPVKPLAQIAGNRYASPVGKALSDACMGTIASFLSKYQDIIIEHQKVVKGNQKRLESLRELAGKENLEYPSVTLPPQPHTKEGVDAYNEVIARVRMWVNLNLWQKLKLSRDDAKPLLRLKGFPSFPLVERQANEVDWWDMVCNVKKLINEKKEDGKVFWQNLAGYKRQEALRPYLSSEEDRKKGKKFARYQLGDLLLHLEKKHGEDWGKVYDEAWERIDKKVEGLSKHIKLEEERRSEDAQSKAALTDWLRAKASFVIEGLKEADKDEFCRCDLKLQKWYGDLRGKPFAIEAENSILDISGFSKQYNCAFIWQKDGVKKLNLYLIINYFKGGKLRFKKIKPEAFEANRFYTVINKKSGEIVPMEVNFNFDDPNLIILPLAFGKRFGREFIWNDLLSLETGSLKLANGRVIEKTLYNRRTRQDEPALFVALTFERREVLDSSNIKPMNLIGVDRGENIPAVIALTDPEGCPLSRFKDSLGNPTHILRIGESYKEKQRTIQAKKEVEQRRAGGYSRKYASKAKNLADDMVRNTARDLLYYAVTQDAMLIFENLSRGFGRQGKRTFMAERQYTRMEDWLTAKLAYEGLPSKTYLSKTLAQYTSKTCSNCGFTITSADYDRVLEKLKKTATGWMTTINGKELKVEGQITYYNRYKRQNVVKDLSVELDRLSEESVNNDISSWTKGRSGEALSLLKKRFSHRPVQEKFVCLNCGFETHADEQAALNIARSWLFLRSQEYKKYQTNKTTGNTDKRAFVETWQSFYRKKLKEVWKPAV

SEQ ID NO: 37257 - protein, 978 aa, synthetic construct
  REGION 1..978: note = engineered CasX variant
QEIKRINKIRRRLVKDSNTKKAGKTGPMKTLLVRVMTPDLRERLENLRKKPENIPQPISNTSRANLNKLLTDYTEMKKAILHVYWEEFQKDPVGLMSRVAQPASKKIDQNKLKPEMDEKGNLTTAGFACSQCGQPLFVYKLEQVSEKGKAYTNYFGRCNVAEHEKLILLAQLKPEKDSDEAVTYSLGKFGQRALDFYSIHVTKESTHPVKPLAQIAGNRYASYPVGKALSDACMGTIASFLSKYQDIIIEHQKVVKGNQKRLESLRELAGKENLEYPSVTLPPQPHTKEGVDAYNEVIARVRMWVNLNLWQKLKLSRDDAKPLLRLKGFPSFPLVERQANEVDWWDMVCNVKKLINEKKEDGKVFWQNLAGYKRQEALRPYLSSEEDRKKGKKFARYQLGDLLLHLEKKHGEDWGKVYDEAWERIDKKVEGLSKHIKLEEERRSEDAQSKAALTDWLRAKASFVIEGLKEADKDEFCRCDLKLQKWYGDLRGKPFAIEAENSILDISGFSKQYNCAFIWQKDGVKKLNLYLIINYFKGGKLRFKKIKPEAFEANRFYTVINKKSGEIVPMEVNFNFDDPNLIILPLAFGKRVGREFIWNDLLSLETGSLKLANGRVIEKTLYNRRTRQDEPALFVALTFERREVLDSSNIKPMNLIGVDRGENIPAVIALTDPEGCPLSRFKDSLGNPTHILRIGESYKEKQRTIQAKKEVEQRRAGGYSRKYASKAKNLADDMVRNTARDLLYYAVTQDAMLIFENLSRGFGRQGKRTFMAERQYTRMEDWLTAKLAYEGLPSKTYLSKTLAQYTSKTCSNCGFTITSADYDRVLEKLKKTATGWMTTINGKELKVEGQITYYNRYKRQNVVKDLSVELDRLSEESVNNDISSWTKGRSGEALSLLKKRFSHRPVQEKFVCLNCGFETHADEQAALNIARSWLFLRSQEYKKYQTNKTTGNTDKRAFVETWQSFYRKKLKEVWKPAV

SEQ ID NO: 37258 - protein, 978 aa, synthetic construct
  REGION 1..978: note = engineered CasX variant
QEIKRINKIRRRLVKDSNTKKAGKTGPMKTLLVRVMTPDLRERLENLRKKPENIPQPISNTSRANLNKLLTDYTEMKKAILHVYWEEFQKDPVGLMSRVAQPASKKIDQNKLKPEMDEKGNLTTAGFACSQCGQPLFVYKLEQVSEKGKAYTNYFGRCNVAEHEKLILLAQLKPEKDSDEAVTYSLGKFGQRALDFYSIHVTKESTHPVKPLAQIAGNRYASHPVGKALSDACMGTIASFLSKYQDIIIEHQKVVKGNQKRLESLRELAGKENLEYPSVTLPPQPHTKEGVDAYNEVIARVRMWVNLNLWQKLKLSRDDAKPLLRLKGFPSFPLVERQANEVDWWDMVCNVKKLINEKKEDGKVFWQNLAGYKRQEALRPYLSSEEDRKKGKKFARYQLGDLLLHLEKKHGEDWGKVYDEAWERIDKKVEGLSKHIKLEEERRSEDAQSKAALTDWLRAKASFVIEGLKEADKDEFCRCDLKLQKWYGDLRGKPFAIEAENSILDISGFSKQYNCAFIWQKDGVKKLNLYLIINYFKGGKLRFKKIKPEAFEANRFYTVINKKSGEIVPMEVNFNFDDPNLIILPLAFGKRVGREFIWNDLLSLETGSLKLANGRVIEKTLYNRRTRQDEPALFVALTFERREVLDSSNIKPMNLIGVDRGENIPAVIALTDPEGCPLSRFKDSLGNPTHILRIGESYKEKQRTIQAKKEVEQRRAGGYSRKYASKAKNLADDMVRNTARDLLYYAVTQDAMLIFENLSRGFGRQGKRTFMAERQYTRMEDWLTAKLAYEGLPSKTYLSKTLAQYTSKTCSNCGFTITSADYDRVLEKLKKTATGWMTTINGKELKVEGQITYYNRYKRQNVVKDLSVELDRLSEESVNNDISSWTKGRSGEALSLLKKRFSHRPVQEKFVCLNCGFETHADEQAALNIARSWLFLRSQEYKKYQTNKTTGNTDKRAFVETWQSFYRKKLKEVWKPAV

SEQ ID NO: 37259 - protein, 978 aa, synthetic construct
  REGION 1..978: note = engineered CasX variant
QEIKRINKIRRRLVKDSNTKKAGKTGPMKTLLVRVMTPDLRERLENLRKKPENIPQPISNTSRANLNKLLTDYTEMKKAILHVYWEEFQKDPVGLMSRVAQPASKKIDQNKLKPEMDEKGNLTTAGFACSQCGQPLFVYKLEQVSEKGKAYTNYFGRCNVAEHEKLILLAQLKPEKDSDEAVTYSLGKFGQRALDFYSIHVTKESTHPVKPLAQIAGNRYASSPVGKALSDACMGTIASFLSKYQDIIIEHQKVVKGNQKRLESLRELAGKENLEYPSVTLPPQPHTKEGVDAYNEVIARVRMWVNLNLWQKLKLSRDDAKPLLRLKGFPSFPLVERQANEVDWWDMVCNVKKLINEKKEDGKVFWQNLAGYKRQEALRPYLSSEEDRKKGKKFARYQLGDLLLHLEKKHGEDWGKVYDEAWERIDKKVEGLSKHIKLEEERRSEDAQSKAALTDWLRAKASFVIEGLKEADKDEFCRCDLKLQKWYGDLRGKPFAIEAENSILDISGFSKQYNCAFIWQKDGVKKLNLYLIINYFKGGKLRFKKIKPEAFEANRFYTVINKKSGEIVPMEVNFNFDDPNLIILPLAFGKRVGREFIWNDLLSLETGSLKLANGRVIEKTLYNRRTRQDEPALFVALTFERREVLDSSNIKPMNLIGVDRGENIPAVIALTDPEGCPLSRFKDSLGNPTHILRIGESYKEKQRTIQAKKEVEQRRAGGYSRKYASKAKNLADDMVRNTARDLLYYAVTQDAMLIFENLSRGFGRQGKRTFMAERQYTRMEDWLTAKLAYEGLPSKTYLSKTLAQYTSKTCSNCGFTITSADYDRVLEKLKKTATGWMTTINGKELKVEGQITYYNRYKRQNVVKDLSVELDRLSEESVNNDISSWTKGRSGEALSLLKKRFSHRPVQEKFVCLNCGFETHADEQAALNIARSWLFLRSQEYKKYQTNKTTGNTDKRAFVETWQSFYRKKLKEVWKPAV

SEQ ID NO: 37260 - protein, 978 aa, synthetic construct
  REGION 1..978: note = engineered CasX variant
QEIKRINKIRRRLVKDSNTKKAGKTGPMKTLLVRVMTPDLRERLENLRKKPENIPQPISNTSRANLNKLLTDYTEMKKAILHVYWEEFQKDPVGLMSRVAQPASKKIDQNKLKPEMDEKGNLTTAGFACSQCGQPLFVYKLEQVSEKGKAYTNYFGRCNVAEHEKLILLAQLKPEKDSDEAVTYSLGKFGQRALDFYSIHVTKESTHPVKPLAQIAGNRYASTPVGKALSDACMGTIASFLSKYQDIIIEHQKVVKGNQKRLESLRELAGKENLEYPSVTLPPQPHTKEGVDAYNEVIARVRMWVNLNLWQKLKLSRDDAKPLLRLKGFPSFPLVERQANEVDWWDMVCNVKKLINEKKEDGKVFWQNLAGYKRQEALRPYLSSEEDRKKGKKFARYQLGDLLLHLEKKHGEDWGKVYDEAWERIDKKVEGLSKHIKLEEERRSEDAQSKAALTDWLRAKASFVIEGLKEADKDEFCRCDLKLQKWYGDLRGKPFAIEAENSILDISGFSKQYNCAFIWQKDGVKKLNLYLIINYFKGGKLRFKKIKPEAFEANRFYTVINKKSGEIVPMEVNFNFDDPNLIILPLAFGKRVGREFIWNDLLSLETGSLKLANGRVIEKTLYNRRTRQDEPALFVALTFERREVLDSSNIKPMNLIGVDRGENIPAVIALTDPEGCPLSRFKDSLGNPTHILRIGESYKEKQRTIQAKKEVEQRRAGGYSRKYASKAKNLADDMVRNTARDLLYYAVTQDAMLIFENLSRGFGRQGKRTFMAERQYTRMEDWLTAKLAYEGLPSKTYLSKTLAQYTSKTCSNCGFTITSADYDRVLEKLKKTATGWMTTINGKELKVEGQITYYNRYKRQNVVKDLSVELDRLSEESVNNDISSWTKGRSGEALSLLKKRFSHRPVQEKFVCLNCGFETHADEQAALNIARSWLFLRSQEYKKYQTNKTTGNTDKRAFVETWQSFYRKKLKEVWKPAV

SEQ ID NO: 37261 - protein, 978 aa, synthetic construct
  REGION 1..978: note = engineered CasX variant
QEIKRINKIRRRLVKDSNTKKAGKTGPMKTLLVRVMTPDLRERLENLRKKPENIPQPISNTSRANLNKLLTDYTEMKKAILHVYWEEFQKDPVGLMSRVAQPASKKIDQNKLKPEMDEKGNLTTAGFACSQCGQPLFVYKLEQVSEKGKAYTNYFGRCNVAEHEKLILLAQLKPEKDSDEAVTYSLGKFGQRALDFYSIHVTKESTHPVKPLAQIAGNRYASAPVGKALSDACMGTIASFLSKYQDIIIEHQKVVKGNQKRLESLRELAGKENLEYPSVTLPPQPHTKEGVDAYNEVIARVRMWVNLNLWQKLKLSRDDAKPLLRLKGFPSFPLVERQANEVDWWDMVCNVKKLINEKKEDGKVFWQNLAGYKRQEALRPYLSSEEDRKKGKKFARYQLGDLLLHLEKKHGEDWGKVYDEAWERIDKKVEGLSKHIKLEEERRSEDAQSKAALTDWLRAKASFVIEGLKEADKDEFCRCDLKLQKWYGDLRGKPFAIEAENSILDISGFSKQYNCAFIWQKDGVKKLNLYLIINYFKGGKLRFKKIKPEAFEANRFYTVINKKSGEIVPMEVNFNFDDPNLIILPLAFGKRVGREFIWNDLLSLETGSLKLANGRVIEKTLYNRRTRQDEPALFVALTFERREVLDSSNIKPMNLIGVDRGENIPAVIALTDPEGCPLSRFKDSLGNPTHILRIGESYKEKQRTIQAKKEVEQRRAGGYSRKYASKAKNLADDMVRNTARDLLYYAVTQDAMLIFENLSRGFGRQGKRTFMAERQYTRMEDWLTAKLAYEGLPSKTYLSKTLAQYTSKTCSNCGFTITSADYDRVLEKLKKTATGWMTTINGKELKVEGQITYYNRYKRQNVVKDLSVELDRLSEESVNNDISSWTKGRSGEALSLLKKRFSHRPVQEKFVCLNCGFETHADEQAALNIARSWLFLRSQEYKKYQTNKTTGNTDKRAFVETWQSFYRKKLKEVWKPAV

SEQ ID NO: 37262 - protein, 978 aa, synthetic construct
  REGION 1..978: note = engineered CasX variant
QEIKRINKIRRRLVKDSNTKKAGKTGPMKTLLVRVMTPDLRERLENLRKKPENIPQPISNTSRANLNKLLTDYTEMKKAILHVYWEEFQKDPVGLMSRVAQPASKKIDQNKLKPEMDEKGNLTTAGFACSQCGQPLFVYKLEQVSEKGKAYTNYFGRCNVAEHEKLILLAQLKPEKDSDEAVTYSLGKFGQRALDFYSIHVTKESTHPVKPLAQIAGNRYASVPVGKALSDACMGTIASFLSKYQDIIIEHQKVVKGNQKRLESLRELAGKENLEYPSVTLPPQPHTKEGVDAYNEVIARVRMWVNLNLWQKLKLSRDDAKPLLRLKGFPSFPLVERQANEVDWWDMVCNVKKLINEKKEDGKVFWQNLAGYKRQEALRPYLSSEEDRKKGKKFARYQLGDLLLHLEKKHGEDWGKVYDEAWERIDKKVEGLSKHIKLEEERRSEDAQSKAALTDWLRAKASFVIEGLKEADKDEFCRCDLKLQKWYGDLRGKPFAIEAENSILDISGFSKQYNCAFIWQKDGVKKLNLYLIINYFKGGKLRFKKIKPEAFEANRFYTVINKKSGEIVPMEVNFNFDDPNLIILPLAFGKRVGREFIWNDLLSLETGSLKLANGRVIEKTLYNRRTRQDEPALFVALTFERREVLDSSNIKPMNLIGVDRGENIPAVIALTDPEGCPLSRFKDSLGNPTHILRIGESYKEKQRTIQAKKEVEQRRAGGYSRKYASKAKNLADDMVRNTARDLLYYAVTQDAMLIFENLSRGFGRQGKRTFMAERQYTRMEDWLTAKLAYEGLPSKTYLSKTLAQYTSKTCSNCGFTITSADYDRVLEKLKKTATGWMTTINGKELKVEGQITYYNRYKRQNVVKDLSVELDRLSEESVNNDISSWTKGRSGEALSLLKKRFSHRPVQEKFVCLNCGFETHADEQAALNIARSWLFLRSQEYKKYQTNKTTGNTDKRAFVETWQSFYRKKLKEVWKPAV

SEQ ID NO: 37263 - protein, 978 aa, synthetic construct
  REGION 1..978: note = engineered CasX variant
QEIKRINKIRRRLVKDSNTKKAGKTGPMKTLLVRVMTPDLRERLENLRKKPENIPQPISNTSRANLNKLLTDYTEMKKAILHVYWEEFQKDPVGLMSRVAQPASKKIDQNKLKPEMDEKGNLTTAGFACSQCGQPLFVYKLEQVSEKGKAYTNYFGRCNVAEHEKLIKLAQLKPEKDSDEAVTYSLGKFGQRALDFYSIHVTKESTHPVKPLAQIAGNRYASGPVGKALSDACMGTIASFLSKYQDIIIEHQKVVKGNQKRLESLRELAGKENLEYPSVTLPPQPHTKEGVDAYNEVIARVRMWVNLNLWQKLKLSRDDAKPLLRLKGFPSFPLVERQANEVDWWDMVCNVKKLINEKKEDGKVFWQNLAGYKRQEALRPYLSSEEDRKKGKKFARYQLGDLLLHLEKKHGEDWGKVYDEAWERIDKKVEGLSKHIKLEEERRSEDAQSKAALTDWLRAKASFVIEGLKEADKDEFCRCDLKLQKWYGDLRGKPFAIEAENSILDISGFSKQYNCAFIWQKDGVKKLNLYLIINYFKGGKLRFKKIKPEAFEANRFYTVINKKSGEIVPMEVNFNFDDPNLIILPLAFGKRVGREFIWNDLLSLETGSLKLANGRVIEKTLYNRRTRQDEPALFVALTFERREVLDSSNIKPMNLIGVDRGENIPAVIALTDPEGCPLSRFKDSLGNPTHILRIGESYKEKQRTIQAKKEVEQRRAGGYSRKYASKAKNLADDMVRNTARDLLYYAVTQDAMLIFENLSRGFGRQGKRTFMAERQYTRMEDWLTAKLAYEGLPSKTYLSKTLAQYTSKTCSNCGFTITSADYDRVLEKLKKTATGWMTTINGKELKVEGQITYYNRYKRQNVVKDLSVELDRLSEESVNNDISSWTKGRSGEALSLLKKRFSHRPVQEKFVCLNCGFETHADEQAALNIARSWLFLRSQEYKKYQTNKTTGNTDKRAFVETWQSFYRKKLKEVWKPAV

SEQ ID NO: 37264 - protein, 977 aa, synthetic construct
  REGION 1..977: note = engineered CasX variant
QEIKRINKIRRRLVKDSNTKKAGKTGPMKTLLVRVMTPDLRERLENLRKKPENIPQPISNTSRANLNKLLTDYTEMKKAILHVYWEEFQKDPVGLMSRVAQPASKKIDQNKLKPEMDEKGNLTTAGFACSQCGQPLFVYKLEQVSEKGKAYTNYFGRCNVAEHEKLILLAQLKPEKDSDEAVTYSLGKFGQRALDFYSIHVTKESTHPVKPLAQIAGNRYASPVGKALSDACMGTIASFLSKYQDIIIEHQKVVKGNQKRLESLRELAGKENLEYPSVTLPPQPHTKEGVDAYNEVIARVRMWVNLNLWQKLKLSRDDAKPLLRLKGFPSFPLVERQANEVDWWDMVCNVKKLINEKKEDGKVFWQNLAGYKRQEALRPYLSSEEDRKKGKKFARYQLGDLLLHLEKKHGEDWGKVYDEAWERIDKKVEGLSKHIKLEEERRSEDAQSKAALTDWLRAKASFVIEGLKEADKDEFCRCDLKLQKWYGDLRGKPFAIEAENSILDISGFSKQYNCAFIWQKDGVKKLNLYLIINYFKGGKLRFKKIKPEAFEANRFYTVINKKSGEIVPMEVNFNFDDPNLIILPLAFGKRVGREFIWNDLLSLETGSLKLANGRVIEKTLYNRRTRQDEPALFVALTFERREVLDSSNIKPMNLIGVDRGENIPAVIALTDPEGCPLSRFKDSLGNPTHILRIGESYKEKQRTIQAKKEVEQRRAGGYSRKYASKAKNLADDMVRNTARDLLYYAVTQDAMLIFENLSRGFGRQGKRTFMAERQYTRMEDWLTAKLAYEGLPSKTYLSKTLAQYTSKTCSNCGFTITSADYDRVLEKLKKTATGWMTTINGKELKVEGQITYYNRYKRQNVVKDLSVELDRLSEESVNNDISSWTKGRSGEALSLLKKRFSHRPVQEKFVCLNCGFETHADEQAALNIARSWLFLRSQEYKKYQTNKTTGNTDKRAFVETWQSFYRKKLKEVWKPAV

SEQ ID NO: 37265 - protein, 979 aa, synthetic construct
  REGION 1..979: note = engineered CasX variant
QEIKRINKIRRRLVKDSNTKKAGKTGPMKTLLVRVMTPDLRERLENLRKKPENIPQPISNTSRANLNKLLTDYTEMKKAILHVYWEEFQKDPVGLMSRVAQPASKKIDQNKLKPEMDEKGNLTTAGFACSQCGQPLFVYKLEQVSEKGKAYTNYFGRCNVAEHEKLILLAQLKPEKDSDEAVTYSLGKFGQRALDFYSIHVTKESTHPVKPLAQIAGNRYASYPVGKALSDACMGTIASFLSKYQDIIIEHQKVVKGNQKRLESLRELAGKENLEYPSVTLPPQPHTKEGVDAYNEVIARVRMWVNLNLWQKLKLSRDDAKPLLRLKGFPSFPLVERQANEVDWWDMVCNVKKLINEKKEDGKVFWQNLAGYKRQEALRPYLSSEEDRKKGKKFARYQLGDLLLHLEKKHGEDWGKVYDEAWERIDKKVEGLSKHIKLEEERRSEDAQSKAALTDWLRAKASFVIEGLKEADKDEFCRCDLKLQKWYGDLRGKPFAIEAENSILDISGFSKQYNCAFIWQKDGVKKLNLYLIINYFKGGKLRFKKIKPEAFEANRFYTVINKKSGEIVPMEVNFNFDDPNLIILPLAFGKRQGREFIWNDLLSLETGSLKLANGRVIEKTLYNRRTRQDEPALFVALTFERREVLDSSNIKTPMNLIGVDRGENIPAVIALTDPEGCPLSRFKDSLGNPTHILRIGESYKEKQRTIQAKKEVEQRRAGGYSRKYASKAKNLADDMVRNTARDLLYYAVTQDAMLIFENLSRGFGRQGKRTFMAERQYTRMEDWLTAKLAYEGLPSKTYLSKTLAQYTSKTCSNCGFTITSADYDRVLEKLKKTATGWMTTINGKELKVEGQITYYNRYKRQNVVKDLSVELDRLSEESVNNDISSWTKGRSGEALSLLKKRFSHRPVQEKFVCLNCGFETHADEQAALNIARSWLFLRSQEYKKYQTNKTTGNTDKRAFVETWQSFYRKKLKEVWKPAV

SEQ ID NO: 37266 - protein, 979 aa, synthetic construct
  REGION 1..979: note = engineered CasX variant
QEIKRINKIRRRLVKDSNTKKAGKTGPMKTLLVRVMTPDLRERLENLRKKPENIPQPISNTSRANLNKLLTDYTEMKKAILHVYWEEFQKDPVGLMSRVAQPASKKIDQNKLKPEMDEKGNLTTAGFACSQCGQPLFVYKLEQVSEKGKAYTNYFGRCNVAEHEKLILLAQLKPEKDSDEAVTYSLGKFGQRALDFYSIHVTKESTHPVKPLAQIAGNRYASHPVGKALSDACMGTIASFLSKYQDIIIEHQKVVKGNQKRLESLRELAGKENLEYPSVTLPPQPHTKEGVDAYNEVIARVRMWVNLNLWQKLKLSRDDAKPLLRLKGFPSFPLVERQANEVDWWDMVCNVKKLINEKKEDGKVFWQNLAGYKRQEALRPYLSSEEDRKKGKKFARYQLGDLLLHLEKKHGEDWGKVYDEAWERIDKKVEGLSKHIKLEEERRSEDAQSKAALTDWLRAKASFVIEGLKEADKDEFCRCDLKLQKWYGDLRGKPFAIEAENSILDISGFSKQYNCAFIWQKDGVKKLNLYLIINYFKGGKLRFKKIKPEAFEANRFYTVINKKSGEIVPMEVNFNFDDPNLIILPLAFGKRQGREFIWNDLLSLETGSLKLANGRVIEKTLYNRRTRQDEPALFVALTFERREVLDSSNIKTPMNLIGVDRGENIPAVIALTDPEGCPLSRFKDSLGNPTHILRIGESYKEKQRTIQAKKEVEQRRAGGYSRKYASKAKNLADDMVRNTARDLLYYAVTQDAMLIFENLSRGFGRQGKRTFMAERQYTRMEDWLTAKLAYEGLPSKTYLSKTLAQYTSKTCSNCGFTITSADYDRVLEKLKKTATGWMTTINGKELKVEGQITYYNRYKRQNVVKDLSVELDRLSEESVNNDISSWTKGRSGEALSLLKKRFSHRPVQEKFVCLNCGFETHADEQAALNIARSWLFLRSQEYKKYQTNKTTGNTDKRAFVETWQSFYRKKLKEVWKPAV

SEQ ID NO: 37267 - protein, 979 aa, synthetic construct
  REGION 1..979: note = engineered CasX variant
QEIKRINKIRRRLVKDSNTKKAGKTGPMKTLLVRVMTPDLRERLENLRKKPENIPQPISNTSRANLNKLLTDYTEMKKAILHVYWEEFQKDPVGLMSRVAQPASKKIDQNKLKPEMDEKGNLTTAGFACSQCGQPLFVYKLEQVSEKGKAYTNYFGRCNVAEHEKLILLAQLKPEKDSDEAVTYSLGKFGQRALDFYSIHVTKESTHPVKPLAQIAGNRYASSPVGKALSDACMGTIASFLSKYQDIIIEHQKVVKGNQKRLESLRELAGKENLEYPSVTLPPQPHTKEGVDAYNEVIARVRMWVNLNLWQKLKLSRDDAKPLLRLKGFPSFPLVERQANEVDWWDMVCNVKKLINEKKEDGKVFWQNLAGYKRQEALRPYLSSEEDRKKGKKFARYQLGDLLLHLEKKHGEDWGKVYDEAWERIDKKVEGLSKHIKLEEERRSEDAQSKAALTDWLRAKASFVIEGLKEADKDEFCRCDLKLQKWYGDLRGKPFAIEAENSILDISGFSKQYNCAFIWQKDGVKKLNLYLIINYFKGGKLRFKKIKPEAFEANRFYTVINKKSGEIVPMEVNFNFDDPNLIILPLAFGKRQGREFIWNDLLSLETGSLKLANGRVIEKTLYNRRTRQDEPALFVALTFERREVLDSSNIKTPMNLIGVDRGENIPAVIALTDPEGCPLSRFKDSLGNPTHILRIGESYKEKQRTIQAKKEVEQRRAGGYSRKYASKAKNLADDMVRNTARDLLYYAVTQDAMLIFENLSRGFGRQGKRTFMAERQYTRMEDWLTAKLAYEGLPSKTYLSKTLAQYTSKTCSNCGFTITSADYDRVLEKLKKTATGWMTTINGKELKVEGQITYYNRYKRQNVVKDLSVELDRLSEESVNNDISSWTKGRSGEALSLLKKRFSHRPVQEKFVCLNCGFETHADEQAALNIARSWLFLRSQEYKKYQTNKTTGNTDKRAFVETWQSFYRKKLKEVWKPAV

SEQ ID NO: 37268 - protein, 979 aa, synthetic construct
  REGION 1..979: note = engineered CasX variant
QEIKRINKIRRRLVKDSNTKKAGKTGPMKTLLVRVMTPDLRERLENLRKKPENIPQPISNTSRANLNKLLTDYTEMKKAILHVYWEEFQKDPVGLMSRVAQPASKKIDQNKLKPEMDEKGNLTTAGFACSQCGQPLFVYKLEQVSEKGKAYTNYFGRCNVAEHEKLILLAQLKPEKDSDEAVTYSLGKFGQRALDFYSIHVTKESTHPVKPLAQIAGNRYASTPVGKALSDACMGTIASFLSKYQDIIIEHQKVVKGNQKRLESLRELAGKENLEYPSVTLPPQPHTKEGVDAYNEVIARVRMWVNLNLWQKLKLSRDDAKPLLRLKGFPSFPLVERQANEVDWWDMVCNVKKLINEKKEDGKVFWQNLAGYKRQEALRPYLSSEEDRKKGKKFARYQLGDLLLHLEKKHGEDWGKVYDEAWERIDKKVEGLSKHIKLEEERRSEDAQSKAALTDWLRAKASFVIEGLKEADKDEFCRCDLKLQKWYGDLRGKPFAIEAENSILDISGFSKQYNCAFIWQKDGVKKLNLYLIINYFKGGKLRFKKIKPEAFEANRFYTVINKKSGEIVPMEVNFNFDDPNLIILPLAFGKRQGREFIWNDLLSLETGSLKLANGRVIEKTLYNRRTRQDEPALFVALTFERREVLDSSNIKTPMNLIGVDRGENIPAVIALTDPEGCPLSRFKDSLGNPTHILRIGESYKEKQRTIQAKKEVEQRRAGGYSRKYASKAKNLADDMVRNTARDLLYYAVTQDAMLIFENLSRGFGRQGKRTFMAERQYTRMEDWLTAKLAYEGLPSKTYLSKTLAQYTSKTCSNCGFTITSADYDRVLEKLKKTATGWMTTINGKELKVEGQITYYNRYKRQNVVKDLSVELDRLSEESVNNDISSWTKGRSGEALSLLKKRFSHRPVQEKFVCLNCGFETHADEQAALNIARSWLFLRSQEYKKYQTNKTTGNTDKRAFVETWQSFYRKKLKEVWKPAV

SEQ ID NO: 37269 - protein, 979 aa, synthetic construct
  REGION 1..979: note = engineered CasX variant
QEIKRINKIRRRLVKDSNTKKAGKTGPMKTLLVRVMTPDLRERLENLRKKPENIPQPISNTSRANLNKLLTDYTEMKKAILHVYWEEFQKDPVGLMSRVAQPASKKIDQNKLKPEMDEKGNLTTAGFACSQCGQPLFVYKLEQVSEKGKAYTNYFGRCNVAEHEKLILLAQLKPEKDSDEAVTYSLGKFGQRALDFYSIHVTKESTHPVKPLAQIAGNRYASAPVGKALSDACMGTIASFLSKYQDIIIEHQKVVKGNQKRLESLRELAGKENLEYPSVTLPPQPHTKEGVDAYNEVIARVRMWVNLNLWQKLKLSRDDAKPLLRLKGFPSFPLVERQANEVDWWDMVCNVKKLINEKKEDGKVFWQNLAGYKRQEALRPYLSSEEDRKKGKKFARYQLGDLLLHLEKKHGEDWGKVYDEAWERIDKKVEGLSKHIKLEEERRSEDAQSKAALTDWLRAKASFVIEGLKEADKDEFCRCDLKLQKWYGDLRGKPFAIEAENSILDISGFSKQYNCAFIWQKDGVKKLNLYLIINYFKGGKLRFKKIKPEAFEANRFYTVINKKSGEIVPMEVNFNFDDPNLIILPLAFGKRQGREFIWNDLLSLETGSLKLANGRVIEKTLYNRRTRQDEPALFVALTFERREVLDSSNIKTPMNLIGVDRGENIPAVIALTDPEGCPLSRFKDSLGNPTHILRIGESYKEKQRTIQAKKEVEQRRAGGYSRKYASKAKNLADDMVRNTARDLLYYAVTQDAMLIFENLSRGFGRQGKRTFMAERQYTRMEDWLTAKLAYEGLPSKTYLSKTLAQYTSKTCSNCGFTITSADYDRVLEKLKKTATGWMTTINGKELKVEGQITYYNRYKRQNVVKDLSVELDRLSEESVNNDISSWTKGRSGEALSLLKKRFSHRPVQEKFVCLNCGFETHADEQAALNIARSWLFLRSQEYKKYQTNKTTGNTDKRAFVETWQSFYRKKLKEVWKPAV

SEQ ID NO: 37270 - protein, 979 aa, synthetic construct
  REGION 1..979: note = engineered CasX variant
QEIKRINKIRRRLVKDSNTKKAGKTGPMKTLLVRVMTPDLRERLENLRKKPENIPQPISNTSRANLNKLLTDYTEMKKAILHVYWEEFQKDPVGLMSRVAQPASKKIDQNKLKPEMDEKGNLTTAGFACSQCGQPLFVYKLEQVSEKGKAYTNYFGRCNVAEHEKLILLAQLKPEKDSDEAVTYSLGKFGQRALDFYSIHVTKESTHPVKPLAQIAGNRYASVPVGKALSDACMGTIASFLSKYQDIIIEHQKVVKGNQKRLESLRELAGKENLEYPSVTLPPQPHTKEGVDAYNEVIARVRMWVNLNLWQKLKLSRDDAKPLLRLKGFPSFPLVERQANEVDWWDMVCNVKKLINEKKEDGKVFWQNLAGYKRQEALRPYLSSEEDRKKGKKFARYQLGDLLLHLEKKHGEDWGKVYDEAWERIDKKVEGLSKHIKLEEERRSEDAQSKAALTDWLRAKASFVIEGLKEADKDEFCRCDLKLQKWYGDLRGKPFAIEAENSILDISGFSKQYNCAFIWQKDGVKKLNLYLIINYFKGGKLRFKKIKPEAFEANRFYTVINKKSGEIVPMEVNFNFDDPNLIILPLAFGKRQGREFIWNDLLSLETGSLKLANGRVIEKTLYNRRTRQDEPALFVALTFERREVLDSSNIKTPMNLIGVDRGENIPAVIALTDPEGCPLSRFKDSLGNPTHILRIGESYKEKQRTIQAKKEVEQRRAGGYSRKYASKAKNLADDMVRNTARDLLYYAVTQDAMLIFENLSRGFGRQGKRTFMAERQYTRMEDWLTAKLAYEGLPSKTYLSKTLAQYTSKTCSNCGFTITSADYDRVLEKLKKTATGWMTTINGKELKVEGQITYYNRYKRQNVVKDLSVELDRLSEESVNNDISSWTKGRSGEALSLLKKRFSHRPVQEKFVCLNCGFETHADEQAALNIARSWLFLRSQEYKKYQTNKTTGNTDKRAFVETWQSFYRKKLKEVWKPAV

SEQ ID NO: 37271 - protein, 979 aa, synthetic construct
  REGION 1..979: note = engineered CasX variant
QEIKRINKIRRRLVKDSNTKKAGKTGPMKTLLVRVMTPDLRERLENLRKKPENIPQPISNTSRANLNKLLTDYTEMKKAILHVYWEEFQKDPVGLMSRVAQPASKKIDQNKLKPEMDEKGNLTTAGFACSQCGQPLFVYKLEQVSEKGKAYTNYFGRCNVAEHEKLIKLAQLKPEKDSDEAVTYSLGKFGQRALDFYSIHVTKESTHPVKPLAQIAGNRYASGPVGKALSDACMGTIASFLSKYQDIIIEHQKVVKGNQKRLESLRELAGKENLEYPSVTLPPQPHTKEGVDAYNEVIARVRMWVNLNLWQKLKLSRDDAKPLLRLKGFPSFPLVERQANEVDWWDMVCNVKKLINEKKEDGKVFWQNLAGYKRQEALRPYLSSEEDRKKGKKFARYQLGDLLLHLEKKHGEDWGKVYDEAWERIDKKVEGLSKHIKLEEERRSEDAQSKAALTDWLRAKASFVIEGLKEADKDEFCRCDLKLQKWYGDLRGKPFAIEAENSILDISGFSKQYNCAFIWQKDGVKKLNLYLIINYFKGGKLRFKKIKPEAFEANRFYTVINKKSGEIVPMEVNFNFDDPNLIILPLAFGKRQGREFIWNDLLSLETGSLKLANGRVIEKTLYNRRTRQDEPALFVALTFERREVLDSSNIKTPMNLIGVDRGENIPAVIALTDPEGCPLSRFKDSLGNPTHILRIGESYKEKQRTIQAKKEVEQRRAGGYSRKYASKAKNLADDMVRNTARDLLYYAVTQDAMLIFENLSRGFGRQGKRTFMAERQYTRMEDWLTAKLAYEGLPSKTYLSKTLAQYTSKTCSNCGFTITSADYDRVLEKLKKTATGWMTTINGKELKVEGQITYYNRYKRQNVVKDLSVELDRLSEESVNNDISSWTKGRSGEALSLLKKRFSHRPVQEKFVCLNCGFETHADEQAALNIARSWLFLRSQEYKKYQTNKTTGNTDKRAFVETWQSFYRKKLKEVWKPAV

SEQ ID NO: 37272 - protein, 978 aa, synthetic construct
  REGION 1..978: note = engineered CasX variant
QEIKRINKIRRRLVKDSNTKKAGKTGPMKTLLVRVMTPDLRERLENLRKKPENIPQPISNTSRANLNKLLTDYTEMKKAILHVYWEEFQKDPVGLMSRVAQPASKKIDQNKLKPEMDEKGNLTTAGFACSQCGQPLFVYKLEQVSEKGKAYTNYFGRCNVAEHEKLILLAQLKPEKDSDEAVTYSLGKFGQRALDFYSIHVTKESTHPVKPLAQIAGNRYASPVGKALSDACMGTIASFLSKYQDIIIEHQKVVKGNQKRLESLRELAGKENLEYPSVTLPPQPHTKEGVDAYNEVIARVRMWVNLNLWQKLKLSRDDAKPLLRLKGFPSFPLVERQANEVDWWDMVCNVKKLINEKKEDGKVFWQNLAGYKRQEALRPYLSSEEDRKKGKKFARYQLGDLLLHLEKKHGEDWGKVYDEAWERIDKKVEGLSKHIKLEEERRSEDAQSKAALTDWLRAKASFVIEGLKEADKDEFCRCDLKLQKWYGDLRGKPFAIEAENSILDISGFSKQYNCAFIWQKDGVKKLNLYLIINYFKGGKLRFKKIKPEAFEANRFYTVINKKSGEIVPMEVNFNFDDPNLIILPLAFGKRQGREFIWNDLLSLETGSLKLANGRVIEKTLYNRRTRQDEPALFVALTFERREVLDSSNIKTPMNLIGVDRGENIPAVIALTDPEGCPLSRFKDSLGNPTHILRIGESYKEKQRTIQAKKEVEQRRAGGYSRKYASKAKNLADDMVRNTARDLLYYAVTQDAMLIFENLSRGFGRQGKRTFMAERQYTRMEDWLTAKLAYEGLPSKTYLSKTLAQYTSKTCSNCGFTITSADYDRVLEKLKKTATGWMTTINGKELKVEGQITYYNRYKRQNVVKDLSVELDRLSEESVNNDISSWTKGRSGEALSLLKKRFSHRPVQEKFVCLNCGFETHADEQAALNIARSWLFLRSQEYKKYQTNKTTGNTDKRAFVETWQSFYRKKLKEVWKPAV

SEQ ID NO: 37273 - protein, 979 aa, synthetic construct
  REGION 1..979: note = engineered CasX variant
QEIKRINKIRRRLVKDSNTKKAGKTGPMKTLLVRVMTPDLRERLENLRKKPENIPQPISNTSRANLNKLLTDYTEMKKAILHVYWEEFQKDPVGLMSRVAQPASKKIDQNKLKPEMDEKGNLTTAGFACSQCGQPLFVYKLEQVSEKGKAYTNYFGRCNVAEHEKLILLAQLKPEKDSDEAVTYSLGKFGQRALDFYSIHVTKESTHPVKPLAQIAGNRYASYPVGKALSDACMGTIASFLSKYQDIIIEHQKVVKGNQKRLESLRELAGKENLEYPSVTLPPQPHTKEGVDAYNEVIARVRMWVNLNLWQKLKLSRDDAKPLLRLKGFPSFPLVERQANEVDWWDMVCNVKKLINEKKEDGKVFWQNLAGYKRQEALRPYLSSEEDRKKGKKFARYQLGDLLLHLEKKHGEDWGKVYDEAWERIDKKVEGLSKHIKLEEERRSEDAQSKAALTDWLRAKASFVIEGLKEADKDEFCRCDLKLQKWYGDLRGKPFAIEAENSILDISGFSKQYNCAFIWQKDGVKKLNLYLIINYFKGGKLRFKKIKPEAFEANRFYTVINKKSGEIVPMEVNFNFDDPNLIILPLAFGKRQGREFIWNDLLSLETGSLKLANGRVIEKTLYNRRTRQDEPALFVALTFERREVLDSSNIKPMSNLIGVDRGENIPAVIALTDPEGCPLSRFKDSLGNPTHILRIGESYKEKQRTIQAKKEVEQRRAGGYSRKYASKAKNLADDMVRNTARDLLYYAVTQDAMLIFENLSRGFGRQGKRTFMAERQYTRMEDWLTAKLAYEGLPSKTYLSKTLAQYTSKTCSNCGFTITSADYDRVLEKLKKTATGWMTTINGKELKVEGQITYYNRYKRQNVVKDLSVELDRLSEESVNNDISSWTKGRSGEALSLLKKRFSHRPVQEKFVCLNCGFETHADEQAALNIARSWLFLRSQEYKKYQTNKTTGNTDKRAFVETWQSFYRKKLKEVWKPAV

SEQ ID NO: 37274 - protein, 979 aa, synthetic construct
  REGION 1..979: note = engineered CasX variant
QEIKRINKIRRRLVKDSNTKKAGKTGPMKTLLVRVMTPDLRERLENLRKKPENIPQPISNTSRANLNKLLTDYTEMKKAILHVYWEEFQKDPVGLMSRVAQPASKKIDQNKLKPEMDEKGNLTTAGFACSQCGQPLFVYKLEQVSEKGKAYTNYFGRCNVAEHEKLILLAQLKPEKDSDEAVTYSLGKFGQRALDFYSIHVTKESTHPVKPLAQIAGNRYASHPVGKALSDACMGTIASFLSKYQDIIIEHQKVVKGNQKRLESLRELAGKENLEYPSVTLPPQPHTKEGVDAYNEVIARVRMWVNLNLWQKLKLSRDDAKPLLRLKGFPSFPLVERQANEVDWWDMVCNVKKLINEKKEDGKVFWQNLAGYKRQEALRPYLSSEEDRKKGKKFARYQLGDLLLHLEKKHGEDWGKVYDEAWERIDKKVEGLSKHIKLEEERRSEDAQSKAALTDWLRAKASFVIEGLKEADKDEFCRCDLKLQKWYGDLRGKPFAIEAENSILDISGFSKQYNCAFIWQKDGVKKLNLYLIINYFKGGKLRFKKIKPEAFEANRFYTVINKKSGEIVPMEVNFNFDDPNLIILPLAFGKRQGREFIWNDLLSLETGSLKLANGRVIEKTLYNRRTRQDEPALFVALTFERREVLDSSNIKPMSNLIGVDRGENIPAVIALTDPEGCPLSRFKDSLGNPTHILRIGESYKEKQRTIQAKKEVEQRRAGGYSRKYASKAKNLADDMVRNTARDLLYYAVTQDAMLIFENLSRGFGRQGKRTFMAERQYTRMEDWLTAKLAYEGLPSKTYLSKTLAQYTSKTCSNCGFTITSADYDRVLEKLKKTATGWMTTINGKELKVEGQITYYNRYKRQNVVKDLSVELDRLSEESVNNDISSWTKGRSGEALSLLKKRFSHRPVQEKFVCLNCGFETHADEQAALNIARSWLFLRSQEYKKYQTNKTTGNTDKRAFVETWQSFYRKKLKEVWKPAV

SEQ ID NO: 37275 - protein, 979 aa, synthetic construct
  REGION 1..979: note = engineered CasX variant
QEIKRINKIRRRLVKDSNTKKAGKTGPMKTLLVRVMTPDLRERLENLRKKPENIPQPISNTSRANLNKLLTDYTEMKKAILHVYWEEFQKDPVGLMSRVAQPASKKIDQNKLKPEMDEKGNLTTAGFACSQCGQPLFVYKLEQVSEKGKAYTNYFGRCNVAEHEKLILLAQLKPEKDSDEAVTYSLGKFGQRALDFYSIHVTKESTHPVKPLAQIAGNRYASSPVGKALSDACMGTIASFLSKYQDIIIEHQKVVKGNQKRLESLRELAGKENLEYPSVTLPPQPHTKEGVDAYNEVIARVRMWVNLNLWQKLKLSRDDAKPLLRLKGFPSFPLVERQANEVDWWDMVCNVKKLINEKKEDGKVFWQNLAGYKRQEALRPYLSSEEDRKKGKKFARYQLGDLLLHLEKKHGEDWGKVYDEAWERIDKKVEGLSKHIKLEEERRSEDAQSKAALTDWLRAKASFVIEGLKEADKDEFCRCDLKLQKWYGDLRGKPFAIEAENSILDISGFSKQYNCAFIWQKDGVKKLNLYLIINYFKGGKLRFKKIKPEAFEANRFYTVINKKSGEIVPMEVNFNFDDPNLIILPLAFGKRQGREFIWNDLLSLETGSLKLANGRVIEKTLYNRRTRQDEPALFVALTFERREVLDSSNIKPMSNLIGVDRGENIPAVIALTDPEGCPLSRFKDSLGNPTHILRIGESYKEKQRTIQAKKEVEQRRAGGYSRKYASKAKNLADDMVRNTARDLLYYAVTQDAMLIFENLSRGFGRQGKRTFMAERQYTRMEDWLTAKLAYEGLPSKTYLSKTLAQYTSKTCSNCGFTITSADYDRVLEKLKKTATGWMTTINGKELKVEGQITYYNRYKRQNVVKDLSVELDRLSEESVNNDISSWTKGRSGEALSLLKKRFSHRPVQEKFVCLNCGFETHADEQAALNIARSWLFLRSQEYKKYQTNKTTGNTDKRAFVETWQSFYRKKLKEVWKPAV

SEQ ID NO: 37276 - protein, 979 aa, synthetic construct
  REGION 1..979: note = engineered CasX variant
QEIKRINKIRRRLVKDSNTKKAGKTGPMKTLLVRVMTPDLRERLENLRKKPENIPQPISNTSRANLNKLLTDYTEMKKAILHVYWEEFQKDPVGLMSRVAQPASKKIDQNKLKPEMDEKGNLTTAGFACSQCGQPLFVYKLEQVSEKGKAYTNYFGRCNVAEHEKLILLAQLKPEKDSDEAVTYSLGKFGQRALDFYSIHVTKESTHPVKPLAQIAGNRYASTPVGKALSDACMGTIASFLSKYQDIIIEHQKVVKGNQKRLESLRELAGKENLEYPSVTLPPQPHTKEGVDAYNEVIARVRMWVNLNLWQKLKLSRDDAKPLLRLKGFPSFPLVERQANEVDWWDMVCNVKKLINEKKEDGKVFWQNLAGYKRQEALRPYLSSEEDRKKGKKFARYQLGDLLLHLEKKHGEDWGKVYDEAWERIDKKVEGLSKHIKLEEERRSEDAQSKAALTDWLRAKASFVIEGLKEADKDEFCRCDLKLQKWYGDLRGKPFAIEAENSILDISGFSKQYNCAFIWQKDGVKKLNLYLIINYFKGGKLRFKKIKPEAFEANRFYTVINKKSGEIVPMEVNFNFDDPNLIILPLAFGKRQGREFIWNDLLSLETGSLKLANGRVIEKTLYNRRTRQDEPALFVALTFERREVLDSSNIKPMSNLIGVDRGENIPAVIALTDPEGCPLSRFKDSLGNPTHILRIGESYKEKQRTIQAKKEVEQRRAGGYSRKYASKAKNLADDMVRNTARDLLYYAVTQDAMLIFENLSRGFGRQGKRTFMAERQYTRMEDWLTAKLAYEGLPSKTYLSKTLAQYTSKTCSNCGFTITSADYDRVLEKLKKTATGWMTTINGKELKVEGQITYYNRYKRQNVVKDLSVELDRLSEESVNNDISSWTKGRSGEALSLLKKRFSHRPVQEKFVCLNCGFETHADEQAALNIARSWLFLRSQEYKKYQTNKTTGNTDKRAFVETWQSFYRKKLKEVWKPAV

SEQ ID NO: 37277 - protein, 979 aa, synthetic construct
  REGION 1..979: note = engineered CasX variant
QEIKRINKIRRRLVKDSNTKKAGKTGPMKTLLVRVMTPDLRERLENLRKKPENIPQPISNTSRANLNKLLTDYTEMKKAILHVYWEEFQKDPVGLMSRVAQPASKKIDQNKLKPEMDEKGNLTTAGFACSQCGQPLFVYKLEQVSEKGKAYTNYFGRCNVAEHEKLILLAQLKPEKDSDEAVTYSLGKFGQRALDFYSIHVTKESTHPVKPLAQIAGNRYASAPVGKALSDACMGTIASFLSKYQDIIIEHQKVVKGNQKRLESLRELAGKENLEYPSVTLPPQPHTKEGVDAYNEVIARVRMWVNLNLWQKLKLSRDDAKPLLRLKGFPSFPLVERQANEVDWWDMVCNVKKLINEKKEDGKVFWQNLAGYKRQEALRPYLSSEEDRKKGKKFARYQLGDLLLHLEKKHGEDWGKVYDEAWERIDKKVEGLSKHIKLEEERRSEDAQSKAALTDWLRAKASFVIEGLKEADKDEFCRCDLKLQKWYGDLRGKPFAIEAENSILDISGFSKQYNCAFIWQKDGVKKLNLYLIINYFKGGKLRFKKIKPEAFEANRFYTVINKKSGEIVPMEVNFNFDDPNLIILPLAFGKRQGREFIWNDLLSLETGSLKLANGRVIEKTLYNRRTRQDEPALFVALTFERREVLDSSNIKPMSNLIGVDRGENIPAVIALTDPEGCPLSRFKDSLGNPTHILRIGESYKEKQRTIQAKKEVEQRRAGGYSRKYASKAKNLADDMVRNTARDLLYYAVTQDAMLIFENLSRGFGRQGKRTFMAERQYTRMEDWLTAKLAYEGLPSKTYLSKTLAQYTSKTCSNCGFTITSADYDRVLEKLKKTATGWMTTINGKELKVEGQITYYNRYKRQNVVKDLSVELDRLSEESVNNDISSWTKGRSGEALSLLKKRFSHRPVQEKFVCLNCGFETHADEQAALNIARSWLFLRSQEYKKYQTNKTTGNTDKRAFVETWQSFYRKKLKEVWKPAV

SEQ ID NO: 37278 - protein, 979 aa, synthetic construct
  REGION 1..979: note = engineered CasX variant
QEIKRINKIRRRLVKDSNTKKAGKTGPMKTLLVRVMTPDLRERLENLRKKPENIPQPISNTSRANLNKLLTDYTEMKKAILHVYWEEFQKDPVGLMSRVAQPASKKIDQNKLKPEMDEKGNLTTAGFACSQCGQPLFVYKLEQVSEKGKAYTNYFGRCNVAEHEKLILLAQLKPEKDSDEAVTYSLGKFGQRALDFYSIHVTKESTHPVKPLAQIAGNRYASVPVGKALSDACMGTIASFLSKYQDIIIEHQKVVKGNQKRLESLRELAGKENLEYPSVTLPPQPHTKEGVDAYNEVIARVRMWVNLNLWQKLKLSRDDAKPLLRLKGFPSFPLVERQANEVDWWDMVCNVKKLINEKKEDGKVFWQNLAGYKRQEALRPYLSSEEDRKKGKKFARYQLGDLLLHLEKKHGEDWGKVYDEAWERIDKKVEGLSKHIKLEEERRSEDAQSKAALTDWLRAKASFVIEGLKEADKDEFCRCDLKLQKWYGDLRGKPFAIEAENSILDISGFSKQYNCAFIWQKDGVKKLNLYLIINYFKGGKLRFKKIKPEAFEANRFYTVINKKSGEIVPMEVNFNFDDPNLIILPLAFGKRQGREFIWNDLLSLETGSLKLANGRVIEKTLYNRRTRQDEPALFVALTFERREVLDSSNIKPMSNLIGVDRGENIPAVIALTDPEGCPLSRFKDSLGNPTHILRIGESYKEKQRTIQAKKEVEQRRAGGYSRKYASKAKNLADDMVRNTARDLLYYAVTQDAMLIFENLSRGFGRQGKRTFMAERQYTRMEDWLTAKLAYEGLPSKTYLSKTLAQYTSKTCSNCGFTITSADYDRVLEKLKKTATGWMTTINGKELKVEGQITYYNRYKRQNVVKDLSVELDRLSEESVNNDISSWTKGRSGEALSLLKKRFSHRPVQEKFVCLNCGFETHADEQAALNIARSWLFLRSQEYKKYQTNKTTGNTDKRAFVETWQSFYRKKLKEVWKPAV

SEQ ID NO: 37279 - protein, 979 aa, synthetic construct
  REGION 1..979: note = engineered CasX variant
QEIKRINKIRRRLVKDSNTKKAGKTGPMKTLLVRVMTPDLRERLENLRKKPENIPQPISNTSRANLNKLLTDYTEMKKAILHVYWEEFQKDPVGLMSRVAQPASKKIDQNKLKPEMDEKGNLTTAGFACSQCGQPLFVYKLEQVSEKGKAYTNYFGRCNVAEHEKLIKLAQLKPEKDSDEAVTYSLGKFGQRALDFYSIHVTKESTHPVKPLAQIAGNRYASGPVGKALSDACMGTIASFLSKYQDIIIEHQKVVKGNQKRLESLRELAGKENLEYPSVTLPPQPHTKEGVDAYNEVIARVRMWVNLNLWQKLKLSRDDAKPLLRLKGFPSFPLVERQANEVDWWDMVCNVKKLINEKKEDGKVFWQNLAGYKRQEALRPYLSSEEDRKKGKKFARYQLGDLLLHLEKKHGEDWGKVYDEAWERIDKKVEGLSKHIKLEEERRSEDAQSKAALTDWLRAKASFVIEGLKEADKDEFCRCDLKLQKWYGDLRGKPFAIEAENSILDISGFSKQYNCAFIWQKDGVKKLNLYLIINYFKGGKLRFKKIKPEAFEANRFYTVINKKSGEIVPMEVNFNFDDPNLIILPLAFGKRQGREFIWNDLLSLETGSLKLANGRVIEKTLYNRRTRQDEPALFVALTFERREVLDSSNIKPMSNLIGVDRGENIPAVIALTDPEGCPLSRFKDSLGNPTHILRIGESYKEKQRTIQAKKEVEQRRAGGYSRKYASKAKNLADDMVRNTARDLLYYAVTQDAMLIFENLSRGFGRQGKRTFMAERQYTRMEDWLTAKLAYEGLPSKTYLSKTLAQYTSKTCSNCGFTITSADYDRVLEKLKKTATGWMTTINGKELKVEGQITYYNRYKRQNVVKDLSVELDRLSEESVNNDISSWTKGRSGEALSLLKKRFSHRPVQEKFVCLNCGFETHADEQAALNIARSWLFLRSQEYKKYQTNKTTGNTDKRAFVETWQSFYRKKLKEVWKPAV

SEQ ID NO: 37280 - protein, 978 aa, synthetic construct
  REGION 1..978: note = engineered CasX variant
QEIKRINKIRRRLVKDSNTKKAGKTGPMKTLLVRVMTPDLRERLENLRKKPENIPQPISNTSRANLNKLLTDYTEMKKAILHVYWEEFQKDPVGLMSRVAQPASKKIDQNKLKPEMDEKGNLTTAGFACSQCGQPLFVYKLEQVSEKGKAYTNYFGRCNVAEHEKLILLAQLKPEKDSDEAVTYSLGKFGQRALDFYSIHVTKESTHPVKPLAQIAGNRYASPVGKALSDACMGTIASFLSKYQDIIIEHQKVVKGNQKRLESLRELAGKENLEYPSVTLPPQPHTKEGVDAYNEVIARVRMWVNLNLWQKLKLSRDDAKPLLRLKGFPSFPLVERQANEVDWWDMVCNVKKLINEKKEDGKVFWQNLAGYKRQEALRPYLSSEEDRKKGKKFARYQLGDLLLHLEKKHGEDWGKVYDEAWERIDKKVEGLSKHIKLEEERRSEDAQSKAALTDWLRAKASFVIEGLKEADKDEFCRCDLKLQKWYGDLRGKPFAIEAENSILDISGFSKQYNCAFIWQKDGVKKLNLYLIINYFKGGKLRFKKIKPEAFEANRFYTVINKKSGEIVPMEVNFNFDDPNLIILPLAFGKRQGREFIWNDLLSLETGSLKLANGRVIEKTLYNRRTRQDEPALFVALTFERREVLDSSNIKPMSNLIGVDRGENIPAVIALTDPEGCPLSRFKDSLGNPTHILRIGESYKEKQRTIQAKKEVEQRRAGGYSRKYASKAKNLADDMVRNTARDLLYYAVTQDAMLIFENLSRGFGRQGKRTFMAERQYTRMEDWLTAKLAYEGLPSKTYLSKTLAQYTSKTCSNCGFTITSADYDRVLEKLKKTATGWMTTINGKELKVEGQITYYNRYKRQNVVKDLSVELDRLSEESVNNDISSWTKGRSGEALSLLKKRFSHRPVQEKFVCLNCGFETHADEQAALNIARSWLFLRSQEYKKYQTNKTTGNTDKRAFVETWQSFYRKKLKEVWKPAV

SEQ ID NO: 37281 - protein, 978 aa, synthetic construct
  REGION 1..978: note = engineered CasX variant
QEIKRINKIRRRLVKDSNTKKAGKTGPMKTLLVRVMTPDLRERLENLRKKPENIPQPISNTSRANLNKLLTDYTEMKKAILHVYWEEFQKDPVGLMSRVAQPASKKIDQNKLKPEMDEKGNLTTAGFACSQCGQPLFVYKLEQVSEKGKAYTNYFGRCNVAEHEKLILLAQLKPEKDSDEAVTYSLGKFGQRALDFYSIHVTKESTHPVKPLAQIAGNRYASYPVGKALSDACMGTIASFLSKYQDIIIEHQKVVKGNQKRLESLRELAGKENLEYPSVTLPPQPHTKEGVDAYNEVIARVRMWVNLNLWQKLKLSRDDAKPLLRLKGFPSFPLVERQANEVDWWDMVCNVKKLINEKKEDGKVFWQNLAGYKRQEALRPYLSSEEDRKKGKKFARYQLGDLLLHLEKKHGEDWGKVYDEAWERIDKKVEGLSKHIKLEEERRSEDAQSKAALTDWLRAKASFVIEGLKEADKDEFCRCDLKLQKWYGDLRGKPFAIEAENSILDISGFSKQYNCAFIWQKDGVKKLNLYLIINYFKGGKLRFKKIKPEAFEANRFYTVINKKSGEIVPMEVNFNFDDPNLIILPLAFGKRQGREFIWNDLLSLETGSLKLANGRVIEKTLYNRRTRQDEPALFVALTFERREVLDSSNIKPMNLIGVDRGENIPAVIALTDPEGCPLSRFKDSLGNPTHILRIRESYKEKQRTIQAKKEVEQRRAGGYSRKYASKAKNLADDMVRNTARDLLYYAVTQDAMLIFENLSRGFGRQGKRTFMAERQYTRMEDWLTAKLAYEGLPSKTYLSKTLAQYTSKTCSNCGFTITSADYDRVLEKLKKTATGWMTTINGKELKVEGQITYYNRYKRQNVVKDLSVELDRLSEESVNNDISSWTKGRSGEALSLLKKRFSHRPVQEKFVCLNCGFETHADEQAALNIARSWLFLRSQEYKKYQTNKTTGNTDKRAFVETWQSFYRKKLKEVWKPAV

SEQ ID NO: 37282 - protein, 978 aa, synthetic construct
  REGION 1..978: note = engineered CasX variant
QEIKRINKIRRRLVKDSNTKKAGKTGPMKTLLVRVMTPDLRERLENLRKKPENIPQPISNTSRANLNKLLTDYTEMKKAILHVYWEEFQKDPVGLMSRVAQPASKKIDQNKLKPEMDEKGNLTTAGFACSQCGQPLFVYKLEQVSEKGKAYTNYFGRCNVAEHEKLILLAQLKPEKDSDEAVTYSLGKFGQRALDFYSIHVTKESTHPVKPLAQIAGNRYASHPVGKALSDACMGTIASFLSKYQDIIIEHQKVVKGNQKRLESLRELAGKENLEYPSVTLPPQPHTKEGVDAYNEVIARVRMWVNLNLWQKLKLSRDDAKPLLRLKGFPSFPLVERQANEVDWWDMVCNVKKLINEKKEDGKVFWQNLAGYKRQEALRPYLSSEEDRKKGKKFARYQLGDLLLHLEKKHGEDWGKVYDEAWERIDKKVEGLSKHIKLEEERRSEDAQSKAALTDWLRAKASFVIEGLKEADKDEFCRCDLKLQKWYGDLRGKPFAIEAENSILDISGFSKQYNCAFIWQKDGVKKLNLYLIINYFKGGKLRFKKIKPEAFEANRFYTVINKKSGEIVPMEVNFNFDDPNLIILPLAFGKRQGREFIWNDLLSLETGSLKLANGRVIEKTLYNRRTRQDEPALFVALTFERREVLDSSNIKPMNLIGVDRGENIPAVIALTDPEGCPLSRFKDSLGNPTHILRIRESYKEKQRTIQAKKEVEQRRAGGYSRKYASKAKNLADDMVRNTARDLLYYAVTQDAMLIFENLSRGFGRQGKRTFMAERQYTRMEDWLTAKLAYEGLPSKTYLSKTLAQYTSKTCSNCGFTITSADYDRVLEKLKKTATGWMTTINGKELKVEGQITYYNRYKRQNVVKDLSVELDRLSEESVNNDISSWTKGRSGEALSLLKKRFSHRPVQEKFVCLNCGFETHADEQAALNIARSWLFLRSQEYKKYQTNKTTGNTDKRAFVETWQSFYRKKLKEVWKPAV

SEQ ID NO: 37283 - protein, 978 aa, synthetic construct
  REGION 1..978: note = engineered CasX variant
QEIKRINKIRRRLVKDSNTKKAGKTGPMKTLLVRVMTPDLRERLENLRKKPENIPQPISNTSRANLNKLLTDYTEMKKAILHVYWEEFQKDPVGLMSRVAQPASKKIDQNKLKPEMDEKGNLTTAGFACSQCGQPLFVYKLEQVSEKGKAYTNYFGRCNVAEHEKLILLAQLKPEKDSDEAVTYSLGKFGQRALDFYSIHVTKESTHPVKPLAQIAGNRYASSPVGKALSDACMGTIASFLSKYQDIIIEHQKVVKGNQKRLESLRELAGKENLEYPSVTLPPQPHTKEGVDAYNEVIARVRMWVNLNLWQKLKLSRDDAKPLLRLKGFPSFPLVERQANEVDWWDMVCNVKKLINEKKEDGKVFWQNLAGYKRQEALRPYLSSEEDRKKGKKFARYQLGDLLLHLEKKHGEDWGKVYDEAWERIDKKVEGLSKHIKLEEERRSEDAQSKAALTDWLRAKASFVIEGLKEADKDEFCRCDLKLQKWYGDLRGKPFAIEAENSILDISGFSKQYNCAFIWQKDGVKKLNLYLIINYFKGGKLRFKKIKPEAFEANRFYTVINKKSGEIVPMEVNFNFDDPNLIILPLAFGKRQGREFIWNDLLSLETGSLKLANGRVIEKTLYNRRTRQDEPALFVALTFERREVLDSSNIKPMNLIGVDRGENIPAVIALTDPEGCPLSRFKDSLGNPTHILRIRESYKEKQRTIQAKKEVEQRRAGGYSRKYASKAKNLADDMVRNTARDLLYYAVTQDAMLIFENLSRGFGRQGKRTFMAERQYTRMEDWLTAKLAYEGLPSKTYLSKTLAQYTSKTCSNCGFTITSADYDRVLEKLKKTATGWMTTINGKELKVEGQITYYNRYKRQNVVKDLSVELDRLSEESVNNDISSWTKGRSGEALSLLKKRFSHRPVQEKFVCLNCGFETHADEQAALNIARSWLFLRSQEYKKYQTNKTTGNTDKRAFVETWQSFYRKKLKEVWKPAV

SEQ ID NO: 37284 - protein, 978 aa, synthetic construct
  REGION 1..978: note = engineered CasX variant
QEIKRINKIRRRLVKDSNTKKAGKTGPMKTLLVRVMTPDLRERLENLRKKPENIPQPISNTSRANLNKLLTDYTEMKKAILHVYWEEFQKDPVGLMSRVAQPASKKIDQNKLKPEMDEKGNLTTAGFACSQCGQPLFVYKLEQVSEKGKAYTNYFGRCNVAEHEKLILLAQLKPEKDSDEAVTYSLGKFGQRALDFYSIHVTKESTHPVKPLAQIAGNRYASTPVGKALSDACMGTIASFLSKYQDIIIEHQKVVKGNQKRLESLRELAGKENLEYPSVTLPPQPHTKEGVDAYNEVIARVRMWVNLNLWQKLKLSRDDAKPLLRLKGFPSFPLVERQANEVDWWDMVCNVKKLINEKKEDGKVFWQNLAGYKRQEALRPYLSSEEDRKKGKKFARYQLGDLLLHLEKKHGEDWGKVYDEAWERIDKKVEGLSKHIKLEEERRSEDAQSKAALTDWLRAKASFVIEGLKEADKDEFCRCDLKLQKWYGDLRGKPFAIEAENSILDISGFSKQYNCAFIWQKDGVKKLNLYLIINYFKGGKLRFKKIKPEAFEANRFYTVINKKSGEIVPMEVNFNFDDPNLIILPLAFGKRQGREFIWNDLLSLETGSLKLANGRVIEKTLYNRRTRQDEPALFVALTFERREVLDSSNIKPMNLIGVDRGENIPAVIALTDPEGCPLSRFKDSLGNPTHILRIRESYKEKQRTIQAKKEVEQRRAGGYSRKYASKAKNLADDMVRNTARDLLYYAVTQDAMLIFENLSRGFGRQGKRTFMAERQYTRMEDWLTAKLAYEGLPSKTYLSKTLAQYTSKTCSNCGFTITSADYDRVLEKLKKTATGWMTTINGKELKVEGQITYYNRYKRQNVVKDLSVELDRLSEESVNNDISSWTKGRSGEALSLLKKRFSHRPVQEKFVCLNCGFETHADEQAALNIARSWLFLRSQEYKKYQTNKTTGNTDKRAFVETWQSFYRKKLKEVWKPAV

SEQ ID NO: 37285 - protein, 978 aa, synthetic construct
  REGION 1..978: note = engineered CasX variant
QEIKRINKIRRRLVKDSNTKKAGKTGPMKTLLVRVMTPDLRERLENLRKKPENIPQPISNTSRANLNKLLTDYTEMKKAILHVYWEEFQKDPVGLMSRVAQPASKKIDQNKLKPEMDEKGNLTTAGFACSQCGQPLFVYKLEQVSEKGKAYTNYFGRCNVAEHEKLILLAQLKPEKDSDEAVTYSLGKFGQRALDFYSIHVTKESTHPVKPLAQIAGNRYASAPVGKALSDACMGTIASFLSKYQDIIIEHQKVVKGNQKRLESLRELAGKENLEYPSVTLPPQPHTKEGVDAYNEVIARVRMWVNLNLWQKLKLSRDDAKPLLRLKGFPSFPLVERQANEVDWWDMVCNVKKLINEKKEDGKVFWQNLAGYKRQEALRPYLSSEEDRKKGKKFARYQLGDLLLHLEKKHGEDWGKVYDEAWERIDKKVEGLSKHIKLEEERRSEDAQSKAALTDWLRAKASFVIEGLKEADKDEFCRCDLKLQKWYGDLRGKPFAIEAENSILDISGFSKQYNCAFIWQKDGVKKLNLYLIINYFKGGKLRFKKIKPEAFEANRFYTVINKKSGEIVPMEVNFNFDDPNLIILPLAFGKRQGREFIWNDLLSLETGSLKLANGRVIEKTLYNRRTRQDEPALFVALTFERREVLDSSNIKPMNLIGVDRGENIPAVIALTDPEGCPLSRFKDSLGNPTHILRIRESYKEKQRTIQAKKEVEQRRAGGYSRKYASKAKNLADDMVRNTARDLLYYAVTQDAMLIFENLSRGFGRQGKRTFMAERQYTRMEDWLTAKLAYEGLPSKTYLSKTLAQYTSKTCSNCGFTITSADYDRVLEKLKKTATGWMTTINGKELKVEGQITYYNRYKRQNVVKDLSVELDRLSEESVNNDISSWTKGRSGEALSLLKKRFSHRPVQEKFVCLNCGFETHADEQAALNIARSWLFLRSQEYKKYQTNKTTGNTDKRAFVETWQSFYRKKLKEVWKPAV

SEQ ID NO: 37286 - protein, 978 aa, synthetic construct
  REGION 1..978: note = engineered CasX variant
QEIKRINKIRRRLVKDSNTKKAGKTGPMKTLLVRVMTPDLRERLENLRKKPENIPQPISNTSRANLNKLLTDYTEMKKAILHVYWEEFQKDPVGLMSRVAQPASKKIDQNKLKPEMDEKGNLTTAGFACSQCGQPLFVYKLEQVSEKGKAYTNYFGRCNVAEHEKLILLAQLKPEKDSDEAVTYSLGKFGQRALDFYSIHVTKESTHPVKPLAQIAGNRYASVPVGKALSDACMGTIASFLSKYQDIIIEHQKVVKGNQKRLESLRELAGKENLEYPSVTLPPQPHTKEGVDAYNEVIARVRMWVNLNLWQKLKLSRDDAKPLLRLKGFPSFPLVERQANEVDWWDMVCNVKKLINEKKEDGKVFWQNLAGYKRQEALRPYLSSEEDRKKGKKFARYQLGDLLLHLEKKHGEDWGKVYDEAWERIDKKVEGLSKHIKLEEERRSEDAQSKAALTDWLRAKASFVIEGLKEADKDEFCRCDLKLQKWYGDLRGKPFAIEAENSILDISGFSKQYNCAFIWQKDGVKKLNLYLIINYFKGGKLRFKKIKPEAFEANRFYTVINKKSGEIVPMEVNFNFDDPNLIILPLAFGKRQGREFIWNDLLSLETGSLKLANGRVIEKTLYNRRTRQDEPALFVALTFERREVLDSSNIKPMNLIGVDRGENIPAVIALTDPEGCPLSRFKDSLGNPTHILRIRESYKEKQRTIQAKKEVEQRRAGGYSRKYASKAKNLADDMVRNTARDLLYYAVTQDAMLIFENLSRGFGRQGKRTFMAERQYTRMEDWLTAKLAYEGLPSKTYLSKTLAQYTSKTCSNCGFTITSADYDRVLEKLKKTATGWMTTINGKELKVEGQITYYNRYKRQNVVKDLSVELDRLSEESVNNDISSWTKGRSGEALSLLKKRFSHRPVQEKFVCLNCGFETHADEQAALNIARSWLFLRSQEYKKYQTNKTTGNTDKRAFVETWQSFYRKKLKEVWKPAV

SEQ ID NO: 37287 - protein, 978 aa, synthetic construct
  REGION 1..978: note = engineered CasX variant
QEIKRINKIRRRLVKDSNTKKAGKTGPMKTLLVRVMTPDLRERLENLRKKPENIPQPISNTSRANLNKLLTDYTEMKKAILHVYWEEFQKDPVGLMSRVAQPASKKIDQNKLKPEMDEKGNLTTAGFACSQCGQPLFVYKLEQVSEKGKAYTNYFGRCNVAEHEKLIKLAQLKPEKDSDEAVTYSLGKFGQRALDFYSIHVTKESTHPVKPLAQIAGNRYASGPVGKALSDACMGTIASFLSKYQDIIIEHQKVVKGNQKRLESLRELAGKENLEYPSVTLPPQPHTKEGVDAYNEVIARVRMWVNLNLWQKLKLSRDDAKPLLRLKGFPSFPLVERQANEVDWWDMVCNVKKLINEKKEDGKVFWQNLAGYKRQEALRPYLSSEEDRKKGKKFARYQLGDLLLHLEKKHGEDWGKVYDEAWERIDKKVEGLSKHIKLEEERRSEDAQSKAALTDWLRAKASFVIEGLKEADKDEFCRCDLKLQKWYGDLRGKPFAIEAENSILDISGFSKQYNCAFIWQKDGVKKLNLYLIINYFKGGKLRFKKIKPEAFEANRFYTVINKKSGEIVPMEVNFNFDDPNLIILPLAFGKRQGREFIWNDLLSLETGSLKLANGRVIEKTLYNRRTRQDEPALFVALTFERREVLDSSNIKPMNLIGVDRGENIPAVIALTDPEGCPLSRFKDSLGNPTHILRIRESYKEKQRTIQAKKEVEQRRAGGYSRKYASKAKNLADDMVRNTARDLLYYAVTQDAMLIFENLSRGFGRQGKRTFMAERQYTRMEDWLTAKLAYEGLPSKTYLSKTLAQYTSKTCSNCGFTITSADYDRVLEKLKKTATGWMTTINGKELKVEGQITYYNRYKRQNVVKDLSVELDRLSEESVNNDISSWTKGRSGEALSLLKKRFSHRPVQEKFVCLNCGFETHADEQAALNIARSWLFLRSQEYKKYQTNKTTGNTDKRAFVETWQSFYRKKLKEVWKPAV

SEQ ID NO: 37288 - protein, 977 aa, synthetic construct
  REGION 1..977: note = engineered CasX variant
QEIKRINKIRRRLVKDSNTKKAGKTGPMKTLLVRVMTPDLRERLENLRKKPENIPQPISNTSRANLNKLLTDYTEMKKAILHVYWEEFQKDPVGLMSRVAQPASKKIDQNKLKPEMDEKGNLTTAGFACSQCGQPLFVYKLEQVSEKGKAYTNYFGRCNVAEHEKLILLAQLKPEKDSDEAVTYSLGKFGQRALDFYSIHVTKESTHPVKPLAQIAGNRYASPVGKALSDACMGTIASFLSKYQDIIIEHQKVVKGNQKRLESLRELAGKENLEYPSVTLPPQPHTKEGVDAYNEVIARVRMWVNLNLWQKLKLSRDDAKPLLRLKGFPSFPLVERQANEVDWWDMVCNVKKLINEKKEDGKVFWQNLAGYKRQEALRPYLSSEEDRKKGKKFARYQLGDLLLHLEKKHGEDWGKVYDEAWERIDKKVEGLSKHIKLEEERRSEDAQSKAALTDWLRAKASFVIEGLKEADKDEFCRCDLKLQKWYGDLRGKPFAIEAENSILDISGFSKQYNCAFIWQKDGVKKLNLYLIINYFKGGKLRFKKIKPEAFEANRFYTVINKKSGEIVPMEVNFNFDDPNLIILPLAFGKRQGREFIWNDLLSLETGSLKLANGRVIEKTLYNRRTRQDEPALFVALTFERREVLDSSNIKPMNLIGVDRGENIPAVIALTDPEGCPLSRFKDSLGNPTHILRIRESYKEKQRTIQAKKEVEQRRAGGYSRKYASKAKNLADDMVRNTARDLLYYAVTQDAMLIFENLSRGFGRQGKRTFMAERQYTRMEDWLTAKLAYEGLPSKTYLSKTLAQYTSKTCSNCGFTITSADYDRVLEKLKKTATGWMTTINGKELKVEGQITYYNRYKRQNVVKDLSVELDRLSEESVNNDISSWTKGRSGEALSLLKKRFSHRPVQEKFVCLNCGFETHADEQAALNIARSWLFLRSQEYKKYQTNKTTGNTDKRAFVETWQSFYRKKLKEVWKPAV

SEQ ID NO: 37289 - protein, 978 aa, synthetic construct
  REGION 1..978: note = engineered CasX variant
QEIKRINKIRRRLVKDSNTKKAGKTGPMKTLLVRVMTPDLRERLENLRKKPENIPQPISNTSRANLNKLLTDYTEMKKAILHVYWEEFQKDPVGLMSRVAQPASKKIDQNKLKPEMDEKGNLTTAGFACSQCGQPLFVYKLEQVSEKGKAYTNYFGRCNVAEHEKLILLAQLKPEKDSDEAVTYSLGKFGQRALDFYSIHVTKESTHPVKPLAQIAGNRYASYPVGKALSDACMGTIASFLSKYQDIIIEHQKVVKGNQKRLESLRELAGKENLEYPSVTLPPQPHTKEGVDAYNEVIARVRMWVNLNLWQKLKLSRDDAKPLLRLKGFPSFPLVERQANEVDWWDMVCNVKKLINEKKEDGKVFWQNLAGYKRQEALRPYLSSEEDRKKGKKFARYQLGDLLLHLEKKHGEDWGKVYDEAWERIDKKVEGLSKHIKLEEERRSEDAQSKAALTDWLRAKASFVIEGLKEADKDEFCRCDLKLQKWYGDLRGKPFAIEAENSILDISGFSKQYNCAFIWQKDGVKKLNLYLIINYFKGGKLRFKKIKPEAFEANRFYTVINKKSGEIVPMEVNFNFDDPNLIILPLAFGKRQGREFIWNDLLSLETGSLKLANGRVIEKTLYNRRTRQDEPALFVALTFERREVLDSSNIKPMNLIGVDRGENIPAVIALTDPEGCPLSRFKDSLGNPTHILRIGESYKEKQRTIQAKKEVEQRRAGGYSRKYASKAKNLADDMVRNTARDLLYYAVTQDAMLIFENLSRGFGRQGKRTFSAERQYTRMEDWLTAKLAYEGLPSKTYLSKTLAQYTSKTCSNCGFTITSADYDRVLEKLKKTATGWMTTINGKELKVEGQITYYNRYKRQNVVKDLSVELDRLSEESVNNDISSWTKGRSGEALSLLKKRFSHRPVQEKFVCLNCGFETHADEQAALNIARSWLFLRSQEYKKYQTNKTTGNTDKRAFVETWQSFYRKKLKEVWKPAV

SEQ ID NO: 37290 - protein, 978 aa, synthetic construct
  REGION 1..978: note = engineered CasX variant
QEIKRINKIRRRLVKDSNTKKAGKTGPMKTLLVRVMTPDLRERLENLRKKPENIPQPISNTSRANLNKLLTDYTEMKKAILHVYWEEFQKDPVGLMSRVAQPASKKIDQNKLKPEMDEKGNLTTAGFACSQCGQPLFVYKLEQVSEKGKAYTNYFGRCNVAEHEKLILLAQLKPEKDSDEAVTYSLGKFGQRALDFYSIHVTKESTHPVKPLAQIAGNRYASHPVGKALSDACMGTIASFLSKYQDIIIEHQKVVKGNQKRLESLRELAGKENLEYPSVTLPPQPHTKEGVDAYNEVIARVRMWVNLNLWQKLKLSRDDAKPLLRLKGFPSFPLVERQANEVDWWDMVCNVKKLINEKKEDGKVFWQNLAGYKRQEALRPYLSSEEDRKKGKKFARYQLGDLLLHLEKKHGEDWGKVYDEAWERIDKKVEGLSKHIKLEEERRSEDAQSKAALTDWLRAKASFVIEGLKEADKDEFCRCDLKLQKWYGDLRGKPFAIEAENSILDISGFSKQYNCAFIWQKDGVKKLNLYLIINYFKGGKLRFKKIKPEAFEANRFYTVINKKSGEIVPMEVNFNFDDPNLIILPLAFGKRQGREFIWNDLLSLETGSLKLANGRVIEKTLYNRRTRQDEPALFVALTFERREVLDSSNIKPMNLIGVDRGENIPAVIALTDPEGCPLSRFKDSLGNPTHILRIGESYKEKQRTIQAKKEVEQRRAGGYSRKYASKAKNLADDMVRNTARDLLYYAVTQDAMLIFENLSRGFGRQGKRTFSAERQYTRMEDWLTAKLAYEGLPSKTYLSKTLAQYTSKTCSNCGFTITSADYDRVLEKLKKTATGWMTTINGKELKVEGQITYYNRYKRQNVVKDLSVELDRLSEESVNNDISSWTKGRSGEALSLLKKRFSHRPVQEKFVCLNCGFETHADEQAALNIARSWLFLRSQEYKKYQTNKTTGNTDKRAFVETWQSFYRKKLKEVWKPAV

SEQ ID NO: 37291 - protein, 978 aa, synthetic construct
  REGION 1..978: note = engineered CasX variant
QEIKRINKIRRRLVKDSNTKKAGKTGPMKTLLVRVMTPDLRERLENLRKKPENIPQPISNTSRANLNKLLTDYTEMKKAILHVYWEEFQKDPVGLMSRVAQPASKKIDQNKLKPEMDEKGNLTTAGFACSQCGQPLFVYKLEQVSEKGKAYTNYFGRCNVAEHEKLILLAQLKPEKDSDEAVTYSLGKFGQRALDFYSIHVTKESTHPVKPLAQIAGNRYASSPVGKALSDACMGTIASFLSKYQDIIIEHQKVVKGNQKRLESLRELAGKENLEYPSVTLPPQPHTKEGVDAYNEVIARVRMWVNLNLWQKLKLSRDDAKPLLRLKGFPSFPLVERQANEVDWWDMVCNVKKLINEKKEDGKVFWQNLAGYKRQEALRPYLSSEEDRKKGKKFARYQLGDLLLHLEKKHGEDWGKVYDEAWERIDKKVEGLSKHIKLEEERRSEDAQSKAALTDWLRAKASFVIEGLKEADKDEFCRCDLKLQKWYGDLRGKPFAIEAENSILDISGFSKQYNCAFIWQKDGVKKLNLYLIINYFKGGKLRFKKIKPEAFEANRFYTVINKKSGEIVPMEVNFNFDDPNLIILPLAFGKRQGREFIWNDLLSLETGSLKLANGRVIEKTLYNRRTRQDEPALFVALTFERREVLDSSNIKPMNLIGVDRGENIPAVIALTDPEGCPLSRFKDSLGNPTHILRIGESYKEKQRTIQAKKEVEQRRAGGYSRKYASKAKNLADDMVRNTARDLLYYAVTQDAMLIFENLSRGFGRQGKRTFSAERQYTRMEDWLTAKLAYEGLPSKTYLSKTLAQYTSKTCSNCGFTITSADYDRVLEKLKKTATGWMTTINGKELKVEGQITYYNRYKRQNVVKDLSVELDRLSEESVNNDISSWTKGRSGEALSLLKKRFSHRPVQEKFVCLNCGFETHADEQAALNIARSWLFLRSQEYKKYQTNKTTGNTDKRAFVETWQSFYRKKLKEVWKPAV

SEQ ID NO: 37292 - protein, 978 aa, synthetic construct
  REGION 1..978: note = engineered CasX variant
QEIKRINKIRRRLVKDSNTKKAGKTGPMKTLLVRVMTPDLRERLENLRKKPENIPQPISNTSRANLNKLLTDYTEMKKAILHVYWEEFQKDPVGLMSRVAQPASKKIDQNKLKPEMDEKGNLTTAGFACSQCGQPLFVYKLEQVSEKGKAYTNYFGRCNVAEHEKLILLAQLKPEKDSDEAVTYSLGKFGQRALDFYSIHVTKESTHPVKPLAQIAGNRYASTPVGKALSDACMGTIASFLSKYQDIIIEHQKVVKGNQKRLESLRELAGKENLEYPSVTLPPQPHTKEGVDAYNEVIARVRMWVNLNLWQKLKLSRDDAKPLLRLKGFPSFPLVERQANEVDWWDMVCNVKKLINEKKEDGKVFWQNLAGYKRQEALRPYLSSEEDRKKGKKFARYQLGDLLLHLEKKHGEDWGKVYDEAWERIDKKVEGLSKHIKLEEERRSEDAQSKAALTDWLRAKASFVIEGLKEADKDEFCRCDLKLQKWYGDLRGKPFAIEAENSILDISGFSKQYNCAFIWQKDGVKKLNLYLIINYFKGGKLRFKKIKPEAFEANRFYTVINKKSGEIVPMEVNFNFDDPNLIILPLAFGKRQGREFIWNDLLSLETGSLKLANGRVIEKTLYNRRTRQDEPALFVALTFERREVLDSSNIKPMNLIGVDRGENIPAVIALTDPEGCPLSRFKDSLGNPTHILRIGESYKEKQRTIQAKKEVEQRRAGGYSRKYASKAKNLADDMVRNTARDLLYYAVTQDAMLIFENLSRGFGRQGKRTFSAERQYTRMEDWLTAKLAYEGLPSKTYLSKTLAQYTSKTCSNCGFTITSADYDRVLEKLKKTATGWMTTINGKELKVEGQITYYNRYKRQNVVKDLSVELDRLSEESVNNDISSWTKGRSGEALSLLKKRFSHRPVQEKFVCLNCGFETHADEQAALNIARSWLFLRSQEYKKYQTNKTTGNTDKRAFVETWQSFYRKKLKEVWKPAV

SEQ ID NO: 37293 - protein, 978 aa, synthetic construct
  REGION 1..978: note = engineered CasX variant
QEIKRINKIRRRLVKDSNTKKAGKTGPMKTLLVRVMTPDLRERLENLRKKPENIPQPISNTSRANLNKLLTDYTEMKKAILHVYWEEFQKDPVGLMSRVAQPASKKIDQNKLKPEMDEKGNLTTAGFACSQCGQPLFVYKLEQVSEKGKAYTNYFGRCNVAEHEKLILLAQLKPEKDSDEAVTYSLGKFGQRALDFYSIHVTKESTHPVKPLAQIAGNRYASAPVGKALSDACMGTIASFLSKYQDIIIEHQKVVKGNQKRLESLRELAGKENLEYPSVTLPPQPHTKEGVDAYNEVIARVRMWVNLNLWQKLKLSRDDAKPLLRLKGFPSFPLVERQANEVDWWDMVCNVKKLINEKKEDGKVFWQNLAGYKRQEALRPYLSSEEDRKKGKKFARYQLGDLLLHLEKKHGEDWGKVYDEAWERIDKKVEGLSKHIKLEEERRSEDAQSKAALTDWLRAKASFVIEGLKEADKDEFCRCDLKLQKWYGDLRGKPFAIEAENSILDISGFSKQYNCAFIWQKDGVKKLNLYLIINYFKGGKLRFKKIKPEAFEANRFYTVINKKSGEIVPMEVNFNFDDPNLIILPLAFGKRQGREFIWNDLLSLETGSLKLANGRVIEKTLYNRRTRQDEPALFVALTFERREVLDSSNIKPMNLIGVDRGENIPAVIALTDPEGCPLSRFKDSLGNPTHILRIGESYKEKQRTIQAKKEVEQRRAGGYSRKYASKAKNLADDMVRNTARDLLYYAVTQDAMLIFENLSRGFGRQGKRTFSAERQYTRMEDWLTAKLAYEGLPSKTYLSKTLAQYTSKTCSNCGFTITSADYDRVLEKLKKTATGWMTTINGKELKVEGQITYYNRYKRQNVVKDLSVELDRLSEESVNNDISSWTKGRSGEALSLLKKRFSHRPVQEKFVCLNCGFETHADEQAALNIARSWLFLRSQEYKKYQTNKTTGNTDKRAFVETWQSFYRKKLKEVWKPAV

SEQ ID NO: 37294 - protein, 978 aa, synthetic construct
  REGION 1..978: note = engineered CasX variant
QEIKRINKIRRRLVKDSNTKKAGKTGPMKTLLVRVMTPDLRERLENLRKKPENIPQPISNTSRANLNKLLTDYTEMKKAILHVYWEEFQKDPVGLMSRVAQPASKKIDQNKLKPEMDEKGNLTTAGFACSQCGQPLFVYKLEQVSEKGKAYTNYFGRCNVAEHEKLILLAQLKPEKDSDEAVTYSLGKFGQRALDFYSIHVTKESTHPVKPLAQIAGNRYASVPVGKALSDACMGTIASFLSKYQDIIIEHQKVVKGNQKRLESLRELAGKENLEYPSVTLPPQPHTKEGVDAYNEVIARVRMWVNLNLWQKLKLSRDDAKPLLRLKGFPSFPLVERQANEVDWWDMVCNVKKLINEKKEDGKVFWQNLAGYKRQEALRPYLSSEEDRKKGKKFARYQLGDLLLHLEKKHGEDWGKVYDEAWERIDKKVEGLSKHIKLEEERRSEDAQSKAALTDWLRAKASFVIEGLKEADKDEFCRCDLKLQKWYGDLRGKPFAIEAENSILDISGFSKQYNCAFIWQKDGVKKLNLYLIINYFKGGKLRFKKIKPEAFEANRFYTVINKKSGEIVPMEVNFNFDDPNLIILPLAFGKRQGREFIWNDLLSLETGSLKLANGRVIEKTLYNRRTRQDEPALFVALTFERREVLDSSNIKPMNLIGVDRGENIPAVIALTDPEGCPLSRFKDSLGNPTHILRIGESYKEKQRTIQAKKEVEQRRAGGYSRKYASKAKNLADDMVRNTARDLLYYAVTQDAMLIFENLSRGFGRQGKRTFSAERQYTRMEDWLTAKLAYEGLPSKTYLSKTLAQYTSKTCSNCGFTITSADYDRVLEKLKKTATGWMTTINGKELKVEGQITYYNRYKRQNVVKDLSVELDRLSEESVNNDISSWTKGRSGEALSLLKKRFSHRPVQEKFVCLNCGFETHADEQAALNIARSWLFLRSQEYKKYQTNKTTGNTDKRAFVETWQSFYRKKLKEVWKPAV

SEQ ID NO: 37295 - protein, 978 aa, synthetic construct
  REGION 1..978: note = engineered CasX variant
QEIKRINKIRRRLVKDSNTKKAGKTGPMKTLLVRVMTPDLRERLENLRKKPENIPQPISNTSRANLNKLLTDYTEMKKAILHVYWEEFQKDPVGLMSRVAQPASKKIDQNKLKPEMDEKGNLTTAGFACSQCGQPLFVYKLEQVSEKGKAYTNYFGRCNVAEHEKLIKLAQLKPEKDSDEAVTYSLGKFGQRALDFYSIHVTKESTHPVKPLAQIAGNRYASGPVGKALSDACMGTIASFLSKYQDIIIEHQKVVKGNQKRLESLRELAGKENLEYPSVTLPPQPHTKEGVDAYNEVIARVRMWVNLNLWQKLKLSRDDAKPLLRLKGFPSFPLVERQANEVDWWDMVCNVKKLINEKKEDGKVFWQNLAGYKRQEALRPYLSSEEDRKKGKKFARYQLGDLLLHLEKKHGEDWGKVYDEAWERIDKKVEGLSKHIKLEEERRSEDAQSKAALTDWLRAKASFVIEGLKEADKDEFCRCDLKLQKWYGDLRGKPFAIEAENSILDISGFSKQYNCAFIWQKDGVKKLNLYLIINYFKGGKLRFKKIKPEAFEANRFYTVINKKSGEIVPMEVNFNFDDPNLIILPLAFGKRQGREFIWNDLLSLETGSLKLANGRVIEKTLYNRRTRQDEPALFVALTFERREVLDSSNIKPMNLIGVDRGENIPAVIALTDPEGCPLSRFKDSLGNPTHILRIGESYKEKQRTIQAKKEVEQRRAGGYSRKYASKAKNLADDMVRNTARDLLYYAVTQDAMLIFENLSRGFGRQGKRTFSAERQYTRMEDWLTAKLAYEGLPSKTYLSKTLAQYTSKTCSNCGFTITSADYDRVLEKLKKTATGWMTTINGKELKVEGQITYYNRYKRQNVVKDLSVELDRLSEESVNNDISSWTKGRSGEALSLLKKRFSHRPVQEKFVCLNCGFETHADEQAALNIARSWLFLRSQEYKKYQTNKTTGNTDKRAFVETWQSFYRKKLKEVWKPAV

SEQ ID NO: 37296 - protein, 977 aa, synthetic construct
  REGION 1..977: note = engineered CasX variant
QEIKRINKIRRRLVKDSNTKKAGKTGPMKTLLVRVMTPDLRERLENLRKKPENIPQPISNTSRANLNKLLTDYTEMKKAILHVYWEEFQKDPVGLMSRVAQPASKKIDQNKLKPEMDEKGNLTTAGFACSQCGQPLFVYKLEQVSEKGKAYTNYFGRCNVAEHEKLILLAQLKPEKDSDEAVTYSLGKFGQRALDFYSIHVTKESTHPVKPLAQIAGNRYASPVGKALSDACMGTIASFLSKYQDIIIEHQKVVKGNQKRLESLRELAGKENLEYPSVTLPPQPHTKEGVDAYNEVIARVRMWVNLNLWQKLKLSRDDAKPLLRLKGFPSFPLVERQANEVDWWDMVCNVKKLINEKKEDGKVFWQNLAGYKRQEALRPYLSSEEDRKKGKKFARYQLGDLLLHLEKKHGEDWGKVYDEAWERIDKKVEGLSKHIKLEEERRSEDAQSKAALTDWLRAKASFVIEGLKEADKDEFCRCDLKLQKWYGDLRGKPFAIEAENSILDISGFSKQYNCAFIWQKDGVKKLNLYLIINYFKGGKLRFKKIKPEAFEANRFYTVINKKSGEIVPMEVNFNFDDPNLIILPLAFGKRQGREFIWNDLLSLETGSLKLANGRVIEKTLYNRRTRQDEPALFVALTFERREVLDSSNIKPMNLIGVDRGENIPAVIALTDPEGCPLSRFKDSLGNPTHILRIGESYKEKQRTIQAKKEVEQRRAGGYSRKYASKAKNLADDMVRNTARDLLYYAVTQDAMLIFENLSRGFGRQGKRTFSAERQYTRMEDWLTAKLAYEGLPSKTYLSKTLAQYTSKTCSNCGFTITSADYDRVLEKLKKTATGWMTTINGKELKVEGQITYYNRYKRQNVVKDLSVELDRLSEESVNNDISSWTKGRSGEALSLLKKRFSHRPVQEKFVCLNCGFETHADEQAALNIARSWLFLRSQEYKKYQTNKTTGNTDKRAFVETWQSFYRKKLKEVWKPAV

SEQ ID NO: 37297 - protein, 978 aa, synthetic construct
  REGION 1..978: note = engineered CasX variant
QEIKRINKIRRRLVKDSNTKKAGKTGPMKTLLVRVMTPDLRERLENLRKKPENIPQPISNTSRANLNKLLTDYTEMKKAILHVYWEEFQKDPVGLMSRVAQPASKKIDQNKLKPEMDEKGNLTTAGFACSQCGQPLFVYKLEQVSEKGKAYTNYFGRCNVAEHEKLILLAQLKPEKDSDEAVTYSLGKFGQRALDFYSIHVTKESTHPVKPLAQIAGNRYASYPVGKALSDACMGTIASFLSKYQDIIIEHQKVVKGNQKRLESLRELAGKENLEYPSVTLPPQPHTKEGVDAYNEVIARVRMWVNLNLWQKLKLSRDDAKPLLRLKGFPSFPLVERQANEVDWWDMVCNVKKLINEKKEDGKVFWQNLAGYKRQEALRPYLSSEEDRKKGKKFARYQLGDLLLHLEKKHGEDWGKVYDEAWERIDKKVEGLSKHIKLEEERRSEDAQSKAALTDWLRAKASFVIEGLKEADKDEFCRCDLKLQKWYGDLRGKPFAIEAENSILDISGFSKQYNCAFIWQKDGVKKLNLYLIINYFKGGKLRFKKIKPEAFEANRFYTVINKKSGEIVPMEVNFNFDDPNLIILPLAFGKRQGREFIWNDLLSLETGSLKLANGRVIEKTLYNRRTRQDEPALFVALTFERREVLDSSNIKPMNLIGVDRGENIPAVIALTDPEGCPLSRFKDSLGNPTHILRIGESYKEKQRTIQAKKEVEQRRAGGYSRKYASKAKNLADDMVRNTARDLLYYAVTQDAMLIFENLSRGFGRQGKRTFMAERQYTRMEDWLTAKLAYEGLPSKTYLSKTLAQYTSKTCSNCGFTITSADYDRVLEKLKKTATGWMTTINGKELKVEGQITYYNRYKRQNVVKDLSVELDRLSEESVNNDISSWDKGRSGEALSLLKKRFSHRPVQEKFVCLNCGFETHADEQAALNIARSWLFLRSQEYKKYQTNKTTGNTDKRAFVETWQSFYRKKLKEVWKPAV

SEQ ID NO: 37298 - protein, 978 aa, synthetic construct
  REGION 1..978: note = engineered CasX variant
QEIKRINKIRRRLVKDSNTKKAGKTGPMKTLLVRVMTPDLRERLENLRKKPENIPQPISNTSRANLNKLLTDYTEMKKAILHVYWEEFQKDPVGLMSRVAQPASKKIDQNKLKPEMDEKGNLTTAGFACSQCGQPLFVYKLEQVSEKGKAYTNYFGRCNVAEHEKLILLAQLKPEKDSDEAVTYSLGKFGQRALDFYSIHVTKESTHPVKPLAQIAGNRYASHPVGKALSDACMGTIASFLSKYQDIIIEHQKVVKGNQKRLESLRELAGKENLEYPSVTLPPQPHTKEGVDAYNEVIARVRMWVNLNLWQKLKLSRDDAKPLLRLKGFPSFPLVERQANEVDWWDMVCNVKKLINEKKEDGKVFWQNLAGYKRQEALRPYLSSEEDRKKGKKFARYQLGDLLLHLEKKHGEDWGKVYDEAWERIDKKVEGLSKHIKLEEERRSEDAQSKAALTDWLRAKASFVIEGLKEADKDEFCRCDLKLQKWYGDLRGKPFAIEAENSILDISGFSKQYNCAFIWQKDGVKKLNLYLIINYFKGGKLRFKKIKPEAFEANRFYTVINKKSGEIVPMEVNFNFDDPNLIILPLAFGKRQGREFIWNDLLSLETGSLKLANGRVIEKTLYNRRTRQDEPALFVALTFERREVLDSSNIKPMNLIGVDRGENIPAVIALTDPEGCPLSRFKDSLGNPTHILRIGESYKEKQRTIQAKKEVEQRRAGGYSRKYASKAKNLADDMVRNTARDLLYYAVTQDAMLIFENLSRGFGRQGKRTFMAERQYTRMEDWLTAKLAYEGLPSKTYLSKTLAQYTSKTCSNCGFTITSADYDRVLEKLKKTATGWMTTINGKELKVEGQITYYNRYKRQNVVKDLSVELDRLSEESVNNDISSWDKGRSGEALSLLKKRFSHRPVQEKFVCLNCGFETHADEQAALNIARSWLFLRSQEYKKYQTNKTTGNTDKRAFVETWQSFYRKKLKEVWKPAV

SEQ ID NO: 37299 - protein, 978 aa, synthetic construct
  REGION 1..978: note = engineered CasX variant
QEIKRINKIRRRLVKDSNTKKAGKTGPMKTLLVRVMTPDLRERLENLRKKPENIPQPISNTSRANLNKLLTDYTEMKKAILHVYWEEFQKDPVGLMSRVAQPASKKIDQNKLKPEMDEKGNLTTAGFACSQCGQPLFVYKLEQVSEKGKAYTNYFGRCNVAEHEKLILLAQLKPEKDSDEAVTYSLGKFGQRALDFYSIHVTKESTHPVKPLAQIAGNRYASSPVGKALSDACMGTIASFLSKYQDIIIEHQKVVKGNQKRLESLRELAGKENLEYPSVTLPPQPHTKEGVDAYNEVIARVRMWVNLNLWQKLKLSRDDAKPLLRLKGFPSFPLVERQANEVDWWDMVCNVKKLINEKKEDGKVFWQNLAGYKRQEALRPYLSSEEDRKKGKKFARYQLGDLLLHLEKKHGEDWGKVYDEAWERIDKKVEGLSKHIKLEEERRSEDAQSKAALTDWLRAKASFVIEGLKEADKDEFCRCDLKLQKWYGDLRGKPFAIEAENSILDISGFSKQYNCAFIWQKDGVKKLNLYLIINYFKGGKLRFKKIKPEAFEANRFYTVINKKSGEIVPMEVNFNFDDPNLIILPLAFGKRQGREFIWNDLLSLETGSLKLANGRVIEKTLYNRRTRQDEPALFVALTFERREVLDSSNIKPMNLIGVDRGENIPAVIALTDPEGCPLSRFKDSLGNPTHILRIGESYKEKQRTIQAKKEVEQRRAGGYSRKYASKAKNLADDMVRNTARDLLYYAVTQDAMLIFENLSRGFGRQGKRTFMAERQYTRMEDWLTAKLAYEGLPSKTYLSKTLAQYTSKTCSNCGFTITSADYDRVLEKLKKTATGWMTTINGKELKVEGQITYYNRYKRQNVVKDLSVELDRLSEESVNNDISSWDKGRSGEALSLLKKRFSHRPVQEKFVCLNCGFETHADEQAALNIARSWLFLRSQEYKKYQTNKTTGNTDKRAFVETWQSFYRKKLKEVWKPAV

SEQ ID NO: 37300 - protein, 978 aa, synthetic construct
  REGION 1..978: note = engineered CasX variant
QEIKRINKIRRRLVKDSNTKKAGKTGPMKTLLVRVMTPDLRERLENLRKKPENIPQPISNTSRANLNKLLTDYTEMKKAILHVYWEEFQKDPVGLMSRVAQPASKKIDQNKLKPEMDEKGNLTTAGFACSQCGQPLFVYKLEQVSEKGKAYTNYFGRCNVAEHEKLILLAQLKPEKDSDEAVTYSLGKFGQRALDFYSIHVTKESTHPVKPLAQIAGNRYASTPVGKALSDACMGTIASFLSKYQDIIIEHQKVVKGNQKRLESLRELAGKENLEYPSVTLPPQPHTKEGVDAYNEVIARVRMWVNLNLWQKLKLSRDDAKPLLRLKGFPSFPLVERQANEVDWWDMVCNVKKLINEKKEDGKVFWQNLAGYKRQEALRPYLSSEEDRKKGKKFARYQLGDLLLHLEKKHGEDWGKVYDEAWERIDKKVEGLSKHIKLEEERRSEDAQSKAALTDWLRAKASFVIEGLKEADKDEFCRCDLKLQKWYGDLRGKPFAIEAENSILDISGFSKQYNCAFIWQKDGVKKLNLYLIINYFKGGKLRFKKIKPEAFEANRFYTVINKKSGEIVPMEVNFNFDDPNLIILPLAFGKRQGREFIWNDLLSLETGSLKLANGRVIEKTLYNRRTRQDEPALFVALTFERREVLDSSNIKPMNLIGVDRGENIPAVIALTDPEGCPLSRFKDSLGNPTHILRIGESYKEKQRTIQAKKEVEQRRAGGYSRKYASKAKNLADDMVRNTARDLLYYAVTQDAMLIFENLSRGFGRQGKRTFMAERQYTRMEDWLTAKLAYEGLPSKTYLSKTLAQYTSKTCSNCGFTITSADYDRVLEKLKKTATGWMTTINGKELKVEGQITYYNRYKRQNVVKDLSVELDRLSEESVNNDISSWDKGRSGEALSLLKKRFSHRPVQEKFVCLNCGFETHADEQAALNIARSWLFLRSQEYKKYQTNKTTGNTDKRAFVETWQSFYRKKLKEVWKPAV

SEQ ID NO: 37301 - protein, 978 aa, synthetic construct
  REGION 1..978: note = engineered CasX variant
QEIKRINKIRRRLVKDSNTKKAGKTGPMKTLLVRVMTPDLRERLENLRKKPENIPQPISNTSRANLNKLLTDYTEMKKAILHVYWEEFQKDPVGLMSRVAQPASKKIDQNKLKPEMDEKGNLTTAGFACSQCGQPLFVYKLEQVSEKGKAYTNYFGRCNVAEHEKLILLAQLKPEKDSDEAVTYSLGKFGQRALDFYSIHVTKESTHPVKPLAQIAGNRYASAPVGKALSDACMGTIASFLSKYQDIIIEHQKVVKGNQKRLESLRELAGKENLEYPSVTLPPQPHTKEGVDAYNEVIARVRMWVNLNLWQKLKLSRDDAKPLLRLKGFPSFPLVERQANEVDWWDMVCNVKKLINEKKEDGKVFWQNLAGYKRQEALRPYLSSEEDRKKGKKFARYQLGDLLLHLEKKHGEDWGKVYDEAWERIDKKVEGLSKHIKLEEERRSEDAQSKAALTDWLRAKASFVIEGLKEADKDEFCRCDLKLQKWYGDLRGKPFAIEAENSILDISGFSKQYNCAFIWQKDGVKKLNLYLIINYFKGGKLRFKKIKPEAFEANRFYTVINKKSGEIVPMEVNFNFDDPNLIILPLAFGKRQGREFIWNDLLSLETGSLKLANGRVIEKTLYNRRTRQDEPALFVALTFERREVLDSSNIKPMNLIGVDRGENIPAVIALTDPEGCPLSRFKDSLGNPTHILRIGESYKEKQRTIQAKKEVEQRRAGGYSRKYASKAKNLADDMVRNTARDLLYYAVTQDAMLIFENLSRGFGRQGKRTFMAERQYTRMEDWLTAKLAYEGLPSKTYLSKTLAQYTSKTCSNCGFTITSADYDRVLEKLKKTATGWMTTINGKELKVEGQITYYNRYKRQNVVKDLSVELDRLSEESVNNDISSWDKGRSGEALSLLKKRFSHRPVQEKFVCLNCGFETHADEQAALNIARSWLFLRSQEYKKYQTNKTTGNTDKRAFVETWQSFYRKKLKEVWKPAV

SEQ ID NO: 37302 - protein, 978 aa, synthetic construct
  REGION 1..978: note = engineered CasX variant
QEIKRINKIRRRLVKDSNTKKAGKTGPMKTLLVRVMTPDLRERLENLRKKPENIPQPISNTSRANLNKLLTDYTEMKKAILHVYWEEFQKDPVGLMSRVAQPASKKIDQNKLKPEMDEKGNLTTAGFACSQCGQPLFVYKLEQVSEKGKAYTNYFGRCNVAEHEKLILLAQLKPEKDSDEAVTYSLGKFGQRALDFYSIHVTKESTHPVKPLAQIAGNRYASVPVGKALSDACMGTIASFLSKYQDIIIEHQKVVKGNQKRLESLRELAGKENLEYPSVTLPPQPHTKEGVDAYNEVIARVRMWVNLNLWQKLKLSRDDAKPLLRLKGFPSFPLVERQANEVDWWDMVCNVKKLINEKKEDGKVFWQNLAGYKRQEALRPYLSSEEDRKKGKKFARYQLGDLLLHLEKKHGEDWGKVYDEAWERIDKKVEGLSKHIKLEEERRSEDAQSKAALTDWLRAKASFVIEGLKEADKDEFCRCDLKLQKWYGDLRGKPFAIEAENSILDISGFSKQYNCAFIWQKDGVKKLNLYLIINYFKGGKLRFKKIKPEAFEANRFYTVINKKSGEIVPMEVNFNFDDPNLIILPLAFGKRQGREFIWNDLLSLETGSLKLANGRVIEKTLYNRRTRQDEPALFVALTFERREVLDSSNIKPMNLIGVDRGENIPAVIALTDPEGCPLSRFKDSLGNPTHILRIGESYKEKQRTIQAKKEVEQRRAGGYSRKYASKAKNLADDMVRNTARDLLYYAVTQDAMLIFENLSRGFGRQGKRTFMAERQYTRMEDWLTAKLAYEGLPSKTYLSKTLAQYTSKTCSNCGFTITSADYDRVLEKLKKTATGWMTTINGKELKVEGQITYYNRYKRQNVVKDLSVELDRLSEESVNNDISSWDKGRSGEALSLLKKRFSHRPVQEKFVCLNCGFETHADEQAALNIARSWLFLRSQEYKKYQTNKTTGNTDKRAFVETWQSFYRKKLKEVWKPAV

SEQ ID NO: 37303 - protein, 978 aa, synthetic construct
  REGION 1..978: note = engineered CasX variant
QEIKRINKIRRRLVKDSNTKKAGKTGPMKTLLVRVMTPDLRERLENLRKKPENIPQPISNTSRANLNKLLTDYTEMKKAILHVYWEEFQKDPVGLMSRVAQPASKKIDQNKLKPEMDEKGNLTTAGFACSQCGQPLFVYKLEQVSEKGKAYTNYFGRCNVAEHEKLIKLAQLKPEKDSDEAVTYSLGKFGQRALDFYSIHVTKESTHPVKPLAQIAGNRYASGPVGKALSDACMGTIASFLSKYQDIIIEHQKVVKGNQKRLESLRELAGKENLEYPSVTLPPQPHTKEGVDAYNEVIARVRMWVNLNLWQKLKLSRDDAKPLLRLKGFPSFPLVERQANEVDWWDMVCNVKKLINEKKEDGKVFWQNLAGYKRQEALRPYLSSEEDRKKGKKFARYQLGDLLLHLEKKHGEDWGKVYDEAWERIDKKVEGLSKHIKLEEERRSEDAQSKAALTDWLRAKASFVIEGLKEADKDEFCRCDLKLQKWYGDLRGKPFAIEAENSILDISGFSKQYNCAFIWQKDGVKKLNLYLIINYFKGGKLRFKKIKPEAFEANRFYTVINKKSGEIVPMEVNFNFDDPNLIILPLAFGKRQGREFIWNDLLSLETGSLKLANGRVIEKTLYNRRTRQDEPALFVALTFERREVLDSSNIKPMNLIGVDRGENIPAVIALTDPEGCPLSRFKDSLGNPTHILRIGESYKEKQRTIQAKKEVEQRRAGGYSRKYASKAKNLADDMVRNTARDLLYYAVTQDAMLIFENLSRGFGRQGKRTFMAERQYTRMEDWLTAKLAYEGLPSKTYLSKTLAQYTSKTCSNCGFTITSADYDRVLEKLKKTATGWMTTINGKELKVEGQITYYNRYKRQNVVKDLSVELDRLSEESVNNDISSWDKGRSGEALSLLKKRFSHRPVQEKFVCLNCGFETHADEQAALNIARSWLFLRSQEYKKYQTNKTTGNTDKRAFVETWQSFYRKKLKEVWKPAV

SEQ ID NO: 37304 - protein, 977 aa, synthetic construct
  REGION 1..977: note = engineered CasX variant
QEIKRINKIRRRLVKDSNTKKAGKTGPMKTLLVRVMTPDLRERLENLRKKPENIPQPISNTSRANLNKLLTDYTEMKKAILHVYWEEFQKDPVGLMSRVAQPASKKIDQNKLKPEMDEKGNLTTAGFACSQCGQPLFVYKLEQVSEKGKAYTNYFGRCNVAEHEKLILLAQLKPEKDSDEAVTYSLGKFGQRALDFYSIHVTKESTHPVKPLAQIAGNRYASPVGKALSDACMGTIASFLSKYQDIIIEHQKVVKGNQKRLESLRELAGKENLEYPSVTLPPQPHTKEGVDAYNEVIARVRMWVNLNLWQKLKLSRDDAKPLLRLKGFPSFPLVERQANEVDWWDMVCNVKKLINEKKEDGKVFWQNLAGYKRQEALRPYLSSEEDRKKGKKFARYQLGDLLLHLEKKHGEDWGKVYDEAWERIDKKVEGLSKHIKLEEERRSEDAQSKAALTDWLRAKASFVIEGLKEADKDEFCRCDLKLQKWYGDLRGKPFAIEAENSILDISGFSKQYNCAFIWQKDGVKKLNLYLIINYFKGGKLRFKKIKPEAFEANRFYTVINKKSGEIVPMEVNFNFDDPNLIILPLAFGKRQGREFIWNDLLSLETGSLKLANGRVIEKTLYNRRTRQDEPALFVALTFERREVLDSSNIKPMNLIGVDRGENIPAVIALTDPEGCPLSRFKDSLGNPTHILRIGESYKEKQRTIQAKKEVEQRRAGGYSRKYASKAKNLADDMVRNTARDLLYYAVTQDAMLIFENLSRGFGRQGKRTFMAERQYTRMEDWLTAKLAYEGLPSKTYLSKTLAQYTSKTCSNCGFTITSADYDRVLEKLKKTATGWMTTINGKELKVEGQITYYNRYKRQNVVKDLSVELDRLSEESVNNDISSWDKGRSGEALSLLKKRFSHRPVQEKFVCLNCGFETHADEQAALNIARSWLFLRSQEYKKYQTNKTTGNTDKRAFVETWQSFYRKKLKEVWKPAV

SEQ ID NO: 37305 - protein, 978 aa, synthetic construct
  REGION 1..978: note = engineered CasX variant
QEIKRINKIRRRLVKDSNTKKAGKTGPMKTLLVRVMTPDLRERLENLRKKPENIPQPISNTSRANLNKLLTDYTEMKKAILHVYWEEFQVDPVGLMSRVAQPASKKIDQNKLKPEMDEKGNLTTAGFACSQCGQPLFVYKLEQVSEKGKAYTNYFGRCNVAEHEKLILLAQLKPEKDSDEAVTYSLGKFGQRALDFYSIHVTKESTHPVKPLAQIAGNRYASYPVGKALSDACMGTIASFLSKYQDIIIEHQKVVKGNQKRLESLRELAGKENLEYPSVTLPPQPHTKEGVDAYNEVIARVRMWVNLNLWQKLKLSRDDAKPLLRLKGFPSFPLVERQANEVDWWDMVCNVKKLINEKKEDGKVFWQNLAGYKRQEALRPYLSSEEDRKKGKKFARYQLGDLLLHLEKKHGEDWGKVYDEAWERIDKKVEGLSKHIKLEEERRSEDAQSKAALTDWLRAKASFVIEGLKEADKDEFCRCDLKLQKWYGDLRGKPFAIEAENSILDISGFSKQYNCAFIWQKDGVKKLNLYLIINYFKGGKLRFKKIKPEAFEANRFYTVINKKSGEIVPMEVNFNFDDPNLIILPLAFGKRQGREFIWNDLLSLETGSLKLANGRVIEKTLYNRRTRQDEPALFVALTFERREVLDSSNIKPMNLIGVDRGENIPAVIALTDPEGCPLSRFKDSLGNPTHILRIGESYKEKQRTIQAKKEVEQRRAGGYSRKYASKAKNLADDMVRNTARDLLYYAVTQDAMLIFENLSRGFGRQGKRTFMAERQYTRMEDWLTAKLAYEGLPSKTYLSKTLAQYTSKTCSNCGFTITSADYDRVLEKLKKTATGWMTTINGKELKVEGQITYYNRYKRQNVVKDLSVELDRLSEESVNNDISSWTKGRSGEALSLLKKRFSHRPVQEKFVCLNCGFETHADEQAALNIARSWLFLRSQEYKKYQTNKTTGNTDKRAFVETWQSFYRKKLKEVWKPAV

SEQ ID NO: 37306 - protein, 978 aa, synthetic construct
  REGION 1..978: note = engineered CasX variant
QEIKRINKIRRRLVKDSNTKKAGKTGPMKTLLVRVMTPDLRERLENLRKKPENIPQPISNTSRANLNKLLTDYTEMKKAILHVYWEEFQVDPVGLMSRVAQPASKKIDQNKLKPEMDEKGNLTTAGFACSQCGQPLFVYKLEQVSEKGKAYTNYFGRCNVAEHEKLILLAQLKPEKDSDEAVTYSLGKFGQRALDFYSIHVTKESTHPVKPLAQIAGNRYASHPVGKALSDACMGTIASFLSKYQDIIIEHQKVVKGNQKRLESLRELAGKENLEYPSVTLPPQPHTKEGVDAYNEVIARVRMWVNLNLWQKLKLSRDDAKPLLRLKGFPSFPLVERQANEVDWWDMVCNVKKLINEKKEDGKVFWQNLAGYKRQEALRPYLSSEEDRKKGKKFARYQLGDLLLHLEKKHGEDWGKVYDEAWERIDKKVEGLSKHIKLEEERRSEDAQSKAALTDWLRAKASFVIEGLKEADKDEFCRCDLKLQKWYGDLRGKPFAIEAENSILDISGFSKQYNCAFIWQKDGVKKLNLYLIINYFKGGKLRFKKIKPEAFEANRFYTVINKKSGEIVPMEVNFNFDDPNLIILPLAFGKRQGREFIWNDLLSLETGSLKLANGRVIEKTLYNRRTRQDEPALFVALTFERREVLDSSNIKPMNLIGVDRGENIPAVIALTDPEGCPLSRFKDSLGNPTHILRIGESYKEKQRTIQAKKEVEQRRAGGYSRKYASKAKNLADDMVRNTARDLLYYAVTQDAMLIFENLSRGFGRQGKRTFMAERQYTRMEDWLTAKLAYEGLPSKTYLSKTLAQYTSKTCSNCGFTITSADYDRVLEKLKKTATGWMTTINGKELKVEGQITYYNRYKRQNVVKDLSVELDRLSEESVNNDISSWTKGRSGEALSLLKKRFSHRPVQEKFVCLNCGFETHADEQAALNIARSWLFLRSQEYKKYQTNKTTGNTDKRAFVETWQSFYRKKLKEVWKPAV

SEQ ID NO: 37307 - protein, 978 aa, synthetic construct
  REGION 1..978: note = engineered CasX variant
QEIKRINKIRRRLVKDSNTKKAGKTGPMKTLLVRVMTPDLRERLENLRKKPENIPQPISNTSRANLNKLLTDYTEMKKAILHVYWEEFQVDPVGLMSRVAQPASKKIDQNKLKPEMDEKGNLTTAGFACSQCGQPLFVYKLEQVSEKGKAYTNYFGRCNVAEHEKLILLAQLKPEKDSDEAVTYSLGKFGQRALDFYSIHVTKESTHPVKPLAQIAGNRYASSPVGKALSDACMGTIASFLSKYQDIIIEHQKVVKGNQKRLESLRELAGKENLEYPSVTLPPQPHTKEGVDAYNEVIARVRMWVNLNLWQKLKLSRDDAKPLLRLKGFPSFPLVERQANEVDWWDMVCNVKKLINEKKEDGKVFWQNLAGYKRQEALRPYLSSEEDRKKGKKFARYQLGDLLLHLEKKHGEDWGKVYDEAWERIDKKVEGLSKHIKLEEERRSEDAQSKAALTDWLRAKASFVIEGLKEADKDEFCRCDLKLQKWYGDLRGKPFAIEAENSILDISGFSKQYNCAFIWQKDGVKKLNLYLIINYFKGGKLRFKKIKPEAFEANRFYTVINKKSGEIVPMEVNFNFDDPNLIILPLAFGKRQGREFIWNDLLSLETGSLKLANGRVIEKTLYNRRTRQDEPALFVALTFERREVLDSSNIKPMNLIGVDRGENIPAVIALTDPEGCPLSRFKDSLGNPTHILRIGESYKEKQRTIQAKKEVEQRRAGGYSRKYASKAKNLADDMVRNTARDLLYYAVTQDAMLIFENLSRGFGRQGKRTFMAERQYTRMEDWLTAKLAYEGLPSKTYLSKTLAQYTSKTCSNCGFTITSADYDRVLEKLKKTATGWMTTINGKELKVEGQITYYNRYKRQNVVKDLSVELDRLSEESVNNDISSWTKGRSGEALSLLKKRFSHRPVQEKFVCLNCGFETHADEQAALNIARSWLFLRSQEYKKYQTNKTTGNTDKRAFVETWQSFYRKKLKEVWKPAV

SEQ ID NO: 37308 - protein, 978 aa, synthetic construct
  REGION 1..978: note = engineered CasX variant
QEIKRINKIRRRLVKDSNTKKAGKTGPMKTLLVRVMTPDLRERLENLRKKPENIPQPISNTSRANLNKLLTDYTEMKKAILHVYWEEFQVDPVGLMSRVAQPASKKIDQNKLKPEMDEKGNLTTAGFACSQCGQPLFVYKLEQVSEKGKAYTNYFGRCNVAEHEKLILLAQLKPEKDSDEAVTYSLGKFGQRALDFYSIHVTKESTHPVKPLAQIAGNRYASTPVGKALSDACMGTIASFLSKYQDIIIEHQKVVKGNQKRLESLRELAGKENLEYPSVTLPPQPHTKEGVDAYNEVIARVRMWVNLNLWQKLKLSRDDAKPLLRLKGFPSFPLVERQANEVDWWDMVCNVKKLINEKKEDGKVFWQNLAGYKRQEALRPYLSSEEDRKKGKKFARYQLGDLLLHLEKKHGEDWGKVYDEAWERIDKKVEGLSKHIKLEEERRSEDAQSKAALTDWLRAKASFVIEGLKEADKDEFCRCDLKLQKWYGDLRGKPFAIEAENSILDISGFSKQYNCAFIWQKDGVKKLNLYLIINYFKGGKLRFKKIKPEAFEANRFYTVINKKSGEIVPMEVNFNFDDPNLIILPLAFGKRQGREFIWNDLLSLETGSLKLANGRVIEKTLYNRRTRQDEPALFVALTFERREVLDSSNIKPMNLIGVDRGENIPAVIALTDPEGCPLSRFKDSLGNPTHILRIGESYKEKQRTIQAKKEVEQRRAGGYSRKYASKAKNLADDMVRNTARDLLYYAVTQDAMLIFENLSRGFGRQGKRTFMAERQYTRMEDWLTAKLAYEGLPSKTYLSKTLAQYTSKTCSNCGFTITSADYDRVLEKLKKTATGWMTTINGKELKVEGQITYYNRYKRQNVVKDLSVELDRLSEESVNNDISSWTKGRSGEALSLLKKRFSHRPVQEKFVCLNCGFETHADEQAALNIARSWLFLRSQEYKKYQTNKTTGNTDKRAFVETWQSFYRKKLKEVWKPAV

SEQ ID NO: 37309 - protein, 978 aa, synthetic construct
  REGION 1..978: note = engineered CasX variant
QEIKRINKIRRRLVKDSNTKKAGKTGPMKTLLVRVMTPDLRERLENLRKKPENIPQPISNTSRANLNKLLTDYTEMKKAILHVYWEEFQVDPVGLMSRVAQPASKKIDQNKLKPEMDEKGNLTTAGFACSQCGQPLFVYKLEQVSEKGKAYTNYFGRCNVAEHEKLILLAQLKPEKDSDEAVTYSLGKFGQRALDFYSIHVTKESTHPVKPLAQIAGNRYASAPVGKALSDACMGTIASFLSKYQDIIIEHQKVVKGNQKRLESLRELAGKENLEYPSVTLPPQPHTKEGVDAYNEVIARVRMWVNLNLWQKLKLSRDDAKPLLRLKGFPSFPLVERQANEVDWWDMVCNVKKLINEKKEDGKVFWQNLAGYKRQEALRPYLSSEEDRKKGKKFARYQLGDLLLHLEKKHGEDWGKVYDEAWERIDKKVEGLSKHIKLEEERRSEDAQSKAALTDWLRAKASFVIEGLKEADKDEFCRCDLKLQKWYGDLRGKPFAIEAENSILDISGFSKQYNCAFIWQKDGVKKLNLYLIINYFKGGKLRFKKIKPEAFEANRFYTVINKKSGEIVPMEVNFNFDDPNLIILPLAFGKRQGREFIWNDLLSLETGSLKLANGRVIEKTLYNRRTRQDEPALFVALTFERREVLDSSNIKPMNLIGVDRGENIPAVIALTDPEGCPLSRFKDSLGNPTHILRIGESYKEKQRTIQAKKEVEQRRAGGYSRKYASKAKNLADDMVRNTARDLLYYAVTQDAMLIFENLSRGFGRQGKRTFMAERQYTRMEDWLTAKLAYEGLPSKTYLSKTLAQYTSKTCSNCGFTITSADYDRVLEKLKKTATGWMTTINGKELKVEGQITYYNRYKRQNVVKDLSVELDRLSEESVNNDISSWTKGRSGEALSLLKKRFSHRPVQEKFVCLNCGFETHADEQAALNIARSWLFLRSQEYKKYQTNKTTGNTDKRAFVETWQSFYRKKLKEVWKPAV

SEQ ID NO: 37310 - protein, 978 aa, synthetic construct
  REGION 1..978: note = engineered CasX variant
QEIKRINKIRRRLVKDSNTKKAGKTGPMKTLLVRVMTPDLRERLENLRKKPENIPQPISNTSRANLNKLLTDYTEMKKAILHVYWEEFQVDPVGLMSRVAQPASKKIDQNKLKPEMDEKGNLTTAGFACSQCGQPLFVYKLEQVSEKGKAYTNYFGRCNVAEHEKLILLAQLKPEKDSDEAVTYSLGKFGQRALDFYSIHVTKESTHPVKPLAQIAGNRYASVPVGKALSDACMGTIASFLSKYQDIIIEHQKVVKGNQKRLESLRELAGKENLEYPSVTLPPQPHTKEGVDAYNEVIARVRMWVNLNLWQKLKLSRDDAKPLLRLKGFPSFPLVERQANEVDWWDMVCNVKKLINEKKEDGKVFWQNLAGYKRQEALRPYLSSEEDRKKGKKFARYQLGDLLLHLEKKHGEDWGKVYDEAWERIDKKVEGLSKHIKLEEERRSEDAQSKAALTDWLRAKASFVIEGLKEADKDEFCRCDLKLQKWYGDLRGKPFAIEAENSILDISGFSKQYNCAFIWQKDGVKKLNLYLIINYFKGGKLRFKKIKPEAFEANRFYTVINKKSGEIVPMEVNFNFDDPNLIILPLAFGKRQGREFIWNDLLSLETGSLKLANGRVIEKTLYNRRTRQDEPALFVALTFERREVLDSSNIKPMNLIGVDRGENIPAVIALTDPEGCPLSRFKDSLGNPTHILRIGESYKEKQRTIQAKKEVEQRRAGGYSRKYASKAKNLADDMVRNTARDLLYYAVTQDAMLIFENLSRGFGRQGKRTFMAERQYTRMEDWLTAKLAYEGLPSKTYLSKTLAQYTSKTCSNCGFTITSADYDRVLEKLKKTATGWMTTINGKELKVEGQITYYNRYKRQNVVKDLSVELDRLSEESVNNDISSWTKGRSGEALSLLKKRFSHRPVQEKFVCLNCGFETHADEQAALNIARSWLFLRSQEYKKYQTNKTTGNTDKRAFVETWQSFYRKKLKEVWKPAV

SEQ ID NO: 37311 - protein, 978 aa, synthetic construct
  REGION 1..978: note = engineered CasX variant
QEIKRINKIRRRLVKDSNTKKAGKTGPMKTLLVRVMTPDLRERLENLRKKPENIPQPISNTSRANLNKLLTDYTEMKKAILHVYWEEFQVDPVGLMSRVAQPASKKIDQNKLKPEMDEKGNLTTAGFACSQCGQPLFVYKLEQVSEKGKAYTNYFGRCNVAEHEKLIKLAQLKPEKDSDEAVTYSLGKFGQRALDFYSIHVTKESTHPVKPLAQIAGNRYASGPVGKALSDACMGTIASFLSKYQDIIIEHQKVVKGNQKRLESLRELAGKENLEYPSVTLPPQPHTKEGVDAYNEVIARVRMWVNLNLWQKLKLSRDDAKPLLRLKGFPSFPLVERQANEVDWWDMVCNVKKLINEKKEDGKVFWQNLAGYKRQEALRPYLSSEEDRKKGKKFARYQLGDLLLHLEKKHGEDWGKVYDEAWERIDKKVEGLSKHIKLEEERRSEDAQSKAALTDWLRAKASFVIEGLKEADKDEFCRCDLKLQKWYGDLRGKPFAIEAENSILDISGFSKQYNCAFIWQKDGVKKLNLYLIINYFKGGKLRFKKIKPEAFEANRFYTVINKKSGEIVPMEVNFNFDDPNLIILPLAFGKRQGREFIWNDLLSLETGSLKLANGRVIEKTLYNRRTRQDEPALFVALTFERREVLDSSNIKPMNLIGVDRGENIPAVIALTDPEGCPLSRFKDSLGNPTHILRIGESYKEKQRTIQAKKEVEQRRAGGYSRKYASKAKNLADDMVRNTARDLLYYAVTQDAMLIFENLSRGFGRQGKRTFMAERQYTRMEDWLTAKLAYEGLPSKTYLSKTLAQYTSKTCSNCGFTITSADYDRVLEKLKKTATGWMTTINGKELKVEGQITYYNRYKRQNVVKDLSVELDRLSEESVNNDISSWTKGRSGEALSLLKKRFSHRPVQEKFVCLNCGFETHADEQAALNIARSWLFLRSQEYKKYQTNKTTGNTDKRAFVETWQSFYRKKLKEVWKPAV

SEQ ID NO: 37312 - protein, 977 aa, synthetic construct
  REGION 1..977: note = engineered CasX variant
QEIKRINKIRRRLVKDSNTKKAGKTGPMKTLLVRVMTPDLRERLENLRKKPENIPQPISNTSRANLNKLLTDYTEMKKAILHVYWEEFQVDPVGLMSRVAQPASKKIDQNKLKPEMDEKGNLTTAGFACSQCGQPLFVYKLEQVSEKGKAYTNYFGRCNVAEHEKLILLAQLKPEKDSDEAVTYSLGKFGQRALDFYSIHVTKESTHPVKPLAQIAGNRYASPVGKALSDACMGTIASFLSKYQDIIIEHQKVVKGNQKRLESLRELAGKENLEYPSVTLPPQPHTKEGVDAYNEVIARVRMWVNLNLWQKLKLSRDDAKPLLRLKGFPSFPLVERQANEVDWWDMVCNVKKLINEKKEDGKVFWQNLAGYKRQEALRPYLSSEEDRKKGKKFARYQLGDLLLHLEKKHGEDWGKVYDEAWERIDKKVEGLSKHIKLEEERRSEDAQSKAALTDWLRAKASFVIEGLKEADKDEFCRCDLKLQKWYGDLRGKPFAIEAENSILDISGFSKQYNCAFIWQKDGVKKLNLYLIINYFKGGKLRFKKIKPEAFEANRFYTVINKKSGEIVPMEVNFNFDDPNLIILPLAFGKRQGREFIWNDLLSLETGSLKLANGRVIEKTLYNRRTRQDEPALFVALTFERREVLDSSNIKPMNLIGVDRGENIPAVIALTDPEGCPLSRFKDSLGNPTHILRIGESYKEKQRTIQAKKEVEQRRAGGYSRKYASKAKNLADDMVRNTARDLLYYAVTQDAMLIFENLSRGFGRQGKRTFMAERQYTRMEDWLTAKLAYEGLPSKTYLSKTLAQYTSKTCSNCGFTITSADYDRVLEKLKKTATGWMTTINGKELKVEGQITYYNRYKRQNVVKDLSVELDRLSEESVNNDISSWTKGRSGEALSLLKKRFSHRPVQEKFVCLNCGFETHADEQAALNIARSWLFLRSQEYKKYQTNKTTGNTDKRAFVETWQSFYRKKLKEVWKPAV

SEQ ID NO: 37313 - protein, 978 aa, synthetic construct
  REGION 1..978: note = engineered CasX variant
QEIKRLNKIRRRLVKDSNTKKAGKTGPMKTLLVRVMTPDLRERLENLRKKPENIPQPISNTSRANLNKLLTDYTEMKKAILHVYWEEFQKDPVGLMSRVAQPASKKIDQNKLKPEMDEKGNLTTAGFACSQCGQPLFVYKLEQVSEKGKAYTNYFGRCNVAEHEKLILLAQLKPEKDSDEAVTYSLGKFGQRALDFYSIHVTKESTHPVKPLAQIAGNRYASYPVGKALSDACMGTIASFLSKYQDIIIEHQKVVKGNQKRLESLRELAGKENLEYPSVTLPPQPHTKEGVDAYNEVIARVRMWVNLNLWQKLKLSRDDAKPLLRLKGFPSFPLVERQANEVDWWDMVCNVKKLINEKKEDGKVFWQNLAGYKRQEALRPYLSSEEDRKKGKKFARYQLGDLLLHLEKKHGEDWGKVYDEAWERIDKKVEGLSKHIKLEEERRSEDAQSKAALTDWLRAKASFVIEGLKEADKDEFCRCDLKLQKWYGDLRGKPFAIEAENSILDISGFSKQYNCAFIWQKDGVKKLNLYLIINYFKGGKLRFKKIKPEAFEANRFYTVINKKSGEIVPMEVNFNFDDPNLIILPLAFGKRQGREFIWNDLLSLETGSLKLANGRVIEKTLYNRRTRQDEPALFVALTFERREVLDSSNIKPMNLIGVDRGENIPAVIALTDPEGCPLSRFKDSLGNPTHILRIGESYKEKQRTIQAKKEVEQRRAGGYSRKYASKAKNLADDMVRNTARDLLYYAVTQDAMLIFENLSRGFGRQGKRTFMAERQYTRMEDWLTAKLAYEGLPSKTYLSKTLAQYTSKTCSNCGFTITSADYDRVLEKLKKTATGWMTTINGKELKVEGQITYYNRYKRQNVVKDLSVELDRLSEESVNNDISSWTKGRSGEALSLLKKRFSHRPVQEKFVCLNCGFETHADEQAALNIARSWLFLRSQEYKKYQTNKTTGNTDKRAFVETWQSFYRKKLKEVWKPAV

SEQ ID NO: 37314 - protein, 978 aa, synthetic construct
  REGION 1..978: note = engineered CasX variant
QEIKRLNKIRRRLVKDSNTKKAGKTGPMKTLLVRVMTPDLRERLENLRKKPENIPQPISNTSRANLNKLLTDYTEMKKAILHVYWEEFQKDPVGLMSRVAQPASKKIDQNKLKPEMDEKGNLTTAGFACSQCGQPLFVYKLEQVSEKGKAYTNYFGRCNVAEHEKLILLAQLKPEKDSDEAVTYSLGKFGQRALDFYSIHVTKESTHPVKPLAQIAGNRYASHPVGKALSDACMGTIASFLSKYQDIIIEHQKVVKGNQKRLESLRELAGKENLEYPSVTLPPQPHTKEGVDAYNEVIARVRMWVNLNLWQKLKLSRDDAKPLLRLKGFPSFPLVERQANEVDWWDMVCNVKKLINEKKEDGKVFWQNLAGYKRQEALRPYLSSEEDRKKGKKFARYQLGDLLLHLEKKHGEDWGKVYDEAWERIDKKVEGLSKHIKLEEERRSEDAQSKAALTDWLRAKASFVIEGLKEADKDEFCRCDLKLQKWYGDLRGKPFAIEAENSILDISGFSKQYNCAFIWQKDGVKKLNLYLIINYFKGGKLRFKKIKPEAFEANRFYTVINKKSGEIVPMEVNFNFDDPNLIILPLAFGKRQGREFIWNDLLSLETGSLKLANGRVIEKTLYNRRTRQDEPALFVALTFERREVLDSSNIKPMNLIGVDRGENIPAVIALTDPEGCPLSRFKDSLGNPTHILRIGESYKEKQRTIQAKKEVEQRRAGGYSRKYASKAKNLADDMVRNTARDLLYYAVTQDAMLIFENLSRGFGRQGKRTFMAERQYTRMEDWLTAKLAYEGLPSKTYLSKTLAQYTSKTCSNCGFTITSADYDRVLEKLKKTATGWMTTINGKELKVEGQITYYNRYKRQNVVKDLSVELDRLSEESVNNDISSWTKGRSGEALSLLKKRFSHRPVQEKFVCLNCGFETHADEQAALNIARSWLFLRSQEYKKYQTNKTTGNTDKRAFVETWQSFYRKKLKEVWKPAV

SEQ ID NO: 37315 - protein, 978 aa, synthetic construct
  REGION 1..978: note = engineered CasX variant
QEIKRLNKIRRRLVKDSNTKKAGKTGPMKTLLVRVMTPDLRERLENLRKKPENIPQPISNTSRANLNKLLTDYTEMKKAILHVYWEEFQKDPVGLMSRVAQPASKKIDQNKLKPEMDEKGNLTTAGFACSQCGQPLFVYKLEQVSEKGKAYTNYFGRCNVAEHEKLILLAQLKPEKDSDEAVTYSLGKFGQRALDFYSIHVTKESTHPVKPLAQIAGNRYASSPVGKALSDACMGTIASFLSKYQDIIIEHQKVVKGNQKRLESLRELAGKENLEYPSVTLPPQPHTKEGVDAYNEVIARVRMWVNLNLWQKLKLSRDDAKPLLRLKGFPSFPLVERQANEVDWWDMVCNVKKLINEKKEDGKVFWQNLAGYKRQEALRPYLSSEEDRKKGKKFARYQLGDLLLHLEKKHGEDWGKVYDEAWERIDKKVEGLSKHIKLEEERRSEDAQSKAALTDWLRAKASFVIEGLKEADKDEFCRCDLKLQKWYGDLRGKPFAIEAENSILDISGFSKQYNCAFIWQKDGVKKLNLYLIINYFKGGKLRFKKIKPEAFEANRFYTVINKKSGEIVPMEVNFNFDDPNLIILPLAFGKRQGREFIWNDLLSLETGSLKLANGRVIEKTLYNRRTRQDEPALFVALTFERREVLDSSNIKPMNLIGVDRGENIPAVIALTDPEGCPLSRFKDSLGNPTHILRIGESYKEKQRTIQAKKEVEQRRAGGYSRKYASKAKNLADDMVRNTARDLLYYAVTQDAMLIFENLSRGFGRQGKRTFMAERQYTRMEDWLTAKLAYEGLPSKTYLSKTLAQYTSKTCSNCGFTITSADYDRVLEKLKKTATGWMTTINGKELKVEGQITYYNRYKRQNVVKDLSVELDRLSEESVNNDISSWTKGRSGEALSLLKKRFSHRPVQEKFVCLNCGFETHADEQAALNIARSWLFLRSQEYKKYQTNKTTGNTDKRAFVETWQSFYRKKLKEVWKPAV

SEQ ID NO: 37316 - protein, 978 aa, synthetic construct
  REGION 1..978: note = engineered CasX variant
QEIKRLNKIRRRLVKDSNTKKAGKTGPMKTLLVRVMTPDLRERLENLRKKPENIPQPISNTSRANLNKLLTDYTEMKKAILHVYWEEFQKDPVGLMSRVAQPASKKIDQNKLKPEMDEKGNLTTAGFACSQCGQPLFVYKLEQVSEKGKAYTNYFGRCNVAEHEKLILLAQLKPEKDSDEAVTYSLGKFGQRALDFYSIHVTKESTHPVKPLAQIAGNRYASTPVGKALSDACMGTIASFLSKYQDIIIEHQKVVKGNQKRLESLRELAGKENLEYPSVTLPPQPHTKEGVDAYNEVIARVRMWVNLNLWQKLKLSRDDAKPLLRLKGFPSFPLVERQANEVDWWDMVCNVKKLINEKKEDGKVFWQNLAGYKRQEALRPYLSSEEDRKKGKKFARYQLGDLLLHLEKKHGEDWGKVYDEAWERIDKKVEGLSKHIKLEEERRSEDAQSKAALTDWLRAKASFVIEGLKEADKDEFCRCDLKLQKWYGDLRGKPFAIEAENSILDISGFSKQYNCAFIWQKDGVKKLNLYLIINYFKGGKLRFKKIKPEAFEANRFYTVINKKSGEIVPMEVNFNFDDPNLIILPLAFGKRQGREFIWNDLLSLETGSLKLANGRVIEKTLYNRRTRQDEPALFVALTFERREVLDSSNIKPMNLIGVDRGENIPAVIALTDPEGCPLSRFKDSLGNPTHILRIGESYKEKQRTIQAKKEVEQRRAGGYSRKYASKAKNLADDMVRNTARDLLYYAVTQDAMLIFENLSRGFGRQGKRTFMAERQYTRMEDWLTAKLAYEGLPSKTYLSKTLAQYTSKTCSNCGFTITSADYDRVLEKLKKTATGWMTTINGKELKVEGQITYYNRYKRQNVVKDLSVELDRLSEESVNNDISSWTKGRSGEALSLLKKRFSHRPVQEKFVCLNCGFETHADEQAALNIARSWLFLRSQEYKKYQTNKTTGNTDKRAFVETWQSFYRKKLKEVWKPAV

SEQ ID NO: 37317 - protein, 978 aa, synthetic construct
  REGION 1..978: note = engineered CasX variant
QEIKRLNKIRRRLVKDSNTKKAGKTGPMKTLLVRVMTPDLRERLENLRKKPENIPQPISNTSRANLNKLLTDYTEMKKAILHVYWEEFQKDPVGLMSRVAQPASKKIDQNKLKPEMDEKGNLTTAGFACSQCGQPLFVYKLEQVSEKGKAYTNYFGRCNVAEHEKLILLAQLKPEKDSDEAVTYSLGKFGQRALDFYSIHVTKESTHPVKPLAQIAGNRYASAPVGKALSDACMGTIASFLSKYQDIIIEHQKVVKGNQKRLESLRELAGKENLEYPSVTLPPQPHTKEGVDAYNEVIARVRMWVNLNLWQKLKLSRDDAKPLLRLKGFPSFPLVERQANEVDWWDMVCNVKKLINEKKEDGKVFWQNLAGYKRQEALRPYLSSEEDRKKGKKFARYQLGDLLLHLEKKHGEDWGKVYDEAWERIDKKVEGLSKHIKLEEERRSEDAQSKAALTDWLRAKASFVIEGLKEADKDEFCRCDLKLQKWYGDLRGKPFAIEAENSILDISGFSKQYNCAFIWQKDGVKKLNLYLIINYFKGGKLRFKKIKPEAFEANRFYTVINKKSGEIVPMEVNFNFDDPNLIILPLAFGKRQGREFIWNDLLSLETGSLKLANGRVIEKTLYNRRTRQDEPALFVALTFERREVLDSSNIKPMNLIGVDRGENIPAVIALTDPEGCPLSRFKDSLGNPTHILRIGESYKEKQRTIQAKKEVEQRRAGGYSRKYASKAKNLADDMVRNTARDLLYYAVTQDAMLIFENLSRGFGRQGKRTFMAERQYTRMEDWLTAKLAYEGLPSKTYLSKTLAQYTSKTCSNCGFTITSADYDRVLEKLKKTATGWMTTINGKELKVEGQITYYNRYKRQNVVKDLSVELDRLSEESVNNDISSWTKGRSGEALSLLKKRFSHRPVQEKFVCLNCGFETHADEQAALNIARSWLFLRSQEYKKYQTNKTTGNTDKRAFVETWQSFYRKKLKEVWKPAV

SEQ ID NO: 37318 - protein, 978 aa, synthetic construct
  REGION 1..978: note = engineered CasX variant
QEIKRLNKIRRRLVKDSNTKKAGKTGPMKTLLVRVMTPDLRERLENLRKKPENIPQPISNTSRANLNKLLTDYTEMKKAILHVYWEEFQKDPVGLMSRVAQPASKKIDQNKLKPEMDEKGNLTTAGFACSQCGQPLFVYKLEQVSEKGKAYTNYFGRCNVAEHEKLILLAQLKPEKDSDEAVTYSLGKFGQRALDFYSIHVTKESTHPVKPLAQIAGNRYASVPVGKALSDACMGTIASFLSKYQDIIIEHQKVVKGNQKRLESLRELAGKENLEYPSVTLPPQPHTKEGVDAYNEVIARVRMWVNLNLWQKLKLSRDDAKPLLRLKGFPSFPLVERQANEVDWWDMVCNVKKLINEKKEDGKVFWQNLAGYKRQEALRPYLSSEEDRKKGKKFARYQLGDLLLHLEKKHGEDWGKVYDEAWERIDKKVEGLSKHIKLEEERRSEDAQSKAALTDWLRAKASFVIEGLKEADKDEFCRCDLKLQKWYGDLRGKPFAIEAENSILDISGFSKQYNCAFIWQKDGVKKLNLYLIINYFKGGKLRFKKIKPEAFEANRFYTVINKKSGEIVPMEVNFNFDDPNLIILPLAFGKRQGREFIWNDLLSLETGSLKLANGRVIEKTLYNRRTRQDEPALFVALTFERREVLDSSNIKPMNLIGVDRGENIPAVIALTDPEGCPLSRFKDSLGNPTHILRIGESYKEKQRTIQAKKEVEQRRAGGYSRKYASKAKNLADDMVRNTARDLLYYAVTQDAMLIFENLSRGFGRQGKRTFMAERQYTRMEDWLTAKLAYEGLPSKTYLSKTLAQYTSKTCSNCGFTITSADYDRVLEKLKKTATGWMTTINGKELKVEGQITYYNRYKRQNVVKDLSVELDRLSEESVNNDISSWTKGRSGEALSLLKKRFSHRPVQEKFVCLNCGFETHADEQAALNIARSWLFLRSQEYKKYQTNKTTGNTDKRAFVETWQSFYRKKLKEVWKPAV

SEQ ID NO: 37319 - protein, 978 aa, synthetic construct
  REGION 1..978: note = engineered CasX variant
QEIKRLNKIRRRLVKDSNTKKAGKTGPMKTLLVRVMTPDLRERLENLRKKPENIPQPISNTSRANLNKLLTDYTEMKKAILHVYWEEFQKDPVGLMSRVAQPASKKIDQNKLKPEMDEKGNLTTAGFACSQCGQPLFVYKLEQVSEKGKAYTNYFGRCNVAEHEKLIKLAQLKPEKDSDEAVTYSLGKFGQRALDFYSIHVTKESTHPVKPLAQIAGNRYASGPVGKALSDACMGTIASFLSKYQDIIIEHQKVVKGNQKRLESLRELAGKENLEYPSVTLPPQPHTKEGVDAYNEVIARVRMWVNLNLWQKLKLSRDDAKPLLRLKGFPSFPLVERQANEVDWWDMVCNVKKLINEKKEDGKVFWQNLAGYKRQEALRPYLSSEEDRKKGKKFARYQLGDLLLHLEKKHGEDWGKVYDEAWERIDKKVEGLSKHIKLEEERRSEDAQSKAALTDWLRAKASFVIEGLKEADKDEFCRCDLKLQKWYGDLRGKPFAIEAENSILDISGFSKQYNCAFIWQKDGVKKLNLYLIINYFKGGKLRFKKIKPEAFEANRFYTVINKKSGEIVPMEVNFNFDDPNLIILPLAFGKRQGREFIWNDLLSLETGSLKLANGRVIEKTLYNRRTRQDEPALFVALTFERREVLDSSNIKPMNLIGVDRGENIPAVIALTDPEGCPLSRFKDSLGNPTHILRIGESYKEKQRTIQAKKEVEQRRAGGYSRKYASKAKNLADDMVRNTARDLLYYAVTQDAMLIFENLSRGFGRQGKRTFMAERQYTRMEDWLTAKLAYEGLPSKTYLSKTLAQYTSKTCSNCGFTITSADYDRVLEKLKKTATGWMTTINGKELKVEGQITYYNRYKRQNVVKDLSVELDRLSEESVNNDISSWTKGRSGEALSLLKKRFSHRPVQEKFVCLNCGFETHADEQAALNIARSWLFLRSQEYKKYQTNKTTGNTDKRAFVETWQSFYRKKLKEVWKPAV

SEQ ID NO: 37320 - protein, 977 aa, synthetic construct
  REGION 1..977: note = engineered CasX variant
QEIKRLNKIRRRLVKDSNTKKAGKTGPMKTLLVRVMTPDLRERLENLRKKPENIPQPISNTSRANLNKLLTDYTEMKKAILHVYWEEFQKDPVGLMSRVAQPASKKIDQNKLKPEMDEKGNLTTAGFACSQCGQPLFVYKLEQVSEKGKAYTNYFGRCNVAEHEKLILLAQLKPEKDSDEAVTYSLGKFGQRALDFYSIHVTKESTHPVKPLAQIAGNRYASPVGKALSDACMGTIASFLSKYQDIIIEHQKVVKGNQKRLESLRELAGKENLEYPSVTLPPQPHTKEGVDAYNEVIARVRMWVNLNLWQKLKLSRDDAKPLLRLKGFPSFPLVERQANEVDWWDMVCNVKKLINEKKEDGKVFWQNLAGYKRQEALRPYLSSEEDRKKGKKFARYQLGDLLLHLEKKHGEDWGKVYDEAWERIDKKVEGLSKHIKLEEERRSEDAQSKAALTDWLRAKASFVIEGLKEADKDEFCRCDLKLQKWYGDLRGKPFAIEAENSILDISGFSKQYNCAFIWQKDGVKKLNLYLIINYFKGGKLRFKKIKPEAFEANRFYTVINKKSGEIVPMEVNFNFDDPNLIILPLAFGKRQGREFIWNDLLSLETGSLKLANGRVIEKTLYNRRTRQDEPALFVALTFERREVLDSSNIKPMNLIGVDRGENIPAVIALTDPEGCPLSRFKDSLGNPTHILRIGESYKEKQRTIQAKKEVEQRRAGGYSRKYASKAKNLADDMVRNTARDLLYYAVTQDAMLIFENLSRGFGRQGKRTFMAERQYTRMEDWLTAKLAYEGLPSKTYLSKTLAQYTSKTCSNCGFTITSADYDRVLEKLKKTATGWMTTINGKELKVEGQITYYNRYKRQNVVKDLSVELDRLSEESVNNDISSWTKGRSGEALSLLKKRFSHRPVQEKFVCLNCGFETHADEQAALNIARSWLFLRSQEYKKYQTNKTTGNTDKRAFVETWQSFYRKKLKEVWKPAV

SEQ ID NO: 37321 - protein, 978 aa, synthetic construct
  REGION 1..978: note = engineered CasX variant
QEIKRINKIRRRLVKDSNTKKAGKTGPMKTLLVRVMTPDLRERLENLRKKPENIPQPISNTSRANLNKLLTDYTEMKKAILHVYWEEFQKDPVGLMSRVAQPASKKIDQNKLKPEMDEKGNLTTAGFACSQCGQPLFVYKLEQVSEKGKAYTNYVGRCNVAEHEKLILLAQLKPEKDSDEAVTYSLGKFGQRALDFYSIHVTKESTHPVKPLAQIAGNRYASYPVGKALSDACMGTIASFLSKYQDIIIEHQKVVKGNQKRLESLRELAGKENLEYPSVTLPPQPHTKEGVDAYNEVIARVRMWVNLNLWQKLKLSRDDAKPLLRLKGFPSFPLVERQANEVDWWDMVCNVKKLINEKKEDGKVFWQNLAGYKRQEALRPYLSSEEDRKKGKKFARYQLGDLLLHLEKKHGEDWGKVYDEAWERIDKKVEGLSKHIKLEEERRSEDAQSKAALTDWLRAKASFVIEGLKEADKDEFCRCDLKLQKWYGDLRGKPFAIEAENSILDISGFSKQYNCAFIWQKDGVKKLNLYLIINYFKGGKLRFKKIKPEAFEANRFYTVINKKSGEIVPMEVNFNFDDPNLIILPLAFGKRQGREFIWNDLLSLETGSLKLANGRVIEKTLYNRRTRQDEPALFVALTFERREVLDSSNIKPMNLIGVDRGENIPAVIALTDPEGCPLSRFKDSLGNPTHILRIGESYKEKQRTIQAKKEVEQRRAGGYSRKYASKAKNLADDMVRNTARDLLYYAVTQDAMLIFENLSRGFGRQGKRTFMAERQYTRMEDWLTAKLAYEGLPSKTYLSKTLAQYTSKTCSNCGFTITSADYDRVLEKLKKTATGWMTTINGKELKVEGQITYYNRYKRQNVVKDLSVELDRLSEESVNNDISSWTKGRSGEALSLLKKRFSHRPVQEKFVCLNCGFETHADEQAALNIARSWLFLRSQEYKKYQTNKTTGNTDKRAFVETWQSFYRKKLKEVWKPAV

SEQ ID NO: 37322 - protein, 978 aa, synthetic construct
  REGION 1..978: note = engineered CasX variant
QEIKRINKIRRRLVKDSNTKKAGKTGPMKTLLVRVMTPDLRERLENLRKKPENIPQPISNTSRANLNKLLTDYTEMKKAILHVYWEEFQKDPVGLMSRVAQPASKKIDQNKLKPEMDEKGNLTTAGFACSQCGQPLFVYKLEQVSEKGKAYTNYVGRCNVAEHEKLILLAQLKPEKDSDEAVTYSLGKFGQRALDFYSIHVTKESTHPVKPLAQIAGNRYASHPVGKALSDACMGTIASFLSKYQDIIIEHQKVVKGNQKRLESLRELAGKENLEYPSVTLPPQPHTKEGVDAYNEVIARVRMWVNLNLWQKLKLSRDDAKPLLRLKGFPSFPLVERQANEVDWWDMVCNVKKLINEKKEDGKVFWQNLAGYKRQEALRPYLSSEEDRKKGKKFARYQLGDLLLHLEKKHGEDWGKVYDEAWERIDKKVEGLSKHIKLEEERRSEDAQSKAALTDWLRAKASFVIEGLKEADKDEFCRCDLKLQKWYGDLRGKPFAIEAENSILDISGFSKQYNCAFIWQKDGVKKLNLYLIINYFKGGKLRFKKIKPEAFEANRFYTVINKKSGEIVPMEVNFNFDDPNLIILPLAFGKRQGREFIWNDLLSLETGSLKLANGRVIEKTLYNRRTRQDEPALFVALTFERREVLDSSNIKPMNLIGVDRGENIPAVIALTDPEGCPLSRFKDSLGNPTHILRIGESYKEKQRTIQAKKEVEQRRAGGYSRKYASKAKNLADDMVRNTARDLLYYAVTQDAMLIFENLSRGFGRQGKRTFMAERQYTRMEDWLTAKLAYEGLPSKTYLSKTLAQYTSKTCSNCGFTITSADYDRVLEKLKKTATGWMTTINGKELKVEGQITYYNRYKRQNVVKDLSVELDRLSEESVNNDISSWTKGRSGEALSLLKKRFSHRPVQEKFVCLNCGFETHADEQAALNIARSWLFLRSQEYKKYQTNKTTGNTDKRAFVETWQSFYRKKLKEVWKPAV

SEQ ID NO: 37323 - protein, 978 aa, synthetic construct
  REGION 1..978: note = engineered CasX variant
QEIKRINKIRRRLVKDSNTKKAGKTGPMKTLLVRVMTPDLRERLENLRKKPENIPQPISNTSRANLNKLLTDYTEMKKAILHVYWEEFQKDPVGLMSRVAQPASKKIDQNKLKPEMDEKGNLTTAGFACSQCGQPLFVYKLEQVSEKGKAYTNYVGRCNVAEHEKLILLAQLKPEKDSDEAVTYSLGKFGQRALDFYSIHVTKESTHPVKPLAQIAGNRYASSPVGKALSDACMGTIASFLSKYQDIIIEHQKVVKGNQKRLESLRELAGKENLEYPSVTLPPQPHTKEGVDAYNEVIARVRMWVNLNLWQKLKLSRDDAKPLLRLKGFPSFPLVERQANEVDWWDMVCNVKKLINEKKEDGKVFWQNLAGYKRQEALRPYLSSEEDRKKGKKFARYQLGDLLLHLEKKHGEDWGKVYDEAWERIDKKVEGLSKHIKLEEERRSEDAQSKAALTDWLRAKASFVIEGLKEADKDEFCRCDLKLQKWYGDLRGKPFAIEAENSILDISGFSKQYNCAFIWQKDGVKKLNLYLIINYFKGGKLRFKKIKPEAFEANRFYTVINKKSGEIVPMEVNFNFDDPNLIILPLAFGKRQGREFIWNDLLSLETGSLKLANGRVIEKTLYNRRTRQDEPALFVALTFERREVLDSSNIKPMNLIGVDRGENIPAVIALTDPEGCPLSRFKDSLGNPTHILRIGESYKEKQRTIQAKKEVEQRRAGGYSRKYASKAKNLADDMVRNTARDLLYYAVTQDAMLIFENLSRGFGRQGKRTFMAERQYTRMEDWLTAKLAYEGLPSKTYLSKTLAQYTSKTCSNCGFTITSADYDRVLEKLKKTATGWMTTINGKELKVEGQITYYNRYKRQNVVKDLSVELDRLSEESVNNDISSWTKGRSGEALSLLKKRFSHRPVQEKFVCLNCGFETHADEQAALNIARSWLFLRSQEYKKYQTNKTTGNTDKRAFVETWQSFYRKKLKEVWKPAV

SEQ ID NO: 37324 - protein, 978 aa, synthetic construct
  REGION 1..978: note = engineered CasX variant
QEIKRINKIRRRLVKDSNTKKAGKTGPMKTLLVRVMTPDLRERLENLRKKPENIPQPISNTSRANLNKLLTDYTEMKKAILHVYWEEFQKDPVGLMSRVAQPASKKIDQNKLKPEMDEKGNLTTAGFACSQCGQPLFVYKLEQVSEKGKAYTNYVGRCNVAEHEKLILLAQLKPEKDSDEAVTYSLGKFGQRALDFYSIHVTKESTHPVKPLAQIAGNRYASTPVGKALSDACMGTIASFLSKYQDIIIEHQKVVKGNQKRLESLRELAGKENLEYPSVTLPPQPHTKEGVDAYNEVIARVRMWVNLNLWQKLKLSRDDAKPLLRLKGFPSFPLVERQANEVDWWDMVCNVKKLINEKKEDGKVFWQNLAGYKRQEALRPYLSSEEDRKKGKKFARYQLGDLLLHLEKKHGEDWGKVYDEAWERIDKKVEGLSKHIKLEEERRSEDAQSKAALTDWLRAKASFVIEGLKEADKDEFCRCDLKLQKWYGDLRGKPFAIEAENSILDISGFSKQYNCAFIWQKDGVKKLNLYLIINYFKGGKLRFKKIKPEAFEANRFYTVINKKSGEIVPMEVNFNFDDPNLIILPLAFGKRQGREFIWNDLLSLETGSLKLANGRVIEKTLYNRRTRQDEPALFVALTFERREVLDSSNIKPMNLIGVDRGENIPAVIALTDPEGCPLSRFKDSLGNPTHILRIGESYKEKQRTIQAKKEVEQRRAGGYSRKYASKAKNLADDMVRNTARDLLYYAVTQDAMLIFENLSRGFGRQGKRTFMAERQYTRMEDWLTAKLAYEGLPSKTYLSKTLAQYTSKTCSNCGFTITSADYDRVLEKLKKTATGWMTTINGKELKVEGQITYYNRYKRQNVVKDLSVELDRLSEESVNNDISSWTKGRSGEALSLLKKRFSHRPVQEKFVCLNCGFETHADEQAALNIARSWLFLRSQEYKKYQTNKTTGNTDKRAFVETWQSFYRKKLKEVWKPAV

SEQ ID NO: 37325 - protein, 978 aa, synthetic construct
  REGION 1..978: note = engineered CasX variant
QEIKRINKIRRRLVKDSNTKKAGKTGPMKTLLVRVMTPDLRERLENLRKKPENIPQPISNTSRANLNKLLTDYTEMKKAILHVYWEEFQKDPVGLMSRVAQPASKKIDQNKLKPEMDEKGNLTTAGFACSQCGQPLFVYKLEQVSEKGKAYTNYVGRCNVAEHEKLILLAQLKPEKDSDEAVTYSLGKFGQRALDFYSIHVTKESTHPVKPLAQIAGNRYASAPVGKALSDACMGTIASFLSKYQDIIIEHQKVVKGNQKRLESLRELAGKENLEYPSVTLPPQPHTKEGVDAYNEVIARVRMWVNLNLWQKLKLSRDDAKPLLRLKGFPSFPLVERQANEVDWWDMVCNVKKLINEKKEDGKVFWQNLAGYKRQEALRPYLSSEEDRKKGKKFARYQLGDLLLHLEKKHGEDWGKVYDEAWERIDKKVEGLSKHIKLEEERRSEDAQSKAALTDWLRAKASFVIEGLKEADKDEFCRCDLKLQKWYGDLRGKPFAIEAENSILDISGFSKQYNCAFIWQKDGVKKLNLYLIINYFKGGKLRFKKIKPEAFEANRFYTVINKKSGEIVPMEVNFNFDDPNLIILPLAFGKRQGREFIWNDLLSLETGSLKLANGRVIEKTLYNRRTRQDEPALFVALTFERREVLDSSNIKPMNLIGVDRGENIPAVIALTDPEGCPLSRFKDSLGNPTHILRIGESYKEKQRTIQAKKEVEQRRAGGYSRKYASKAKNLADDMVRNTARDLLYYAVTQDAMLIFENLSRGFGRQGKRTFMAERQYTRMEDWLTAKLAYEGLPSKTYLSKTLAQYTSKTCSNCGFTITSADYDRVLEKLKKTATGWMTTINGKELKVEGQITYYNRYKRQNVVKDLSVELDRLSEESVNNDISSWTKGRSGEALSLLKKRFSHRPVQEKFVCLNCGFETHADEQAALNIARSWLFLRSQEYKKYQTNKTTGNTDKRAFVETWQSFYRKKLKEVWKPAV

SEQ ID NO: 37326 - protein, 978 aa, synthetic construct
  REGION 1..978: note = engineered CasX variant
QEIKRINKIRRRLVKDSNTKKAGKTGPMKTLLVRVMTPDLRERLENLRKKPENIPQPISNTSRANLNKLLTDYTEMKKAILHVYWEEFQKDPVGLMSRVAQPASKKIDQNKLKPEMDEKGNLTTAGFACSQCGQPLFVYKLEQVSEKGKAYTNYVGRCNVAEHEKLILLAQLKPEKDSDEAVTYSLGKFGQRALDFYSIHVTKESTHPVKPLAQIAGNRYASVPVGKALSDACMGTIASFLSKYQDIIIEHQKVVKGNQKRLESLRELAGKENLEYPSVTLPPQPHTKEGVDAYNEVIARVRMWVNLNLWQKLKLSRDDAKPLLRLKGFPSFPLVERQANEVDWWDMVCNVKKLINEKKEDGKVFWQNLAGYKRQEALRPYLSSEEDRKKGKKFARYQLGDLLLHLEKKHGEDWGKVYDEAWERIDKKVEGLSKHIKLEEERRSEDAQSKAALTDWLRAKASFVIEGLKEADKDEFCRCDLKLQKWYGDLRGKPFAIEAENSILDISGFSKQYNCAFIWQKDGVKKLNLYLIINYFKGGKLRFKKIKPEAFEANRFYTVINKKSGEIVPMEVNFNFDDPNLIILPLAFGKRQGREFIWNDLLSLETGSLKLANGRVIEKTLYNRRTRQDEPALFVALTFERREVLDSSNIKPMNLIGVDRGENIPAVIALTDPEGCPLSRFKDSLGNPTHILRIGESYKEKQRTIQAKKEVEQRRAGGYSRKYASKAKNLADDMVRNTARDLLYYAVTQDAMLIFENLSRGFGRQGKRTFMAERQYTRMEDWLTAKLAYEGLPSKTYLSKTLAQYTSKTCSNCGFTITSADYDRVLEKLKKTATGWMTTINGKELKVEGQITYYNRYKRQNVVKDLSVELDRLSEESVNNDISSWTKGRSGEALSLLKKRFSHRPVQEKFVCLNCGFETHADEQAALNIARSWLFLRSQEYKKYQTNKTTGNTDKRAFVETWQSFYRKKLKEVWKPAV

SEQ ID NO: 37327 - protein, 978 aa, synthetic construct
  REGION 1..978: note = engineered CasX variant
QEIKRINKIRRRLVKDSNTKKAGKTGPMKTLLVRVMTPDLRERLENLRKKPENIPQPISNTSRANLNKLLTDYTEMKKAILHVYWEEFQKDPVGLMSRVAQPASKKIDQNKLKPEMDEKGNLTTAGFACSQCGQPLFVYKLEQVSEKGKAYTNYVGRCNVAEHEKLIKLAQLKPEKDSDEAVTYSLGKFGQRALDFYSIHVTKESTHPVKPLAQIAGNRYASGPVGKALSDACMGTIASFLSKYQDIIIEHQKVVKGNQKRLESLRELAGKENLEYPSVTLPPQPHTKEGVDAYNEVIARVRMWVNLNLWQKLKLSRDDAKPLLRLKGFPSFPLVERQANEVDWWDMVCNVKKLINEKKEDGKVFWQNLAGYKRQEALRPYLSSEEDRKKGKKFARYQLGDLLLHLEKKHGEDWGKVYDEAWERIDKKVEGLSKHIKLEEERRSEDAQSKAALTDWLRAKASFVIEGLKEADKDEFCRCDLKLQKWYGDLRGKPFAIEAENSILDISGFSKQYNCAFIWQKDGVKKLNLYLIINYFKGGKLRFKKIKPEAFEANRFYTVINKKSGEIVPMEVNFNFDDPNLIILPLAFGKRQGREFIWNDLLSLETGSLKLANGRVIEKTLYNRRTRQDEPALFVALTFERREVLDSSNIKPMNLIGVDRGENIPAVIALTDPEGCPLSRFKDSLGNPTHILRIGESYKEKQRTIQAKKEVEQRRAGGYSRKYASKAKNLADDMVRNTARDLLYYAVTQDAMLIFENLSRGFGRQGKRTFMAERQYTRMEDWLTAKLAYEGLPSKTYLSKTLAQYTSKTCSNCGFTITSADYDRVLEKLKKTATGWMTTINGKELKVEGQITYYNRYKRQNVVKDLSVELDRLSEESVNNDISSWTKGRSGEALSLLKKRFSHRPVQEKFVCLNCGFETHADEQAALNIARSWLFLRSQEYKKYQTNKTTGNTDKRAFVETWQSFYRKKLKEVWKPAV

SEQ ID NO: 37328 - protein, 977 aa, synthetic construct
  REGION 1..977: note = engineered CasX variant
QEIKRINKIRRRLVKDSNTKKAGKTGPMKTLLVRVMTPDLRERLENLRKKPENIPQPISNTSRANLNKLLTDYTEMKKAILHVYWEEFQKDPVGLMSRVAQPASKKIDQNKLKPEMDEKGNLTTAGFACSQCGQPLFVYKLEQVSEKGKAYTNYVGRCNVAEHEKLILLAQLKPEKDSDEAVTYSLGKFGQRALDFYSIHVTKESTHPVKPLAQIAGNRYASPVGKALSDACMGTIASFLSKYQDIIIEHQKVVKGNQKRLESLRELAGKENLEYPSVTLPPQPHTKEGVDAYNEVIARVRMWVNLNLWQKLKLSRDDAKPLLRLKGFPSFPLVERQANEVDWWDMVCNVKKLINEKKEDGKVFWQNLAGYKRQEALRPYLSSEEDRKKGKKFARYQLGDLLLHLEKKHGEDWGKVYDEAWERIDKKVEGLSKHIKLEEERRSEDAQSKAALTDWLRAKASFVIEGLKEADKDEFCRCDLKLQKWYGDLRGKPFAIEAENSILDISGFSKQYNCAFIWQKDGVKKLNLYLIINYFKGGKLRFKKIKPEAFEANRFYTVINKKSGEIVPMEVNFNFDDPNLIILPLAFGKRQGREFIWNDLLSLETGSLKLANGRVIEKTLYNRRTRQDEPALFVALTFERREVLDSSNIKPMNLIGVDRGENIPAVIALTDPEGCPLSRFKDSLGNPTHILRIGESYKEKQRTIQAKKEVEQRRAGGYSRKYASKAKNLADDMVRNTARDLLYYAVTQDAMLIFENLSRGFGRQGKRTFMAERQYTRMEDWLTAKLAYEGLPSKTYLSKTLAQYTSKTCSNCGFTITSADYDRVLEKLKKTATGWMTTINGKELKVEGQITYYNRYKRQNVVKDLSVELDRLSEESVNNDISSWTKGRSGEALSLLKKRFSHRPVQEKFVCLNCGFETHADEQAALNIARSWLFLRSQEYKKYQTNKTTGNTDKRAFVETWQSFYRKKLKEVWKPAV

SEQ ID NO: 37329 - protein, 978 aa, synthetic construct
  REGION 1..978: note = engineered CasX variant
QEIKRINKIRRRLVKDSNTKKAGKTGPMKTLLVRVMTPDLRERLENLRKKPENIPQPISNTSRANLNKLLTDYTEMKKAILHVYWEEFQKDPVGLMSRVAQPASKKIDQNKLKPEMDEKGNLTTAGFACSQCGQPLFVYKLEQVSEKGKAYTNYFGRCNVAEHEKLILLAQLKPEKDSDEAVTYSLGKFGQRALDFYSIHVTKESTHPVKPLAQIAGNRYASYPVGKALSDACMGTIASFLSKYQDIIIEHQKVVKGNQKRLESLRELAGKENLEYPSVTLPPQPHTKEGVDAYNEVIARVRMWVNLNLWQKLKLSRDDAKPLLRLKGFPSFPLVERQANEVDWWDMVCNVKKLINEKKEDGKVFWQNLAGYKRQEALRPYLSSEEDRKKGKKFARYQLGDLLLHLEKKHGEDWGKVYDEAWERIDKKVEGLSKHIKLEEERRSEDAQSKAALTDWLRAKASFVIEGLKEADKDEFCRCDLKLQKWYGDLRGKPFAIEAENSILDISGFSKQYNCAFIWQKDGVKKLNLYLIINYFKGGKLRFKKIKPEAFEANRFYTVINKKSGEIVPMEVNFNFDDPNLIILPLAFGKRQGREFIWNDLLSLETGSLKLANGRVIEKTLYNRRTRQDEPALFVALTFERREVLDSSNIKPMNLIGVDRGENIPAVIALTDPEGCPLSRFKDSLGNPTHILRIGESYKEKQRTIQAKKEVEQRRAGGYSRKYASKAKNLADDMVRNTARDLLYYAVTQDAMLIFENLSRGFGRQGKRTFMAERQYTRMEDWLTAKLAYEGLASKTYLSKTLAQYTSKTCSNCGFTITSADYDRVLEKLKKTATGWMTTINGKELKVEGQITYYNRYKRQNVVKDLSVELDRLSEESVNNDISSWTKGRSGEALSLLKKRFSHRPVQEKFVCLNCGFETHADEQAALNIARSWLFLRSQEYKKYQTNKTTGNTDKRAFVETWQSFYRKKLKEVWKPAV

SEQ ID NO: 37330 - protein, 978 aa, synthetic construct
  REGION 1..978: note = engineered CasX variant
QEIKRINKIRRRLVKDSNTKKAGKTGPMKTLLVRVMTPDLRERLENLRKKPENIPQPISNTSRANLNKLLTDYTEMKKAILHVYWEEFQKDPVGLMSRVAQPASKKIDQNKLKPEMDEKGNLTTAGFACSQCGQPLFVYKLEQVSEKGKAYTNYFGRCNVAEHEKLILLAQLKPEKDSDEAVTYSLGKFGQRALDFYSIHVTKESTHPVKPLAQIAGNRYASHPVGKALSDACMGTIASFLSKYQDIIIEHQKVVKGNQKRLESLRELAGKENLEYPSVTLPPQPHTKEGVDAYNEVIARVRMWVNLNLWQKLKLSRDDAKPLLRLKGFPSFPLVERQANEVDWWDMVCNVKKLINEKKEDGKVFWQNLAGYKRQEALRPYLSSEEDRKKGKKFARYQLGDLLLHLEKKHGEDWGKVYDEAWERIDKKVEGLSKHIKLEEERRSEDAQSKAALTDWLRAKASFVIEGLKEADKDEFCRCDLKLQKWYGDLRGKPFAIEAENSILDISGFSKQYNCAFIWQKDGVKKLNLYLIINYFKGGKLRFKKIKPEAFEANRFYTVINKKSGEIVPMEVNFNFDDPNLIILPLAFGKRQGREFIWNDLLSLETGSLKLANGRVIEKTLYNRRTRQDEPALFVALTFERREVLDSSNIKPMNLIGVDRGENIPAVIALTDPEGCPLSRFKDSLGNPTHILRIGESYKEKQRTIQAKKEVEQRRAGGYSRKYASKAKNLADDMVRNTARDLLYYAVTQDAMLIFENLSRGFGRQGKRTFMAERQYTRMEDWLTAKLAYEGLASKTYLSKTLAQYTSKTCSNCGFTITSADYDRVLEKLKKTATGWMTTINGKELKVEGQITYYNRYKRQNVVKDLSVELDRLSEESVNNDISSWTKGRSGEALSLLKKRFSHRPVQEKFVCLNCGFETHADEQAALNIARSWLFLRSQEYKKYQTNKTTGNTDKRAFVETWQSFYRKKLKEVWKPAV

SEQ ID NO: 37331 - protein, 978 aa, synthetic construct
  REGION 1..978: note = engineered CasX variant
QEIKRINKIRRRLVKDSNTKKAGKTGPMKTLLVRVMTPDLRERLENLRKKPENIPQPISNTSRANLNKLLTDYTEMKKAILHVYWEEFQKDPVGLMSRVAQPASKKIDQNKLKPEMDEKGNLTTAGFACSQCGQPLFVYKLEQVSEKGKAYTNYFGRCNVAEHEKLILLAQLKPEKDSDEAVTYSLGKFGQRALDFYSIHVTKESTHPVKPLAQIAGNRYASSPVGKALSDACMGTIASFLSKYQDIIIEHQKVVKGNQKRLESLRELAGKENLEYPSVTLPPQPHTKEGVDAYNEVIARVRMWVNLNLWQKLKLSRDDAKPLLRLKGFPSFPLVERQANEVDWWDMVCNVKKLINEKKEDGKVFWQNLAGYKRQEALRPYLSSEEDRKKGKKFARYQLGDLLLHLEKKHGEDWGKVYDEAWERIDKKVEGLSKHIKLEEERRSEDAQSKAALTDWLRAKASFVIEGLKEADKDEFCRCDLKLQKWYGDLRGKPFAIEAENSILDISGFSKQYNCAFIWQKDGVKKLNLYLIINYFKGGKLRFKKIKPEAFEANRFYTVINKKSGEIVPMEVNFNFDDPNLIILPLAFGKRQGREFIWNDLLSLETGSLKLANGRVIEKTLYNRRTRQDEPALFVALTFERREVLDSSNIKPMNLIGVDRGENIPAVIALTDPEGCPLSRFKDSLGNPTHILRIGESYKEKQRTIQAKKEVEQRRAGGYSRKYASKAKNLADDMVRNTARDLLYYAVTQDAMLIFENLSRGFGRQGKRTFMAERQYTRMEDWLTAKLAYEGLASKTYLSKTLAQYTSKTCSNCGFTITSADYDRVLEKLKKTATGWMTTINGKELKVEGQITYYNRYKRQNVVKDLSVELDRLSEESVNNDISSWTKGRSGEALSLLKKRFSHRPVQEKFVCLNCGFETHADEQAALNIARSWLFLRSQEYKKYQTNKTTGNTDKRAFVETWQSFYRKKLKEVWKPAV

SEQ ID NO: 37332 - protein, 978 aa, synthetic construct
  REGION 1..978: note = engineered CasX variant
QEIKRINKIRRRLVKDSNTKKAGKTGPMKTLLVRVMTPDLRERLENLRKKPENIPQPISNTSRANLNKLLTDYTEMKKAILHVYWEEFQKDPVGLMSRVAQPASKKIDQNKLKPEMDEKGNLTTAGFACSQCGQPLFVYKLEQVSEKGKAYTNYFGRCNVAEHEKLILLAQLKPEKDSDEAVTYSLGKFGQRALDFYSIHVTKESTHPVKPLAQIAGNRYASTPVGKALSDACMGTIASFLSKYQDIIIEHQKVVKGNQKRLESLRELAGKENLEYPSVTLPPQPHTKEGVDAYNEVIARVRMWVNLNLWQKLKLSRDDAKPLLRLKGFPSFPLVERQANEVDWWDMVCNVKKLINEKKEDGKVFWQNLAGYKRQEALRPYLSSEEDRKKGKKFARYQLGDLLLHLEKKHGEDWGKVYDEAWERIDKKVEGLSKHIKLEEERRSEDAQSKAALTDWLRAKASFVIEGLKEADKDEFCRCDLKLQKWYGDLRGKPFAIEAENSILDISGFSKQYNCAFIWQKDGVKKLNLYLIINYFKGGKLRFKKIKPEAFEANRFYTVINKKSGEIVPMEVNFNFDDPNLIILPLAFGKRQGREFIWNDLLSLETGSLKLANGRVIEKTLYNRRTRQDEPALFVALTFERREVLDSSNIKPMNLIGVDRGENIPAVIALTDPEGCPLSRFKDSLGNPTHILRIGESYKEKQRTIQAKKEVEQRRAGGYSRKYASKAKNLADDMVRNTARDLLYYAVTQDAMLIFENLSRGFGRQGKRTFMAERQYTRMEDWLTAKLAYEGLASKTYLSKTLAQYTSKTCSNCGFTITSADYDRVLEKLKKTATGWMTTINGKELKVEGQITYYNRYKRQNVVKDLSVELDRLSEESVNNDISSWTKGRSGEALSLLKKRFSHRPVQEKFVCLNCGFETHADEQAALNIARSWLFLRSQEYKKYQTNKTTGNTDKRAFVETWQSFYRKKLKEVWKPAV

SEQ ID NO: 37333 - protein, 978 aa, synthetic construct
  REGION 1..978: note = engineered CasX variant
QEIKRINKIRRRLVKDSNTKKAGKTGPMKTLLVRVMTPDLRERLENLRKKPENIPQPISNTSRANLNKLLTDYTEMKKAILHVYWEEFQKDPVGLMSRVAQPASKKIDQNKLKPEMDEKGNLTTAGFACSQCGQPLFVYKLEQVSEKGKAYTNYFGRCNVAEHEKLILLAQLKPEKDSDEAVTYSLGKFGQRALDFYSIHVTKESTHPVKPLAQIAGNRYASAPVGKALSDACMGTIASFLSKYQDIIIEHQKVVKGNQKRLESLRELAGKENLEYPSVTLPPQPHTKEGVDAYNEVIARVRMWVNLNLWQKLKLSRDDAKPLLRLKGFPSFPLVERQANEVDWWDMVCNVKKLINEKKEDGKVFWQNLAGYKRQEALRPYLSSEEDRKKGKKFARYQLGDLLLHLEKKHGEDWGKVYDEAWERIDKKVEGLSKHIKLEEERRSEDAQSKAALTDWLRAKASFVIEGLKEADKDEFCRCDLKLQKWYGDLRGKPFAIEAENSILDISGFSKQYNCAFIWQKDGVKKLNLYLIINYFKGGKLRFKKIKPEAFEANRFYTVINKKSGEIVPMEVNFNFDDPNLIILPLAFGKRQGREFIWNDLLSLETGSLKLANGRVIEKTLYNRRTRQDEPALFVALTFERREVLDSSNIKPMNLIGVDRGENIPAVIALTDPEGCPLSRFKDSLGNPTHILRIGESYKEKQRTIQAKKEVEQRRAGGYSRKYASKAKNLADDMVRNTARDLLYYAVTQDAMLIFENLSRGFGRQGKRTFMAERQYTRMEDWLTAKLAYEGLASKTYLSKTLAQYTSKTCSNCGFTITSADYDRVLEKLKKTATGWMTTINGKELKVEGQITYYNRYKRQNVVKDLSVELDRLSEESVNNDISSWTKGRSGEALSLLKKRFSHRPVQEKFVCLNCGFETHADEQAALNIARSWLFLRSQEYKKYQTNKTTGNTDKRAFVETWQSFYRKKLKEVWKPAV

SEQ ID NO: 37334 - protein, 978 aa, synthetic construct
  REGION 1..978: note = engineered CasX variant
QEIKRINKIRRRLVKDSNTKKAGKTGPMKTLLVRVMTPDLRERLENLRKKPENIPQPISNTSRANLNKLLTDYTEMKKAILHVYWEEFQKDPVGLMSRVAQPASKKIDQNKLKPEMDEKGNLTTAGFACSQCGQPLFVYKLEQVSEKGKAYTNYFGRCNVAEHEKLILLAQLKPEKDSDEAVTYSLGKFGQRALDFYSIHVTKESTHPVKPLAQIAGNRYASVPVGKALSDACMGTIASFLSKYQDIIIEHQKVVKGNQKRLESLRELAGKENLEYPSVTLPPQPHTKEGVDAYNEVIARVRMWVNLNLWQKLKLSRDDAKPLLRLKGFPSFPLVERQANEVDWWDMVCNVKKLINEKKEDGKVFWQNLAGYKRQEALRPYLSSEEDRKKGKKFARYQLGDLLLHLEKKHGEDWGKVYDEAWERIDKKVEGLSKHIKLEEERRSEDAQSKAALTDWLRAKASFVIEGLKEADKDEFCRCDLKLQKWYGDLRGKPFAIEAENSILDISGFSKQYNCAFIWQKDGVKKLNLYLIINYFKGGKLRFKKIKPEAFEANRFYTVINKKSGEIVPMEVNFNFDDPNLIILPLAFGKRQGREFIWNDLLSLETGSLKLANGRVIEKTLYNRRTRQDEPALFVALTFERREVLDSSNIKPMNLIGVDRGENIPAVIALTDPEGCPLSRFKDSLGNPTHILRIGESYKEKQRTIQAKKEVEQRRAGGYSRKYASKAKNLADDMVRNTARDLLYYAVTQDAMLIFENLSRGFGRQGKRTFMAERQYTRMEDWLTAKLAYEGLASKTYLSKTLAQYTSKTCSNCGFTITSADYDRVLEKLKKTATGWMTTINGKELKVEGQITYYNRYKRQNVVKDLSVELDRLSEESVNNDISSWTKGRSGEALSLLKKRFSHRPVQEKFVCLNCGFETHADEQAALNIARSWLFLRSQEYKKYQTNKTTGNTDKRAFVETWQSFYRKKLKEVWKPAV

SEQ ID NO: 37335 - protein, 978 aa, synthetic construct
  REGION 1..978: note = engineered CasX variant
QEIKRINKIRRRLVKDSNTKKAGKTGPMKTLLVRVMTPDLRERLENLRKKPENIPQPISNTSRANLNKLLTDYTEMKKAILHVYWEEFQKDPVGLMSRVAQPASKKIDQNKLKPEMDEKGNLTTAGFACSQCGQPLFVYKLEQVSEKGKAYTNYFGRCNVAEHEKLIKLAQLKPEKDSDEAVTYSLGKFGQRALDFYSIHVTKESTHPVKPLAQIAGNRYASGPVGKALSDACMGTIASFLSKYQDIIIEHQKVVKGNQKRLESLRELAGKENLEYPSVTLPPQPHTKEGVDAYNEVIARVRMWVNLNLWQKLKLSRDDAKPLLRLKGFPSFPLVERQANEVDWWDMVCNVKKLINEKKEDGKVFWQNLAGYKRQEALRPYLSSEEDRKKGKKFARYQLGDLLLHLEKKHGEDWGKVYDEAWERIDKKVEGLSKHIKLEEERRSEDAQSKAALTDWLRAKASFVIEGLKEADKDEFCRCDLKLQKWYGDLRGKPFAIEAENSILDISGFSKQYNCAFIWQKDGVKKLNLYLIINYFKGGKLRFKKIKPEAFEANRFYTVINKKSGEIVPMEVNFNFDDPNLIILPLAFGKRQGREFIWNDLLSLETGSLKLANGRVIEKTLYNRRTRQDEPALFVALTFERREVLDSSNIKPMNLIGVDRGENIPAVIALTDPEGCPLSRFKDSLGNPTHILRIGESYKEKQRTIQAKKEVEQRRAGGYSRKYASKAKNLADDMVRNTARDLLYYAVTQDAMLIFENLSRGFGRQGKRTFMAERQYTRMEDWLTAKLAYEGLASKTYLSKTLAQYTSKTCSNCGFTITSADYDRVLEKLKKTATGWMTTINGKELKVEGQITYYNRYKRQNVVKDLSVELDRLSEESVNNDISSWTKGRSGEALSLLKKRFSHRPVQEKFVCLNCGFETHADEQAALNIARSWLFLRSQEYKKYQTNKTTGNTDKRAFVETWQSFYRKKLKEVWKPAV

SEQ ID NO: 37336 - protein, 977 aa, synthetic construct
  REGION 1..977: note = engineered CasX variant
QEIKRINKIRRRLVKDSNTKKAGKTGPMKTLLVRVMTPDLRERLENLRKKPENIPQPISNTSRANLNKLLTDYTEMKKAILHVYWEEFQKDPVGLMSRVAQPASKKIDQNKLKPEMDEKGNLTTAGFACSQCGQPLFVYKLEQVSEKGKAYTNYFGRCNVAEHEKLILLAQLKPEKDSDEAVTYSLGKFGQRALDFYSIHVTKESTHPVKPLAQIAGNRYASPVGKALSDACMGTIASFLSKYQDIIIEHQKVVKGNQKRLESLRELAGKENLEYPSVTLPPQPHTKEGVDAYNEVIARVRMWVNLNLWQKLKLSRDDAKPLLRLKGFPSFPLVERQANEVDWWDMVCNVKKLINEKKEDGKVFWQNLAGYKRQEALRPYLSSEEDRKKGKKFARYQLGDLLLHLEKKHGEDWGKVYDEAWERIDKKVEGLSKHIKLEEERRSEDAQSKAALTDWLRAKASFVIEGLKEADKDEFCRCDLKLQKWYGDLRGKPFAIEAENSILDISGFSKQYNCAFIWQKDGVKKLNLYLIINYFKGGKLRFKKIKPEAFEANRFYTVINKKSGEIVPMEVNFNFDDPNLIILPLAFGKRQGREFIWNDLLSLETGSLKLANGRVIEKTLYNRRTRQDEPALFVALTFERREVLDSSNIKPMNLIGVDRGENIPAVIALTDPEGCPLSRFKDSLGNPTHILRIGESYKEKQRTIQAKKEVEQRRAGGYSRKYASKAKNLADDMVRNTARDLLYYAVTQDAMLIFENLSRGFGRQGKRTFMAERQYTRMEDWLTAKLAYEGLASKTYLSKTLAQYTSKTCSNCGFTITSADYDRVLEKLKKTATGWMTTINGKELKVEGQITYYNRYKRQNVVKDLSVELDRLSEESVNNDISSWTKGRSGEALSLLKKRFSHRPVQEKFVCLNCGFETHADEQAALNIARSWLFLRSQEYKKYQTNKTTGNTDKRAFVETWQSFYRKKLKEVWKPAV

SEQ ID NO: 37337 - protein, 978 aa, synthetic construct
  REGION 1..978: note = engineered CasX variant
QEIKRINKIRRRLVKDSNTKKAGKTGPMKTLLVRVMTPDLRERLENLRKKPENIPQPISNTSRANLNKLLTDYTEMKKAILHVYWEEFQKDPVGLMSRVAQPASKKIDQNKLKPEMDEKGNLTTAGFACSQCGQPLFVYKLEQVSEKGKAYTNYFGRCNVAEHEKLILLAQLKPEKDSDEAVTYSLGKFGQRALDFYSIHVTKESTHPVKPLAQIAGNRYASYPVGKALSDACMGTIASFLSKYQDIIIEHQKVVKGNQKRLESLRELAGKENLEYPSVTLPPQPHTKEGVDAYNEVIARVRMWVNLNLWQKLKLSRDDAKPLLRLKGFPSFPLVERQANEVDWWDMVCNVKKLINEKKEDGKVFWQNLAGYKRQEALRPYLSSEEDRKKGKKFARYQLGDLLLHLEKKHGEDWGKVYDEAWERIDKKVEGLSKHIKLEEERRSEDAQSKAALTDWLRAKASFVIEGLKEADKDEFCRCDLKLQKWYGDLRGKPFAIEAENSILDISGFSKQYNCAFIWQKDGVKKLNLYLIINYFKGGKLRFKKIKPEAFEANRFYTVINKKSGEIVPMEVNFNFDDPNLIILPLAFGKRQGREFIWNDLLSLETGSLKLANGRVIEKTLYNRRTRQDEPALFVALTFERREVLDSSNIKPMNLIGVDRGENIPAVIALTDPEGCPLSRFKDSLGNPTHILRIGESYKEKQRTIQAKKEVEQRRAGGYSRKYASKAKNLADDMVRNTARDLLYYAVTQDAMLIFENLSRGFGRQGKRTFMAERQYTRMEDWLTAKLAYEGLPSKVYLSKTLAQYTSKTCSNCGFTITSADYDRVLEKLKKTATGWMTTINGKELKVEGQITYYNRYKRQNVVKDLSVELDRLSEESVNNDISSWTKGRSGEALSLLKKRFSHRPVQEKFVCLNCGFETHADEQAALNIARSWLFLRSQEYKKYQTNKTTGNTDKRAFVETWQSFYRKKLKEVWKPAV

SEQ ID NO: 37338 - protein, 978 aa, synthetic construct
  REGION 1..978: note = engineered CasX variant
QEIKRINKIRRRLVKDSNTKKAGKTGPMKTLLVRVMTPDLRERLENLRKKPENIPQPISNTSRANLNKLLTDYTEMKKAILHVYWEEFQKDPVGLMSRVAQPASKKIDQNKLKPEMDEKGNLTTAGFACSQCGQPLFVYKLEQVSEKGKAYTNYFGRCNVAEHEKLILLAQLKPEKDSDEAVTYSLGKFGQRALDFYSIHVTKESTHPVKPLAQIAGNRYASHPVGKALSDACMGTIASFLSKYQDIIIEHQKVVKGNQKRLESLRELAGKENLEYPSVTLPPQPHTKEGVDAYNEVIARVRMWVNLNLWQKLKLSRDDAKPLLRLKGFPSFPLVERQANEVDWWDMVCNVKKLINEKKEDGKVFWQNLAGYKRQEALRPYLSSEEDRKKGKKFARYQLGDLLLHLEKKHGEDWGKVYDEAWERIDKKVEGLSKHIKLEEERRSEDAQSKAALTDWLRAKASFVIEGLKEADKDEFCRCDLKLQKWYGDLRGKPFAIEAENSILDISGFSKQYNCAFIWQKDGVKKLNLYLIINYFKGGKLRFKKIKPEAFEANRFYTVINKKSGEIVPMEVNFNFDDPNLIILPLAFGKRQGREFIWNDLLSLETGSLKLANGRVIEKTLYNRRTRQDEPALFVALTFERREVLDSSNIKPMNLIGVDRGENIPAVIALTDPEGCPLSRFKDSLGNPTHILRIGESYKEKQRTIQAKKEVEQRRAGGYSRKYASKAKNLADDMVRNTARDLLYYAVTQDAMLIFENLSRGFGRQGKRTFMAERQYTRMEDWLTAKLAYEGLPSKVYLSKTLAQYTSKTCSNCGFTITSADYDRVLEKLKKTATGWMTTINGKELKVEGQITYYNRYKRQNVVKDLSVELDRLSEESVNNDISSWTKGRSGEALSLLKKRFSHRPVQEKFVCLNCGFETHADEQAALNIARSWLFLRSQEYKKYQTNKTTGNTDKRAFVETWQSFYRKKLKEVWKPAV

SEQ ID NO: 37339 - protein, 978 aa, synthetic construct
  REGION 1..978: note = engineered CasX variant
QEIKRINKIRRRLVKDSNTKKAGKTGPMKTLLVRVMTPDLRERLENLRKKPENIPQPISNTSRANLNKLLTDYTEMKKAILHVYWEEFQKDPVGLMSRVAQPASKKIDQNKLKPEMDEKGNLTTAGFACSQCGQPLFVYKLEQVSEKGKAYTNYFGRCNVAEHEKLILLAQLKPEKDSDEAVTYSLGKFGQRALDFYSIHVTKESTHPVKPLAQIAGNRYASSPVGKALSDACMGTIASFLSKYQDIIIEHQKVVKGNQKRLESLRELAGKENLEYPSVTLPPQPHTKEGVDAYNEVIARVRMWVNLNLWQKLKLSRDDAKPLLRLKGFPSFPLVERQANEVDWWDMVCNVKKLINEKKEDGKVFWQNLAGYKRQEALRPYLSSEEDRKKGKKFARYQLGDLLLHLEKKHGEDWGKVYDEAWERIDKKVEGLSKHIKLEEERRSEDAQSKAALTDWLRAKASFVIEGLKEADKDEFCRCDLKLQKWYGDLRGKPFAIEAENSILDISGFSKQYNCAFIWQKDGVKKLNLYLIINYFKGGKLRFKKIKPEAFEANRFYTVINKKSGEIVPMEVNFNFDDPNLIILPLAFGKRQGREFIWNDLLSLETGSLKLANGRVIEKTLYNRRTRQDEPALFVALTFERREVLDSSNIKPMNLIGVDRGENIPAVIALTDPEGCPLSRFKDSLGNPTHILRIGESYKEKQRTIQAKKEVEQRRAGGYSRKYASKAKNLADDMVRNTARDLLYYAVTQDAMLIFENLSRGFGRQGKRTFMAERQYTRMEDWLTAKLAYEGLPSKVYLSKTLAQYTSKTCSNCGFTITSADYDRVLEKLKKTATGWMTTINGKELKVEGQITYYNRYKRQNVVKDLSVELDRLSEESVNNDISSWTKGRSGEALSLLKKRFSHRPVQEKFVCLNCGFETHADEQAALNIARSWLFLRSQEYKKYQTNKTTGNTDKRAFVETWQSFYRKKLKEVWKPAV

SEQ ID NO: 37340 - protein, 978 aa, synthetic construct
  REGION 1..978: note = engineered CasX variant
QEIKRINKIRRRLVKDSNTKKAGKTGPMKTLLVRVMTPDLRERLENLRKKPENIPQPISNTSRANLNKLLTDYTEMKKAILHVYWEEFQKDPVGLMSRVAQPASKKIDQNKLKPEMDEKGNLTTAGFACSQCGQPLFVYKLEQVSEKGKAYTNYFGRCNVAEHEKLILLAQLKPEKDSDEAVTYSLGKFGQRALDFYSIHVTKESTHPVKPLAQIAGNRYASTPVGKALSDACMGTIASFLSKYQDIIIEHQKVVKGNQKRLESLRELAGKENLEYPSVTLPPQPHTKEGVDAYNEVIARVRMWVNLNLWQKLKLSRDDAKPLLRLKGFPSFPLVERQANEVDWWDMVCNVKKLINEKKEDGKVFWQNLAGYKRQEALRPYLSSEEDRKKGKKFARYQLGDLLLHLEKKHGEDWGKVYDEAWERIDKKVEGLSKHIKLEEERRSEDAQSKAALTDWLRAKASFVIEGLKEADKDEFCRCDLKLQKWYGDLRGKPFAIEAENSILDISGFSKQYNCAFIWQKDGVKKLNLYLIINYFKGGKLRFKKIKPEAFEANRFYTVINKKSGEIVPMEVNFNFDDPNLIILPLAFGKRQGREFIWNDLLSLETGSLKLANGRVIEKTLYNRRTRQDEPALFVALTFERREVLDSSNIKPMNLIGVDRGENIPAVIALTDPEGCPLSRFKDSLGNPTHILRIGESYKEKQRTIQAKKEVEQRRAGGYSRKYASKAKNLADDMVRNTARDLLYYAVTQDAMLIFENLSRGFGRQGKRTFMAERQYTRMEDWLTAKLAYEGLPSKVYLSKTLAQYTSKTCSNCGFTITSADYDRVLEKLKKTATGWMTTINGKELKVEGQITYYNRYKRQNVVKDLSVELDRLSEESVNNDISSWTKGRSGEALSLLKKRFSHRPVQEKFVCLNCGFETHADEQAALNIARSWLFLRSQEYKKYQTNKTTGNTDKRAFVETWQSFYRKKLKEVWKPAV

SEQ ID NO: 37341 - protein, 978 aa, synthetic construct
  REGION 1..978: note = engineered CasX variant
QEIKRINKIRRRLVKDSNTKKAGKTGPMKTLLVRVMTPDLRERLENLRKKPENIPQPISNTSRANLNKLLTDYTEMKKAILHVYWEEFQKDPVGLMSRVAQPASKKIDQNKLKPEMDEKGNLTTAGFACSQCGQPLFVYKLEQVSEKGKAYTNYFGRCNVAEHEKLILLAQLKPEKDSDEAVTYSLGKFGQRALDFYSIHVTKESTHPVKPLAQIAGNRYASAPVGKALSDACMGTIASFLSKYQDIIIEHQKVVKGNQKRLESLRELAGKENLEYPSVTLPPQPHTKEGVDAYNEVIARVRMWVNLNLWQKLKLSRDDAKPLLRLKGFPSFPLVERQANEVDWWDMVCNVKKLINEKKEDGKVFWQNLAGYKRQEALRPYLSSEEDRKKGKKFARYQLGDLLLHLEKKHGEDWGKVYDEAWERIDKKVEGLSKHIKLEEERRSEDAQSKAALTDWLRAKASFVIEGLKEADKDEFCRCDLKLQKWYGDLRGKPFAIEAENSILDISGFSKQYNCAFIWQKDGVKKLNLYLIINYFKGGKLRFKKIKPEAFEANRFYTVINKKSGEIVPMEVNFNFDDPNLIILPLAFGKRQGREFIWNDLLSLETGSLKLANGRVIEKTLYNRRTRQDEPALFVALTFERREVLDSSNIKPMNLIGVDRGENIPAVIALTDPEGCPLSRFKDSLGNPTHILRIGESYKEKQRTIQAKKEVEQRRAGGYSRKYASKAKNLADDMVRNTARDLLYYAVTQDAMLIFENLSRGFGRQGKRTFMAERQYTRMEDWLTAKLAYEGLPSKVYLSKTLAQYTSKTCSNCGFTITSADYDRVLEKLKKTATGWMTTINGKELKVEGQITYYNRYKRQNVVKDLSVELDRLSEESVNNDISSWTKGRSGEALSLLKKRFSHRPVQEKFVCLNCGFETHADEQAALNIARSWLFLRSQEYKKYQTNKTTGNTDKRAFVETWQSFYRKKLKEVWKPAV

SEQ ID NO: 37342 - protein, 978 aa, synthetic construct
  REGION 1..978: note = engineered CasX variant
QEIKRINKIRRRLVKDSNTKKAGKTGPMKTLLVRVMTPDLRERLENLRKKPENIPQPISNTSRANLNKLLTDYTEMKKAILHVYWEEFQKDPVGLMSRVAQPASKKIDQNKLKPEMDEKGNLTTAGFACSQCGQPLFVYKLEQVSEKGKAYTNYFGRCNVAEHEKLILLAQLKPEKDSDEAVTYSLGKFGQRALDFYSIHVTKESTHPVKPLAQIAGNRYASVPVGKALSDACMGTIASFLSKYQDIIIEHQKVVKGNQKRLESLRELAGKENLEYPSVTLPPQPHTKEGVDAYNEVIARVRMWVNLNLWQKLKLSRDDAKPLLRLKGFPSFPLVERQANEVDWWDMVCNVKKLINEKKEDGKVFWQNLAGYKRQEALRPYLSSEEDRKKGKKFARYQLGDLLLHLEKKHGEDWGKVYDEAWERIDKKVEGLSKHIKLEEERRSEDAQSKAALTDWLRAKASFVIEGLKEADKDEFCRCDLKLQKWYGDLRGKPFAIEAENSILDISGFSKQYNCAFIWQKDGVKKLNLYLIINYFKGGKLRFKKIKPEAFEANRFYTVINKKSGEIVPMEVNFNFDDPNLIILPLAFGKRQGREFIWNDLLSLETGSLKLANGRVIEKTLYNRRTRQDEPALFVALTFERREVLDSSNIKPMNLIGVDRGENIPAVIALTDPEGCPLSRFKDSLGNPTHILRIGESYKEKQRTIQAKKEVEQRRAGGYSRKYASKAKNLADDMVRNTARDLLYYAVTQDAMLIFENLSRGFGRQGKRTFMAERQYTRMEDWLTAKLAYEGLPSKVYLSKTLAQYTSKTCSNCGFTITSADYDRVLEKLKKTATGWMTTINGKELKVEGQITYYNRYKRQNVVKDLSVELDRLSEESVNNDISSWTKGRSGEALSLLKKRFSHRPVQEKFVCLNCGFETHADEQAALNIARSWLFLRSQEYKKYQTNKTTGNTDKRAFVETWQSFYRKKLKEVWKPAV

SEQ ID NO: 37343 - protein, 978 aa, synthetic construct
  REGION 1..978: note = engineered CasX variant
QEIKRINKIRRRLVKDSNTKKAGKTGPMKTLLVRVMTPDLRERLENLRKKPENIPQPISNTSRANLNKLLTDYTEMKKAILHVYWEEFQKDPVGLMSRVAQPASKKIDQNKLKPEMDEKGNLTTAGFACSQCGQPLFVYKLEQVSEKGKAYTNYFGRCNVAEHEKLIKLAQLKPEKDSDEAVTYSLGKFGQRALDFYSIHVTKESTHPVKPLAQIAGNRYASGPVGKALSDACMGTIASFLSKYQDIIIEHQKVVKGNQKRLESLRELAGKENLEYPSVTLPPQPHTKEGVDAYNEVIARVRMWVNLNLWQKLKLSRDDAKPLLRLKGFPSFPLVERQANEVDWWDMVCNVKKLINEKKEDGKVFWQNLAGYKRQEALRPYLSSEEDRKKGKKFARYQLGDLLLHLEKKHGEDWGKVYDEAWERIDKKVEGLSKHIKLEEERRSEDAQSKAALTDWLRAKASFVIEGLKEADKDEFCRCDLKLQKWYGDLRGKPFAIEAENSILDISGFSKQYNCAFIWQKDGVKKLNLYLIINYFKGGKLRFKKIKPEAFEANRFYTVINKKSGEIVPMEVNFNFDDPNLIILPLAFGKRQGREFIWNDLLSLETGSLKLANGRVIEKTLYNRRTRQDEPALFVALTFERREVLDSSNIKPMNLIGVDRGENIPAVIALTDPEGCPLSRFKDSLGNPTHILRIGESYKEKQRTIQAKKEVEQRRAGGYSRKYASKAKNLADDMVRNTARDLLYYAVTQDAMLIFENLSRGFGRQGKRTFMAERQYTRMEDWLTAKLAYEGLPSKVYLSKTLAQYTSKTCSNCGFTITSADYDRVLEKLKKTATGWMTTINGKELKVEGQITYYNRYKRQNVVKDLSVELDRLSEESVNNDISSWTKGRSGEALSLLKKRFSHRPVQEKFVCLNCGFETHADEQAALNIARSWLFLRSQEYKKYQTNKTTGNTDKRAFVETWQSFYRKKLKEVWKPAV

SEQ ID NO: 37344 - protein, 977 aa, synthetic construct
  REGION 1..977: note = engineered CasX variant
QEIKRINKIRRRLVKDSNTKKAGKTGPMKTLLVRVMTPDLRERLENLRKKPENIPQPISNTSRANLNKLLTDYTEMKKAILHVYWEEFQKDPVGLMSRVAQPASKKIDQNKLKPEMDEKGNLTTAGFACSQCGQPLFVYKLEQVSEKGKAYTNYFGRCNVAEHEKLILLAQLKPEKDSDEAVTYSLGKFGQRALDFYSIHVTKESTHPVKPLAQIAGNRYASPVGKALSDACMGTIASFLSKYQDIIIEHQKVVKGNQKRLESLRELAGKENLEYPSVTLPPQPHTKEGVDAYNEVIARVRMWVNLNLWQKLKLSRDDAKPLLRLKGFPSFPLVERQANEVDWWDMVCNVKKLINEKKEDGKVFWQNLAGYKRQEALRPYLSSEEDRKKGKKFARYQLGDLLLHLEKKHGEDWGKVYDEAWERIDKKVEGLSKHIKLEEERRSEDAQSKAALTDWLRAKASFVIEGLKEADKDEFCRCDLKLQKWYGDLRGKPFAIEAENSILDISGFSKQYNCAFIWQKDGVKKLNLYLIINYFKGGKLRFKKIKPEAFEANRFYTVINKKSGEIVPMEVNFNFDDPNLIILPLAFGKRQGREFIWNDLLSLETGSLKLANGRVIEKTLYNRRTRQDEPALFVALTFERREVLDSSNIKPMNLIGVDRGENIPAVIALTDPEGCPLSRFKDSLGNPTHILRIGESYKEKQRTIQAKKEVEQRRAGGYSRKYASKAKNLADDMVRNTARDLLYYAVTQDAMLIFENLSRGFGRQGKRTFMAERQYTRMEDWLTAKLAYEGLPSKVYLSKTLAQYTSKTCSNCGFTITSADYDRVLEKLKKTATGWMTTINGKELKVEGQITYYNRYKRQNVVKDLSVELDRLSEESVNNDISSWTKGRSGEALSLLKKRFSHRPVQEKFVCLNCGFETHADEQAALNIARSWLFLRSQEYKKYQTNKTTGNTDKRAFVETWQSFYRKKLKEVWKPAV

SEQ ID NO: 37345 - protein, 979 aa, synthetic construct
  REGION 1..979: note = engineered CasX variant
QEIKRINKIRRRLVKDSNTKKAGKTGPMKTLLVRVMTPDLRERLENLRKKPENIPQPISNTSRANLNKLLTDYTEMKKAILHVYWEEFQKDPVGLMSRVAQPASKKIDQNKLKPEMDEKGNLTTAGFACSQCGQPLFVYKLEQVSEKGKAYTNYFGRCNVAEHEKLILLAQLKPEKDSDEAVTYSLGKFGQRALDFYSIHVTKESTHPVKPLAQIAGNRYASYPVGKALSDACMGTIASFLSKYQDIIIEHQKVVKGNQKRLESLRELAGKENLEYPSVTLPPQPHTKEGVDAYNEVIARVRMWVNLNLWQKLKLSRDDAKPLLRLKGFPSFPLVERQANEVDWWDMVCNVKKLINEKKEDGKVFWQNLAGYKRQEALRPYLSSEEDRKKGKKFARYQLGDLLLHLEKKHGEDWGKVYDEAWERIDKKVEGLSKHIKLEEERRSEDAQSKAALTDWLRAKASFVIEGLKEADKDEFCRCDLKLQKWYGDLRGKPFAIEAENSILDISGFSKQYNCAFIWQKDGVKKLNLYLIINYFKGGKLRFKKIKPEAFEANRFYTVINKKSGEIVPMEVNFNFDDPNLIILPLAFGKRQGREFIWNDLLSLETGSLKLANGRVIEKTLYNRRTRQDEPALFVALTFERREVLDSSNIKPMNLIGVDRGENIPAVIALTDPEGCPLSRFKDSLGNPTHILRIGESYKEKQRTIQAKKEVEQRRAGGYSRKYASKAKNLADDMVRNTARDLLYYAVTQDAMLIFENLSRGFGRQGKRTFMAERQYTRMEDWLTAKLAYEGPLPSKTYLSKTLAQYTSKTCSNCGFTITSADYDRVLEKLKKTATGWMTTINGKELKVEGQITYYNRYKRQNVVKDLSVELDRLSEESVNNDISSWTKGRSGEALSLLKKRFSHRPVQEKFVCLNCGFETHADEQAALNIARSWLFLRSQEYKKYQTNKTTGNTDKRAFVETWQSFYRKKLKEVWKPAV

SEQ ID NO: 37346 - protein, 979 aa, synthetic construct
  REGION 1..979: note = engineered CasX variant
QEIKRINKIRRRLVKDSNTKKAGKTGPMKTLLVRVMTPDLRERLENLRKKPENIPQPISNTSRANLNKLLTDYTEMKKAILHVYWEEFQKDPVGLMSRVAQPASKKIDQNKLKPEMDEKGNLTTAGFACSQCGQPLFVYKLEQVSEKGKAYTNYFGRCNVAEHEKLILLAQLKPEKDSDEAVTYSLGKFGQRALDFYSIHVTKESTHPVKPLAQIAGNRYASHPVGKALSDACMGTIASFLSKYQDIIIEHQKVVKGNQKRLESLRELAGKENLEYPSVTLPPQPHTKEGVDAYNEVIARVRMWVNLNLWQKLKLSRDDAKPLLRLKGFPSFPLVERQANEVDWWDMVCNVKKLINEKKEDGKVFWQNLAGYKRQEALRPYLSSEEDRKKGKKFARYQLGDLLLHLEKKHGEDWGKVYDEAWERIDKKVEGLSKHIKLEEERRSEDAQSKAALTDWLRAKASFVIEGLKEADKDEFCRCDLKLQKWYGDLRGKPFAIEAENSILDISGFSKQYNCAFIWQKDGVKKLNLYLIINYFKGGKLRFKKIKPEAFEANRFYTVINKKSGEIVPMEVNFNFDDPNLIILPLAFGKRQGREFIWNDLLSLETGSLKLANGRVIEKTLYNRRTRQDEPALFVALTFERREVLDSSNIKPMNLIGVDRGENIPAVIALTDPEGCPLSRFKDSLGNPTHILRIGESYKEKQRTIQAKKEVEQRRAGGYSRKYASKAKNLADDMVRNTARDLLYYAVTQDAMLIFENLSRGFGRQGKRTFMAERQYTRMEDWLTAKLAYEGPLPSKTYLSKTLAQYTSKTCSNCGFTITSADYDRVLEKLKKTATGWMTTINGKELKVEGQITYYNRYKRQNVVKDLSVELDRLSEESVNNDISSWTKGRSGEALSLLKKRFSHRPVQEKFVCLNCGFETHADEQAALNIARSWLFLRSQEYKKYQTNKTTGNTDKRAFVETWQSFYRKKLKEVWKPAV

SEQ ID NO: 37347 - protein, 979 aa, synthetic construct
  REGION 1..979: note = engineered CasX variant
QEIKRINKIRRRLVKDSNTKKAGKTGPMKTLLVRVMTPDLRERLENLRKKPENIPQPISNTSRANLNKLLTDYTEMKKAILHVYWEEFQKDPVGLMSRVAQPASKKIDQNKLKPEMDEKGNLTTAGFACSQCGQPLFVYKLEQVSEKGKAYTNYFGRCNVAEHEKLILLAQLKPEKDSDEAVTYSLGKFGQRALDFYSIHVTKESTHPVKPLAQIAGNRYASSPVGKALSDACMGTIASFLSKYQDIIIEHQKVVKGNQKRLESLRELAGKENLEYPSVTLPPQPHTKEGVDAYNEVIARVRMWVNLNLWQKLKLSRDDAKPLLRLKGFPSFPLVERQANEVDWWDMVCNVKKLINEKKEDGKVFWQNLAGYKRQEALRPYLSSEEDRKKGKKFARYQLGDLLLHLEKKHGEDWGKVYDEAWERIDKKVEGLSKHIKLEEERRSEDAQSKAALTDWLRAKASFVIEGLKEADKDEFCRCDLKLQKWYGDLRGKPFAIEAENSILDISGFSKQYNCAFIWQKDGVKKLNLYLIINYFKGGKLRFKKIKPEAFEANRFYTVINKKSGEIVPMEVNFNFDDPNLIILPLAFGKRQGREFIWNDLLSLETGSLKLANGRVIEKTLYNRRTRQDEPALFVALTFERREVLDSSNIKPMNLIGVDRGENIPAVIALTDPEGCPLSRFKDSLGNPTHILRIGESYKEKQRTIQAKKEVEQRRAGGYSRKYASKAKNLADDMVRNTARDLLYYAVTQDAMLIFENLSRGFGRQGKRTFMAERQYTRMEDWLTAKLAYEGPLPSKTYLSKTLAQYTSKTCSNCGFTITSADYDRVLEKLKKTATGWMTTINGKELKVEGQITYYNRYKRQNVVKDLSVELDRLSEESVNNDISSWTKGRSGEALSLLKKRFSHRPVQEKFVCLNCGFETHADEQAALNIARSWLFLRSQEYKKYQTNKTTGNTDKRAFVETWQSFYRKKLKEVWKPAV

SEQ ID NO: 37348 - protein, 979 aa, synthetic construct
  REGION 1..979: note = engineered CasX variant
QEIKRINKIRRRLVKDSNTKKAGKTGPMKTLLVRVMTPDLRERLENLRKKPENIPQPISNTSRANLNKLLTDYTEMKKAILHVYWEEFQKDPVGLMSRVAQPASKKIDQNKLKPEMDEKGNLTTAGFACSQCGQPLFVYKLEQVSEKGKAYTNYFGRCNVAEHEKLILLAQLKPEKDSDEAVTYSLGKFGQRALDFYSIHVTKESTHPVKPLAQIAGNRYASTPVGKALSDACMGTIASFLSKYQDIIIEHQKVVKGNQKRLESLRELAGKENLEYPSVTLPPQPHTKEGVDAYNEVIARVRMWVNLNLWQKLKLSRDDAKPLLRLKGFPSFPLVERQANEVDWWDMVCNVKKLINEKKEDGKVFWQNLAGYKRQEALRPYLSSEEDRKKGKKFARYQLGDLLLHLEKKHGEDWGKVYDEAWERIDKKVEGLSKHIKLEEERRSEDAQSKAALTDWLRAKASFVIEGLKEADKDEFCRCDLKLQKWYGDLRGKPFAIEAENSILDISGFSKQYNCAFIWQKDGVKKLNLYLIINYFKGGKLRFKKIKPEAFEANRFYTVINKKSGEIVPMEVNFNFDDPNLIILPLAFGKRQGREFIWNDLLSLETGSLKLANGRVIEKTLYNRRTRQDEPALFVALTFERREVLDSSNIKPMNLIGVDRGENIPAVIALTDPEGCPLSRFKDSLGNPTHILRIGESYKEKQRTIQAKKEVEQRRAGGYSRKYASKAKNLADDMVRNTARDLLYYAVTQDAMLIFENLSRGFGRQGKRTFMAERQYTRMEDWLTAKLAYEGPLPSKTYLSKTLAQYTSKTCSNCGFTITSADYDRVLEKLKKTATGWMTTINGKELKVEGQITYYNRYKRQNVVKDLSVELDRLSEESVNNDISSWTKGRSGEALSLLKKRFSHRPVQEKFVCLNCGFETHADEQAALNIARSWLFLRSQEYKKYQTNKTTGNTDKRAFVETWQSFYRKKLKEVWKPAV

SEQ ID NO: 37349 - protein, 979 aa, synthetic construct
  REGION 1..979: note = engineered CasX variant
QEIKRINKIRRRLVKDSNTKKAGKTGPMKTLLVRVMTPDLRERLENLRKKPENIPQPISNTSRANLNKLLTDYTEMKKAILHVYWEEFQKDPVGLMSRVAQPASKKIDQNKLKPEMDEKGNLTTAGFACSQCGQPLFVYKLEQVSEKGKAYTNYFGRCNVAEHEKLILLAQLKPEKDSDEAVTYSLGKFGQRALDFYSIHVTKESTHPVKPLAQIAGNRYASAPVGKALSDACMGTIASFLSKYQDIIIEHQKVVKGNQKRLESLRELAGKENLEYPSVTLPPQPHTKEGVDAYNEVIARVRMWVNLNLWQKLKLSRDDAKPLLRLKGFPSFPLVERQANEVDWWDMVCNVKKLINEKKEDGKVFWQNLAGYKRQEALRPYLSSEEDRKKGKKFARYQLGDLLLHLEKKHGEDWGKVYDEAWERIDKKVEGLSKHIKLEEERRSEDAQSKAALTDWLRAKASFVIEGLKEADKDEFCRCDLKLQKWYGDLRGKPFAIEAENSILDISGFSKQYNCAFIWQKDGVKKLNLYLIINYFKGGKLRFKKIKPEAFEANRFYTVINKKSGEIVPMEVNFNFDDPNLIILPLAFGKRQGREFIWNDLLSLETGSLKLANGRVIEKTLYNRRTRQDEPALFVALTFERREVLDSSNIKPMNLIGVDRGENIPAVIALTDPEGCPLSRFKDSLGNPTHILRIGESYKEKQRTIQAKKEVEQRRAGGYSRKYASKAKNLADDMVRNTARDLLYYAVTQDAMLIFENLSRGFGRQGKRTFMAERQYTRMEDWLTAKLAYEGPLPSKTYLSKTLAQYTSKTCSNCGFTITSADYDRVLEKLKKTATGWMTTINGKELKVEGQITYYNRYKRQNVVKDLSVELDRLSEESVNNDISSWTKGRSGEALSLLKKRFSHRPVQEKFVCLNCGFETHADEQAALNIARSWLFLRSQEYKKYQTNKTTGNTDKRAFVETWQSFYRKKLKEVWKPAV

SEQ ID NO: 37350 - protein, 979 aa, synthetic construct
  REGION 1..979: note = engineered CasX variant
QEIKRINKIRRRLVKDSNTKKAGKTGPMKTLLVRVMTPDLRERLENLRKKPENIPQPISNTSRANLNKLLTDYTEMKKAILHVYWEEFQKDPVGLMSRVAQPASKKIDQNKLKPEMDEKGNLTTAGFACSQCGQPLFVYKLEQVSEKGKAYTNYFGRCNVAEHEKLILLAQLKPEKDSDEAVTYSLGKFGQRALDFYSIHVTKESTHPVKPLAQIAGNRYASVPVGKALSDACMGTIASFLSKYQDIIIEHQKVVKGNQKRLESLRELAGKENLEYPSVTLPPQPHTKEGVDAYNEVIARVRMWVNLNLWQKLKLSRDDAKPLLRLKGFPSFPLVERQANEVDWWDMVCNVKKLINEKKEDGKVFWQNLAGYKRQEALRPYLSSEEDRKKGKKFARYQLGDLLLHLEKKHGEDWGKVYDEAWERIDKKVEGLSKHIKLEEERRSEDAQSKAALTDWLRAKASFVIEGLKEADKDEFCRCDLKLQKWYGDLRGKPFAIEAENSILDISGFSKQYNCAFIWQKDGVKKLNLYLIINYFKGGKLRFKKIKPEAFEANRFYTVINKKSGEIVPMEVNFNFDDPNLIILPLAFGKRQGREFIWNDLLSLETGSLKLANGRVIEKTLYNRRTRQDEPALFVALTFERREVLDSSNIKPMNLIGVDRGENIPAVIALTDPEGCPLSRFKDSLGNPTHILRIGESYKEKQRTIQAKKEVEQRRAGGYSRKYASKAKNLADDMVRNTARDLLYYAVTQDAMLIFENLSRGFGRQGKRTFMAERQYTRMEDWLTAKLAYEGPLPSKTYLSKTLAQYTSKTCSNCGFTITSADYDRVLEKLKKTATGWMTTINGKELKVEGQITYYNRYKRQNVVKDLSVELDRLSEESVNNDISSWTKGRSGEALSLLKKRFSHRPVQEKFVCLNCGFETHADEQAALNIARSWLFLRSQEYKKYQTNKTTGNTDKRAFVETWQSFYRKKLKEVWKPAV

SEQ ID NO: 37351 - protein, 979 aa, synthetic construct
  REGION 1..979: note = engineered CasX variant
QEIKRINKIRRRLVKDSNTKKAGKTGPMKTLLVRVMTPDLRERLENLRKKPENIPQPISNTSRANLNKLLTDYTEMKKAILHVYWEEFQKDPVGLMSRVAQPASKKIDQNKLKPEMDEKGNLTTAGFACSQCGQPLFVYKLEQVSEKGKAYTNYFGRCNVAEHEKLIKLAQLKPEKDSDEAVTYSLGKFGQRALDFYSIHVTKESTHPVKPLAQIAGNRYASGPVGKALSDACMGTIASFLSKYQDIIIEHQKVVKGNQKRLESLRELAGKENLEYPSVTLPPQPHTKEGVDAYNEVIARVRMWVNLNLWQKLKLSRDDAKPLLRLKGFPSFPLVERQANEVDWWDMVCNVKKLINEKKEDGKVFWQNLAGYKRQEALRPYLSSEEDRKKGKKFARYQLGDLLLHLEKKHGEDWGKVYDEAWERIDKKVEGLSKHIKLEEERRSEDAQSKAALTDWLRAKASFVIEGLKEADKDEFCRCDLKLQKWYGDLRGKPFAIEAENSILDISGFSKQYNCAFIWQKDGVKKLNLYLIINYFKGGKLRFKKIKPEAFEANRFYTVINKKSGEIVPMEVNFNFDDPNLIILPLAFGKRQGREFIWNDLLSLETGSLKLANGRVIEKTLYNRRTRQDEPALFVALTFERREVLDSSNIKPMNLIGVDRGENIPAVIALTDPEGCPLSRFKDSLGNPTHILRIGESYKEKQRTIQAKKEVEQRRAGGYSRKYASKAKNLADDMVRNTARDLLYYAVTQDAMLIFENLSRGFGRQGKRTFMAERQYTRMEDWLTAKLAYEGPLPSKTYLSKTLAQYTSKTCSNCGFTITSADYDRVLEKLKKTATGWMTTINGKELKVEGQITYYNRYKRQNVVKDLSVELDRLSEESVNNDISSWTKGRSGEALSLLKKRFSHRPVQEKFVCLNCGFETHADEQAALNIARSWLFLRSQEYKKYQTNKTTGNTDKRAFVETWQSFYRKKLKEVWKPAV

SEQ ID NO: 37352 - protein, 978 aa, synthetic construct
  REGION 1..978: note = engineered CasX variant
QEIKRINKIRRRLVKDSNTKKAGKTGPMKTLLVRVMTPDLRERLENLRKKPENIPQPISNTSRANLNKLLTDYTEMKKAILHVYWEEFQKDPVGLMSRVAQPASKKIDQNKLKPEMDEKGNLTTAGFACSQCGQPLFVYKLEQVSEKGKAYTNYFGRCNVAEHEKLILLAQLKPEKDSDEAVTYSLGKFGQRALDFYSIHVTKESTHPVKPLAQIAGNRYASPVGKALSDACMGTIASFLSKYQDIIIEHQKVVKGNQKRLESLRELAGKENLEYPSVTLPPQPHTKEGVDAYNEVIARVRMWVNLNLWQKLKLSRDDAKPLLRLKGFPSFPLVERQANEVDWWDMVCNVKKLINEKKEDGKVFWQNLAGYKRQEALRPYLSSEEDRKKGKKFARYQLGDLLLHLEKKHGEDWGKVYDEAWERIDKKVEGLSKHIKLEEERRSEDAQSKAALTDWLRAKASFVIEGLKEADKDEFCRCDLKLQKWYGDLRGKPFAIEAENSILDISGFSKQYNCAFIWQKDGVKKLNLYLIINYFKGGKLRFKKIKPEAFEANRFYTVINKKSGEIVPMEVNFNFDDPNLIILPLAFGKRQGREFIWNDLLSLETGSLKLANGRVIEKTLYNRRTRQDEPALFVALTFERREVLDSSNIKPMNLIGVDRGENIPAVIALTDPEGCPLSRFKDSLGNPTHILRIGESYKEKQRTIQAKKEVEQRRAGGYSRKYASKAKNLADDMVRNTARDLLYYAVTQDAMLIFENLSRGFGRQGKRTFMAERQYTRMEDWLTAKLAYEGPLPSKTYLSKTLAQYTSKTCSNCGFTITSADYDRVLEKLKKTATGWMTTINGKELKVEGQITYYNRYKRQNVVKDLSVELDRLSEESVNNDISSWTKGRSGEALSLLKKRFSHRPVQEKFVCLNCGFETHADEQAALNIARSWLFLRSQEYKKYQTNKTTGNTDKRAFVETWQSFYRKKLKEVWKPAV

SEQ ID NO: 37353 - protein, 979 aa, synthetic construct
  REGION 1..979: note = engineered CasX variant
QEIKRINKIRRRLVKDSNTKKAGKTGPMKTLLVRVMTPDLRERLENLRKKPENIPQPISNTSRANLNKLLTDYTEMKKAILHVYWEEFQKDPVGLMSRVAQPASKKIDQNKLKPEMDEKGNLTTAGFACSQCGQPLFVYKLEQVSEKGKAYTNYFGRCNVAEHEKLILLAQLKPEKDSDEAVTYSLGKFGQRALDFYSIHVTKESTHPVKPLAQIAGNRYASYPVGKALSDACMGTIASFLSKYQDIIIEHQKVVKGNQKRLESLRELAGKENLEYPSVTLPPQPHTKEGVDAYNEVIARVRMWVNLNLWQKLKLSRDDAKPLLRLKGFPSFPLVERQANEVDWWDMVCNVKKLINEKKEDGKVFWQNLAGYKRQEALRPYLSSEEDVRKKGKKFARYQLGDLLLHLEKKHGEDWGKVYDEAWERIDKKVEGLSKHIKLEEERRSEDAQSKAALTDWLRAKASFVIEGLKEADKDEFCRCDLKLQKWYGDLRGKPFAIEAENSILDISGFSKQYNCAFIWQKDGVKKLNLYLIINYFKGGKLRFKKIKPEAFEANRFYTVINKKSGEIVPMEVNFNFDDPNLIILPLAFGKRQGREFIWNDLLSLETGSLKLANGRVIEKTLYNRRTRQDEPALFVALTFERREVLDSSNIKPMNLIGVDRGENIPAVIALTDPEGCPLSRFKDSLGNPTHILRIGESYKEKQRTIQAKKEVEQRRAGGYSRKYASKAKNLADDMVRNTARDLLYYAVTQDAMLIFENLSRGFGRQGKRTFMAERQYTRMEDWLTAKLAYEGLPSKTYLSKTLAQYTSKTCSNCGFTITSADYDRVLEKLKKTATGWMTTINGKELKVEGQITYYNRYKRQNVVKDLSVELDRLSEESVNNDISSWTKGRSGEALSLLKKRFSHRPVQEKFVCLNCGFETHADEQAALNIARSWLFLRSQEYKKYQTNKTTGNTDKRAFVETWQSFYRKKLKEVWKPAV

SEQ ID NO: 37354 - protein, 979 aa, synthetic construct
  REGION 1..979: note = engineered CasX variant
QEIKRINKIRRRLVKDSNTKKAGKTGPMKTLLVRVMTPDLRERLENLRKKPENIPQPISNTSRANLNKLLTDYTEMKKAILHVYWEEFQKDPVGLMSRVAQPASKKIDQNKLKPEMDEKGNLTTAGFACSQCGQPLFVYKLEQVSEKGKAYTNYFGRCNVAEHEKLILLAQLKPEKDSDEAVTYSLGKFGQRALDFYSIHVTKESTHPVKPLAQIAGNRYASHPVGKALSDACMGTIASFLSKYQDIIIEHQKVVKGNQKRLESLRELAGKENLEYPSVTLPPQPHTKEGVDAYNEVIARVRMWVNLNLWQKLKLSRDDAKPLLRLKGFPSFPLVERQANEVDWWDMVCNVKKLINEKKEDGKVFWQNLAGYKRQEALRPYLSSEEDVRKKGKKFARYQLGDLLLHLEKKHGEDWGKVYDEAWERIDKKVEGLSKHIKLEEERRSEDAQSKAALTDWLRAKASFVIEGLKEADKDEFCRCDLKLQKWYGDLRGKPFAIEAENSILDISGFSKQYNCAFIWQKDGVKKLNLYLIINYFKGGKLRFKKIKPEAFEANRFYTVINKKSGEIVPMEVNFNFDDPNLIILPLAFGKRQGREFIWNDLLSLETGSLKLANGRVIEKTLYNRRTRQDEPALFVALTFERREVLDSSNIKPMNLIGVDRGENIPAVIALTDPEGCPLSRFKDSLGNPTHILRIGESYKEKQRTIQAKKEVEQRRAGGYSRKYASKAKNLADDMVRNTARDLLYYAVTQDAMLIFENLSRGFGRQGKRTFMAERQYTRMEDWLTAKLAYEGLPSKTYLSKTLAQYTSKTCSNCGFTITSADYDRVLEKLKKTATGWMTTINGKELKVEGQITYYNRYKRQNVVKDLSVELDRLSEESVNNDISSWTKGRSGEALSLLKKRFSHRPVQEKFVCLNCGFETHADEQAALNIARSWLFLRSQEYKKYQTNKTTGNTDKRAFVETWQSFYRKKLKEVWKPAV

SEQ ID NO: 37355 - protein, 979 aa, synthetic construct
  REGION 1..979: note = engineered CasX variant
QEIKRINKIRRRLVKDSNTKKAGKTGPMKTLLVRVMTPDLRERLENLRKKPENIPQPISNTSRANLNKLLTDYTEMKKAILHVYWEEFQKDPVGLMSRVAQPASKKIDQNKLKPEMDEKGNLTTAGFACSQCGQPLFVYKLEQVSEKGKAYTNYFGRCNVAEHEKLILLAQLKPEKDSDEAVTYSLGKFGQRALDFYSIHVTKESTHPVKPLAQIAGNRYASSPVGKALSDACMGTIASFLSKYQDIIIEHQKVVKGNQKRLESLRELAGKENLEYPSVTLPPQPHTKEGVDAYNEVIARVRMWVNLNLWQKLKLSRDDAKPLLRLKGFPSFPLVERQANEVDWWDMVCNVKKLINEKKEDGKVFWQNLAGYKRQEALRPYLSSEEDVRKKGKKFARYQLGDLLLHLEKKHGEDWGKVYDEAWERIDKKVEGLSKHIKLEEERRSEDAQSKAALTDWLRAKASFVIEGLKEADKDEFCRCDLKLQKWYGDLRGKPFAIEAENSILDISGFSKQYNCAFIWQKDGVKKLNLYLIINYFKGGKLRFKKIKPEAFEANRFYTVINKKSGEIVPMEVNFNFDDPNLIILPLAFGKRQGREFIWNDLLSLETGSLKLANGRVIEKTLYNRRTRQDEPALFVALTFERREVLDSSNIKPMNLIGVDRGENIPAVIALTDPEGCPLSRFKDSLGNPTHILRIGESYKEKQRTIQAKKEVEQRRAGGYSRKYASKAKNLADDMVRNTARDLLYYAVTQDAMLIFENLSRGFGRQGKRTFMAERQYTRMEDWLTAKLAYEGLPSKTYLSKTLAQYTSKTCSNCGFTITSADYDRVLEKLKKTATGWMTTINGKELKVEGQITYYNRYKRQNVVKDLSVELDRLSEESVNNDISSWTKGRSGEALSLLKKRFSHRPVQEKFVCLNCGFETHADEQAALNIARSWLFLRSQEYKKYQTNKTTGNTDKRAFVETWQSFYRKKLKEVWKPAV

SEQ ID NO: 37356 - protein, 979 aa, synthetic construct
  REGION 1..979: note = engineered CasX variant
QEIKRINKIRRRLVKDSNTKKAGKTGPMKTLLVRVMTPDLRERLENLRKKPENIPQPISNTSRANLNKLLTDYTEMKKAILHVYWEEFQKDPVGLMSRVAQPASKKIDQNKLKPEMDEKGNLTTAGFACSQCGQPLFVYKLEQVSEKGKAYTNYFGRCNVAEHEKLILLAQLKPEKDSDEAVTYSLGKFGQRALDFYSIHVTKESTHPVKPLAQIAGNRYASTPVGKALSDACMGTIASFLSKYQDIIIEHQKVVKGNQKRLESLRELAGKENLEYPSVTLPPQPHTKEGVDAYNEVIARVRMWVNLNLWQKLKLSRDDAKPLLRLKGFPSFPLVERQANEVDWWDMVCNVKKLINEKKEDGKVFWQNLAGYKRQEALRPYLSSEEDVRKKGKKFARYQLGDLLLHLEKKHGEDWGKVYDEAWERIDKKVEGLSKHIKLEEERRSEDAQSKAALTDWLRAKASFVIEGLKEADKDEFCRCDLKLQKWYGDLRGKPFAIEAENSILDISGFSKQYNCAFIWQKDGVKKLNLYLIINYFKGGKLRFKKIKPEAFEANRFYTVINKKSGEIVPMEVNFNFDDPNLIILPLAFGKRQGREFIWNDLLSLETGSLKLANGRVIEKTLYNRRTRQDEPALFVALTFERREVLDSSNIKPMNLIGVDRGENIPAVIALTDPEGCPLSRFKDSLGNPTHILRIGESYKEKQRTIQAKKEVEQRRAGGYSRKYASKAKNLADDMVRNTARDLLYYAVTQDAMLIFENLSRGFGRQGKRTFMAERQYTRMEDWLTAKLAYEGLPSKTYLSKTLAQYTSKTCSNCGFTITSADYDRVLEKLKKTATGWMTTINGKELKVEGQITYYNRYKRQNVVKDLSVELDRLSEESVNNDISSWTKGRSGEALSLLKKRFSHRPVQEKFVCLNCGFETHADEQAALNIARSWLFLRSQEYKKYQTNKTTGNTDKRAFVETWQSFYRKKLKEVWKPAV

SEQ ID NO: 37357 - protein, 979 aa, synthetic construct
  REGION 1..979: note = engineered CasX variant
QEIKRINKIRRRLVKDSNTKKAGKTGPMKTLLVRVMTPDLRERLENLRKKPENIPQPISNTSRANLNKLLTDYTEMKKAILHVYWEEFQKDPVGLMSRVAQPASKKIDQNKLKPEMDEKGNLTTAGFACSQCGQPLFVYKLEQVSEKGKAYTNYFGRCNVAEHEKLILLAQLKPEKDSDEAVTYSLGKFGQRALDFYSIHVTKESTHPVKPLAQIAGNRYASAPVGKALSDACMGTIASFLSKYQDIIIEHQKVVKGNQKRLESLRELAGKENLEYPSVTLPPQPHTKEGVDAYNEVIARVRMWVNLNLWQKLKLSRDDAKPLLRLKGFPSFPLVERQANEVDWWDMVCNVKKLINEKKEDGKVFWQNLAGYKRQEALRPYLSSEEDVRKKGKKFARYQLGDLLLHLEKKHGEDWGKVYDEAWERIDKKVEGLSKHIKLEEERRSEDAQSKAALTDWLRAKASFVIEGLKEADKDEFCRCDLKLQKWYGDLRGKPFAIEAENSILDISGFSKQYNCAFIWQKDGVKKLNLYLIINYFKGGKLRFKKIKPEAFEANRFYTVINKKSGEIVPMEVNFNFDDPNLIILPLAFGKRQGREFIWNDLLSLETGSLKLANGRVIEKTLYNRRTRQDEPALFVALTFERREVLDSSNIKPMNLIGVDRGENIPAVIALTDPEGCPLSRFKDSLGNPTHILRIGESYKEKQRTIQAKKEVEQRRAGGYSRKYASKAKNLADDMVRNTARDLLYYAVTQDAMLIFENLSRGFGRQGKRTFMAERQYTRMEDWLTAKLAYEGLPSKTYLSKTLAQYTSKTCSNCGFTITSADYDRVLEKLKKTATGWMTTINGKELKVEGQITYYNRYKRQNVVKDLSVELDRLSEESVNNDISSWTKGRSGEALSLLKKRFSHRPVQEKFVCLNCGFETHADEQAALNIARSWLFLRSQEYKKYQTNKTTGNTDKRAFVETWQSFYRKKLKEVWKPAV

SEQ ID NO: 37358 - protein, 979 aa, synthetic construct
  REGION 1..979: note = engineered CasX variant
QEIKRINKIRRRLVKDSNTKKAGKTGPMKTLLVRVMTPDLRERLENLRKKPENIPQPISNTSRANLNKLLTDYTEMKKAILHVYWEEFQKDPVGLMSRVAQPASKKIDQNKLKPEMDEKGNLTTAGFACSQCGQPLFVYKLEQVSEKGKAYTNYFGRCNVAEHEKLILLAQLKPEKDSDEAVTYSLGKFGQRALDFYSIHVTKESTHPVKPLAQIAGNRYASVPVGKALSDACMGTIASFLSKYQDIIIEHQKVVKGNQKRLESLRELAGKENLEYPSVTLPPQPHTKEGVDAYNEVIARVRMWVNLNLWQKLKLSRDDAKPLLRLKGFPSFPLVERQANEVDWWDMVCNVKKLINEKKEDGKVFWQNLAGYKRQEALRPYLSSEEDVRKKGKKFARYQLGDLLLHLEKKHGEDWGKVYDEAWERIDKKVEGLSKHIKLEEERRSEDAQSKAALTDWLRAKASFVIEGLKEADKDEFCRCDLKLQKWYGDLRGKPFAIEAENSILDISGFSKQYNCAFIWQKDGVKKLNLYLIINYFKGGKLRFKKIKPEAFEANRFYTVINKKSGEIVPMEVNFNFDDPNLIILPLAFGKRQGREFIWNDLLSLETGSLKLANGRVIEKTLYNRRTRQDEPALFVALTFERREVLDSSNIKPMNLIGVDRGENIPAVIALTDPEGCPLSRFKDSLGNPTHILRIGESYKEKQRTIQAKKEVEQRRAGGYSRKYASKAKNLADDMVRNTARDLLYYAVTQDAMLIFENLSRGFGRQGKRTFMAERQYTRMEDWLTAKLAYEGLPSKTYLSKTLAQYTSKTCSNCGFTITSADYDRVLEKLKKTATGWMTTINGKELKVEGQITYYNRYKRQNVVKDLSVELDRLSEESVNNDISSWTKGRSGEALSLLKKRFSHRPVQEKFVCLNCGFETHADEQAALNIARSWLFLRSQEYKKYQTNKTTGNTDKRAFVETWQSFYRKKLKEVWKPAV

SEQ ID NO: 37359 - protein, 979 aa, synthetic construct
  REGION 1..979: note = engineered CasX variant
QEIKRINKIRRRLVKDSNTKKAGKTGPMKTLLVRVMTPDLRERLENLRKKPENIPQPISNTSRANLNKLLTDYTEMKKAILHVYWEEFQKDPVGLMSRVAQPASKKIDQNKLKPEMDEKGNLTTAGFACSQCGQPLFVYKLEQVSEKGKAYTNYFGRCNVAEHEKLIKLAQLKPEKDSDEAVTYSLGKFGQRALDFYSIHVTKESTHPVKPLAQIAGNRYASGPVGKALSDACMGTIASFLSKYQDIIIEHQKVVKGNQKRLESLRELAGKENLEYPSVTLPPQPHTKEGVDAYNEVIARVRMWVNLNLWQKLKLSRDDAKPLLRLKGFPSFPLVERQANEVDWWDMVCNVKKLINEKKEDGKVFWQNLAGYKRQEALRPYLSSEEDVRKKGKKFARYQLGDLLLHLEKKHGEDWGKVYDEAWERIDKKVEGLSKHIKLEEERRSEDAQSKAALTDWLRAKASFVIEGLKEADKDEFCRCDLKLQKWYGDLRGKPFAIEAENSILDISGFSKQYNCAFIWQKDGVKKLNLYLIINYFKGGKLRFKKIKPEAFEANRFYTVINKKSGEIVPMEVNFNFDDPNLIILPLAFGKRQGREFIWNDLLSLETGSLKLANGRVIEKTLYNRRTRQDEPALFVALTFERREVLDSSNIKPMNLIGVDRGENIPAVIALTDPEGCPLSRFKDSLGNPTHILRIGESYKEKQRTIQAKKEVEQRRAGGYSRKYASKAKNLADDMVRNTARDLLYYAVTQDAMLIFENLSRGFGRQGKRTFMAERQYTRMEDWLTAKLAYEGLPSKTYLSKTLAQYTSKTCSNCGFTITSADYDRVLEKLKKTATGWMTTINGKELKVEGQITYYNRYKRQNVVKDLSVELDRLSEESVNNDISSWTKGRSGEALSLLKKRFSHRPVQEKFVCLNCGFETHADEQAALNIARSWLFLRSQEYKKYQTNKTTGNTDKRAFVETWQSFYRKKLKEVWKPAV

SEQ ID NO: 37360 - protein, 978 aa, synthetic construct
  REGION 1..978: note = engineered CasX variant
QEIKRINKIRRRLVKDSNTKKAGKTGPMKTLLVRVMTPDLRERLENLRKKPENIPQPISNTSRANLNKLLTDYTEMKKAILHVYWEEFQKDPVGLMSRVAQPASKKIDQNKLKPEMDEKGNLTTAGFACSQCGQPLFVYKLEQVSEKGKAYTNYFGRCNVAEHEKLILLAQLKPEKDSDEAVTYSLGKFGQRALDFYSIHVTKESTHPVKPLAQIAGNRYASPVGKALSDACMGTIASFLSKYQDIIIEHQKVVKGNQKRLESLRELAGKENLEYPSVTLPPQPHTKEGVDAYNEVIARVRMWVNLNLWQKLKLSRDDAKPLLRLKGFPSFPLVERQANEVDWWDMVCNVKKLINEKKEDGKVFWQNLAGYKRQEALRPYLSSEEDVRKKGKKFARYQLGDLLLHLEKKHGEDWGKVYDEAWERIDKKVEGLSKHIKLEEERRSEDAQSKAALTDWLRAKASFVIEGLKEADKDEFCRCDLKLQKWYGDLRGKPFAIEAENSILDISGFSKQYNCAFIWQKDGVKKLNLYLIINYFKGGKLRFKKIKPEAFEANRFYTVINKKSGEIVPMEVNFNFDDPNLIILPLAFGKRQGREFIWNDLLSLETGSLKLANGRVIEKTLYNRRTRQDEPALFVALTFERREVLDSSNIKPMNLIGVDRGENIPAVIALTDPEGCPLSRFKDSLGNPTHILRIGESYKEKQRTIQAKKEVEQRRAGGYSRKYASKAKNLADDMVRNTARDLLYYAVTQDAMLIFENLSRGFGRQGKRTFMAERQYTRMEDWLTAKLAYEGLPSKTYLSKTLAQYTSKTCSNCGFTITSADYDRVLEKLKKTATGWMTTINGKELKVEGQITYYNRYKRQNVVKDLSVELDRLSEESVNNDISSWTKGRSGEALSLLKKRFSHRPVQEKFVCLNCGFETHADEQAALNIARSWLFLRSQEYKKYQTNKTTGNTDKRAFVETWQSFYRKKLKEVWKPAV

SEQ ID NO: 37361 - protein, 978 aa, synthetic construct
  REGION 1..978: note = engineered CasX variant
QEIKRINKIRRRLVKDSNTKKAGKTGPMKTLLVRVMTPDLRERLENLRKKPENIPQPISNTSRANLNKLLTDYTEMKKAILHVYWEEFQKDPVGLMSRVAQPASKKIDQNKLKPEMDEKGNLTTAGFACSQCGQPLFVYKLEQVSEKGKAYTNYFGRCNVAEHEKLILLAQLKPEKDSDEAVTYSLGKFGQRALDFYSIHVTKESTHPVKPLAQIAGNRYASYPVGKALSDACMGTIASFLSKYQDIIIEHQKVVKGNQKRLESLRELAGKENLEYPSVTLPPQPHTKEGVDAYNEVIARVRMWVNLNLWQKLKLSRDDAKPLLRLKGFPSFPLVERQANEVDWWDMVCNVKKLINEKKEDGKVFWQNLAGYKRQEALRPYLSSEEDRKKGKKFARYQLGDLLLHLEKKHGEDWGKVYDEAWERIDKKVEGLSKHIKLEEERRSEDAQSKAALTDWLRAKASFVIEGLKEADKDEFCRCDLKLQKWYGDLRGKPFAIEAENSILDISGFSKQYNCAFIWQKDGVKKLNLYLIINYFKGGKLRFKKIKPEAFEANRFYTVINKKSGEIVPMEVNFNFDDPNLIILPLAFGKRQGREFIWNDLLSLETGSLKLANGRVIEKTLYNRRTRQDEPALFVALTFERREVLDSSNIKPMNLIGVDRGENIPAVIALTDPEGCPLSRFKDSLGNPTHILRIGESYKEKQRTIQAKKEVEQRRAGGYSRKYASKAKNLADDMVRNTARDLLYYAVTQDAMLIFENLSRGFGRQGKRTFMAERQYTRMEDWLTAKLAYEGLPSKTYLSKTLAQYTSKTCSNCGFTITSADYDRMLEKLKKTATGWMTTINGKELKVEGQITYYNRYKRQNVVKDLSVELDRLSEESVNNDISSWTKGRSGEALSLLKKRFSHRPVQEKFVCLNCGFETHADEQAALNIARSWLFLRSQEYKKYQTNKTTGNTDKRAFVETWQSFYRKKLKEVWKPAV

SEQ ID NO: 37362 - protein, 978 aa, synthetic construct
  REGION 1..978: note = engineered CasX variant
QEIKRINKIRRRLVKDSNTKKAGKTGPMKTLLVRVMTPDLRERLENLRKKPENIPQPISNTSRANLNKLLTDYTEMKKAILHVYWEEFQKDPVGLMSRVAQPASKKIDQNKLKPEMDEKGNLTTAGFACSQCGQPLFVYKLEQVSEKGKAYTNYFGRCNVAEHEKLILLAQLKPEKDSDEAVTYSLGKFGQRALDFYSIHVTKESTHPVKPLAQIAGNRYASHPVGKALSDACMGTIASFLSKYQDIIIEHQKVVKGNQKRLESLRELAGKENLEYPSVTLPPQPHTKEGVDAYNEVIARVRMWVNLNLWQKLKLSRDDAKPLLRLKGFPSFPLVERQANEVDWWDMVCNVKKLINEKKEDGKVFWQNLAGYKRQEALRPYLSSEEDRKKGKKFARYQLGDLLLHLEKKHGEDWGKVYDEAWERIDKKVEGLSKHIKLEEERRSEDAQSKAALTDWLRAKASFVIEGLKEADKDEFCRCDLKLQKWYGDLRGKPFAIEAENSILDISGFSKQYNCAFIWQKDGVKKLNLYLIINYFKGGKLRFKKIKPEAFEANRFYTVINKKSGEIVPMEVNFNFDDPNLIILPLAFGKRQGREFIWNDLLSLETGSLKLANGRVIEKTLYNRRTRQDEPALFVALTFERREVLDSSNIKPMNLIGVDRGENIPAVIALTDPEGCPLSRFKDSLGNPTHILRIGESYKEKQRTIQAKKEVEQRRAGGYSRKYASKAKNLADDMVRNTARDLLYYAVTQDAMLIFENLSRGFGRQGKRTFMAERQYTRMEDWLTAKLAYEGLPSKTYLSKTLAQYTSKTCSNCGFTITSADYDRMLEKLKKTATGWMTTINGKELKVEGQITYYNRYKRQNVVKDLSVELDRLSEESVNNDISSWTKGRSGEALSLLKKRFSHRPVQEKFVCLNCGFETHADEQAALNIARSWLFLRSQEYKKYQTNKTTGNTDKRAFVETWQSFYRKKLKEVWKPAV

SEQ ID NO: 37363 - protein, 978 aa, synthetic construct
  REGION 1..978: note = engineered CasX variant
QEIKRINKIRRRLVKDSNTKKAGKTGPMKTLLVRVMTPDLRERLENLRKKPENIPQPISNTSRANLNKLLTDYTEMKKAILHVYWEEFQKDPVGLMSRVAQPASKKIDQNKLKPEMDEKGNLTTAGFACSQCGQPLFVYKLEQVSEKGKAYTNYFGRCNVAEHEKLILLAQLKPEKDSDEAVTYSLGKFGQRALDFYSIHVTKESTHPVKPLAQIAGNRYASSPVGKALSDACMGTIASFLSKYQDIIIEHQKVVKGNQKRLESLRELAGKENLEYPSVTLPPQPHTKEGVDAYNEVIARVRMWVNLNLWQKLKLSRDDAKPLLRLKGFPSFPLVERQANEVDWWDMVCNVKKLINEKKEDGKVFWQNLAGYKRQEALRPYLSSEEDRKKGKKFARYQLGDLLLHLEKKHGEDWGKVYDEAWERIDKKVEGLSKHIKLEEERRSEDAQSKAALTDWLRAKASFVIEGLKEADKDEFCRCDLKLQKWYGDLRGKPFAIEAENSILDISGFSKQYNCAFIWQKDGVKKLNLYLIINYFKGGKLRFKKIKPEAFEANRFYTVINKKSGEIVPMEVNFNFDDPNLIILPLAFGKRQGREFIWNDLLSLETGSLKLANGRVIEKTLYNRRTRQDEPALFVALTFERREVLDSSNIKPMNLIGVDRGENIPAVIALTDPEGCPLSRFKDSLGNPTHILRIGESYKEKQRTIQAKKEVEQRRAGGYSRKYASKAKNLADDMVRNTARDLLYYAVTQDAMLIFENLSRGFGRQGKRTFMAERQYTRMEDWLTAKLAYEGLPSKTYLSKTLAQYTSKTCSNCGFTITSADYDRMLEKLKKTATGWMTTINGKELKVEGQITYYNRYKRQNVVKDLSVELDRLSEESVNNDISSWTKGRSGEALSLLKKRFSHRPVQEKFVCLNCGFETHADEQAALNIARSWLFLRSQEYKKYQTNKTTGNTDKRAFVETWQSFYRKKLKEVWKPAV

SEQ ID NO: 37364 - protein, 978 aa, synthetic construct
  REGION 1..978: note = engineered CasX variant
QEIKRINKIRRRLVKDSNTKKAGKTGPMKTLLVRVMTPDLRERLENLRKKPENIPQPISNTSRANLNKLLTDYTEMKKAILHVYWEEFQKDPVGLMSRVAQPASKKIDQNKLKPEMDEKGNLTTAGFACSQCGQPLFVYKLEQVSEKGKAYTNYFGRCNVAEHEKLILLAQLKPEKDSDEAVTYSLGKFGQRALDFYSIHVTKESTHPVKPLAQIAGNRYASTPVGKALSDACMGTIASFLSKYQDIIIEHQKVVKGNQKRLESLRELAGKENLEYPSVTLPPQPHTKEGVDAYNEVIARVRMWVNLNLWQKLKLSRDDAKPLLRLKGFPSFPLVERQANEVDWWDMVCNVKKLINEKKEDGKVFWQNLAGYKRQEALRPYLSSEEDRKKGKKFARYQLGDLLLHLEKKHGEDWGKVYDEAWERIDKKVEGLSKHIKLEEERRSEDAQSKAALTDWLRAKASFVIEGLKEADKDEFCRCDLKLQKWYGDLRGKPFAIEAENSILDISGFSKQYNCAFIWQKDGVKKLNLYLIINYFKGGKLRFKKIKPEAFEANRFYTVINKKSGEIVPMEVNFNFDDPNLIILPLAFGKRQGREFIWNDLLSLETGSLKLANGRVIEKTLYNRRTRQDEPALFVALTFERREVLDSSNIKPMNLIGVDRGENIPAVIALTDPEGCPLSRFKDSLGNPTHILRIGESYKEKQRTIQAKKEVEQRRAGGYSRKYASKAKNLADDMVRNTARDLLYYAVTQDAMLIFENLSRGFGRQGKRTFMAERQYTRMEDWLTAKLAYEGLPSKTYLSKTLAQYTSKTCSNCGFTITSADYDRMLEKLKKTATGWMTTINGKELKVEGQITYYNRYKRQNVVKDLSVELDRLSEESVNNDISSWTKGRSGEALSLLKKRFSHRPVQEKFVCLNCGFETHADEQAALNIARSWLFLRSQEYKKYQTNKTTGNTDKRAFVETWQSFYRKKLKEVWKPAV

SEQ ID NO: 37365 - protein, 978 aa, synthetic construct
  REGION 1..978: note = engineered CasX variant
QEIKRINKIRRRLVKDSNTKKAGKTGPMKTLLVRVMTPDLRERLENLRKKPENIPQPISNTSRANLNKLLTDYTEMKKAILHVYWEEFQKDPVGLMSRVAQPASKKIDQNKLKPEMDEKGNLTTAGFACSQCGQPLFVYKLEQVSEKGKAYTNYFGRCNVAEHEKLILLAQLKPEKDSDEAVTYSLGKFGQRALDFYSIHVTKESTHPVKPLAQIAGNRYASAPVGKALSDACMGTIASFLSKYQDIIIEHQKVVKGNQKRLESLRELAGKENLEYPSVTLPPQPHTKEGVDAYNEVIARVRMWVNLNLWQKLKLSRDDAKPLLRLKGFPSFPLVERQANEVDWWDMVCNVKKLINEKKEDGKVFWQNLAGYKRQEALRPYLSSEEDRKKGKKFARYQLGDLLLHLEKKHGEDWGKVYDEAWERIDKKVEGLSKHIKLEEERRSEDAQSKAALTDWLRAKASFVIEGLKEADKDEFCRCDLKLQKWYGDLRGKPFAIEAENSILDISGFSKQYNCAFIWQKDGVKKLNLYLIINYFKGGKLRFKKIKPEAFEANRFYTVINKKSGEIVPMEVNFNFDDPNLIILPLAFGKRQGREFIWNDLLSLETGSLKLANGRVIEKTLYNRRTRQDEPALFVALTFERREVLDSSNIKPMNLIGVDRGENIPAVIALTDPEGCPLSRFKDSLGNPTHILRIGESYKEKQRTIQAKKEVEQRRAGGYSRKYASKAKNLADDMVRNTARDLLYYAVTQDAMLIFENLSRGFGRQGKRTFMAERQYTRMEDWLTAKLAYEGLPSKTYLSKTLAQYTSKTCSNCGFTITSADYDRMLEKLKKTATGWMTTINGKELKVEGQITYYNRYKRQNVVKDLSVELDRLSEESVNNDISSWTKGRSGEALSLLKKRFSHRPVQEKFVCLNCGFETHADEQAALNIARSWLFLRSQEYKKYQTNKTTGNTDKRAFVETWQSFYRKKLKEVWKPAV

SEQ ID NO: 37366 - protein, 978 aa, synthetic construct
  REGION 1..978: note = engineered CasX variant
QEIKRINKIRRRLVKDSNTKKAGKTGPMKTLLVRVMTPDLRERLENLRKKPENIPQPISNTSRANLNKLLTDYTEMKKAILHVYWEEFQKDPVGLMSRVAQPASKKIDQNKLKPEMDEKGNLTTAGFACSQCGQPLFVYKLEQVSEKGKAYTNYFGRCNVAEHEKLILLAQLKPEKDSDEAVTYSLGKFGQRALDFYSIHVTKESTHPVKPLAQIAGNRYASVPVGKALSDACMGTIASFLSKYQDIIIEHQKVVKGNQKRLESLRELAGKENLEYPSVTLPPQPHTKEGVDAYNEVIARVRMWVNLNLWQKLKLSRDDAKPLLRLKGFPSFPLVERQANEVDWWDMVCNVKKLINEKKEDGKVFWQNLAGYKRQEALRPYLSSEEDRKKGKKFARYQLGDLLLHLEKKHGEDWGKVYDEAWERIDKKVEGLSKHIKLEEERRSEDAQSKAALTDWLRAKASFVIEGLKEADKDEFCRCDLKLQKWYGDLRGKPFAIEAENSILDISGFSKQYNCAFIWQKDGVKKLNLYLIINYFKGGKLRFKKIKPEAFEANRFYTVINKKSGEIVPMEVNFNFDDPNLIILPLAFGKRQGREFIWNDLLSLETGSLKLANGRVIEKTLYNRRTRQDEPALFVALTFERREVLDSSNIKPMNLIGVDRGENIPAVIALTDPEGCPLSRFKDSLGNPTHILRIGESYKEKQRTIQAKKEVEQRRAGGYSRKYASKAKNLADDMVRNTARDLLYYAVTQDAMLIFENLSRGFGRQGKRTFMAERQYTRMEDWLTAKLAYEGLPSKTYLSKTLAQYTSKTCSNCGFTITSADYDRMLEKLKKTATGWMTTINGKELKVEGQITYYNRYKRQNVVKDLSVELDRLSEESVNNDISSWTKGRSGEALSLLKKRFSHRPVQEKFVCLNCGFETHADEQAALNIARSWLFLRSQEYKKYQTNKTTGNTDKRAFVETWQSFYRKKLKEVWKPAV

SEQ ID NO: 37367 - protein, 978 aa, synthetic construct
  REGION 1..978: note = engineered CasX variant
QEIKRINKIRRRLVKDSNTKKAGKTGPMKTLLVRVMTPDLRERLENLRKKPENIPQPISNTSRANLNKLLTDYTEMKKAILHVYWEEFQKDPVGLMSRVAQPASKKIDQNKLKPEMDEKGNLTTAGFACSQCGQPLFVYKLEQVSEKGKAYTNYFGRCNVAEHEKLIKLAQLKPEKDSDEAVTYSLGKFGQRALDFYSIHVTKESTHPVKPLAQIAGNRYASGPVGKALSDACMGTIASFLSKYQDIIIEHQKVVKGNQKRLESLRELAGKENLEYPSVTLPPQPHTKEGVDAYNEVIARVRMWVNLNLWQKLKLSRDDAKPLLRLKGFPSFPLVERQANEVDWWDMVCNVKKLINEKKEDGKVFWQNLAGYKRQEALRPYLSSEEDRKKGKKFARYQLGDLLLHLEKKHGEDWGKVYDEAWERIDKKVEGLSKHIKLEEERRSEDAQSKAALTDWLRAKASFVIEGLKEADKDEFCRCDLKLQKWYGDLRGKPFAIEAENSILDISGFSKQYNCAFIWQKDGVKKLNLYLIINYFKGGKLRFKKIKPEAFEANRFYTVINKKSGEIVPMEVNFNFDDPNLIILPLAFGKRQGREFIWNDLLSLETGSLKLANGRVIEKTLYNRRTRQDEPALFVALTFERREVLDSSNIKPMNLIGVDRGENIPAVIALTDPEGCPLSRFKDSLGNPTHILRIGESYKEKQRTIQAKKEVEQRRAGGYSRKYASKAKNLADDMVRNTARDLLYYAVTQDAMLIFENLSRGFGRQGKRTFMAERQYTRMEDWLTAKLAYEGLPSKTYLSKTLAQYTSKTCSNCGFTITSADYDRMLEKLKKTATGWMTTINGKELKVEGQITYYNRYKRQNVVKDLSVELDRLSEESVNNDISSWTKGRSGEALSLLKKRFSHRPVQEKFVCLNCGFETHADEQAALNIARSWLFLRSQEYKKYQTNKTTGNTDKRAFVETWQSFYRKKLKEVWKPAV

SEQ ID NO: 37368 - protein, 977 aa, synthetic construct
  REGION 1..977: note = engineered CasX variant
QEIKRINKIRRRLVKDSNTKKAGKTGPMKTLLVRVMTPDLRERLENLRKKPENIPQPISNTSRANLNKLLTDYTEMKKAILHVYWEEFQKDPVGLMSRVAQPASKKIDQNKLKPEMDEKGNLTTAGFACSQCGQPLFVYKLEQVSEKGKAYTNYFGRCNVAEHEKLILLAQLKPEKDSDEAVTYSLGKFGQRALDFYSIHVTKESTHPVKPLAQIAGNRYASPVGKALSDACMGTIASFLSKYQDIIIEHQKVVKGNQKRLESLRELAGKENLEYPSVTLPPQPHTKEGVDAYNEVIARVRMWVNLNLWQKLKLSRDDAKPLLRLKGFPSFPLVERQANEVDWWDMVCNVKKLINEKKEDGKVFWQNLAGYKRQEALRPYLSSEEDRKKGKKFARYQLGDLLLHLEKKHGEDWGKVYDEAWERIDKKVEGLSKHIKLEEERRSEDAQSKAALTDWLRAKASFVIEGLKEADKDEFCRCDLKLQKWYGDLRGKPFAIEAENSILDISGFSKQYNCAFIWQKDGVKKLNLYLIINYFKGGKLRFKKIKPEAFEANRFYTVINKKSGEIVPMEVNFNFDDPNLIILPLAFGKRQGREFIWNDLLSLETGSLKLANGRVIEKTLYNRRTRQDEPALFVALTFERREVLDSSNIKPMNLIGVDRGENIPAVIALTDPEGCPLSRFKDSLGNPTHILRIGESYKEKQRTIQAKKEVEQRRAGGYSRKYASKAKNLADDMVRNTARDLLYYAVTQDAMLIFENLSRGFGRQGKRTFMAERQYTRMEDWLTAKLAYEGLPSKTYLSKTLAQYTSKTCSNCGFTITSADYDRMLEKLKKTATGWMTTINGKELKVEGQITYYNRYKRQNVVKDLSVELDRLSEESVNNDISSWTKGRSGEALSLLKKRFSHRPVQEKFVCLNCGFETHADEQAALNIARSWLFLRSQEYKKYQTNKTTGNTDKRAFVETWQSFYRKKLKEVWKPAV

SEQ ID NO: 37369 - protein, 978 aa, synthetic construct
  REGION 1..978: note = engineered CasX variant
QEIKRINKIRRRLVKDSNTKKAGKTGPMKTLLVRVMTPDLRERLENLRKKPENIPQPISNTSRANLNKLLTDYTEMKKAILHVYWEEFQKDPVGLMSRVAQPASKKIDQNKLKPEMDEKGNLTTAGFACSQCGQPLFVYKLEQVSEKGKAYTNYFGRCNVAEHEKLILLAQLKPEKDSDEAVTYSLGKFGQRALDFYSIHVTKESTHPVKPLAQIAGNRYASYPVGKALSDACMGTIASFLSKYQDIIIEHQKVVKGNQKRLESLRELAGKENLEYPSVTLPPQPHTKEGVDAYNEVIARVRMWVNLNLWQKLKLSRDDAKPLLRLKGFPSFPLVERQANEVDWWDMVCNVKKLINEKKEDGKVFWQNLAGYKRQEALRPYLSSEEDRKKGKKFARYQLGDLLLHLEKKHGEDWGKVYDEAWERIDKKVEGLSKHIKLEEERRSEDAQSKAALTDWLRAKASFVIEGLKEADKDEFCRCDLKLQKWYGDLRGKPFAIEAENSILDISGFSKQYNCAFIWQKDGVKKLNLYLIINYFKGGKLRFKKIKPEAFEANRFYTVINKKSGEIVPMEVNFNFDDPNLIILPLAFGKRQGREFIWNDLLSLETGSLKLANGRVIEKTLYNRRTRQDEPALFVALTFERREVLDSSNIKPMNLIGVDRGENIPAVIALTDPEGCPLSRFKDSLGNPTHILRIGESYKEKQRTIQAKKEVEQRRAGGYSRKYASKAKNLADDMVRNTARDLLYYAVTQDAMLIFENLSRGFGRQGKRTFMAERQYTRMEDWLTAKLAYEGLPSKTYLSKTLAQYTSKTCSNCGFTITSADYDRVLEKLKKTATGWMTTINGKELKVEGQITYYNRYKRQNVVKDLSVELDRLSEESVNNDISSWTKGRQGEALSLLKKRFSHRPVQEKFVCLNCGFETHADEQAALNIARSWLFLRSQEYKKYQTNKTTGNTDKRAFVETWQSFYRKKLKEVWKPAV

SEQ ID NO: 37370 - protein, 978 aa, synthetic construct
  REGION 1..978: note = engineered CasX variant
QEIKRINKIRRRLVKDSNTKKAGKTGPMKTLLVRVMTPDLRERLENLRKKPENIPQPISNTSRANLNKLLTDYTEMKKAILHVYWEEFQKDPVGLMSRVAQPASKKIDQNKLKPEMDEKGNLTTAGFACSQCGQPLFVYKLEQVSEKGKAYTNYFGRCNVAEHEKLILLAQLKPEKDSDEAVTYSLGKFGQRALDFYSIHVTKESTHPVKPLAQIAGNRYASHPVGKALSDACMGTIASFLSKYQDIIIEHQKVVKGNQKRLESLRELAGKENLEYPSVTLPPQPHTKEGVDAYNEVIARVRMWVNLNLWQKLKLSRDDAKPLLRLKGFPSFPLVERQANEVDWWDMVCNVKKLINEKKEDGKVFWQNLAGYKRQEALRPYLSSEEDRKKGKKFARYQLGDLLLHLEKKHGEDWGKVYDEAWERIDKKVEGLSKHIKLEEERRSEDAQSKAALTDWLRAKASFVIEGLKEADKDEFCRCDLKLQKWYGDLRGKPFAIEAENSILDISGFSKQYNCAFIWQKDGVKKLNLYLIINYFKGGKLRFKKIKPEAFEANRFYTVINKKSGEIVPMEVNFNFDDPNLIILPLAFGKRQGREFIWNDLLSLETGSLKLANGRVIEKTLYNRRTRQDEPALFVALTFERREVLDSSNIKPMNLIGVDRGENIPAVIALTDPEGCPLSRFKDSLGNPTHILRIGESYKEKQRTIQAKKEVEQRRAGGYSRKYASKAKNLADDMVRNTARDLLYYAVTQDAMLIFENLSRGFGRQGKRTFMAERQYTRMEDWLTAKLAYEGLPSKTYLSKTLAQYTSKTCSNCGFTITSADYDRVLEKLKKTATGWMTTINGKELKVEGQITYYNRYKRQNVVKDLSVELDRLSEESVNNDISSWTKGRQGEALSLLKKRFSHRPVQEKFVCLNCGFETHADEQAALNIARSWLFLRSQEYKKYQTNKTTGNTDKRAFVETWQSFYRKKLKEVWKPAV

SEQ ID NO: 37371 - protein, 978 aa, synthetic construct
  REGION 1..978: note = engineered CasX variant
QEIKRINKIRRRLVKDSNTKKAGKTGPMKTLLVRVMTPDLRERLENLRKKPENIPQPISNTSRANLNKLLTDYTEMKKAILHVYWEEFQKDPVGLMSRVAQPASKKIDQNKLKPEMDEKGNLTTAGFACSQCGQPLFVYKLEQVSEKGKAYTNYFGRCNVAEHEKLILLAQLKPEKDSDEAVTYSLGKFGQRALDFYSIHVTKESTHPVKPLAQIAGNRYASSPVGKALSDACMGTIASFLSKYQDIIIEHQKVVKGNQKRLESLRELAGKENLEYPSVTLPPQPHTKEGVDAYNEVIARVRMWVNLNLWQKLKLSRDDAKPLLRLKGFPSFPLVERQANEVDWWDMVCNVKKLINEKKEDGKVFWQNLAGYKRQEALRPYLSSEEDRKKGKKFARYQLGDLLLHLEKKHGEDWGKVYDEAWERIDKKVEGLSKHIKLEEERRSEDAQSKAALTDWLRAKASFVIEGLKEADKDEFCRCDLKLQKWYGDLRGKPFAIEAENSILDISGFSKQYNCAFIWQKDGVKKLNLYLIINYFKGGKLRFKKIKPEAFEANRFYTVINKKSGEIVPMEVNFNFDDPNLIILPLAFGKRQGREFIWNDLLSLETGSLKLANGRVIEKTLYNRRTRQDEPALFVALTFERREVLDSSNIKPMNLIGVDRGENIPAVIALTDPEGCPLSRFKDSLGNPTHILRIGESYKEKQRTIQAKKEVEQRRAGGYSRKYASKAKNLADDMVRNTARDLLYYAVTQDAMLIFENLSRGFGRQGKRTFMAERQYTRMEDWLTAKLAYEGLPSKTYLSKTLAQYTSKTCSNCGFTITSADYDRVLEKLKKTATGWMTTINGKELKVEGQITYYNRYKRQNVVKDLSVELDRLSEESVNNDISSWTKGRQGEALSLLKKRFSHRPVQEKFVCLNCGFETHADEQAALNIARSWLFLRSQEYKKYQTNKTTGNTDKRAFVETWQSFYRKKLKEVWKPAV

SEQ ID NO: 37372 - protein, 978 aa, synthetic construct
  REGION 1..978: note = engineered CasX variant
QEIKRINKIRRRLVKDSNTKKAGKTGPMKTLLVRVMTPDLRERLENLRKKPENIPQPISNTSRANLNKLLTDYTEMKKAILHVYWEEFQKDPVGLMSRVAQPASKKIDQNKLKPEMDEKGNLTTAGFACSQCGQPLFVYKLEQVSEKGKAYTNYFGRCNVAEHEKLILLAQLKPEKDSDEAVTYSLGKFGQRALDFYSIHVTKESTHPVKPLAQIAGNRYASTPVGKALSDACMGTIASFLSKYQDIIIEHQKVVKGNQKRLESLRELAGKENLEYPSVTLPPQPHTKEGVDAYNEVIARVRMWVNLNLWQKLKLSRDDAKPLLRLKGFPSFPLVERQANEVDWWDMVCNVKKLINEKKEDGKVFWQNLAGYKRQEALRPYLSSEEDRKKGKKFARYQLGDLLLHLEKKHGEDWGKVYDEAWERIDKKVEGLSKHIKLEEERRSEDAQSKAALTDWLRAKASFVIEGLKEADKDEFCRCDLKLQKWYGDLRGKPFAIEAENSILDISGFSKQYNCAFIWQKDGVKKLNLYLIINYFKGGKLRFKKIKPEAFEANRFYTVINKKSGEIVPMEVNFNFDDPNLIILPLAFGKRQGREFIWNDLLSLETGSLKLANGRVIEKTLYNRRTRQDEPALFVALTFERREVLDSSNIKPMNLIGVDRGENIPAVIALTDPEGCPLSRFKDSLGNPTHILRIGESYKEKQRTIQAKKEVEQRRAGGYSRKYASKAKNLADDMVRNTARDLLYYAVTQDAMLIFENLSRGFGRQGKRTFMAERQYTRMEDWLTAKLAYEGLPSKTYLSKTLAQYTSKTCSNCGFTITSADYDRVLEKLKKTATGWMTTINGKELKVEGQITYYNRYKRQNVVKDLSVELDRLSEESVNNDISSWTKGRQGEALSLLKKRFSHRPVQEKFVCLNCGFETHADEQAALNIARSWLFLRSQEYKKYQTNKTTGNTDKRAFVETWQSFYRKKLKEVWKPAV

SEQ ID NO: 37373 - protein, 978 aa, synthetic construct
  REGION 1..978: note = engineered CasX variant
QEIKRINKIRRRLVKDSNTKKAGKTGPMKTLLVRVMTPDLRERLENLRKKPENIPQPISNTSRANLNKLLTDYTEMKKAILHVYWEEFQKDPVGLMSRVAQPASKKIDQNKLKPEMDEKGNLTTAGFACSQCGQPLFVYKLEQVSEKGKAYTNYFGRCNVAEHEKLILLAQLKPEKDSDEAVTYSLGKFGQRALDFYSIHVTKESTHPVKPLAQIAGNRYASAPVGKALSDACMGTIASFLSKYQDIIIEHQKVVKGNQKRLESLRELAGKENLEYPSVTLPPQPHTKEGVDAYNEVIARVRMWVNLNLWQKLKLSRDDAKPLLRLKGFPSFPLVERQANEVDWWDMVCNVKKLINEKKEDGKVFWQNLAGYKRQEALRPYLSSEEDRKKGKKFARYQLGDLLLHLEKKHGEDWGKVYDEAWERIDKKVEGLSKHIKLEEERRSEDAQSKAALTDWLRAKASFVIEGLKEADKDEFCRCDLKLQKWYGDLRGKPFAIEAENSILDISGFSKQYNCAFIWQKDGVKKLNLYLIINYFKGGKLRFKKIKPEAFEANRFYTVINKKSGEIVPMEVNFNFDDPNLIILPLAFGKRQGREFIWNDLLSLETGSLKLANGRVIEKTLYNRRTRQDEPALFVALTFERREVLDSSNIKPMNLIGVDRGENIPAVIALTDPEGCPLSRFKDSLGNPTHILRIGESYKEKQRTIQAKKEVEQRRAGGYSRKYASKAKNLADDMVRNTARDLLYYAVTQDAMLIFENLSRGFGRQGKRTFMAERQYTRMEDWLTAKLAYEGLPSKTYLSKTLAQYTSKTCSNCGFTITSADYDRVLEKLKKTATGWMTTINGKELKVEGQITYYNRYKRQNVVKDLSVELDRLSEESVNNDISSWTKGRQGEALSLLKKRFSHRPVQEKFVCLNCGFETHADEQAALNIARSWLFLRSQEYKKYQTNKTTGNTDKRAFVETWQSFYRKKLKEVWKPAV

SEQ ID NO: 37374 - protein, 978 aa, synthetic construct
  REGION 1..978: note = engineered CasX variant
QEIKRINKIRRRLVKDSNTKKAGKTGPMKTLLVRVMTPDLRERLENLRKKPENIPQPISNTSRANLNKLLTDYTEMKKAILHVYWEEFQKDPVGLMSRVAQPASKKIDQNKLKPEMDEKGNLTTAGFACSQCGQPLFVYKLEQVSEKGKAYTNYFGRCNVAEHEKLILLAQLKPEKDSDEAVTYSLGKFGQRALDFYSIHVTKESTHPVKPLAQIAGNRYASVPVGKALSDACMGTIASFLSKYQDIIIEHQKVVKGNQKRLESLRELAGKENLEYPSVTLPPQPHTKEGVDAYNEVIARVRMWVNLNLWQKLKLSRDDAKPLLRLKGFPSFPLVERQANEVDWWDMVCNVKKLINEKKEDGKVFWQNLAGYKRQEALRPYLSSEEDRKKGKKFARYQLGDLLLHLEKKHGEDWGKVYDEAWERIDKKVEGLSKHIKLEEERRSEDAQSKAALTDWLRAKASFVIEGLKEADKDEFCRCDLKLQKWYGDLRGKPFAIEAENSILDISGFSKQYNCAFIWQKDGVKKLNLYLIINYFKGGKLRFKKIKPEAFEANRFYTVINKKSGEIVPMEVNFNFDDPNLIILPLAFGKRQGREFIWNDLLSLETGSLKLANGRVIEKTLYNRRTRQDEPALFVALTFERREVLDSSNIKPMNLIGVDRGENIPAVIALTDPEGCPLSRFKDSLGNPTHILRIGESYKEKQRTIQAKKEVEQRRAGGYSRKYASKAKNLADDMVRNTARDLLYYAVTQDAMLIFENLSRGFGRQGKRTFMAERQYTRMEDWLTAKLAYEGLPSKTYLSKTLAQYTSKTCSNCGFTITSADYDRVLEKLKKTATGWMTTINGKELKVEGQITYYNRYKRQNVVKDLSVELDRLSEESVNNDISSWTKGRQGEALSLLKKRFSHRPVQEKFVCLNCGFETHADEQAALNIARSWLFLRSQEYKKYQTNKTTGNTDKRAFVETWQSFYRKKLKEVWKPAV

SEQ ID NO: 37375 - protein, 978 aa, synthetic construct
  REGION 1..978: note = engineered CasX variant
QEIKRINKIRRRLVKDSNTKKAGKTGPMKTLLVRVMTPDLRERLENLRKKPENIPQPISNTSRANLNKLLTDYTEMKKAILHVYWEEFQKDPVGLMSRVAQPASKKIDQNKLKPEMDEKGNLTTAGFACSQCGQPLFVYKLEQVSEKGKAYTNYFGRCNVAEHEKLIKLAQLKPEKDSDEAVTYSLGKFGQRALDFYSIHVTKESTHPVKPLAQIAGNRYASGPVGKALSDACMGTIASFLSKYQDIIIEHQKVVKGNQKRLESLRELAGKENLEYPSVTLPPQPHTKEGVDAYNEVIARVRMWVNLNLWQKLKLSRDDAKPLLRLKGFPSFPLVERQANEVDWWDMVCNVKKLINEKKEDGKVFWQNLAGYKRQEALRPYLSSEEDRKKGKKFARYQLGDLLLHLEKKHGEDWGKVYDEAWERIDKKVEGLSKHIKLEEERRSEDAQSKAALTDWLRAKASFVIEGLKEADKDEFCRCDLKLQKWYGDLRGKPFAIEAENSILDISGFSKQYNCAFIWQKDGVKKLNLYLIINYFKGGKLRFKKIKPEAFEANRFYTVINKKSGEIVPMEVNFNFDDPNLIILPLAFGKRQGREFIWNDLLSLETGSLKLANGRVIEKTLYNRRTRQDEPALFVALTFERREVLDSSNIKPMNLIGVDRGENIPAVIALTDPEGCPLSRFKDSLGNPTHILRIGESYKEKQRTIQAKKEVEQRRAGGYSRKYASKAKNLADDMVRNTARDLLYYAVTQDAMLIFENLSRGFGRQGKRTFMAERQYTRMEDWLTAKLAYEGLPSKTYLSKTLAQYTSKTCSNCGFTITSADYDRVLEKLKKTATGWMTTINGKELKVEGQITYYNRYKRQNVVKDLSVELDRLSEESVNNDISSWTKGRQGEALSLLKKRFSHRPVQEKFVCLNCGFETHADEQAALNIARSWLFLRSQEYKKYQTNKTTGNTDKRAFVETWQSFYRKKLKEVWKPAV

SEQ ID NO: 37376 - protein, 977 aa, synthetic construct
  REGION 1..977: note = engineered CasX variant
QEIKRINKIRRRLVKDSNTKKAGKTGPMKTLLVRVMTPDLRERLENLRKKPENIPQPISNTSRANLNKLLTDYTEMKKAILHVYWEEFQKDPVGLMSRVAQPASKKIDQNKLKPEMDEKGNLTTAGFACSQCGQPLFVYKLEQVSEKGKAYTNYFGRCNVAEHEKLILLAQLKPEKDSDEAVTYSLGKFGQRALDFYSIHVTKESTHPVKPLAQIAGNRYASPVGKALSDACMGTIASFLSKYQDIIIEHQKVVKGNQKRLESLRELAGKENLEYPSVTLPPQPHTKEGVDAYNEVIARVRMWVNLNLWQKLKLSRDDAKPLLRLKGFPSFPLVERQANEVDWWDMVCNVKKLINEKKEDGKVFWQNLAGYKRQEALRPYLSSEEDRKKGKKFARYQLGDLLLHLEKKHGEDWGKVYDEAWERIDKKVEGLSKHIKLEEERRSEDAQSKAALTDWLRAKASFVIEGLKEADKDEFCRCDLKLQKWYGDLRGKPFAIEAENSILDISGFSKQYNCAFIWQKDGVKKLNLYLIINYFKGGKLRFKKIKPEAFEANRFYTVINKKSGEIVPMEVNFNFDDPNLIILPLAFGKRQGREFIWNDLLSLETGSLKLANGRVIEKTLYNRRTRQDEPALFVALTFERREVLDSSNIKPMNLIGVDRGENIPAVIALTDPEGCPLSRFKDSLGNPTHILRIGESYKEKQRTIQAKKEVEQRRAGGYSRKYASKAKNLADDMVRNTARDLLYYAVTQDAMLIFENLSRGFGRQGKRTFMAERQYTRMEDWLTAKLAYEGLPSKTYLSKTLAQYTSKTCSNCGFTITSADYDRVLEKLKKTATGWMTTINGKELKVEGQITYYNRYKRQNVVKDLSVELDRLSEESVNNDISSWTKGRQGEALSLLKKRFSHRPVQEKFVCLNCGFETHADEQAALNIARSWLFLRSQEYKKYQTNKTTGNTDKRAFVETWQSFYRKKLKEVWKPAV

SEQ ID NO: 37377 - protein, 978 aa, synthetic construct
  REGION 1..978: note = engineered CasX variant
QEIKRINKIRRRLVKDSNTKKAGKTGPMKTLLVRVMTPDLRERLENLRKKPENIPQPISNTSRANLNKLLTDYTEMKKAILHVYWEEFQKDPVGLMSRVAQPASKKIDQNKLKPEMDEKGNLTTAGFACSQCGQPLFVYKLEQVSEKGKAYTNYFGRCNVAEHEKLILLAQLKPEKDSDEAVTYSLGKFGQRALDFYSIHVTKESTHPVKPLAQIAGNRYASYPVGKALSDACMGTIASFLSKYQDIIIEHQKVVKGNQKRLESLRELAGKENLEYPSVTLPPQPHTKEGVDAYNEVIARVRMWVNLNLWQKLKLSRDDAKPLLRLKGFPSFPLVERQANEVDWWDMVCNVKKLINEKKEDGKVFWQNLAGYKRQEALRPYLSSEEDRKKGKKFARYQLGDLLLHLEKKHGEDWGKVYDEAWERIDKKVEGLSKHIKLEEERRSEDAQSKAALTDWLRAKASFVIEGLKEADKDEFCRCDLKLQKWYGDLRGKPFAIEAENSILDISGFSKQYNCAFIWQKDGVKKLNLYLIINYFKGGKLRFKKIKPEAFEANRFYTVINKKSGEIVPMEVNFNFDDPNLIILPLAFGKRQGREFIWNDLLSLETGSLKLANGRVIEKTLYNRRTRQDEPALFVALTFERREVLDSSNIKPMNLIGVDRGENIPAVIALTDPEGCPLSRFKDSLGNPTHILRIGESYKEKQRTIQAKKEVEQRRAGGYSRKYASKAKNLADDMVRNTARDLLYYAVTQDAMLIFENLSRGFGRQGKRTFMAERQYTRMEDWLTAKLAYEGLPSKTYLSKTLAQYTSKTCSNCGFTITSADYDRVLEKLKKTATGWMTTINGKELKVEGQITYYNRYKRQNVVKDLSVELDRLSEESVNNDISSWTKGRSGEALSLLKKRFSHRPVQEKFVCLNCEFETHADEQAALNIARSWLFLRSQEYKKYQTNKTTGNTDKRAFVETWQSFYRKKLKEVWKPAV

SEQ ID NO: 37378 - protein, 978 aa, synthetic construct
  REGION 1..978: note = engineered CasX variant
QEIKRINKIRRRLVKDSNTKKAGKTGPMKTLLVRVMTPDLRERLENLRKKPENIPQPISNTSRANLNKLLTDYTEMKKAILHVYWEEFQKDPVGLMSRVAQPASKKIDQNKLKPEMDEKGNLTTAGFACSQCGQPLFVYKLEQVSEKGKAYTNYFGRCNVAEHEKLILLAQLKPEKDSDEAVTYSLGKFGQRALDFYSIHVTKESTHPVKPLAQIAGNRYASHPVGKALSDACMGTIASFLSKYQDIIIEHQKVVKGNQKRLESLRELAGKENLEYPSVTLPPQPHTKEGVDAYNEVIARVRMWVNLNLWQKLKLSRDDAKPLLRLKGFPSFPLVERQANEVDWWDMVCNVKKLINEKKEDGKVFWQNLAGYKRQEALRPYLSSEEDRKKGKKFARYQLGDLLLHLEKKHGEDWGKVYDEAWERIDKKVEGLSKHIKLEEERRSEDAQSKAALTDWLRAKASFVIEGLKEADKDEFCRCDLKLQKWYGDLRGKPFAIEAENSILDISGFSKQYNCAFIWQKDGVKKLNLYLIINYFKGGKLRFKKIKPEAFEANRFYTVINKKSGEIVPMEVNFNFDDPNLIILPLAFGKRQGREFIWNDLLSLETGSLKLANGRVIEKTLYNRRTRQDEPALFVALTFERREVLDSSNIKPMNLIGVDRGENIPAVIALTDPEGCPLSRFKDSLGNPTHILRIGESYKEKQRTIQAKKEVEQRRAGGYSRKYASKAKNLADDMVRNTARDLLYYAVTQDAMLIFENLSRGFGRQGKRTFMAERQYTRMEDWLTAKLAYEGLPSKTYLSKTLAQYTSKTCSNCGFTITSADYDRVLEKLKKTATGWMTTINGKELKVEGQITYYNRYKRQNVVKDLSVELDRLSEESVNNDISSWTKGRSGEALSLLKKRFSHRPVQEKFVCLNCEFETHADEQAALNIARSWLFLRSQEYKKYQTNKTTGNTDKRAFVETWQSFYRKKLKEVWKPAV

SEQ ID NO: 37379 - protein, 978 aa, synthetic construct
  REGION 1..978: note = engineered CasX variant
QEIKRINKIRRRLVKDSNTKKAGKTGPMKTLLVRVMTPDLRERLENLRKKPENIPQPISNTSRANLNKLLTDYTEMKKAILHVYWEEFQKDPVGLMSRVAQPASKKIDQNKLKPEMDEKGNLTTAGFACSQCGQPLFVYKLEQVSEKGKAYTNYFGRCNVAEHEKLILLAQLKPEKDSDEAVTYSLGKFGQRALDFYSIHVTKESTHPVKPLAQIAGNRYASSPVGKALSDACMGTIASFLSKYQDIIIEHQKVVKGNQKRLESLRELAGKENLEYPSVTLPPQPHTKEGVDAYNEVIARVRMWVNLNLWQKLKLSRDDAKPLLRLKGFPSFPLVERQANEVDWWDMVCNVKKLINEKKEDGKVFWQNLAGYKRQEALRPYLSSEEDRKKGKKFARYQLGDLLLHLEKKHGEDWGKVYDEAWERIDKKVEGLSKHIKLEEERRSEDAQSKAALTDWLRAKASFVIEGLKEADKDEFCRCDLKLQKWYGDLRGKPFAIEAENSILDISGFSKQYNCAFIWQKDGVKKLNLYLIINYFKGGKLRFKKIKPEAFEANRFYTVINKKSGEIVPMEVNFNFDDPNLIILPLAFGKRQGREFIWNDLLSLETGSLKLANGRVIEKTLYNRRTRQDEPALFVALTFERREVLDSSNIKPMNLIGVDRGENIPAVIALTDPEGCPLSRFKDSLGNPTHILRIGESYKEKQRTIQAKKEVEQRRAGGYSRKYASKAKNLADDMVRNTARDLLYYAVTQDAMLIFENLSRGFGRQGKRTFMAERQYTRMEDWLTAKLAYEGLPSKTYLSKTLAQYTSKTCSNCGFTITSADYDRVLEKLKKTATGWMTTINGKELKVEGQITYYNRYKRQNVVKDLSVELDRLSEESVNNDISSWTKGRSGEALSLLKKRFSHRPVQEKFVCLNCEFETHADEQAALNIARSWLFLRSQEYKKYQTNKTTGNTDKRAFVETWQSFYRKKLKEVWKPAV

SEQ ID NO: 37380 - protein, 978 aa, synthetic construct
  REGION 1..978: note = engineered CasX variant
QEIKRINKIRRRLVKDSNTKKAGKTGPMKTLLVRVMTPDLRERLENLRKKPENIPQPISNTSRANLNKLLTDYTEMKKAILHVYWEEFQKDPVGLMSRVAQPASKKIDQNKLKPEMDEKGNLTTAGFACSQCGQPLFVYKLEQVSEKGKAYTNYFGRCNVAEHEKLILLAQLKPEKDSDEAVTYSLGKFGQRALDFYSIHVTKESTHPVKPLAQIAGNRYASTPVGKALSDACMGTIASFLSKYQDIIIEHQKVVKGNQKRLESLRELAGKENLEYPSVTLPPQPHTKEGVDAYNEVIARVRMWVNLNLWQKLKLSRDDAKPLLRLKGFPSFPLVERQANEVDWWDMVCNVKKLINEKKEDGKVFWQNLAGYKRQEALRPYLSSEEDRKKGKKFARYQLGDLLLHLEKKHGEDWGKVYDEAWERIDKKVEGLSKHIKLEEERRSEDAQSKAALTDWLRAKASFVIEGLKEADKDEFCRCDLKLQKWYGDLRGKPFAIEAENSILDISGFSKQYNCAFIWQKDGVKKLNLYLIINYFKGGKLRFKKIKPEAFEANRFYTVINKKSGEIVPMEVNFNFDDPNLIILPLAFGKRQGREFIWNDLLSLETGSLKLANGRVIEKTLYNRRTRQDEPALFVALTFERREVLDSSNIKPMNLIGVDRGENIPAVIALTDPEGCPLSRFKDSLGNPTHILRIGESYKEKQRTIQAKKEVEQRRAGGYSRKYASKAKNLADDMVRNTARDLLYYAVTQDAMLIFENLSRGFGRQGKRTFMAERQYTRMEDWLTAKLAYEGLPSKTYLSKTLAQYTSKTCSNCGFTITSADYDRVLEKLKKTATGWMTTINGKELKVEGQITYYNRYKRQNVVKDLSVELDRLSEESVNNDISSWTKGRSGEALSLLKKRFSHRPVQEKFVCLNCEFETHADEQAALNIARSWLFLRSQEYKKYQTNKTTGNTDKRAFVETWQSFYRKKLKEVWKPAV

SEQ ID NO: 37381 - protein, 978 aa, synthetic construct
  REGION 1..978: note = engineered CasX variant
QEIKRINKIRRRLVKDSNTKKAGKTGPMKTLLVRVMTPDLRERLENLRKKPENIPQPISNTSRANLNKLLTDYTEMKKAILHVYWEEFQKDPVGLMSRVAQPASKKIDQNKLKPEMDEKGNLTTAGFACSQCGQPLFVYKLEQVSEKGKAYTNYFGRCNVAEHEKLILLAQLKPEKDSDEAVTYSLGKFGQRALDFYSIHVTKESTHPVKPLAQIAGNRYASAPVGKALSDACMGTIASFLSKYQDIIIEHQKVVKGNQKRLESLRELAGKENLEYPSVTLPPQPHTKEGVDAYNEVIARVRMWVNLNLWQKLKLSRDDAKPLLRLKGFPSFPLVERQANEVDWWDMVCNVKKLINEKKEDGKVFWQNLAGYKRQEALRPYLSSEEDRKKGKKFARYQLGDLLLHLEKKHGEDWGKVYDEAWERIDKKVEGLSKHIKLEEERRSEDAQSKAALTDWLRAKASFVIEGLKEADKDEFCRCDLKLQKWYGDLRGKPFAIEAENSILDISGFSKQYNCAFIWQKDGVKKLNLYLIINYFKGGKLRFKKIKPEAFEANRFYTVINKKSGEIVPMEVNFNFDDPNLIILPLAFGKRQGREFIWNDLLSLETGSLKLANGRVIEKTLYNRRTRQDEPALFVALTFERREVLDSSNIKPMNLIGVDRGENIPAVIALTDPEGCPLSRFKDSLGNPTHILRIGESYKEKQRTIQAKKEVEQRRAGGYSRKYASKAKNLADDMVRNTARDLLYYAVTQDAMLIFENLSRGFGRQGKRTFMAERQYTRMEDWLTAKLAYEGLPSKTYLSKTLAQYTSKTCSNCGFTITSADYDRVLEKLKKTATGWMTTINGKELKVEGQITYYNRYKRQNVVKDLSVELDRLSEESVNNDISSWTKGRSGEALSLLKKRFSHRPVQEKFVCLNCEFETHADEQAALNIARSWLFLRSQEYKKYQTNKTTGNTDKRAFVETWQSFYRKKLKEVWKPAV

SEQ ID NO: 37382 - protein, 978 aa, synthetic construct
  REGION 1..978: note = engineered CasX variant
QEIKRINKIRRRLVKDSNTKKAGKTGPMKTLLVRVMTPDLRERLENLRKKPENIPQPISNTSRANLNKLLTDYTEMKKAILHVYWEEFQKDPVGLMSRVAQPASKKIDQNKLKPEMDEKGNLTTAGFACSQCGQPLFVYKLEQVSEKGKAYTNYFGRCNVAEHEKLILLAQLKPEKDSDEAVTYSLGKFGQRALDFYSIHVTKESTHPVKPLAQIAGNRYASVPVGKALSDACMGTIASFLSKYQDIIIEHQKVVKGNQKRLESLRELAGKENLEYPSVTLPPQPHTKEGVDAYNEVIARVRMWVNLNLWQKLKLSRDDAKPLLRLKGFPSFPLVERQANEVDWWDMVCNVKKLINEKKEDGKVFWQNLAGYKRQEALRPYLSSEEDRKKGKKFARYQLGDLLLHLEKKHGEDWGKVYDEAWERIDKKVEGLSKHIKLEEERRSEDAQSKAALTDWLRAKASFVIEGLKEADKDEFCRCDLKLQKWYGDLRGKPFAIEAENSILDISGFSKQYNCAFIWQKDGVKKLNLYLIINYFKGGKLRFKKIKPEAFEANRFYTVINKKSGEIVPMEVNFNFDDPNLIILPLAFGKRQGREFIWNDLLSLETGSLKLANGRVIEKTLYNRRTRQDEPALFVALTFERREVLDSSNIKPMNLIGVDRGENIPAVIALTDPEGCPLSRFKDSLGNPTHILRIGESYKEKQRTIQAKKEVEQRRAGGYSRKYASKAKNLADDMVRNTARDLLYYAVTQDAMLIFENLSRGFGRQGKRTFMAERQYTRMEDWLTAKLAYEGLPSKTYLSKTLAQYTSKTCSNCGFTITSADYDRVLEKLKKTATGWMTTINGKELKVEGQITYYNRYKRQNVVKDLSVELDRLSEESVNNDISSWTKGRSGEALSLLKKRFSHRPVQEKFVCLNCEFETHADEQAALNIARSWLFLRSQEYKKYQTNKTTGNTDKRAFVETWQSFYRKKLKEVWKPAV

SEQ ID NO: 37383 - protein, 978 aa, synthetic construct
  REGION 1..978: note = engineered CasX variant
QEIKRINKIRRRLVKDSNTKKAGKTGPMKTLLVRVMTPDLRERLENLRKKPENIPQPISNTSRANLNKLLTDYTEMKKAILHVYWEEFQKDPVGLMSRVAQPASKKIDQNKLKPEMDEKGNLTTAGFACSQCGQPLFVYKLEQVSEKGKAYTNYFGRCNVAEHEKLIKLAQLKPEKDSDEAVTYSLGKFGQRALDFYSIHVTKESTHPVKPLAQIAGNRYASGPVGKALSDACMGTIASFLSKYQDIIIEHQKVVKGNQKRLESLRELAGKENLEYPSVTLPPQPHTKEGVDAYNEVIARVRMWVNLNLWQKLKLSRDDAKPLLRLKGFPSFPLVERQANEVDWWDMVCNVKKLINEKKEDGKVFWQNLAGYKRQEALRPYLSSEEDRKKGKKFARYQLGDLLLHLEKKHGEDWGKVYDEAWERIDKKVEGLSKHIKLEEERRSEDAQSKAALTDWLRAKASFVIEGLKEADKDEFCRCDLKLQKWYGDLRGKPFAIEAENSILDISGFSKQYNCAFIWQKDGVKKLNLYLIINYFKGGKLRFKKIKPEAFEANRFYTVINKKSGEIVPMEVNFNFDDPNLIILPLAFGKRQGREFIWNDLLSLETGSLKLANGRVIEKTLYNRRTRQDEPALFVALTFERREVLDSSNIKPMNLIGVDRGENIPAVIALTDPEGCPLSRFKDSLGNPTHILRIGESYKEKQRTIQAKKEVEQRRAGGYSRKYASKAKNLADDMVRNTARDLLYYAVTQDAMLIFENLSRGFGRQGKRTFMAERQYTRMEDWLTAKLAYEGLPSKTYLSKTLAQYTSKTCSNCGFTITSADYDRVLEKLKKTATGWMTTINGKELKVEGQITYYNRYKRQNVVKDLSVELDRLSEESVNNDISSWTKGRSGEALSLLKKRFSHRPVQEKFVCLNCEFETHADEQAALNIARSWLFLRSQEYKKYQTNKTTGNTDKRAFVETWQSFYRKKLKEVWKPAV

SEQ ID NO: 37384 - protein, 977 aa, synthetic construct
  REGION 1..977: note = engineered CasX variant
QEIKRINKIRRRLVKDSNTKKAGKTGPMKTLLVRVMTPDLRERLENLRKKPENIPQPISNTSRANLNKLLTDYTEMKKAILHVYWEEFQKDPVGLMSRVAQPASKKIDQNKLKPEMDEKGNLTTAGFACSQCGQPLFVYKLEQVSEKGKAYTNYFGRCNVAEHEKLILLAQLKPEKDSDEAVTYSLGKFGQRALDFYSIHVTKESTHPVKPLAQIAGNRYASPVGKALSDACMGTIASFLSKYQDIIIEHQKVVKGNQKRLESLRELAGKENLEYPSVTLPPQPHTKEGVDAYNEVIARVRMWVNLNLWQKLKLSRDDAKPLLRLKGFPSFPLVERQANEVDWWDMVCNVKKLINEKKEDGKVFWQNLAGYKRQEALRPYLSSEEDRKKGKKFARYQLGDLLLHLEKKHGEDWGKVYDEAWERIDKKVEGLSKHIKLEEERRSEDAQSKAALTDWLRAKASFVIEGLKEADKDEFCRCDLKLQKWYGDLRGKPFAIEAENSILDISGFSKQYNCAFIWQKDGVKKLNLYLIINYFKGGKLRFKKIKPEAFEANRFYTVINKKSGEIVPMEVNFNFDDPNLIILPLAFGKRQGREFIWNDLLSLETGSLKLANGRVIEKTLYNRRTRQDEPALFVALTFERREVLDSSNIKPMNLIGVDRGENIPAVIALTDPEGCPLSRFKDSLGNPTHILRIGESYKEKQRTIQAKKEVEQRRAGGYSRKYASKAKNLADDMVRNTARDLLYYAVTQDAMLIFENLSRGFGRQGKRTFMAERQYTRMEDWLTAKLAYEGLPSKTYLSKTLAQYTSKTCSNCGFTITSADYDRVLEKLKKTATGWMTTINGKELKVEGQITYYNRYKRQNVVKDLSVELDRLSEESVNNDISSWTKGRSGEALSLLKKRFSHRPVQEKFVCLNCEFETHADEQAALNIARSWLFLRSQEYKKYQTNKTTGNTDKRAFVETWQSFYRKKLKEVWKPAV

SEQ ID NO: 37385 - protein, 979 aa, synthetic construct
  REGION 1..979: note = engineered CasX variant
QEIKRINKIRRRLVKDSNTKKAGKTGPMKTLLVRVMTPDLRERLENLRKKPENIPQPISNTSRANLNKLLTDYTEMKKAILHVYWEEFQKDPVGLMSRVAQPASKKIDQNKLKPEMDEKGNLTTAGFACSQCGQPLFVYKLEQVSEKGKAYTNYFGRCNVAEHEKLILLAQLKPEKDSDEAVTYSLGKFGQRALDFYSIHVTKESTHPVKPLAQIAGNRYASYPVGKALSDACMGTIASFLSKYQDIIIEHQKVVKGNQKRLESLRELAGKENLEYPSVTLPPQPHTKEGVDAYNEVIARVRMWVNLNLWQKLKLSRDDAKPLLRLKGFPSFPLVERQANEVDWWDMVCNVKKLINEKKEDGKVFWQNLAGYKRQEALRPYLSSEEDRKKGKKFARYQLGDLLLHLEKKHGEDWGKVYDEAWERIDKKVEGLSKHIKLEEERRSEDAQSKAALTDWLRAKASFVIEGLKEADKDEFCRCDLKLQKWYGDLRGKPFAIEAENSILDISGFSKQYNCAFIWQKDGVKKLNLYLIINYFKGGKLRFKKIKPEAFEANRFYTVINKKSGEIVPMEVNFNFDDPNLIILPLAFGKRQGREFIWNDLLSLETGSLKLANGRVIEKTLYNRRTRQDEPALFVALTFERREVLDSSNIKPMNLIGVDRGENIPAVIALTDPEGCPLSRFKDSLGNPTHILRIGESYKEKQRTIQAKKEVEQRRAGGYSRKYASKAKNLADDMVRNTARDLLYYAVTQDAMLIFENLSRGFGRQGKRTFMAERQYTRMEDWLTAKLAYEGLPSKTYLSKTLAQYTSKTCSNCGFTITSADYDRVLEKLKKTATGWMTTINGKELKVEGQITYYNRYKRQNVVKDLSVELDRLSEESVNNDISSWTKGRSGEALSLLKKRFSHRPVQEKFVCLNCGFETHADEQAALNIARSWLFLRSQEYKKYQTNKTSTGNTDKRAFVETWQSFYRKKLKEVWKPAV

SEQ ID NO: 37386 - protein, 979 aa, synthetic construct
  REGION 1..979: note = engineered CasX variant
QEIKRINKIRRRLVKDSNTKKAGKTGPMKTLLVRVMTPDLRERLENLRKKPENIPQPISNTSRANLNKLLTDYTEMKKAILHVYWEEFQKDPVGLMSRVAQPASKKIDQNKLKPEMDEKGNLTTAGFACSQCGQPLFVYKLEQVSEKGKAYTNYFGRCNVAEHEKLILLAQLKPEKDSDEAVTYSLGKFGQRALDFYSIHVTKESTHPVKPLAQIAGNRYASHPVGKALSDACMGTIASFLSKYQDIIIEHQKVVKGNQKRLESLRELAGKENLEYPSVTLPPQPHTKEGVDAYNEVIARVRMWVNLNLWQKLKLSRDDAKPLLRLKGFPSFPLVERQANEVDWWDMVCNVKKLINEKKEDGKVFWQNLAGYKRQEALRPYLSSEEDRKKGKKFARYQLGDLLLHLEKKHGEDWGKVYDEAWERIDKKVEGLSKHIKLEEERRSEDAQSKAALTDWLRAKASFVIEGLKEADKDEFCRCDLKLQKWYGDLRGKPFAIEAENSILDISGFSKQYNCAFIWQKDGVKKLNLYLIINYFKGGKLRFKKIKPEAFEANRFYTVINKKSGEIVPMEVNFNFDDPNLIILPLAFGKRQGREFIWNDLLSLETGSLKLANGRVIEKTLYNRRTRQDEPALFVALTFERREVLDSSNIKPMNLIGVDRGENIPAVIALTDPEGCPLSRFKDSLGNPTHILRIGESYKEKQRTIQAKKEVEQRRAGGYSRKYASKAKNLADDMVRNTARDLLYYAVTQDAMLIFENLSRGFGRQGKRTFMAERQYTRMEDWLTAKLAYEGLPSKTYLSKTLAQYTSKTCSNCGFTITSADYDRVLEKLKKTATGWMTTINGKELKVEGQITYYNRYKRQNVVKDLSVELDRLSEESVNNDISSWTKGRSGEALSLLKKRFSHRPVQEKFVCLNCGFETHADEQAALNIARSWLFLRSQEYKKYQTNKTSTGNTDKRAFVETWQSFYRKKLKEVWKPAV

SEQ ID NO: 37387 - protein, 979 aa, synthetic construct
  REGION 1..979: note = engineered CasX variant
QEIKRINKIRRRLVKDSNTKKAGKTGPMKTLLVRVMTPDLRERLENLRKKPENIPQPISNTSRANLNKLLTDYTEMKKAILHVYWEEFQKDPVGLMSRVAQPASKKIDQNKLKPEMDEKGNLTTAGFACSQCGQPLFVYKLEQVSEKGKAYTNYFGRCNVAEHEKLILLAQLKPEKDSDEAVTYSLGKFGQRALDFYSIHVTKESTHPVKPLAQIAGNRYASSPVGKALSDACMGTIASFLSKYQDIIIEHQKVVKGNQKRLESLRELAGKENLEYPSVTLPPQPHTKEGVDAYNEVIARVRMWVNLNLWQKLKLSRDDAKPLLRLKGFPSFPLVERQANEVDWWDMVCNVKKLINEKKEDGKVFWQNLAGYKRQEALRPYLSSEEDRKKGKKFARYQLGDLLLHLEKKHGEDWGKVYDEAWERIDKKVEGLSKHIKLEEERRSEDAQSKAALTDWLRAKASFVIEGLKEADKDEFCRCDLKLQKWYGDLRGKPFAIEAENSILDISGFSKQYNCAFIWQKDGVKKLNLYLIINYFKGGKLRFKKIKPEAFEANRFYTVINKKSGEIVPMEVNFNFDDPNLIILPLAFGKRQGREFIWNDLLSLETGSLKLANGRVIEKTLYNRRTRQDEPALFVALTFERREVLDSSNIKPMNLIGVDRGENIPAVIALTDPEGCPLSRFKDSLGNPTHILRIGESYKEKQRTIQAKKEVEQRRAGGYSRKYASKAKNLADDMVRNTARDLLYYAVTQDAMLIFENLSRGFGRQGKRTFMAERQYTRMEDWLTAKLAYEGLPSKTYLSKTLAQYTSKTCSNCGFTITSADYDRVLEKLKKTATGWMTTINGKELKVEGQITYYNRYKRQNVVKDLSVELDRLSEESVNNDISSWTKGRSGEALSLLKKRFSHRPVQEKFVCLNCGFETHADEQAALNIARSWLFLRSQEYKKYQTNKTSTGNTDKRAFVETWQSFYRKKLKEVWKPAV

SEQ ID NO: 37388 - protein, 979 aa, synthetic construct
  REGION 1..979: note = engineered CasX variant
QEIKRINKIRRRLVKDSNTKKAGKTGPMKTLLVRVMTPDLRERLENLRKKPENIPQPISNTSRANLNKLLTDYTEMKKAILHVYWEEFQKDPVGLMSRVAQPASKKIDQNKLKPEMDEKGNLTTAGFACSQCGQPLFVYKLEQVSEKGKAYTNYFGRCNVAEHEKLILLAQLKPEKDSDEAVTYSLGKFGQRALDFYSIHVTKESTHPVKPLAQIAGNRYASTPVGKALSDACMGTIASFLSKYQDIIIEHQKVVKGNQKRLESLRELAGKENLEYPSVTLPPQPHTKEGVDAYNEVIARVRMWVNLNLWQKLKLSRDDAKPLLRLKGFPSFPLVERQANEVDWWDMVCNVKKLINEKKEDGKVFWQNLAGYKRQEALRPYLSSEEDRKKGKKFARYQLGDLLLHLEKKHGEDWGKVYDEAWERIDKKVEGLSKHIKLEEERRSEDAQSKAALTDWLRAKASFVIEGLKEADKDEFCRCDLKLQKWYGDLRGKPFAIEAENSILDISGFSKQYNCAFIWQKDGVKKLNLYLIINYFKGGKLRFKKIKPEAFEANRFYTVINKKSGEIVPMEVNFNFDDPNLIILPLAFGKRQGREFIWNDLLSLETGSLKLANGRVIEKTLYNRRTRQDEPALFVALTFERREVLDSSNIKPMNLIGVDRGENIPAVIALTDPEGCPLSRFKDSLGNPTHILRIGESYKEKQRTIQAKKEVEQRRAGGYSRKYASKAKNLADDMVRNTARDLLYYAVTQDAMLIFENLSRGFGRQGKRTFMAERQYTRMEDWLTAKLAYEGLPSKTYLSKTLAQYTSKTCSNCGFTITSADYDRVLEKLKKTATGWMTTINGKELKVEGQITYYNRYKRQNVVKDLSVELDRLSEESVNNDISSWTKGRSGEALSLLKKRFSHRPVQEKFVCLNCGFETHADEQAALNIARSWLFLRSQEYKKYQTNKTSTGNTDKRAFVETWQSFYRKKLKEVWKPAV

SEQ ID NO: 37389 - protein, 979 aa, synthetic construct
  REGION 1..979: note = engineered CasX variant
QEIKRINKIRRRLVKDSNTKKAGKTGPMKTLLVRVMTPDLRERLENLRKKPENIPQPISNTSRANLNKLLTDYTEMKKAILHVYWEEFQKDPVGLMSRVAQPASKKIDQNKLKPEMDEKGNLTTAGFACSQCGQPLFVYKLEQVSEKGKAYTNYFGRCNVAEHEKLILLAQLKPEKDSDEAVTYSLGKFGQRALDFYSIHVTKESTHPVKPLAQIAGNRYASAPVGKALSDACMGTIASFLSKYQDIIIEHQKVVKGNQKRLESLRELAGKENLEYPSVTLPPQPHTKEGVDAYNEVIARVRMWVNLNLWQKLKLSRDDAKPLLRLKGFPSFPLVERQANEVDWWDMVCNVKKLINEKKEDGKVFWQNLAGYKRQEALRPYLSSEEDRKKGKKFARYQLGDLLLHLEKKHGEDWGKVYDEAWERIDKKVEGLSKHIKLEEERRSEDAQSKAALTDWLRAKASFVIEGLKEADKDEFCRCDLKLQKWYGDLRGKPFAIEAENSILDISGFSKQYNCAFIWQKDGVKKLNLYLIINYFKGGKLRFKKIKPEAFEANRFYTVINKKSGEIVPMEVNFNFDDPNLIILPLAFGKRQGREFIWNDLLSLETGSLKLANGRVIEKTLYNRRTRQDEPALFVALTFERREVLDSSNIKPMNLIGVDRGENIPAVIALTDPEGCPLSRFKDSLGNPTHILRIGESYKEKQRTIQAKKEVEQRRAGGYSRKYASKAKNLADDMVRNTARDLLYYAVTQDAMLIFENLSRGFGRQGKRTFMAERQYTRMEDWLTAKLAYEGLPSKTYLSKTLAQYTSKTCSNCGFTITSADYDRVLEKLKKTATGWMTTINGKELKVEGQITYYNRYKRQNVVKDLSVELDRLSEESVNNDISSWTKGRSGEALSLLKKRFSHRPVQEKFVCLNCGFETHADEQAALNIARSWLFLRSQEYKKYQTNKTSTGNTDKRAFVETWQSFYRKKLKEVWKPAV

SEQ ID NO: 37390 - protein, 979 aa, synthetic construct
  REGION 1..979: note = engineered CasX variant
QEIKRINKIRRRLVKDSNTKKAGKTGPMKTLLVRVMTPDLRERLENLRKKPENIPQPISNTSRANLNKLLTDYTEMKKAILHVYWEEFQKDPVGLMSRVAQPASKKIDQNKLKPEMDEKGNLTTAGFACSQCGQPLFVYKLEQVSEKGKAYTNYFGRCNVAEHEKLILLAQLKPEKDSDEAVTYSLGKFGQRALDFYSIHVTKESTHPVKPLAQIAGNRYASVPVGKALSDACMGTIASFLSKYQDIIIEHQKVVKGNQKRLESLRELAGKENLEYPSVTLPPQPHTKEGVDAYNEVIARVRMWVNLNLWQKLKLSRDDAKPLLRLKGFPSFPLVERQANEVDWWDMVCNVKKLINEKKEDGKVFWQNLAGYKRQEALRPYLSSEEDRKKGKKFARYQLGDLLLHLEKKHGEDWGKVYDEAWERIDKKVEGLSKHIKLEEERRSEDAQSKAALTDWLRAKASFVIEGLKEADKDEFCRCDLKLQKWYGDLRGKPFAIEAENSILDISGFSKQYNCAFIWQKDGVKKLNLYLIINYFKGGKLRFKKIKPEAFEANRFYTVINKKSGEIVPMEVNFNFDDPNLIILPLAFGKRQGREFIWNDLLSLETGSLKLANGRVIEKTLYNRRTRQDEPALFVALTFERREVLDSSNIKPMNLIGVDRGENIPAVIALTDPEGCPLSRFKDSLGNPTHILRIGESYKEKQRTIQAKKEVEQRRAGGYSRKYASKAKNLADDMVRNTARDLLYYAVTQDAMLIFENLSRGFGRQGKRTFMAERQYTRMEDWLTAKLAYEGLPSKTYLSKTLAQYTSKTCSNCGFTITSADYDRVLEKLKKTATGWMTTINGKELKVEGQITYYNRYKRQNVVKDLSVELDRLSEESVNNDISSWTKGRSGEALSLLKKRFSHRPVQEKFVCLNCGFETHADEQAALNIARSWLFLRSQEYKKYQTNKTSTGNTDKRAFVETWQSFYRKKLKEVWKPAV

SEQ ID NO: 37391 - protein, 979 aa, synthetic construct
  REGION 1..979: note = engineered CasX variant
QEIKRINKIRRRLVKDSNTKKAGKTGPMKTLLVRVMTPDLRERLENLRKKPENIPQPISNTSRANLNKLLTDYTEMKKAILHVYWEEFQKDPVGLMSRVAQPASKKIDQNKLKPEMDEKGNLTTAGFACSQCGQPLFVYKLEQVSEKGKAYTNYFGRCNVAEHEKLIKLAQLKPEKDSDEAVTYSLGKFGQRALDFYSIHVTKESTHPVKPLAQIAGNRYASGPVGKALSDACMGTIASFLSKYQDIIIEHQKVVKGNQKRLESLRELAGKENLEYPSVTLPPQPHTKEGVDAYNEVIARVRMWVNLNLWQKLKLSRDDAKPLLRLKGFPSFPLVERQANEVDWWDMVCNVKKLINEKKEDGKVFWQNLAGYKRQEALRPYLSSEEDRKKGKKFARYQLGDLLLHLEKKHGEDWGKVYDEAWERIDKKVEGLSKHIKLEEERRSEDAQSKAALTDWLRAKASFVIEGLKEADKDEFCRCDLKLQKWYGDLRGKPFAIEAENSILDISGFSKQYNCAFIWQKDGVKKLNLYLIINYFKGGKLRFKKIKPEAFEANRFYTVINKKSGEIVPMEVNFNFDDPNLIILPLAFGKRQGREFIWNDLLSLETGSLKLANGRVIEKTLYNRRTRQDEPALFVALTFERREVLDSSNIKPMNLIGVDRGENIPAVIALTDPEGCPLSRFKDSLGNPTHILRIGESYKEKQRTIQAKKEVEQRRAGGYSRKYASKAKNLADDMVRNTARDLLYYAVTQDAMLIFENLSRGFGRQGKRTFMAERQYTRMEDWLTAKLAYEGLPSKTYLSKTLAQYTSKTCSNCGFTITSADYDRVLEKLKKTATGWMTTINGKELKVEGQITYYNRYKRQNVVKDLSVELDRLSEESVNNDISSWTKGRSGEALSLLKKRFSHRPVQEKFVCLNCGFETHADEQAALNIARSWLFLRSQEYKKYQTNKTSTGNTDKRAFVETWQSFYRKKLKEVWKPAV

SEQ ID NO: 37392 - protein, 978 aa, synthetic construct
  REGION 1..978: note = engineered CasX variant
QEIKRINKIRRRLVKDSNTKKAGKTGPMKTLLVRVMTPDLRERLENLRKKPENIPQPISNTSRANLNKLLTDYTEMKKAILHVYWEEFQKDPVGLMSRVAQPASKKIDQNKLKPEMDEKGNLTTAGFACSQCGQPLFVYKLEQVSEKGKAYTNYFGRCNVAEHEKLILLAQLKPEKDSDEAVTYSLGKFGQRALDFYSIHVTKESTHPVKPLAQIAGNRYASPVGKALSDACMGTIASFLSKYQDIIIEHQKVVKGNQKRLESLRELAGKENLEYPSVTLPPQPHTKEGVDAYNEVIARVRMWVNLNLWQKLKLSRDDAKPLLRLKGFPSFPLVERQANEVDWWDMVCNVKKLINEKKEDGKVFWQNLAGYKRQEALRPYLSSEEDRKKGKKFARYQLGDLLLHLEKKHGEDWGKVYDEAWERIDKKVEGLSKHIKLEEERRSEDAQSKAALTDWLRAKASFVIEGLKEADKDEFCRCDLKLQKWYGDLRGKPFAIEAENSILDISGFSKQYNCAFIWQKDGVKKLNLYLIINYFKGGKLRFKKIKPEAFEANRFYTVINKKSGEIVPMEVNFNFDDPNLIILPLAFGKRQGREFIWNDLLSLETGSLKLANGRVIEKTLYNRRTRQDEPALFVALTFERREVLDSSNIKPMNLIGVDRGENIPAVIALTDPEGCPLSRFKDSLGNPTHILRIGESYKEKQRTIQAKKEVEQRRAGGYSRKYASKAKNLADDMVRNTARDLLYYAVTQDAMLIFENLSRGFGRQGKRTFMAERQYTRMEDWLTAKLAYEGLPSKTYLSKTLAQYTSKTCSNCGFTITSADYDRVLEKLKKTATGWMTTINGKELKVEGQITYYNRYKRQNVVKDLSVELDRLSEESVNNDISSWTKGRSGEALSLLKKRFSHRPVQEKFVCLNCGFETHADEQAALNIARSWLFLRSQEYKKYQTNKTSTGNTDKRAFVETWQSFYRKKLKEVWKPAV

SEQ ID NO: 37393 - protein, 979 aa, synthetic construct
  REGION 1..979: note = engineered CasX variant
QEIKRINKIRRRLVKDSNTKKAGKTGPMKTLLVRVMTPDLRERLENLRKKPENIPQPISNTSRANLNKLLTDYTEMKKAILHVYWEEFQKDPVGLMSRVAQPASKKIDQNKLKPEMDEKGNLTTAGFACSQCGQPLFVYKLEQVSEKGKAYTNYFGRCNVAEHEKLILLAQLKPEKDSDEAVTYSLGKFGQRALDFYSIHVTKESTHPVKPLAQIAGNRYASYPVGKALSDACMGTIASFLSKYQDIIIEHQKVVKGNQKRLESLRELAGKENLEYPSVTLPPQPHTKEGVDAYNEVIARVRMWVNLNLWQKLKLSRDDAKPLLRLKGFPSFPLVERQANEVDWWDMVCNVKKLINEKKEDGKVFWQNLAGYKRQEALRPYLSSEEDRKKGKKFARYQLGDLLLHLEKKHGEDWGKVYDEAWERIDKKVEGLSKHIKLEEERRSEDAQSKAALTDWLRAKASFVIEGLKEADKDEFCRCDLKLQKWYGDLRGKPFAIEAENSILDISGFSKQYNCAFIWQKDGVKKLNLYLIINYFKGGKLRFKKIKPEAFEANRFYTVINKKSGEIVPMEVNFNFDDPNLIILPLAFGKRQGREFIWNDLLSLETGSLKLANGRVIEKTLYNRRTRQDEPALFVALTFERREVLDSSNIKPMNLIGVDRGENIPAVIALTDPEGCPLSRFKDSLGNPTHILRIGESYKEKQRTIQAKKEVEQRRAGGYSRKYASKAKNLADDMVRNTARDLLYYAVTQDAMLIFENLSRGFGRQGKRTFMAERQYTRMEDWLTAKLAYEGLPSKTYLSKTLAQYTSKTCSNCGFTITSADYDRVLEKLKKTATGWMTTINGKELKVEGQITYYNRYKRQNVVKDLSVELDRLSEESVNNDISSWTKGRSGEALSLLKKRFSHRPVQEKFVCLNCGFETHADEQAALNIARSWLFLRSQEYKKYQTNKTTGKNTDKRAFVETWQSFYRKKLKEVWKPAV

SEQ ID NO: 37394 - protein, 979 aa, synthetic construct
  REGION 1..979: note = engineered CasX variant
QEIKRINKIRRRLVKDSNTKKAGKTGPMKTLLVRVMTPDLRERLENLRKKPENIPQPISNTSRANLNKLLTDYTEMKKAILHVYWEEFQKDPVGLMSRVAQPASKKIDQNKLKPEMDEKGNLTTAGFACSQCGQPLFVYKLEQVSEKGKAYTNYFGRCNVAEHEKLILLAQLKPEKDSDEAVTYSLGKFGQRALDFYSIHVTKESTHPVKPLAQIAGNRYASHPVGKALSDACMGTIASFLSKYQDIIIEHQKVVKGNQKRLESLRELAGKENLEYPSVTLPPQPHTKEGVDAYNEVIARVRMWVNLNLWQKLKLSRDDAKPLLRLKGFPSFPLVERQANEVDWWDMVCNVKKLINEKKEDGKVFWQNLAGYKRQEALRPYLSSEEDRKKGKKFARYQLGDLLLHLEKKHGEDWGKVYDEAWERIDKKVEGLSKHIKLEEERRSEDAQSKAALTDWLRAKASFVIEGLKEADKDEFCRCDLKLQKWYGDLRGKPFAIEAENSILDISGFSKQYNCAFIWQKDGVKKLNLYLIINYFKGGKLRFKKIKPEAFEANRFYTVINKKSGEIVPMEVNFNFDDPNLIILPLAFGKRQGREFIWNDLLSLETGSLKLANGRVIEKTLYNRRTRQDEPALFVALTFERREVLDSSNIKPMNLIGVDRGENIPAVIALTDPEGCPLSRFKDSLGNPTHILRIGESYKEKQRTIQAKKEVEQRRAGGYSRKYASKAKNLADDMVRNTARDLLYYAVTQDAMLIFENLSRGFGRQGKRTFMAERQYTRMEDWLTAKLAYEGLPSKTYLSKTLAQYTSKTCSNCGFTITSADYDRVLEKLKKTATGWMTTINGKELKVEGQITYYNRYKRQNVVKDLSVELDRLSEESVNNDISSWTKGRSGEALSLLKKRFSHRPVQEKFVCLNCGFETHADEQAALNIARSWLFLRSQEYKKYQTNKTTGKNTDKRAFVETWQSFYRKKLKEVWKPAV

SEQ ID NO: 37395 - protein, 979 aa, synthetic construct
  REGION 1..979: note = engineered CasX variant
QEIKRINKIRRRLVKDSNTKKAGKTGPMKTLLVRVMTPDLRERLENLRKKPENIPQPISNTSRANLNKLLTDYTEMKKAILHVYWEEFQKDPVGLMSRVAQPASKKIDQNKLKPEMDEKGNLTTAGFACSQCGQPLFVYKLEQVSEKGKAYTNYFGRCNVAEHEKLILLAQLKPEKDSDEAVTYSLGKFGQRALDFYSIHVTKESTHPVKPLAQIAGNRYASSPVGKALSDACMGTIASFLSKYQDIIIEHQKVVKGNQKRLESLRELAGKENLEYPSVTLPPQPHTKEGVDAYNEVIARVRMWVNLNLWQKLKLSRDDAKPLLRLKGFPSFPLVERQANEVDWWDMVCNVKKLINEKKEDGKVFWQNLAGYKRQEALRPYLSSEEDRKKGKKFARYQLGDLLLHLEKKHGEDWGKVYDEAWERIDKKVEGLSKHIKLEEERRSEDAQSKAALTDWLRAKASFVIEGLKEADKDEFCRCDLKLQKWYGDLRGKPFAIEAENSILDISGFSKQYNCAFIWQKDGVKKLNLYLIINYFKGGKLRFKKIKPEAFEANRFYTVINKKSGEIVPMEVNFNFDDPNLIILPLAFGKRQGREFIWNDLLSLETGSLKLANGRVIEKTLYNRRTRQDEPALFVALTFERREVLDSSNIKPMNLIGVDRGENIPAVIALTDPEGCPLSRFKDSLGNPTHILRIGESYKEKQRTIQAKKEVEQRRAGGYSRKYASKAKNLADDMVRNTARDLLYYAVTQDAMLIFENLSRGFGRQGKRTFMAERQYTRMEDWLTAKLAYEGLPSKTYLSKTLAQYTSKTCSNCGFTITSADYDRVLEKLKKTATGWMTTINGKELKVEGQITYYNRYKRQNVVKDLSVELDRLSEESVNNDISSWTKGRSGEALSLLKKRFSHRPVQEKFVCLNCGFETHADEQAALNIARSWLFLRSQEYKKYQTNKTTGKNTDKRAFVETWQSFYRKKLKEVWKPAV

SEQ ID NO: 37396 - protein, 979 aa, synthetic construct
  REGION 1..979: note = engineered CasX variant
QEIKRINKIRRRLVKDSNTKKAGKTGPMKTLLVRVMTPDLRERLENLRKKPENIPQPISNTSRANLNKLLTDYTEMKKAILHVYWEEFQKDPVGLMSRVAQPASKKIDQNKLKPEMDEKGNLTTAGFACSQCGQPLFVYKLEQVSEKGKAYTNYFGRCNVAEHEKLILLAQLKPEKDSDEAVTYSLGKFGQRALDFYSIHVTKESTHPVKPLAQIAGNRYASTPVGKALSDACMGTIASFLSKYQDIIIEHQKVVKGNQKRLESLRELAGKENLEYPSVTLPPQPHTKEGVDAYNEVIARVRMWVNLNLWQKLKLSRDDAKPLLRLKGFPSFPLVERQANEVDWWDMVCNVKKLINEKKEDGKVFWQNLAGYKRQEALRPYLSSEEDRKKGKKFARYQLGDLLLHLEKKHGEDWGKVYDEAWERIDKKVEGLSKHIKLEEERRSEDAQSKAALTDWLRAKASFVIEGLKEADKDEFCRCDLKLQKWYGDLRGKPFAIEAENSILDISGFSKQYNCAFIWQKDGVKKLNLYLIINYFKGGKLRFKKIKPEAFEANRFYTVINKKSGEIVPMEVNFNFDDPNLIILPLAFGKRQGREFIWNDLLSLETGSLKLANGRVIEKTLYNRRTRQDEPALFVALTFERREVLDSSNIKPMNLIGVDRGENIPAVIALTDPEGCPLSRFKDSLGNPTHILRIGESYKEKQRTIQAKKEVEQRRAGGYSRKYASKAKNLADDMVRNTARDLLYYAVTQDAMLIFENLSRGFGRQGKRTFMAERQYTRMEDWLTAKLAYEGLPSKTYLSKTLAQYTSKTCSNCGFTITSADYDRVLEKLKKTATGWMTTINGKELKVEGQITYYNRYKRQNVVKDLSVELDRLSEESVNNDISSWTKGRSGEALSLLKKRFSHRPVQEKFVCLNCGFETHADEQAALNIARSWLFLRSQEYKKYQTNKTTGKNTDKRAFVETWQSFYRKKLKEVWKPAV

SEQ ID NO: 37397 - protein, 979 aa, synthetic construct
  REGION 1..979: note = engineered CasX variant
QEIKRINKIRRRLVKDSNTKKAGKTGPMKTLLVRVMTPDLRERLENLRKKPENIPQPISNTSRANLNKLLTDYTEMKKAILHVYWEEFQKDPVGLMSRVAQPASKKIDQNKLKPEMDEKGNLTTAGFACSQCGQPLFVYKLEQVSEKGKAYTNYFGRCNVAEHEKLILLAQLKPEKDSDEAVTYSLGKFGQRALDFYSIHVTKESTHPVKPLAQIAGNRYASAPVGKALSDACMGTIASFLSKYQDIIIEHQKVVKGNQKRLESLRELAGKENLEYPSVTLPPQPHTKEGVDAYNEVIARVRMWVNLNLWQKLKLSRDDAKPLLRLKGFPSFPLVERQANEVDWWDMVCNVKKLINEKKEDGKVFWQNLAGYKRQEALRPYLSSEEDRKKGKKFARYQLGDLLLHLEKKHGEDWGKVYDEAWERIDKKVEGLSKHIKLEEERRSEDAQSKAALTDWLRAKASFVIEGLKEADKDEFCRCDLKLQKWYGDLRGKPFAIEAENSILDISGFSKQYNCAFIWQKDGVKKLNLYLIINYFKGGKLRFKKIKPEAFEANRFYTVINKKSGEIVPMEVNFNFDDPNLIILPLAFGKRQGREFIWNDLLSLETGSLKLANGRVIEKTLYNRRTRQDEPALFVALTFERREVLDSSNIKPMNLIGVDRGENIPAVIALTDPEGCPLSRFKDSLGNPTHILRIGESYKEKQRTIQAKKEVEQRRAGGYSRKYASKAKNLADDMVRNTARDLLYYAVTQDAMLIFENLSRGFGRQGKRTFMAERQYTRMEDWLTAKLAYEGLPSKTYLSKTLAQYTSKTCSNCGFTITSADYDRVLEKLKKTATGWMTTINGKELKVEGQITYYNRYKRQNVVKDLSVELDRLSEESVNNDISSWTKGRSGEALSLLKKRFSHRPVQEKFVCLNCGFETHADEQAALNIARSWLFLRSQEYKKYQTNKTTGKNTDKRAFVETWQSFYRKKLKEVWKPAV

SEQ ID NO: 37398 - protein, 979 aa, synthetic construct
  REGION 1..979: note = engineered CasX variant
QEIKRINKIRRRLVKDSNTKKAGKTGPMKTLLVRVMTPDLRERLENLRKKPENIPQPISNTSRANLNKLLTDYTEMKKAILHVYWEEFQKDPVGLMSRVAQPASKKIDQNKLKPEMDEKGNLTTAGFACSQCGQPLFVYKLEQVSEKGKAYTNYFGRCNVAEHEKLILLAQLKPEKDSDEAVTYSLGKFGQRALDFYSIHVTKESTHPVKPLAQIAGNRYASVPVGKALSDACMGTIASFLSKYQDIIIEHQKVVKGNQKRLESLRELAGKENLEYPSVTLPPQPHTKEGVDAYNEVIARVRMWVNLNLWQKLKLSRDDAKPLLRLKGFPSFPLVERQANEVDWWDMVCNVKKLINEKKEDGKVFWQNLAGYKRQEALRPYLSSEEDRKKGKKFARYQLGDLLLHLEKKHGEDWGKVYDEAWERIDKKVEGLSKHIKLEEERRSEDAQSKAALTDWLRAKASFVIEGLKEADKDEFCRCDLKLQKWYGDLRGKPFAIEAENSILDISGFSKQYNCAFIWQKDGVKKLNLYLIINYFKGGKLRFKKIKPEAFEANRFYTVINKKSGEIVPMEVNFNFDDPNLIILPLAFGKRQGREFIWNDLLSLETGSLKLANGRVIEKTLYNRRTRQDEPALFVALTFERREVLDSSNIKPMNLIGVDRGENIPAVIALTDPEGCPLSRFKDSLGNPTHILRIGESYKEKQRTIQAKKEVEQRRAGGYSRKYASKAKNLADDMVRNTARDLLYYAVTQDAMLIFENLSRGFGRQGKRTFMAERQYTRMEDWLTAKLAYEGLPSKTYLSKTLAQYTSKTCSNCGFTITSADYDRVLEKLKKTATGWMTTINGKELKVEGQITYYNRYKRQNVVKDLSVELDRLSEESVNNDISSWTKGRSGEALSLLKKRFSHRPVQEKFVCLNCGFETHADEQAALNIARSWLFLRSQEYKKYQTNKTTGKNTDKRAFVETWQSFYRKKLKEVWKPAV

SEQ ID NO: 37399 - protein, 979 aa, synthetic construct
  REGION 1..979: note = engineered CasX variant
QEIKRINKIRRRLVKDSNTKKAGKTGPMKTLLVRVMTPDLRERLENLRKKPENIPQPISNTSRANLNKLLTDYTEMKKAILHVYWEEFQKDPVGLMSRVAQPASKKIDQNKLKPEMDEKGNLTTAGFACSQCGQPLFVYKLEQVSEKGKAYTNYFGRCNVAEHEKLIKLAQLKPEKDSDEAVTYSLGKFGQRALDFYSIHVTKESTHPVKPLAQIAGNRYASGPVGKALSDACMGTIASFLSKYQDIIIEHQKVVKGNQKRLESLRELAGKENLEYPSVTLPPQPHTKEGVDAYNEVIARVRMWVNLNLWQKLKLSRDDAKPLLRLKGFPSFPLVERQANEVDWWDMVCNVKKLINEKKEDGKVFWQNLAGYKRQEALRPYLSSEEDRKKGKKFARYQLGDLLLHLEKKHGEDWGKVYDEAWERIDKKVEGLSKHIKLEEERRSEDAQSKAALTDWLRAKASFVIEGLKEADKDEFCRCDLKLQKWYGDLRGKPFAIEAENSILDISGFSKQYNCAFIWQKDGVKKLNLYLIINYFKGGKLRFKKIKPEAFEANRFYTVINKKSGEIVPMEVNFNFDDPNLIILPLAFGKRQGREFIWNDLLSLETGSLKLANGRVIEKTLYNRRTRQDEPALFVALTFERREVLDSSNIKPMNLIGVDRGENIPAVIALTDPEGCPLSRFKDSLGNPTHILRIGESYKEKQRTIQAKKEVEQRRAGGYSRKYASKAKNLADDMVRNTARDLLYYAVTQDAMLIFENLSRGFGRQGKRTFMAERQYTRMEDWLTAKLAYEGLPSKTYLSKTLAQYTSKTCSNCGFTITSADYDRVLEKLKKTATGWMTTINGKELKVEGQITYYNRYKRQNVVKDLSVELDRLSEESVNNDISSWTKGRSGEALSLLKKRFSHRPVQEKFVCLNCGFETHADEQAALNIARSWLFLRSQEYKKYQTNKTTGKNTDKRAFVETWQSFYRKKLKEVWKPAV

SEQ ID NO: 37400 - protein, 978 aa, synthetic construct
  REGION 1..978: note = engineered CasX variant
QEIKRINKIRRRLVKDSNTKKAGKTGPMKTLLVRVMTPDLRERLENLRKKPENIPQPISNTSRANLNKLLTDYTEMKKAILHVYWEEFQKDPVGLMSRVAQPASKKIDQNKLKPEMDEKGNLTTAGFACSQCGQPLFVYKLEQVSEKGKAYTNYFGRCNVAEHEKLILLAQLKPEKDSDEAVTYSLGKFGQRALDFYSIHVTKESTHPVKPLAQIAGNRYASPVGKALSDACMGTIASFLSKYQDIIIEHQKVVKGNQKRLESLRELAGKENLEYPSVTLPPQPHTKEGVDAYNEVIARVRMWVNLNLWQKLKLSRDDAKPLLRLKGFPSFPLVERQANEVDWWDMVCNVKKLINEKKEDGKVFWQNLAGYKRQEALRPYLSSEEDRKKGKKFARYQLGDLLLHLEKKHGEDWGKVYDEAWERIDKKVEGLSKHIKLEEERRSEDAQSKAALTDWLRAKASFVIEGLKEADKDEFCRCDLKLQKWYGDLRGKPFAIEAENSILDISGFSKQYNCAFIWQKDGVKKLNLYLIINYFKGGKLRFKKIKPEAFEANRFYTVINKKSGEIVPMEVNFNFDDPNLIILPLAFGKRQGREFIWNDLLSLETGSLKLANGRVIEKTLYNRRTRQDEPALFVALTFERREVLDSSNIKPMNLIGVDRGENIPAVIALTDPEGCPLSRFKDSLGNPTHILRIGESYKEKQRTIQAKKEVEQRRAGGYSRKYASKAKNLADDMVRNTARDLLYYAVTQDAMLIFENLSRGFGRQGKRTFMAERQYTRMEDWLTAKLAYEGLPSKTYLSKTLAQYTSKTCSNCGFTITSADYDRVLEKLKKTATGWMTTINGKELKVEGQITYYNRYKRQNVVKDLSVELDRLSEESVNNDISSWTKGRSGEALSLLKKRFSHRPVQEKFVCLNCGFETHADEQAALNIARSWLFLRSQEYKKYQTNKTTGKNTDKRAFVETWQSFYRKKLKEVWKPAV

SEQ ID NO: 37401 - protein, 978 aa, synthetic construct
  REGION 1..978: note = engineered CasX variant
QEIKRINKIRRRLVKDSNTKKAGKTGPMKTLLVRVMTPDLRERLENLRKKPENIPQPISNTSRANLNKLLTDYTEMKKAILHVYWEEFQKDPVGLMSRVAQPASKKIDQNKLKPEMDEKGNLTTAGFACSQCGQPLFVYKLEQVSEKGKAYTNYFGRCNVAEHEKLILLAQLKPEKDSDEAVTYSLGKFGQRALDFYSIHVTKESTHPVKPLAQIAGNRYASYPVGKALSDACMGTIASFLSKYQDIIIEHQKVVKGNQKRLESLRELAGKENLEYPSVTLPPQPHTKEGVDAYNEVIARVRMWVNLNLWQKLKLSRDDAKPLLRLKKFPSFPLVERQANEVDWWDMVCNVKKLINEKKEDGKVFWQNLAGYKRQEALRPYLSSEEDRKKGKKFARYQLGDLLLHLEKKHGEDWGKVYDEAWERIDKKVEGLSKHIKLEEERRSEDAQSKAALTDWLRAKASFVIEGLKEADKDEFCRCDLKLQKWYGDLRGKPFAIEAENSILDISGFSKQYNCAFIWQKDGVKKLNLYLIINYFKGGKLRFKKIKPEAFEANRFYTVINKKSGEIVPMEVNFNFDDPNLIILPLAFGKRQGREFIWNDLLSLETGSLKLANGRVIEKTLYNRRTRQDEPALFVALTFERREVLDSSNIKPMNLIGVDRGENIPAVIALTDPEGCPLSRFKDSLGNPTHILRIGESYKEKQRTIQAKKEVEQRRAGGYSRKYASKAKNLADDMVRNTARDLLYYAVTQDAMLIFENLSRGFGRQGKRTFMAERQYTRMEDWLTAKLAYEGLPSKTYLSKTLAQYTSKTCSNCGFTITSADYDRVLEKLKKTATGWMTTINGKELKVEGQITYYNRYKRQNVVKDLSVELDRLSEESVNNDISSWTKGRSGEALSLLKKRFSHRPVQEKFVCLNCGFETHADEQAALNIARSWLFLRSQEYKKYQTNKTTGNTDKRAFVETWQSFYRKKLKEVWKPAV

SEQ ID NO: 37402 - protein, 978 aa, synthetic construct
  REGION 1..978: note = engineered CasX variant
QEIKRINKIRRRLVKDSNTKKAGKTGPMKTLLVRVMTPDLRERLENLRKKPENIPQPISNTSRANLNKLLTDYTEMKKAILHVYWEEFQKDPVGLMSRVAQPASKKIDQNKLKPEMDEKGNLTTAGFACSQCGQPLFVYKLEQVSEKGKAYTNYFGRCNVAEHEKLILLAQLKPEKDSDEAVTYSLGKFGQRALDFYSIHVTKESTHPVKPLAQIAGNRYASHPVGKALSDACMGTIASFLSKYQDIIIEHQKVVKGNQKRLESLRELAGKENLEYPSVTLPPQPHTKEGVDAYNEVIARVRMWVNLNLWQKLKLSRDDAKPLLRLKKFPSFPLVERQANEVDWWDMVCNVKKLINEKKEDGKVFWQNLAGYKRQEALRPYLSSEEDRKKGKKFARYQLGDLLLHLEKKHGEDWGKVYDEAWERIDKKVEGLSKHIKLEEERRSEDAQSKAALTDWLRAKASFVIEGLKEADKDEFCRCDLKLQKWYGDLRGKPFAIEAENSILDISGFSKQYNCAFIWQKDGVKKLNLYLIINYFKGGKLRFKKIKPEAFEANRFYTVINKKSGEIVPMEVNFNFDDPNLIILPLAFGKRQGREFIWNDLLSLETGSLKLANGRVIEKTLYNRRTRQDEPALFVALTFERREVLDSSNIKPMNLIGVDRGENIPAVIALTDPEGCPLSRFKDSLGNPTHILRIGESYKEKQRTIQAKKEVEQRRAGGYSRKYASKAKNLADDMVRNTARDLLYYAVTQDAMLIFENLSRGFGRQGKRTFMAERQYTRMEDWLTAKLAYEGLPSKTYLSKTLAQYTSKTCSNCGFTITSADYDRVLEKLKKTATGWMTTINGKELKVEGQITYYNRYKRQNVVKDLSVELDRLSEESVNNDISSWTKGRSGEALSLLKKRFSHRPVQEKFVCLNCGFETHADEQAALNIARSWLFLRSQEYKKYQTNKTTGNTDKRAFVETWQSFYRKKLKEVWKPAV

SEQ ID NO: 37403 - protein, 978 aa, synthetic construct
  REGION 1..978: note = engineered CasX variant
QEIKRINKIRRRLVKDSNTKKAGKTGPMKTLLVRVMTPDLRERLENLRKKPENIPQPISNTSRANLNKLLTDYTEMKKAILHVYWEEFQKDPVGLMSRVAQPASKKIDQNKLKPEMDEKGNLTTAGFACSQCGQPLFVYKLEQVSEKGKAYTNYFGRCNVAEHEKLILLAQLKPEKDSDEAVTYSLGKFGQRALDFYSIHVTKESTHPVKPLAQIAGNRYASSPVGKALSDACMGTIASFLSKYQDIIIEHQKVVKGNQKRLESLRELAGKENLEYPSVTLPPQPHTKEGVDAYNEVIARVRMWVNLNLWQKLKLSRDDAKPLLRLKKFPSFPLVERQANEVDWWDMVCNVKKLINEKKEDGKVFWQNLAGYKRQEALRPYLSSEEDRKKGKKFARYQLGDLLLHLEKKHGEDWGKVYDEAWERIDKKVEGLSKHIKLEEERRSEDAQSKAALTDWLRAKASFVIEGLKEADKDEFCRCDLKLQKWYGDLRGKPFAIEAENSILDISGFSKQYNCAFIWQKDGVKKLNLYLIINYFKGGKLRFKKIKPEAFEANRFYTVINKKSGEIVPMEVNFNFDDPNLIILPLAFGKRQGREFIWNDLLSLETGSLKLANGRVIEKTLYNRRTRQDEPALFVALTFERREVLDSSNIKPMNLIGVDRGENIPAVIALTDPEGCPLSRFKDSLGNPTHILRIGESYKEKQRTIQAKKEVEQRRAGGYSRKYASKAKNLADDMVRNTARDLLYYAVTQDAMLIFENLSRGFGRQGKRTFMAERQYTRMEDWLTAKLAYEGLPSKTYLSKTLAQYTSKTCSNCGFTITSADYDRVLEKLKKTATGWMTTINGKELKVEGQITYYNRYKRQNVVKDLSVELDRLSEESVNNDISSWTKGRSGEALSLLKKRFSHRPVQEKFVCLNCGFETHADEQAALNIARSWLFLRSQEYKKYQTNKTTGNTDKRAFVETWQSFYRKKLKEVWKPAV

SEQ ID NO: 37404 - protein, 978 aa, synthetic construct
  REGION 1..978: note = engineered CasX variant
QEIKRINKIRRRLVKDSNTKKAGKTGPMKTLLVRVMTPDLRERLENLRKKPENIPQPISNTSRANLNKLLTDYTEMKKAILHVYWEEFQKDPVGLMSRVAQPASKKIDQNKLKPEMDEKGNLTTAGFACSQCGQPLFVYKLEQVSEKGKAYTNYFGRCNVAEHEKLILLAQLKPEKDSDEAVTYSLGKFGQRALDFYSIHVTKESTHPVKPLAQIAGNRYASTPVGKALSDACMGTIASFLSKYQDIIIEHQKVVKGNQKRLESLRELAGKENLEYPSVTLPPQPHTKEGVDAYNEVIARVRMWVNLNLWQKLKLSRDDAKPLLRLKKFPSFPLVERQANEVDWWDMVCNVKKLINEKKEDGKVFWQNLAGYKRQEALRPYLSSEEDRKKGKKFARYQLGDLLLHLEKKHGEDWGKVYDEAWERIDKKVEGLSKHIKLEEERRSEDAQSKAALTDWLRAKASFVIEGLKEADKDEFCRCDLKLQKWYGDLRGKPFAIEAENSILDISGFSKQYNCAFIWQKDGVKKLNLYLIINYFKGGKLRFKKIKPEAFEANRFYTVINKKSGEIVPMEVNFNFDDPNLIILPLAFGKRQGREFIWNDLLSLETGSLKLANGRVIEKTLYNRRTRQDEPALFVALTFERREVLDSSNIKPMNLIGVDRGENIPAVIALTDPEGCPLSRFKDSLGNPTHILRIGESYKEKQRTIQAKKEVEQRRAGGYSRKYASKAKNLADDMVRNTARDLLYYAVTQDAMLIFENLSRGFGRQGKRTFMAERQYTRMEDWLTAKLAYEGLPSKTYLSKTLAQYTSKTCSNCGFTITSADYDRVLEKLKKTATGWMTTINGKELKVEGQITYYNRYKRQNVVKDLSVELDRLSEESVNNDISSWTKGRSGEALSLLKKRFSHRPVQEKFVCLNCGFETHADEQAALNIARSWLFLRSQEYKKYQTNKTTGNTDKRAFVETWQSFYRKKLKEVWKPAV

SEQ ID NO: 37405 - protein, 978 aa, synthetic construct
  REGION 1..978: note = engineered CasX variant
QEIKRINKIRRRLVKDSNTKKAGKTGPMKTLLVRVMTPDLRERLENLRKKPENIPQPISNTSRANLNKLLTDYTEMKKAILHVYWEEFQKDPVGLMSRVAQPASKKIDQNKLKPEMDEKGNLTTAGFACSQCGQPLFVYKLEQVSEKGKAYTNYFGRCNVAEHEKLILLAQLKPEKDSDEAVTYSLGKFGQRALDFYSIHVTKESTHPVKPLAQIAGNRYASAPVGKALSDACMGTIASFLSKYQDIIIEHQKVVKGNQKRLESLRELAGKENLEYPSVTLPPQPHTKEGVDAYNEVIARVRMWVNLNLWQKLKLSRDDAKPLLRLKKFPSFPLVERQANEVDWWDMVCNVKKLINEKKEDGKVFWQNLAGYKRQEALRPYLSSEEDRKKGKKFARYQLGDLLLHLEKKHGEDWGKVYDEAWERIDKKVEGLSKHIKLEEERRSEDAQSKAALTDWLRAKASFVIEGLKEADKDEFCRCDLKLQKWYGDLRGKPFAIEAENSILDISGFSKQYNCAFIWQKDGVKKLNLYLIINYFKGGKLRFKKIKPEAFEANRFYTVINKKSGEIVPMEVNFNFDDPNLIILPLAFGKRQGREFIWNDLLSLETGSLKLANGRVIEKTLYNRRTRQDEPALFVALTFERREVLDSSNIKPMNLIGVDRGENIPAVIALTDPEGCPLSRFKDSLGNPTHILRIGESYKEKQRTIQAKKEVEQRRAGGYSRKYASKAKNLADDMVRNTARDLLYYAVTQDAMLIFENLSRGFGRQGKRTFMAERQYTRMEDWLTAKLAYEGLPSKTYLSKTLAQYTSKTCSNCGFTITSADYDRVLEKLKKTATGWMTTINGKELKVEGQITYYNRYKRQNVVKDLSVELDRLSEESVNNDISSWTKGRSGEALSLLKKRFSHRPVQEKFVCLNCGFETHADEQAALNIARSWLFLRSQEYKKYQTNKTTGNTDKRAFVETWQSFYRKKLKEVWKPAV

SEQ ID NO: 37406 - protein, 978 aa, synthetic construct
  REGION 1..978: note = engineered CasX variant
QEIKRINKIRRRLVKDSNTKKAGKTGPMKTLLVRVMTPDLRERLENLRKKPENIPQPISNTSRANLNKLLTDYTEMKKAILHVYWEEFQKDPVGLMSRVAQPASKKIDQNKLKPEMDEKGNLTTAGFACSQCGQPLFVYKLEQVSEKGKAYTNYFGRCNVAEHEKLILLAQLKPEKDSDEAVTYSLGKFGQRALDFYSIHVTKESTHPVKPLAQIAGNRYASVPVGKALSDACMGTIASFLSKYQDIIIEHQKVVKGNQKRLESLRELAGKENLEYPSVTLPPQPHTKEGVDAYNEVIARVRMWVNLNLWQKLKLSRDDAKPLLRLKKFPSFPLVERQANEVDWWDMVCNVKKLINEKKEDGKVFWQNLAGYKRQEALRPYLSSEEDRKKGKKFARYQLGDLLLHLEKKHGEDWGKVYDEAWERIDKKVEGLSKHIKLEEERRSEDAQSKAALTDWLRAKASFVIEGLKEADKDEFCRCDLKLQKWYGDLRGKPFAIEAENSILDISGFSKQYNCAFIWQKDGVKKLNLYLIINYFKGGKLRFKKIKPEAFEANRFYTVINKKSGEIVPMEVNFNFDDPNLIILPLAFGKRQGREFIWNDLLSLETGSLKLANGRVIEKTLYNRRTRQDEPALFVALTFERREVLDSSNIKPMNLIGVDRGENIPAVIALTDPEGCPLSRFKDSLGNPTHILRIGESYKEKQRTIQAKKEVEQRRAGGYSRKYASKAKNLADDMVRNTARDLLYYAVTQDAMLIFENLSRGFGRQGKRTFMAERQYTRMEDWLTAKLAYEGLPSKTYLSKTLAQYTSKTCSNCGFTITSADYDRVLEKLKKTATGWMTTINGKELKVEGQITYYNRYKRQNVVKDLSVELDRLSEESVNNDISSWTKGRSGEALSLLKKRFSHRPVQEKFVCLNCGFETHADEQAALNIARSWLFLRSQEYKKYQTNKTTGNTDKRAFVETWQSFYRKKLKEVWKPAV

SEQ ID NO: 37407 - protein, 978 aa, synthetic construct
  REGION 1..978: note = engineered CasX variant
QEIKRINKIRRRLVKDSNTKKAGKTGPMKTLLVRVMTPDLRERLENLRKKPENIPQPISNTSRANLNKLLTDYTEMKKAILHVYWEEFQKDPVGLMSRVAQPASKKIDQNKLKPEMDEKGNLTTAGFACSQCGQPLFVYKLEQVSEKGKAYTNYFGRCNVAEHEKLIKLAQLKPEKDSDEAVTYSLGKFGQRALDFYSIHVTKESTHPVKPLAQIAGNRYASGPVGKALSDACMGTIASFLSKYQDIIIEHQKVVKGNQKRLESLRELAGKENLEYPSVTLPPQPHTKEGVDAYNEVIARVRMWVNLNLWQKLKLSRDDAKPLLRLKKFPSFPLVERQANEVDWWDMVCNVKKLINEKKEDGKVFWQNLAGYKRQEALRPYLSSEEDRKKGKKFARYQLGDLLLHLEKKHGEDWGKVYDEAWERIDKKVEGLSKHIKLEEERRSEDAQSKAALTDWLRAKASFVIEGLKEADKDEFCRCDLKLQKWYGDLRGKPFAIEAENSILDISGFSKQYNCAFIWQKDGVKKLNLYLIINYFKGGKLRFKKIKPEAFEANRFYTVINKKSGEIVPMEVNFNFDDPNLIILPLAFGKRQGREFIWNDLLSLETGSLKLANGRVIEKTLYNRRTRQDEPALFVALTFERREVLDSSNIKPMNLIGVDRGENIPAVIALTDPEGCPLSRFKDSLGNPTHILRIGESYKEKQRTIQAKKEVEQRRAGGYSRKYASKAKNLADDMVRNTARDLLYYAVTQDAMLIFENLSRGFGRQGKRTFMAERQYTRMEDWLTAKLAYEGLPSKTYLSKTLAQYTSKTCSNCGFTITSADYDRVLEKLKKTATGWMTTINGKELKVEGQITYYNRYKRQNVVKDLSVELDRLSEESVNNDISSWTKGRSGEALSLLKKRFSHRPVQEKFVCLNCGFETHADEQAALNIARSWLFLRSQEYKKYQTNKTTGNTDKRAFVETWQSFYRKKLKEVWKPAV

SEQ ID NO: 37408 - protein, 977 aa, synthetic construct
  REGION 1..977: note = engineered CasX variant
QEIKRINKIRRRLVKDSNTKKAGKTGPMKTLLVRVMTPDLRERLENLRKKPENIPQPISNTSRANLNKLLTDYTEMKKAILHVYWEEFQKDPVGLMSRVAQPASKKIDQNKLKPEMDEKGNLTTAGFACSQCGQPLFVYKLEQVSEKGKAYTNYFGRCNVAEHEKLILLAQLKPEKDSDEAVTYSLGKFGQRALDFYSIHVTKESTHPVKPLAQIAGNRYASPVGKALSDACMGTIASFLSKYQDIIIEHQKVVKGNQKRLESLRELAGKENLEYPSVTLPPQPHTKEGVDAYNEVIARVRMWVNLNLWQKLKLSRDDAKPLLRLKKFPSFPLVERQANEVDWWDMVCNVKKLINEKKEDGKVFWQNLAGYKRQEALRPYLSSEEDRKKGKKFARYQLGDLLLHLEKKHGEDWGKVYDEAWERIDKKVEGLSKHIKLEEERRSEDAQSKAALTDWLRAKASFVIEGLKEADKDEFCRCDLKLQKWYGDLRGKPFAIEAENSILDISGFSKQYNCAFIWQKDGVKKLNLYLIINYFKGGKLRFKKIKPEAFEANRFYTVINKKSGEIVPMEVNFNFDDPNLIILPLAFGKRQGREFIWNDLLSLETGSLKLANGRVIEKTLYNRRTRQDEPALFVALTFERREVLDSSNIKPMNLIGVDRGENIPAVIALTDPEGCPLSRFKDSLGNPTHILRIGESYKEKQRTIQAKKEVEQRRAGGYSRKYASKAKNLADDMVRNTARDLLYYAVTQDAMLIFENLSRGFGRQGKRTFMAERQYTRMEDWLTAKLAYEGLPSKTYLSKTLAQYTSKTCSNCGFTITSADYDRVLEKLKKTATGWMTTINGKELKVEGQITYYNRYKRQNVVKDLSVELDRLSEESVNNDISSWTKGRSGEALSLLKKRFSHRPVQEKFVCLNCGFETHADEQAALNIARSWLFLRSQEYKKYQTNKTTGNTDKRAFVETWQSFYRKKLKEVWKPAV

SEQ ID NO: 37409 - protein, 978 aa, synthetic construct
  REGION 1..978: note = engineered CasX variant
QEIKRINKIRRRLVKDSNTKKAGKTGPMKTLLVRVMTPDLRERLENLRKKPENIPQPISNTSRANLNKLLTDYTEMKKAILHVYWEEFQKDPVGLMSRVAQPASKKIDQNKLKPEMDEKGNLTTAGFACSQCGQPLFVYKLEQVSEKGKAYTNYFGRCNVAEHEKLILLAQLKPEKDSDEAVTYSLGKFGQRALDFYSIHVTKESTHPVKPLAQIAGNRYASYPVGKALSDACMGTIASFLSKYQDIIIEHQKVVKGNQKRLESLRELAGKENLEYPSVTLPPQPHTKEGVDAYNEVIARVRMWVNLNLWQKLKLSRDDAKPLLRLKGFPSFPLVERQANEVDWWDMVCNVKKLINEKKEDGKVFWQNLAGYKRQEALRPYLSSEEDRKKGKKFARYQLGDLLLHLEKKHGEDWGKVYDEAWERIDKKVEGLSKHIKLEEERRSEDAQSKAALTDWLRAKASFVIEGLKEADKDEFCRCDLKLQKWYGDLRGKPFAIEAENSILDISGFSKQYNCAFIWQKDGVKKLNLYLIINYFKGGKLRFKKIKPEAFEANRFYTVINKKSGEIVPMEVNFNFDDPNLIILPLAFGKRQGREFIWNDLLSLETGSLKLANGRVIEKTLYNRRTRQDEPALFVALTFERREVLDSSNIKPMNLIGVDRGENIPAVIALTDPEGCPLSRFKDSLGNPTHILRIGERYKEKQRTIQAKKEVEQRRAGGYSRKYASKAKNLADDMVRNTARDLLYYAVTQDAMLIFENLSRGFGRQGKRTFMAERQYTRMEDWLTAKLAYEGLPSKTYLSKTLAQYTSKTCSNCGFTITSADYDRVLEKLKKTATGWMTTINGKELKVEGQITYYNRYKRQNVVKDLSVELDRLSEESVNNDISSWTKGRSGEALSLLKKRFSHRPVQEKFVCLNCGFETHADEQAALNIARSWLFLRSQEYKKYQTNKTTGNTDKRAFVETWQSFYRKKLKEVWKPAV

SEQ ID NO: 37410 - protein, 978 aa, synthetic construct
  REGION 1..978: note = engineered CasX variant
QEIKRINKIRRRLVKDSNTKKAGKTGPMKTLLVRVMTPDLRERLENLRKKPENIPQPISNTSRANLNKLLTDYTEMKKAILHVYWEEFQKDPVGLMSRVAQPASKKIDQNKLKPEMDEKGNLTTAGFACSQCGQPLFVYKLEQVSEKGKAYTNYFGRCNVAEHEKLILLAQLKPEKDSDEAVTYSLGKFGQRALDFYSIHVTKESTHPVKPLAQIAGNRYASHPVGKALSDACMGTIASFLSKYQDIIIEHQKVVKGNQKRLESLRELAGKENLEYPSVTLPPQPHTKEGVDAYNEVIARVRMWVNLNLWQKLKLSRDDAKPLLRLKGFPSFPLVERQANEVDWWDMVCNVKKLINEKKEDGKVFWQNLAGYKRQEALRPYLSSEEDRKKGKKFARYQLGDLLLHLEKKHGEDWGKVYDEAWERIDKKVEGLSKHIKLEEERRSEDAQSKAALTDWLRAKASFVIEGLKEADKDEFCRCDLKLQKWYGDLRGKPFAIEAENSILDISGFSKQYNCAFIWQKDGVKKLNLYLIINYFKGGKLRFKKIKPEAFEANRFYTVINKKSGEIVPMEVNFNFDDPNLIILPLAFGKRQGREFIWNDLLSLETGSLKLANGRVIEKTLYNRRTRQDEPALFVALTFERREVLDSSNIKPMNLIGVDRGENIPAVIALTDPEGCPLSRFKDSLGNPTHILRIGERYKEKQRTIQAKKEVEQRRAGGYSRKYASKAKNLADDMVRNTARDLLYYAVTQDAMLIFENLSRGFGRQGKRTFMAERQYTRMEDWLTAKLAYEGLPSKTYLSKTLAQYTSKTCSNCGFTITSADYDRVLEKLKKTATGWMTTINGKELKVEGQITYYNRYKRQNVVKDLSVELDRLSEESVNNDISSWTKGRSGEALSLLKKRFSHRPVQEKFVCLNCGFETHADEQAALNIARSWLFLRSQEYKKYQTNKTTGNTDKRAFVETWQSFYRKKLKEVWKPAV

SEQ ID NO: 37411 - protein, 978 aa, synthetic construct
  REGION 1..978: note = engineered CasX variant
QEIKRINKIRRRLVKDSNTKKAGKTGPMKTLLVRVMTPDLRERLENLRKKPENIPQPISNTSRANLNKLLTDYTEMKKAILHVYWEEFQKDPVGLMSRVAQPASKKIDQNKLKPEMDEKGNLTTAGFACSQCGQPLFVYKLEQVSEKGKAYTNYFGRCNVAEHEKLILLAQLKPEKDSDEAVTYSLGKFGQRALDFYSIHVTKESTHPVKPLAQIAGNRYASSPVGKALSDACMGTIASFLSKYQDIIIEHQKVVKGNQKRLESLRELAGKENLEYPSVTLPPQPHTKEGVDAYNEVIARVRMWVNLNLWQKLKLSRDDAKPLLRLKGFPSFPLVERQANEVDWWDMVCNVKKLINEKKEDGKVFWQNLAGYKRQEALRPYLSSEEDRKKGKKFARYQLGDLLLHLEKKHGEDWGKVYDEAWERIDKKVEGLSKHIKLEEERRSEDAQSKAALTDWLRAKASFVIEGLKEADKDEFCRCDLKLQKWYGDLRGKPFAIEAENSILDISGFSKQYNCAFIWQKDGVKKLNLYLIINYFKGGKLRFKKIKPEAFEANRFYTVINKKSGEIVPMEVNFNFDDPNLIILPLAFGKRQGREFIWNDLLSLETGSLKLANGRVIEKTLYNRRTRQDEPALFVALTFERREVLDSSNIKPMNLIGVDRGENIPAVIALTDPEGCPLSRFKDSLGNPTHILRIGERYKEKQRTIQAKKEVEQRRAGGYSRKYASKAKNLADDMVRNTARDLLYYAVTQDAMLIFENLSRGFGRQGKRTFMAERQYTRMEDWLTAKLAYEGLPSKTYLSKTLAQYTSKTCSNCGFTITSADYDRVLEKLKKTATGWMTTINGKELKVEGQITYYNRYKRQNVVKDLSVELDRLSEESVNNDISSWTKGRSGEALSLLKKRFSHRPVQEKFVCLNCGFETHADEQAALNIARSWLFLRSQEYKKYQTNKTTGNTDKRAFVETWQSFYRKKLKEVWKPAV

SEQ ID NO: 37412 - protein, 978 aa, synthetic construct
  REGION 1..978: note = engineered CasX variant
QEIKRINKIRRRLVKDSNTKKAGKTGPMKTLLVRVMTPDLRERLENLRKKPENIPQPISNTSRANLNKLLTDYTEMKKAILHVYWEEFQKDPVGLMSRVAQPASKKIDQNKLKPEMDEKGNLTTAGFACSQCGQPLFVYKLEQVSEKGKAYTNYFGRCNVAEHEKLILLAQLKPEKDSDEAVTYSLGKFGQRALDFYSIHVTKESTHPVKPLAQIAGNRYASTPVGKALSDACMGTIASFLSKYQDIIIEHQKVVKGNQKRLESLRELAGKENLEYPSVTLPPQPHTKEGVDAYNEVIARVRMWVNLNLWQKLKLSRDDAKPLLRLKGFPSFPLVERQANEVDWWDMVCNVKKLINEKKEDGKVFWQNLAGYKRQEALRPYLSSEEDRKKGKKFARYQLGDLLLHLEKKHGEDWGKVYDEAWERIDKKVEGLSKHIKLEEERRSEDAQSKAALTDWLRAKASFVIEGLKEADKDEFCRCDLKLQKWYGDLRGKPFAIEAENSILDISGFSKQYNCAFIWQKDGVKKLNLYLIINYFKGGKLRFKKIKPEAFEANRFYTVINKKSGEIVPMEVNFNFDDPNLIILPLAFGKRQGREFIWNDLLSLETGSLKLANGRVIEKTLYNRRTRQDEPALFVALTFERREVLDSSNIKPMNLIGVDRGENIPAVIALTDPEGCPLSRFKDSLGNPTHILRIGERYKEKQRTIQAKKEVEQRRAGGYSRKYASKAKNLADDMVRNTARDLLYYAVTQDAMLIFENLSRGFGRQGKRTFMAERQYTRMEDWLTAKLAYEGLPSKTYLSKTLAQYTSKTCSNCGFTITSADYDRVLEKLKKTATGWMTTINGKELKVEGQITYYNRYKRQNVVKDLSVELDRLSEESVNNDISSWTKGRSGEALSLLKKRFSHRPVQEKFVCLNCGFETHADEQAALNIARSWLFLRSQEYKKYQTNKTTGNTDKRAFVETWQSFYRKKLKEVWKPAV

SEQ ID NO: 37413 - protein, 978 aa, synthetic construct
  REGION 1..978: note = engineered CasX variant
QEIKRINKIRRRLVKDSNTKKAGKTGPMKTLLVRVMTPDLRERLENLRKKPENIPQPISNTSRANLNKLLTDYTEMKKAILHVYWEEFQKDPVGLMSRVAQPASKKIDQNKLKPEMDEKGNLTTAGFACSQCGQPLFVYKLEQVSEKGKAYTNYFGRCNVAEHEKLILLAQLKPEKDSDEAVTYSLGKFGQRALDFYSIHVTKESTHPVKPLAQIAGNRYASAPVGKALSDACMGTIASFLSKYQDIIIEHQKVVKGNQKRLESLRELAGKENLEYPSVTLPPQPHTKEGVDAYNEVIARVRMWVNLNLWQKLKLSRDDAKPLLRLKGFPSFPLVERQANEVDWWDMVCNVKKLINEKKEDGKVFWQNLAGYKRQEALRPYLSSEEDRKKGKKFARYQLGDLLLHLEKKHGEDWGKVYDEAWERIDKKVEGLSKHIKLEEERRSEDAQSKAALTDWLRAKASFVIEGLKEADKDEFCRCDLKLQKWYGDLRGKPFAIEAENSILDISGFSKQYNCAFIWQKDGVKKLNLYLIINYFKGGKLRFKKIKPEAFEANRFYTVINKKSGEIVPMEVNFNFDDPNLIILPLAFGKRQGREFIWNDLLSLETGSLKLANGRVIEKTLYNRRTRQDEPALFVALTFERREVLDSSNIKPMNLIGVDRGENIPAVIALTDPEGCPLSRFKDSLGNPTHILRIGERYKEKQRTIQAKKEVEQRRAGGYSRKYASKAKNLADDMVRNTARDLLYYAVTQDAMLIFENLSRGFGRQGKRTFMAERQYTRMEDWLTAKLAYEGLPSKTYLSKTLAQYTSKTCSNCGFTITSADYDRVLEKLKKTATGWMTTINGKELKVEGQITYYNRYKRQNVVKDLSVELDRLSEESVNNDISSWTKGRSGEALSLLKKRFSHRPVQEKFVCLNCGFETHADEQAALNIARSWLFLRSQEYKKYQTNKTTGNTDKRAFVETWQSFYRKKLKEVWKPAV

SEQ ID NO: 37414 - protein, 978 aa, synthetic construct
  REGION 1..978: note = engineered CasX variant
QEIKRINKIRRRLVKDSNTKKAGKTGPMKTLLVRVMTPDLRERLENLRKKPENIPQPISNTSRANLNKLLTDYTEMKKAILHVYWEEFQKDPVGLMSRVAQPASKKIDQNKLKPEMDEKGNLTTAGFACSQCGQPLFVYKLEQVSEKGKAYTNYFGRCNVAEHEKLILLAQLKPEKDSDEAVTYSLGKFGQRALDFYSIHVTKESTHPVKPLAQIAGNRYASVPVGKALSDACMGTIASFLSKYQDIIIEHQKVVKGNQKRLESLRELAGKENLEYPSVTLPPQPHTKEGVDAYNEVIARVRMWVNLNLWQKLKLSRDDAKPLLRLKGFPSFPLVERQANEVDWWDMVCNVKKLINEKKEDGKVFWQNLAGYKRQEALRPYLSSEEDRKKGKKFARYQLGDLLLHLEKKHGEDWGKVYDEAWERIDKKVEGLSKHIKLEEERRSEDAQSKAALTDWLRAKASFVIEGLKEADKDEFCRCDLKLQKWYGDLRGKPFAIEAENSILDISGFSKQYNCAFIWQKDGVKKLNLYLIINYFKGGKLRFKKIKPEAFEANRFYTVINKKSGEIVPMEVNFNFDDPNLIILPLAFGKRQGREFIWNDLLSLETGSLKLANGRVIEKTLYNRRTRQDEPALFVALTFERREVLDSSNIKPMNLIGVDRGENIPAVIALTDPEGCPLSRFKDSLGNPTHILRIGERYKEKQRTIQAKKEVEQRRAGGYSRKYASKAKNLADDMVRNTARDLLYYAVTQDAMLIFENLSRGFGRQGKRTFMAERQYTRMEDWLTAKLAYEGLPSKTYLSKTLAQYTSKTCSNCGFTITSADYDRVLEKLKKTATGWMTTINGKELKVEGQITYYNRYKRQNVVKDLSVELDRLSEESVNNDISSWTKGRSGEALSLLKKRFSHRPVQEKFVCLNCGFETHADEQAALNIARSWLFLRSQEYKKYQTNKTTGNTDKRAFVETWQSFYRKKLKEVWKPAV

SEQ ID NO: 37415 - protein, 978 aa, synthetic construct
  REGION 1..978: note = engineered CasX variant
QEIKRINKIRRRLVKDSNTKKAGKTGPMKTLLVRVMTPDLRERLENLRKKPENIPQPISNTSRANLNKLLTDYTEMKKAILHVYWEEFQKDPVGLMSRVAQPASKKIDQNKLKPEMDEKGNLTTAGFACSQCGQPLFVYKLEQVSEKGKAYTNYFGRCNVAEHEKLIKLAQLKPEKDSDEAVTYSLGKFGQRALDFYSIHVTKESTHPVKPLAQIAGNRYASGPVGKALSDACMGTIASFLSKYQDIIIEHQKVVKGNQKRLESLRELAGKENLEYPSVTLPPQPHTKEGVDAYNEVIARVRMWVNLNLWQKLKLSRDDAKPLLRLKGFPSFPLVERQANEVDWWDMVCNVKKLINEKKEDGKVFWQNLAGYKRQEALRPYLSSEEDRKKGKKFARYQLGDLLLHLEKKHGEDWGKVYDEAWERIDKKVEGLSKHIKLEEERRSEDAQSKAALTDWLRAKASFVIEGLKEADKDEFCRCDLKLQKWYGDLRGKPFAIEAENSILDISGFSKQYNCAFIWQKDGVKKLNLYLIINYFKGGKLRFKKIKPEAFEANRFYTVINKKSGEIVPMEVNFNFDDPNLIILPLAFGKRQGREFIWNDLLSLETGSLKLANGRVIEKTLYNRRTRQDEPALFVALTFERREVLDSSNIKPMNLIGVDRGENIPAVIALTDPEGCPLSRFKDSLGNPTHILRIGERYKEKQRTIQAKKEVEQRRAGGYSRKYASKAKNLADDMVRNTARDLLYYAVTQDAMLIFENLSRGFGRQGKRTFMAERQYTRMEDWLTAKLAYEGLPSKTYLSKTLAQYTSKTCSNCGFTITSADYDRVLEKLKKTATGWMTTINGKELKVEGQITYYNRYKRQNVVKDLSVELDRLSEESVNNDISSWTKGRSGEALSLLKKRFSHRPVQEKFVCLNCGFETHADEQAALNIARSWLFLRSQEYKKYQTNKTTGNTDKRAFVETWQSFYRKKLKEVWKPAV

SEQ ID NO: 37416 - protein, 977 aa, synthetic construct
  REGION 1..977: note = engineered CasX variant
QEIKRINKIRRRLVKDSNTKKAGKTGPMKTLLVRVMTPDLRERLENLRKKPENIPQPISNTSRANLNKLLTDYTEMKKAILHVYWEEFQKDPVGLMSRVAQPASKKIDQNKLKPEMDEKGNLTTAGFACSQCGQPLFVYKLEQVSEKGKAYTNYFGRCNVAEHEKLILLAQLKPEKDSDEAVTYSLGKFGQRALDFYSIHVTKESTHPVKPLAQIAGNRYASPVGKALSDACMGTIASFLSKYQDIIIEHQKVVKGNQKRLESLRELAGKENLEYPSVTLPPQPHTKEGVDAYNEVIARVRMWVNLNLWQKLKLSRDDAKPLLRLKGFPSFPLVERQANEVDWWDMVCNVKKLINEKKEDGKVFWQNLAGYKRQEALRPYLSSEEDRKKGKKFARYQLGDLLLHLEKKHGEDWGKVYDEAWERIDKKVEGLSKHIKLEEERRSEDAQSKAALTDWLRAKASFVIEGLKEADKDEFCRCDLKLQKWYGDLRGKPFAIEAENSILDISGFSKQYNCAFIWQKDGVKKLNLYLIINYFKGGKLRFKKIKPEAFEANRFYTVINKKSGEIVPMEVNFNFDDPNLIILPLAFGKRQGREFIWNDLLSLETGSLKLANGRVIEKTLYNRRTRQDEPALFVALTFERREVLDSSNIKPMNLIGVDRGENIPAVIALTDPEGCPLSRFKDSLGNPTHILRIGERYKEKQRTIQAKKEVEQRRAGGYSRKYASKAKNLADDMVRNTARDLLYYAVTQDAMLIFENLSRGFGRQGKRTFMAERQYTRMEDWLTAKLAYEGLPSKTYLSKTLAQYTSKTCSNCGFTITSADYDRVLEKLKKTATGWMTTINGKELKVEGQITYYNRYKRQNVVKDLSVELDRLSEESVNNDISSWTKGRSGEALSLLKKRFSHRPVQEKFVCLNCGFETHADEQAALNIARSWLFLRSQEYKKYQTNKTTGNTDKRAFVETWQSFYRKKLKEVWKPAV

SEQ ID NO: 37417 - protein, 978 aa, synthetic construct
  REGION 1..978: note = engineered CasX variant
QEIKRINKIRRRLVKDSNTKKAGKTGPMKTLLVRVMTPDLRERLENLRKKPENIPQPISNTSRANLNKLLTDYTEMKKAILHVYWEEFQKDPVGLMSRVAQPASKKIDQNKLKPEMDEKGNLTTAGFACSQCGQPLFVYKLEQVSEKGKAYTNYFGRCNVAEHEKLILLAQLKPEKDSDEAVTYSLGKFGQRALDFYSIHVTKESTHPVKPLAQIAGNRYASYPVGKALSDACMGTIASFLSKYQDIIIEHQKVVKGNQKRLESLRELAGKENLEYPSVTLPPQPHTKEGVDAYNEVIARVRMWVNLNLWQKLKLSRDDAKPLLRLKGFPSFPLVERQANEVDWWDMVCNVKKLINEKKEDGKVFWQNLAGYKRQEALRPYLSSEEDRKKGKKFARYQLGDLLLHLEKKHGEDWGKVYDEAWERIDKKVEGLSKHIKLEEERRSEDAQSKAALTDWLRAKASFVIEGLKEADKDEFCRCDLKLQKWYGDLRGKPFAIEAENSILDISGFSKQYNCAFIWQKDGVKKLNLYLIINYFKGGKLRFKKIKPEAFEANRFYTVINKKSGEIVPMEVNFNFDDPNLIILPLAFGKRQGREFIWNDLLSLETGSLQLANGRVIEKTLYNRRTRQDEPALFVALTFERREVLDSSNIKPMNLIGVDRGENIPAVIALTDPEGCPLSRFKDSLGNPTHILRIGESYKEKQRTIQAKKEVEQRRAGGYSRKYASKAKNLADDMVRNTARDLLYYAVTQDAMLIFENLSRGFGRQGKRTFMAERQYTRMEDWLTAKLAYEGLPSKTYLSKTLAQYTSKTCSNCGFTITSADYDRVLEKLKKTATGWMTTINGKELKVEGQITYYNRYKRQNVVKDLSVELDRLSEESVNNDISSWTKGRSGEALSLLKKRFSHRPVQEKFVCLNCGFETHADEQAALNIARSWLFLRSQEYKKYQTNKTTGNTDKRAFVETWQSFYRKKLKEVWKPAV

SEQ ID NO: 37418 - protein, 978 aa, synthetic construct
  REGION 1..978: note = engineered CasX variant
QEIKRINKIRRRLVKDSNTKKAGKTGPMKTLLVRVMTPDLRERLENLRKKPENIPQPISNTSRANLNKLLTDYTEMKKAILHVYWEEFQKDPVGLMSRVAQPASKKIDQNKLKPEMDEKGNLTTAGFACSQCGQPLFVYKLEQVSEKGKAYTNYFGRCNVAEHEKLILLAQLKPEKDSDEAVTYSLGKFGQRALDFYSIHVTKESTHPVKPLAQIAGNRYASHPVGKALSDACMGTIASFLSKYQDIIIEHQKVVKGNQKRLESLRELAGKENLEYPSVTLPPQPHTKEGVDAYNEVIARVRMWVNLNLWQKLKLSRDDAKPLLRLKGFPSFPLVERQANEVDWWDMVCNVKKLINEKKEDGKVFWQNLAGYKRQEALRPYLSSEEDRKKGKKFARYQLGDLLLHLEKKHGEDWGKVYDEAWERIDKKVEGLSKHIKLEEERRSEDAQSKAALTDWLRAKASFVIEGLKEADKDEFCRCDLKLQKWYGDLRGKPFAIEAENSILDISGFSKQYNCAFIWQKDGVKKLNLYLIINYFKGGKLRFKKIKPEAFEANRFYTVINKKSGEIVPMEVNFNFDDPNLIILPLAFGKRQGREFIWNDLLSLETGSLQLANGRVIEKTLYNRRTRQDEPALFVALTFERREVLDSSNIKPMNLIGVDRGENIPAVIALTDPEGCPLSRFKDSLGNPTHILRIGESYKEKQRTIQAKKEVEQRRAGGYSRKYASKAKNLADDMVRNTARDLLYYAVTQDAMLIFENLSRGFGRQGKRTFMAERQYTRMEDWLTAKLAYEGLPSKTYLSKTLAQYTSKTCSNCGFTITSADYDRVLEKLKKTATGWMTTINGKELKVEGQITYYNRYKRQNVVKDLSVELDRLSEESVNNDISSWTKGRSGEALSLLKKRFSHRPVQEKFVCLNCGFETHADEQAALNIARSWLFLRSQEYKKYQTNKTTGNTDKRAFVETWQSFYRKKLKEVWKPAV

SEQ ID NO: 37419 - protein, 978 aa, synthetic construct
  REGION 1..978: note = engineered CasX variant
QEIKRINKIRRRLVKDSNTKKAGKTGPMKTLLVRVMTPDLRERLENLRKKPENIPQPISNTSRANLNKLLTDYTEMKKAILHVYWEEFQKDPVGLMSRVAQPASKKIDQNKLKPEMDEKGNLTTAGFACSQCGQPLFVYKLEQVSEKGKAYTNYFGRCNVAEHEKLILLAQLKPEKDSDEAVTYSLGKFGQRALDFYSIHVTKESTHPVKPLAQIAGNRYASSPVGKALSDACMGTIASFLSKYQDIIIEHQKVVKGNQKRLESLRELAGKENLEYPSVTLPPQPHTKEGVDAYNEVIARVRMWVNLNLWQKLKLSRDDAKPLLRLKGFPSFPLVERQANEVDWWDMVCNVKKLINEKKEDGKVFWQNLAGYKRQEALRPYLSSEEDRKKGKKFARYQLGDLLLHLEKKHGEDWGKVYDEAWERIDKKVEGLSKHIKLEEERRSEDAQSKAALTDWLRAKASFVIEGLKEADKDEFCRCDLKLQKWYGDLRGKPFAIEAENSILDISGFSKQYNCAFIWQKDGVKKLNLYLIINYFKGGKLRFKKIKPEAFEANRFYTVINKKSGEIVPMEVNFNFDDPNLIILPLAFGKRQGREFIWNDLLSLETGSLQLANGRVIEKTLYNRRTRQDEPALFVALTFERREVLDSSNIKPMNLIGVDRGENIPAVIALTDPEGCPLSRFKDSLGNPTHILRIGESYKEKQRTIQAKKEVEQRRAGGYSRKYASKAKNLADDMVRNTARDLLYYAVTQDAMLIFENLSRGFGRQGKRTFMAERQYTRMEDWLTAKLAYEGLPSKTYLSKTLAQYTSKTCSNCGFTITSADYDRVLEKLKKTATGWMTTINGKELKVEGQITYYNRYKRQNVVKDLSVELDRLSEESVNNDISSWTKGRSGEALSLLKKRFSHRPVQEKFVCLNCGFETHADEQAALNIARSWLFLRSQEYKKYQTNKTTGNTDKRAFVETWQSFYRKKLKEVWKPAV

SEQ ID NO: 37420 - protein, 978 aa, synthetic construct
  REGION 1..978: note = engineered CasX variant
QEIKRINKIRRRLVKDSNTKKAGKTGPMKTLLVRVMTPDLRERLENLRKKPENIPQPISNTSRANLNKLLTDYTEMKKAILHVYWEEFQKDPVGLMSRVAQPASKKIDQNKLKPEMDEKGNLTTAGFACSQCGQPLFVYKLEQVSEKGKAYTNYFGRCNVAEHEKLILLAQLKPEKDSDEAVTYSLGKFGQRALDFYSIHVTKESTHPVKPLAQIAGNRYASTPVGKALSDACMGTIASFLSKYQDIIIEHQKVVKGNQKRLESLRELAGKENLEYPSVTLPPQPHTKEGVDAYNEVIARVRMWVNLNLWQKLKLSRDDAKPLLRLKGFPSFPLVERQANEVDWWDMVCNVKKLINEKKEDGKVFWQNLAGYKRQEALRPYLSSEEDRKKGKKFARYQLGDLLLHLEKKHGEDWGKVYDEAWERIDKKVEGLSKHIKLEEERRSEDAQSKAALTDWLRAKASFVIEGLKEADKDEFCRCDLKLQKWYGDLRGKPFAIEAENSILDISGFSKQYNCAFIWQKDGVKKLNLYLIINYFKGGKLRFKKIKPEAFEANRFYTVINKKSGEIVPMEVNFNFDDPNLIILPLAFGKRQGREFIWNDLLSLETGSLQLANGRVIEKTLYNRRTRQDEPALFVALTFERREVLDSSNIKPMNLIGVDRGENIPAVIALTDPEGCPLSRFKDSLGNPTHILRIGESYKEKQRTIQAKKEVEQRRAGGYSRKYASKAKNLADDMVRNTARDLLYYAVTQDAMLIFENLSRGFGRQGKRTFMAERQYTRMEDWLTAKLAYEGLPSKTYLSKTLAQYTSKTCSNCGFTITSADYDRVLEKLKKTATGWMTTINGKELKVEGQITYYNRYKRQNVVKDLSVELDRLSEESVNNDISSWTKGRSGEALSLLKKRFSHRPVQEKFVCLNCGFETHADEQAALNIARSWLFLRSQEYKKYQTNKTTGNTDKRAFVETWQSFYRKKLKEVWKPAV

SEQ ID NO: 37421 - protein, 978 aa, synthetic construct
  REGION 1..978: note = engineered CasX variant
QEIKRINKIRRRLVKDSNTKKAGKTGPMKTLLVRVMTPDLRERLENLRKKPENIPQPISNTSRANLNKLLTDYTEMKKAILHVYWEEFQKDPVGLMSRVAQPASKKIDQNKLKPEMDEKGNLTTAGFACSQCGQPLFVYKLEQVSEKGKAYTNYFGRCNVAEHEKLILLAQLKPEKDSDEAVTYSLGKFGQRALDFYSIHVTKESTHPVKPLAQIAGNRYASAPVGKALSDACMGTIASFLSKYQDIIIEHQKVVKGNQKRLESLRELAGKENLEYPSVTLPPQPHTKEGVDAYNEVIARVRMWVNLNLWQKLKLSRDDAKPLLRLKGFPSFPLVERQANEVDWWDMVCNVKKLINEKKEDGKVFWQNLAGYKRQEALRPYLSSEEDRKKGKKFARYQLGDLLLHLEKKHGEDWGKVYDEAWERIDKKVEGLSKHIKLEEERRSEDAQSKAALTDWLRAKASFVIEGLKEADKDEFCRCDLKLQKWYGDLRGKPFAIEAENSILDISGFSKQYNCAFIWQKDGVKKLNLYLIINYFKGGKLRFKKIKPEAFEANRFYTVINKKSGEIVPMEVNFNFDDPNLIILPLAFGKRQGREFIWNDLLSLETGSLQLANGRVIEKTLYNRRTRQDEPALFVALTFERREVLDSSNIKPMNLIGVDRGENIPAVIALTDPEGCPLSRFKDSLGNPTHILRIGESYKEKQRTIQAKKEVEQRRAGGYSRKYASKAKNLADDMVRNTARDLLYYAVTQDAMLIFENLSRGFGRQGKRTFMAERQYTRMEDWLTAKLAYEGLPSKTYLSKTLAQYTSKTCSNCGFTITSADYDRVLEKLKKTATGWMTTINGKELKVEGQITYYNRYKRQNVVKDLSVELDRLSEESVNNDISSWTKGRSGEALSLLKKRFSHRPVQEKFVCLNCGFETHADEQAALNIARSWLFLRSQEYKKYQTNKTTGNTDKRAFVETWQSFYRKKLKEVWKPAV

SEQ ID NO: 37422 - protein, 978 aa, synthetic construct
  REGION 1..978: note = engineered CasX variant
QEIKRINKIRRRLVKDSNTKKAGKTGPMKTLLVRVMTPDLRERLENLRKKPENIPQPISNTSRANLNKLLTDYTEMKKAILHVYWEEFQKDPVGLMSRVAQPASKKIDQNKLKPEMDEKGNLTTAGFACSQCGQPLFVYKLEQVSEKGKAYTNYFGRCNVAEHEKLILLAQLKPEKDSDEAVTYSLGKFGQRALDFYSIHVTKESTHPVKPLAQIAGNRYASVPVGKALSDACMGTIASFLSKYQDIIIEHQKVVKGNQKRLESLRELAGKENLEYPSVTLPPQPHTKEGVDAYNEVIARVRMWVNLNLWQKLKLSRDDAKPLLRLKGFPSFPLVERQANEVDWWDMVCNVKKLINEKKEDGKVFWQNLAGYKRQEALRPYLSSEEDRKKGKKFARYQLGDLLLHLEKKHGEDWGKVYDEAWERIDKKVEGLSKHIKLEEERRSEDAQSKAALTDWLRAKASFVIEGLKEADKDEFCRCDLKLQKWYGDLRGKPFAIEAENSILDISGFSKQYNCAFIWQKDGVKKLNLYLIINYFKGGKLRFKKIKPEAFEANRFYTVINKKSGEIVPMEVNFNFDDPNLIILPLAFGKRQGREFIWNDLLSLETGSLQLANGRVIEKTLYNRRTRQDEPALFVALTFERREVLDSSNIKPMNLIGVDRGENIPAVIALTDPEGCPLSRFKDSLGNPTHILRIGESYKEKQRTIQAKKEVEQRRAGGYSRKYASKAKNLADDMVRNTARDLLYYAVTQDAMLIFENLSRGFGRQGKRTFMAERQYTRMEDWLTAKLAYEGLPSKTYLSKTLAQYTSKTCSNCGFTITSADYDRVLEKLKKTATGWMTTINGKELKVEGQITYYNRYKRQNVVKDLSVELDRLSEESVNNDISSWTKGRSGEALSLLKKRFSHRPVQEKFVCLNCGFETHADEQAALNIARSWLFLRSQEYKKYQTNKTTGNTDKRAFVETWQSFYRKKLKEVWKPAV

SEQ ID NO: 37423 - protein, 978 aa, synthetic construct
  REGION 1..978: note = engineered CasX variant
QEIKRINKIRRRLVKDSNTKKAGKTGPMKTLLVRVMTPDLRERLENLRKKPENIPQPISNTSRANLNKLLTDYTEMKKAILHVYWEEFQKDPVGLMSRVAQPASKKIDQNKLKPEMDEKGNLTTAGFACSQCGQPLFVYKLEQVSEKGKAYTNYFGRCNVAEHEKLIKLAQLKPEKDSDEAVTYSLGKFGQRALDFYSIHVTKESTHPVKPLAQIAGNRYASGPVGKALSDACMGTIASFLSKYQDIIIEHQKVVKGNQKRLESLRELAGKENLEYPSVTLPPQPHTKEGVDAYNEVIARVRMWVNLNLWQKLKLSRDDAKPLLRLKGFPSFPLVERQANEVDWWDMVCNVKKLINEKKEDGKVFWQNLAGYKRQEALRPYLSSEEDRKKGKKFARYQLGDLLLHLEKKHGEDWGKVYDEAWERIDKKVEGLSKHIKLEEERRSEDAQSKAALTDWLRAKASFVIEGLKEADKDEFCRCDLKLQKWYGDLRGKPFAIEAENSILDISGFSKQYNCAFIWQKDGVKKLNLYLIINYFKGGKLRFKKIKPEAFEANRFYTVINKKSGEIVPMEVNFNFDDPNLIILPLAFGKRQGREFIWNDLLSLETGSLQLANGRVIEKTLYNRRTRQDEPALFVALTFERREVLDSSNIKPMNLIGVDRGENIPAVIALTDPEGCPLSRFKDSLGNPTHILRIGESYKEKQRTIQAKKEVEQRRAGGYSRKYASKAKNLADDMVRNTARDLLYYAVTQDAMLIFENLSRGFGRQGKRTFMAERQYTRMEDWLTAKLAYEGLPSKTYLSKTLAQYTSKTCSNCGFTITSADYDRVLEKLKKTATGWMTTINGKELKVEGQITYYNRYKRQNVVKDLSVELDRLSEESVNNDISSWTKGRSGEALSLLKKRFSHRPVQEKFVCLNCGFETHADEQAALNIARSWLFLRSQEYKKYQTNKTTGNTDKRAFVETWQSFYRKKLKEVWKPAV

SEQ ID NO: 37424 - protein, 977 aa, synthetic construct
  REGION 1..977: note = engineered CasX variant
QEIKRINKIRRRLVKDSNTKKAGKTGPMKTLLVRVMTPDLRERLENLRKKPENIPQPISNTSRANLNKLLTDYTEMKKAILHVYWEEFQKDPVGLMSRVAQPASKKIDQNKLKPEMDEKGNLTTAGFACSQCGQPLFVYKLEQVSEKGKAYTNYFGRCNVAEHEKLILLAQLKPEKDSDEAVTYSLGKFGQRALDFYSIHVTKESTHPVKPLAQIAGNRYASPVGKALSDACMGTIASFLSKYQDIIIEHQKVVKGNQKRLESLRELAGKENLEYPSVTLPPQPHTKEGVDAYNEVIARVRMWVNLNLWQKLKLSRDDAKPLLRLKGFPSFPLVERQANEVDWWDMVCNVKKLINEKKEDGKVFWQNLAGYKRQEALRPYLSSEEDRKKGKKFARYQLGDLLLHLEKKHGEDWGKVYDEAWERIDKKVEGLSKHIKLEEERRSEDAQSKAALTDWLRAKASFVIEGLKEADKDEFCRCDLKLQKWYGDLRGKPFAIEAENSILDISGFSKQYNCAFIWQKDGVKKLNLYLIINYFKGGKLRFKKIKPEAFEANRFYTVINKKSGEIVPMEVNFNFDDPNLIILPLAFGKRQGREFIWNDLLSLETGSLQLANGRVIEKTLYNRRTRQDEPALFVALTFERREVLDSSNIKPMNLIGVDRGENIPAVIALTDPEGCPLSRFKDSLGNPTHILRIGESYKEKQRTIQAKKEVEQRRAGGYSRKYASKAKNLADDMVRNTARDLLYYAVTQDAMLIFENLSRGFGRQGKRTFMAERQYTRMEDWLTAKLAYEGLPSKTYLSKTLAQYTSKTCSNCGFTITSADYDRVLEKLKKTATGWMTTINGKELKVEGQITYYNRYKRQNVVKDLSVELDRLSEESVNNDISSWTKGRSGEALSLLKKRFSHRPVQEKFVCLNCGFETHADEQAALNIARSWLFLRSQEYKKYQTNKTTGNTDKRAFVETWQSFYRKKLKEVWKPAV

SEQ ID NO: 37425 - protein, 979 aa, synthetic construct
  REGION 1..979: note = engineered CasX variant
QEIKRINKIRRRLVKDSNTKKAGKTGPMKTLLVRVMTPDLRERLENLRKKPENIPQPISNTSRANLNKLLTDYTEMKKAILHVYWEEFQKDPVGLMSRVAQPASKKIDQNKLKPEMDEKGNLTTAGFACSQCGQPLFVYKLEQVSEKGKAYTNYFGRCNVAEHEKLILLAQLKPEKDSDEAVTYSLGKFGQRALDFYSIHVTKESTHPVKPLAQIAGNRYASYPVGKALSDACMGTIASFLSKYQDIIIEHQKVVKGNQKRLESLRELAGKENLEYPSVTLPPQPHTKEGVDAYNEVIARVRMWVNLNLWQKLKLSRDDAKPLLRLKGFPSFPLVERQANEVDWWDMVCNVKKLINEKKEDGKVFWQNLAGYKRQEALRPYLSSEEDRKKGKKFARYQLGDLLLHLEKKHGEDWGKVYDEAWERIDKKVEGLSKHIKLEEERRSEDAQSKAALTDWLRAKASFVIEGLKEADKDEFCRCELKLQKWYGDLRGKPFAIEAENSILDISGFSKQYNCAFIWQKDGVKKLNLYLIINYFKGGKLRFKKIKPEAFEANRFYTVINKKSGEIVPMEVNFNFDDPNLIILPLAFGKRFVGREFIWNDLLSLETGSLKLANGRVIEKTLYNRRTRQDEPALFVALTFERREVLDSSNIKPMNLIGVDRGENIPAVIALTDPEGCPLSRFKDSLGNPTHILRIGESYKEKQRTIQAKKEVEQRRAGGYSRKYASKAKNLADDMVRNTARDLLYYAVTQDAMLIFENLSRGFGRQGKRTFMAERQYTRMEDWLTAKLAYEGLPSKTYLSKTLAQYTSKTCSNCGFTITSADYDRVLEKLKKTATGWMTTINGKELKVEGQITYYNRYKRQNVVKDLSVELDRLSEESVNNDISSWTKGRSGEALSLLKKRFSHRPVQEKFVCLNCGFETHADEQAALNIARSWLFLRSQEYKKYQTNKTTGNTDKRAFVETWQSFYRKKLKEVWKPAV

SEQ ID NO: 37426 - protein, 979 aa, synthetic construct
  REGION 1..979: note = engineered CasX variant
QEIKRINKIRRRLVKDSNTKKAGKTGPMKTLLVRVMTPDLRERLENLRKKPENIPQPISNTSRANLNKLLTDYTEMKKAILHVYWEEFQKDPVGLMSRVAQPASKKIDQNKLKPEMDEKGNLTTAGFACSQCGQPLFVYKLEQVSEKGKAYTNYFGRCNVAEHEKLILLAQLKPEKDSDEAVTYSLGKFGQRALDFYSIHVTKESTHPVKPLAQIAGNRYASHPVGKALSDACMGTIASFLSKYQDIIIEHQKVVKGNQKRLESLRELAGKENLEYPSVTLPPQPHTKEGVDAYNEVIARVRMWVNLNLWQKLKLSRDDAKPLLRLKGFPSFPLVERQANEVDWWDMVCNVKKLINEKKEDGKVFWQNLAGYKRQEALRPYLSSEEDRKKGKKFARYQLGDLLLHLEKKHGEDWGKVYDEAWERIDKKVEGLSKHIKLEEERRSEDAQSKAALTDWLRAKASFVIEGLKEADKDEFCRCELKLQKWYGDLRGKPFAIEAENSILDISGFSKQYNCAFIWQKDGVKKLNLYLIINYFKGGKLRFKKIKPEAFEANRFYTVINKKSGEIVPMEVNFNFDDPNLIILPLAFGKRFVGREFIWNDLLSLETGSLKLANGRVIEKTLYNRRTRQDEPALFVALTFERREVLDSSNIKPMNLIGVDRGENIPAVIALTDPEGCPLSRFKDSLGNPTHILRIGESYKEKQRTIQAKKEVEQRRAGGYSRKYASKAKNLADDMVRNTARDLLYYAVTQDAMLIFENLSRGFGRQGKRTFMAERQYTRMEDWLTAKLAYEGLPSKTYLSKTLAQYTSKTCSNCGFTITSADYDRVLEKLKKTATGWMTTINGKELKVEGQITYYNRYKRQNVVKDLSVELDRLSEESVNNDISSWTKGRSGEALSLLKKRFSHRPVQEKFVCLNCGFETHADEQAALNIARSWLFLRSQEYKKYQTNKTTGNTDKRAFVETWQSFYRKKLKEVWKPAV

SEQ ID NO: 37427 - protein, 979 aa, synthetic construct
  REGION 1..979: note = engineered CasX variant
QEIKRINKIRRRLVKDSNTKKAGKTGPMKTLLVRVMTPDLRERLENLRKKPENIPQPISNTSRANLNKLLTDYTEMKKAILHVYWEEFQKDPVGLMSRVAQPASKKIDQNKLKPEMDEKGNLTTAGFACSQCGQPLFVYKLEQVSEKGKAYTNYFGRCNVAEHEKLILLAQLKPEKDSDEAVTYSLGKFGQRALDFYSIHVTKESTHPVKPLAQIAGNRYASSPVGKALSDACMGTIASFLSKYQDIIIEHQKVVKGNQKRLESLRELAGKENLEYPSVTLPPQPHTKEGVDAYNEVIARVRMWVNLNLWQKLKLSRDDAKPLLRLKGFPSFPLVERQANEVDWWDMVCNVKKLINEKKEDGKVFWQNLAGYKRQEALRPYLSSEEDRKKGKKFARYQLGDLLLHLEKKHGEDWGKVYDEAWERIDKKVEGLSKHIKLEEERRSEDAQSKAALTDWLRAKASFVIEGLKEADKDEFCRCELKLQKWYGDLRGKPFAIEAENSILDISGFSKQYNCAFIWQKDGVKKLNLYLIINYFKGGKLRFKKIKPEAFEANRFYTVINKKSGEIVPMEVNFNFDDPNLIILPLAFGKRFVGREFIWNDLLSLETGSLKLANGRVIEKTLYNRRTRQDEPALFVALTFERREVLDSSNIKPMNLIGVDRGENIPAVIALTDPEGCPLSRFKDSLGNPTHILRIGESYKEKQRTIQAKKEVEQRRAGGYSRKYASKAKNLADDMVRNTARDLLYYAVTQDAMLIFENLSRGFGRQGKRTFMAERQYTRMEDWLTAKLAYEGLPSKTYLSKTLAQYTSKTCSNCGFTITSADYDRVLEKLKKTATGWMTTINGKELKVEGQITYYNRYKRQNVVKDLSVELDRLSEESVNNDISSWTKGRSGEALSLLKKRFSHRPVQEKFVCLNCGFETHADEQAALNIARSWLFLRSQEYKKYQTNKTTGNTDKRAFVETWQSFYRKKLKEVWKPAV

SEQ ID NO: 37428 - protein, 979 aa, synthetic construct
  REGION 1..979: note = engineered CasX variant
QEIKRINKIRRRLVKDSNTKKAGKTGPMKTLLVRVMTPDLRERLENLRKKPENIPQPISNTSRANLNKLLTDYTEMKKAILHVYWEEFQKDPVGLMSRVAQPASKKIDQNKLKPEMDEKGNLTTAGFACSQCGQPLFVYKLEQVSEKGKAYTNYFGRCNVAEHEKLILLAQLKPEKDSDEAVTYSLGKFGQRALDFYSIHVTKESTHPVKPLAQIAGNRYASTPVGKALSDACMGTIASFLSKYQDIIIEHQKVVKGNQKRLESLRELAGKENLEYPSVTLPPQPHTKEGVDAYNEVIARVRMWVNLNLWQKLKLSRDDAKPLLRLKGFPSFPLVERQANEVDWWDMVCNVKKLINEKKEDGKVFWQNLAGYKRQEALRPYLSSEEDRKKGKKFARYQLGDLLLHLEKKHGEDWGKVYDEAWERIDKKVEGLSKHIKLEEERRSEDAQSKAALTDWLRAKASFVIEGLKEADKDEFCRCELKLQKWYGDLRGKPFAIEAENSILDISGFSKQYNCAFIWQKDGVKKLNLYLIINYFKGGKLRFKKIKPEAFEANRFYTVINKKSGEIVPMEVNFNFDDPNLIILPLAFGKRFVGREFIWNDLLSLETGSLKLANGRVIEKTLYNRRTRQDEPALFVALTFERREVLDSSNIKPMNLIGVDRGENIPAVIALTDPEGCPLSRFKDSLGNPTHILRIGESYKEKQRTIQAKKEVEQRRAGGYSRKYASKAKNLADDMVRNTARDLLYYAVTQDAMLIFENLSRGFGRQGKRTFMAERQYTRMEDWLTAKLAYEGLPSKTYLSKTLAQYTSKTCSNCGFTITSADYDRVLEKLKKTATGWMTTINGKELKVEGQITYYNRYKRQNVVKDLSVELDRLSEESVNNDISSWTKGRSGEALSLLKKRFSHRPVQEKFVCLNCGFETHADEQAALNIARSWLFLRSQEYKKYQTNKTTGNTDKRAFVETWQSFYRKKLKEVWKPAV

SEQ ID NO: 37429 - protein, 979 aa, synthetic construct
  REGION 1..979: note = engineered CasX variant
QEIKRINKIRRRLVKDSNTKKAGKTGPMKTLLVRVMTPDLRERLENLRKKPENIPQPISNTSRANLNKLLTDYTEMKKAILHVYWEEFQKDPVGLMSRVAQPASKKIDQNKLKPEMDEKGNLTTAGFACSQCGQPLFVYKLEQVSEKGKAYTNYFGRCNVAEHEKLILLAQLKPEKDSDEAVTYSLGKFGQRALDFYSIHVTKESTHPVKPLAQIAGNRYASAPVGKALSDACMGTIASFLSKYQDIIIEHQKVVKGNQKRLESLRELAGKENLEYPSVTLPPQPHTKEGVDAYNEVIARVRMWVNLNLWQKLKLSRDDAKPLLRLKGFPSFPLVERQANEVDWWDMVCNVKKLINEKKEDGKVFWQNLAGYKRQEALRPYLSSEEDRKKGKKFARYQLGDLLLHLEKKHGEDWGKVYDEAWERIDKKVEGLSKHIKLEEERRSEDAQSKAALTDWLRAKASFVIEGLKEADKDEFCRCELKLQKWYGDLRGKPFAIEAENSILDISGFSKQYNCAFIWQKDGVKKLNLYLIINYFKGGKLRFKKIKPEAFEANRFYTVINKKSGEIVPMEVNFNFDDPNLIILPLAFGKRFVGREFIWNDLLSLETGSLKLANGRVIEKTLYNRRTRQDEPALFVALTFERREVLDSSNIKPMNLIGVDRGENIPAVIALTDPEGCPLSRFKDSLGNPTHILRIGESYKEKQRTIQAKKEVEQRRAGGYSRKYASKAKNLADDMVRNTARDLLYYAVTQDAMLIFENLSRGFGRQGKRTFMAERQYTRMEDWLTAKLAYEGLPSKTYLSKTLAQYTSKTCSNCGFTITSADYDRVLEKLKKTATGWMTTINGKELKVEGQITYYNRYKRQNVVKDLSVELDRLSEESVNNDISSWTKGRSGEALSLLKKRFSHRPVQEKFVCLNCGFETHADEQAALNIARSWLFLRSQEYKKYQTNKTTGNTDKRAFVETWQSFYRKKLKEVWKPAV

SEQ ID NO: 37430 - protein, 979 aa, synthetic construct
  REGION 1..979: note = engineered CasX variant
QEIKRINKIRRRLVKDSNTKKAGKTGPMKTLLVRVMTPDLRERLENLRKKPENIPQPISNTSRANLNKLLTDYTEMKKAILHVYWEEFQKDPVGLMSRVAQPASKKIDQNKLKPEMDEKGNLTTAGFACSQCGQPLFVYKLEQVSEKGKAYTNYFGRCNVAEHEKLILLAQLKPEKDSDEAVTYSLGKFGQRALDFYSIHVTKESTHPVKPLAQIAGNRYASVPVGKALSDACMGTIASFLSKYQDIIIEHQKVVKGNQKRLESLRELAGKENLEYPSVTLPPQPHTKEGVDAYNEVIARVRMWVNLNLWQKLKLSRDDAKPLLRLKGFPSFPLVERQANEVDWWDMVCNVKKLINEKKEDGKVFWQNLAGYKRQEALRPYLSSEEDRKKGKKFARYQLGDLLLHLEKKHGEDWGKVYDEAWERIDKKVEGLSKHIKLEEERRSEDAQSKAALTDWLRAKASFVIEGLKEADKDEFCRCELKLQKWYGDLRGKPFAIEAENSILDISGFSKQYNCAFIWQKDGVKKLNLYLIINYFKGGKLRFKKIKPEAFEANRFYTVINKKSGEIVPMEVNFNFDDPNLIILPLAFGKRFVGREFIWNDLLSLETGSLKLANGRVIEKTLYNRRTRQDEPALFVALTFERREVLDSSNIKPMNLIGVDRGENIPAVIALTDPEGCPLSRFKDSLGNPTHILRIGESYKEKQRTIQAKKEVEQRRAGGYSRKYASKAKNLADDMVRNTARDLLYYAVTQDAMLIFENLSRGFGRQGKRTFMAERQYTRMEDWLTAKLAYEGLPSKTYLSKTLAQYTSKTCSNCGFTITSADYDRVLEKLKKTATGWMTTINGKELKVEGQITYYNRYKRQNVVKDLSVELDRLSEESVNNDISSWTKGRSGEALSLLKKRFSHRPVQEKFVCLNCGFETHADEQAALNIARSWLFLRSQEYKKYQTNKTTGNTDKRAFVETWQSFYRKKLKEVWKPAV

SEQ ID NO: 37431 - protein, 979 aa, synthetic construct
  REGION 1..979: note = engineered CasX variant
QEIKRINKIRRRLVKDSNTKKAGKTGPMKTLLVRVMTPDLRERLENLRKKPENIPQPISNTSRANLNKLLTDYTEMKKAILHVYWEEFQKDPVGLMSRVAQPASKKIDQNKLKPEMDEKGNLTTAGFACSQCGQPLFVYKLEQVSEKGKAYTNYFGRCNVAEHEKLIKLAQLKPEKDSDEAVTYSLGKFGQRALDFYSIHVTKESTHPVKPLAQIAGNRYASGPVGKALSDACMGTIASFLSKYQDIIIEHQKVVKGNQKRLESLRELAGKENLEYPSVTLPPQPHTKEGVDAYNEVIARVRMWVNLNLWQKLKLSRDDAKPLLRLKGFPSFPLVERQANEVDWWDMVCNVKKLINEKKEDGKVFWQNLAGYKRQEALRPYLSSEEDRKKGKKFARYQLGDLLLHLEKKHGEDWGKVYDEAWERIDKKVEGLSKHIKLEEERRSEDAQSKAALTDWLRAKASFVIEGLKEADKDEFCRCELKLQKWYGDLRGKPFAIEAENSILDISGFSKQYNCAFIWQKDGVKKLNLYLIINYFKGGKLRFKKIKPEAFEANRFYTVINKKSGEIVPMEVNFNFDDPNLIILPLAFGKRFVGREFIWNDLLSLETGSLKLANGRVIEKTLYNRRTRQDEPALFVALTFERREVLDSSNIKPMNLIGVDRGENIPAVIALTDPEGCPLSRFKDSLGNPTHILRIGESYKEKQRTIQAKKEVEQRRAGGYSRKYASKAKNLADDMVRNTARDLLYYAVTQDAMLIFENLSRGFGRQGKRTFMAERQYTRMEDWLTAKLAYEGLPSKTYLSKTLAQYTSKTCSNCGFTITSADYDRVLEKLKKTATGWMTTINGKELKVEGQITYYNRYKRQNVVKDLSVELDRLSEESVNNDISSWTKGRSGEALSLLKKRFSHRPVQEKFVCLNCGFETHADEQAALNIARSWLFLRSQEYKKYQTNKTTGNTDKRAFVETWQSFYRKKLKEVWKPAV

SEQ ID NO: 37432 - protein, 978 aa, synthetic construct
  REGION 1..978: note = engineered CasX variant
QEIKRINKIRRRLVKDSNTKKAGKTGPMKTLLVRVMTPDLRERLENLRKKPENIPQPISNTSRANLNKLLTDYTEMKKAILHVYWEEFQKDPVGLMSRVAQPASKKIDQNKLKPEMDEKGNLTTAGFACSQCGQPLFVYKLEQVSEKGKAYTNYFGRCNVAEHEKLILLAQLKPEKDSDEAVTYSLGKFGQRALDFYSIHVTKESTHPVKPLAQIAGNRYASPVGKALSDACMGTIASFLSKYQDIIIEHQKVVKGNQKRLESLRELAGKENLEYPSVTLPPQPHTKEGVDAYNEVIARVRMWVNLNLWQKLKLSRDDAKPLLRLKGFPSFPLVERQANEVDWWDMVCNVKKLINEKKEDGKVFWQNLAGYKRQEALRPYLSSEEDRKKGKKFARYQLGDLLLHLEKKHGEDWGKVYDEAWERIDKKVEGLSKHIKLEEERRSEDAQSKAALTDWLRAKASFVIEGLKEADKDEFCRCELKLQKWYGDLRGKPFAIEAENSILDISGFSKQYNCAFIWQKDGVKKLNLYLIINYFKGGKLRFKKIKPEAFEANRFYTVINKKSGEIVPMEVNFNFDDPNLIILPLAFGKRFVGREFIWNDLLSLETGSLKLANGRVIEKTLYNRRTRQDEPALFVALTFERREVLDSSNIKPMNLIGVDRGENIPAVIALTDPEGCPLSRFKDSLGNPTHILRIGESYKEKQRTIQAKKEVEQRRAGGYSRKYASKAKNLADDMVRNTARDLLYYAVTQDAMLIFENLSRGFGRQGKRTFMAERQYTRMEDWLTAKLAYEGLPSKTYLSKTLAQYTSKTCSNCGFTITSADYDRVLEKLKKTATGWMTTINGKELKVEGQITYYNRYKRQNVVKDLSVELDRLSEESVNNDISSWTKGRSGEALSLLKKRFSHRPVQEKFVCLNCGFETHADEQAALNIARSWLFLRSQEYKKYQTNKTTGNTDKRAFVETWQSFYRKKLKEVWKPAV

SEQ ID NO: 37433 - protein, 979 aa, synthetic construct
  REGION 1..979: note = engineered CasX variant
QEIKRINKIRRRLVKDSNTKKAGKTGPMKTLLVRVMTPDLRERLENLRKKPENIPQPISNTSRANLNKLLTDYTEMKKAILHVYWEEFQKDPVGLMSRVAQPASKKIDQNKLKPEMDEKGNLTTAGFACSQCGQPLFVYKLEQVSEKGKAYTNYFGRCNVAEHEKLILLAQLKPEKDSDEAVTYSLGKFGQRALDFYSIHVTKESTHPVKPLAQIAGNRYASYPVGKALSDACMGTIASFLSKYQDIIIEHQKVVKGNQKRLESLRELAGKENLEYPSVTLPPQPHTKEGVDAYNEVIARVRMWVNLNLWQKLKLSRDDAKPLLRLKGFPSFPLVERQANEVDWWDMVCNVKKLINEKKEDGKVFWQNLAGYKRQEALRPYLSSEEDRKKGKKFARYQLGDLLLHLEKKHGEDWGKVYDEAWERIDKKVEGLSKHIKLEEERRSEDAQSKAALTDWLRAKASFVIEGLKEADKDEFCRCELKLQKWYGDLRGKPFAIEAENSILDISGFSKQYNCAFIWQKDGVKKLNLYLIINYFKGGKLRFKKIKPEAFEANRFYTVINKKSGEIVPMEVNFNFDDPNLIILPLAFGKRFGREFIWNDLLSLETGSLKLANGRVIEKTLYNRRTRQDEPALFVALTFERREVLDSSNIKTPMNLIGVDRGENIPAVIALTDPEGCPLSRFKDSLGNPTHILRIGESYKEKQRTIQAKKEVEQRRAGGYSRKYASKAKNLADDMVRNTARDLLYYAVTQDAMLIFENLSRGFGRQGKRTFMAERQYTRMEDWLTAKLAYEGLPSKTYLSKTLAQYTSKTCSNCGFTITSADYDRVLEKLKKTATGWMTTINGKELKVEGQITYYNRYKRQNVVKDLSVELDRLSEESVNNDISSWTKGRSGEALSLLKKRFSHRPVQEKFVCLNCGFETHADEQAALNIARSWLFLRSQEYKKYQTNKTTGNTDKRAFVETWQSFYRKKLKEVWKPAV

SEQ ID NO: 37434 - protein, 979 aa, synthetic construct
  REGION 1..979: note = engineered CasX variant
QEIKRINKIRRRLVKDSNTKKAGKTGPMKTLLVRVMTPDLRERLENLRKKPENIPQPISNTSRANLNKLLTDYTEMKKAILHVYWEEFQKDPVGLMSRVAQPASKKIDQNKLKPEMDEKGNLTTAGFACSQCGQPLFVYKLEQVSEKGKAYTNYFGRCNVAEHEKLILLAQLKPEKDSDEAVTYSLGKFGQRALDFYSIHVTKESTHPVKPLAQIAGNRYASHPVGKALSDACMGTIASFLSKYQDIIIEHQKVVKGNQKRLESLRELAGKENLEYPSVTLPPQPHTKEGVDAYNEVIARVRMWVNLNLWQKLKLSRDDAKPLLRLKGFPSFPLVERQANEVDWWDMVCNVKKLINEKKEDGKVFWQNLAGYKRQEALRPYLSSEEDRKKGKKFARYQLGDLLLHLEKKHGEDWGKVYDEAWERIDKKVEGLSKHIKLEEERRSEDAQSKAALTDWLRAKASFVIEGLKEADKDEFCRCELKLQKWYGDLRGKPFAIEAENSILDISGFSKQYNCAFIWQKDGVKKLNLYLIINYFKGGKLRFKKIKPEAFEANRFYTVINKKSGEIVPMEVNFNFDDPNLIILPLAFGKRFGREFIWNDLLSLETGSLKLANGRVIEKTLYNRRTRQDEPALFVALTFERREVLDSSNIKTPMNLIGVDRGENIPAVIALTDPEGCPLSRFKDSLGNPTHILRIGESYKEKQRTIQAKKEVEQRRAGGYSRKYASKAKNLADDMVRNTARDLLYYAVTQDAMLIFENLSRGFGRQGKRTFMAERQYTRMEDWLTAKLAYEGLPSKTYLSKTLAQYTSKTCSNCGFTITSADYDRVLEKLKKTATGWMTTINGKELKVEGQITYYNRYKRQNVVKDLSVELDRLSEESVNNDISSWTKGRSGEALSLLKKRFSHRPVQEKFVCLNCGFETHADEQAALNIARSWLFLRSQEYKKYQTNKTTGNTDKRAFVETWQSFYRKKLKEVWKPAV

SEQ ID NO: 37435 - protein, 979 aa, synthetic construct
  REGION 1..979: note = engineered CasX variant
QEIKRINKIRRRLVKDSNTKKAGKTGPMKTLLVRVMTPDLRERLENLRKKPENIPQPISNTSRANLNKLLTDYTEMKKAILHVYWEEFQKDPVGLMSRVAQPASKKIDQNKLKPEMDEKGNLTTAGFACSQCGQPLFVYKLEQVSEKGKAYTNYFGRCNVAEHEKLILLAQLKPEKDSDEAVTYSLGKFGQRALDFYSIHVTKESTHPVKPLAQIAGNRYASSPVGKALSDACMGTIASFLSKYQDIIIEHQKVVKGNQKRLESLRELAGKENLEYPSVTLPPQPHTKEGVDAYNEVIARVRMWVNLNLWQKLKLSRDDAKPLLRLKGFPSFPLVERQANEVDWWDMVCNVKKLINEKKEDGKVFWQNLAGYKRQEALRPYLSSEEDRKKGKKFARYQLGDLLLHLEKKHGEDWGKVYDEAWERIDKKVEGLSKHIKLEEERRSEDAQSKAALTDWLRAKASFVIEGLKEADKDEFCRCELKLQKWYGDLRGKPFAIEAENSILDISGFSKQYNCAFIWQKDGVKKLNLYLIINYFKGGKLRFKKIKPEAFEANRFYTVINKKSGEIVPMEVNFNFDDPNLIILPLAFGKRFGREFIWNDLLSLETGSLKLANGRVIEKTLYNRRTRQDEPALFVALTFERREVLDSSNIKTPMNLIGVDRGENIPAVIALTDPEGCPLSRFKDSLGNPTHILRIGESYKEKQRTIQAKKEVEQRRAGGYSRKYASKAKNLADDMVRNTARDLLYYAVTQDAMLIFENLSRGFGRQGKRTFMAERQYTRMEDWLTAKLAYEGLPSKTYLSKTLAQYTSKTCSNCGFTITSADYDRVLEKLKKTATGWMTTINGKELKVEGQITYYNRYKRQNVVKDLSVELDRLSEESVNNDISSWTKGRSGEALSLLKKRFSHRPVQEKFVCLNCGFETHADEQAALNIARSWLFLRSQEYKKYQTNKTTGNTDKRAFVETWQSFYRKKLKEVWKPAV

SEQ ID NO: 37436 - protein, 979 aa, synthetic construct
  REGION 1..979: note = engineered CasX variant
QEIKRINKIRRRLVKDSNTKKAGKTGPMKTLLVRVMTPDLRERLENLRKKPENIPQPISNTSRANLNKLLTDYTEMKKAILHVYWEEFQKDPVGLMSRVAQPASKKIDQNKLKPEMDEKGNLTTAGFACSQCGQPLFVYKLEQVSEKGKAYTNYFGRCNVAEHEKLILLAQLKPEKDSDEAVTYSLGKFGQRALDFYSIHVTKESTHPVKPLAQIAGNRYASTPVGKALSDACMGTIASFLSKYQDIIIEHQKVVKGNQKRLESLRELAGKENLEYPSVTLPPQPHTKEGVDAYNEVIARVRMWVNLNLWQKLKLSRDDAKPLLRLKGFPSFPLVERQANEVDWWDMVCNVKKLINEKKEDGKVFWQNLAGYKRQEALRPYLSSEEDRKKGKKFARYQLGDLLLHLEKKHGEDWGKVYDEAWERIDKKVEGLSKHIKLEEERRSEDAQSKAALTDWLRAKASFVIEGLKEADKDEFCRCELKLQKWYGDLRGKPFAIEAENSILDISGFSKQYNCAFIWQKDGVKKLNLYLIINYFKGGKLRFKKIKPEAFEANRFYTVINKKSGEIVPMEVNFNFDDPNLIILPLAFGKRFGREFIWNDLLSLETGSLKLANGRVIEKTLYNRRTRQDEPALFVALTFERREVLDSSNIKTPMNLIGVDRGENIPAVIALTDPEGCPLSRFKDSLGNPTHILRIGESYKEKQRTIQAKKEVEQRRAGGYSRKYASKAKNLADDMVRNTARDLLYYAVTQDAMLIFENLSRGFGRQGKRTFMAERQYTRMEDWLTAKLAYEGLPSKTYLSKTLAQYTSKTCSNCGFTITSADYDRVLEKLKKTATGWMTTINGKELKVEGQITYYNRYKRQNVVKDLSVELDRLSEESVNNDISSWTKGRSGEALSLLKKRFSHRPVQEKFVCLNCGFETHADEQAALNIARSWLFLRSQEYKKYQTNKTTGNTDKRAFVETWQSFYRKKLKEVWKPAV

SEQ ID NO: 37437 - protein, 979 aa, synthetic construct
  REGION 1..979: note = engineered CasX variant
QEIKRINKIRRRLVKDSNTKKAGKTGPMKTLLVRVMTPDLRERLENLRKKPENIPQPISNTSRANLNKLLTDYTEMKKAILHVYWEEFQKDPVGLMSRVAQPASKKIDQNKLKPEMDEKGNLTTAGFACSQCGQPLFVYKLEQVSEKGKAYTNYFGRCNVAEHEKLILLAQLKPEKDSDEAVTYSLGKFGQRALDFYSIHVTKESTHPVKPLAQIAGNRYASAPVGKALSDACMGTIASFLSKYQDIIIEHQKVVKGNQKRLESLRELAGKENLEYPSVTLPPQPHTKEGVDAYNEVIARVRMWVNLNLWQKLKLSRDDAKPLLRLKGFPSFPLVERQANEVDWWDMVCNVKKLINEKKEDGKVFWQNLAGYKRQEALRPYLSSEEDRKKGKKFARYQLGDLLLHLEKKHGEDWGKVYDEAWERIDKKVEGLSKHIKLEEERRSEDAQSKAALTDWLRAKASFVIEGLKEADKDEFCRCELKLQKWYGDLRGKPFAIEAENSILDISGFSKQYNCAFIWQKDGVKKLNLYLIINYFKGGKLRFKKIKPEAFEANRFYTVINKKSGEIVPMEVNFNFDDPNLIILPLAFGKRFGREFIWNDLLSLETGSLKLANGRVIEKTLYNRRTRQDEPALFVALTFERREVLDSSNIKTPMNLIGVDRGENIPAVIALTDPEGCPLSRFKDSLGNPTHILRIGESYKEKQRTIQAKKEVEQRRAGGYSRKYASKAKNLADDMVRNTARDLLYYAVTQDAMLIFENLSRGFGRQGKRTFMAERQYTRMEDWLTAKLAYEGLPSKTYLSKTLAQYTSKTCSNCGFTITSADYDRVLEKLKKTATGWMTTINGKELKVEGQITYYNRYKRQNVVKDLSVELDRLSEESVNNDISSWTKGRSGEALSLLKKRFSHRPVQEKFVCLNCGFETHADEQAALNIARSWLFLRSQEYKKYQTNKTTGNTDKRAFVETWQSFYRKKLKEVWKPAV

SEQ ID NO: 37438 - protein, 979 aa, synthetic construct
  REGION 1..979: note = engineered CasX variant
QEIKRINKIRRRLVKDSNTKKAGKTGPMKTLLVRVMTPDLRERLENLRKKPENIPQPISNTSRANLNKLLTDYTEMKKAILHVYWEEFQKDPVGLMSRVAQPASKKIDQNKLKPEMDEKGNLTTAGFACSQCGQPLFVYKLEQVSEKGKAYTNYFGRCNVAEHEKLILLAQLKPEKDSDEAVTYSLGKFGQRALDFYSIHVTKESTHPVKPLAQIAGNRYASVPVGKALSDACMGTIASFLSKYQDIIIEHQKVVKGNQKRLESLRELAGKENLEYPSVTLPPQPHTKEGVDAYNEVIARVRMWVNLNLWQKLKLSRDDAKPLLRLKGFPSFPLVERQANEVDWWDMVCNVKKLINEKKEDGKVFWQNLAGYKRQEALRPYLSSEEDRKKGKKFARYQLGDLLLHLEKKHGEDWGKVYDEAWERIDKKVEGLSKHIKLEEERRSEDAQSKAALTDWLRAKASFVIEGLKEADKDEFCRCELKLQKWYGDLRGKPFAIEAENSILDISGFSKQYNCAFIWQKDGVKKLNLYLIINYFKGGKLRFKKIKPEAFEANRFYTVINKKSGEIVPMEVNFNFDDPNLIILPLAFGKRFGREFIWNDLLSLETGSLKLANGRVIEKTLYNRRTRQDEPALFVALTFERREVLDSSNIKTPMNLIGVDRGENIPAVIALTDPEGCPLSRFKDSLGNPTHILRIGESYKEKQRTIQAKKEVEQRRAGGYSRKYASKAKNLADDMVRNTARDLLYYAVTQDAMLIFENLSRGFGRQGKRTFMAERQYTRMEDWLTAKLAYEGLPSKTYLSKTLAQYTSKTCSNCGFTITSADYDRVLEKLKKTATGWMTTINGKELKVEGQITYYNRYKRQNVVKDLSVELDRLSEESVNNDISSWTKGRSGEALSLLKKRFSHRPVQEKFVCLNCGFETHADEQAALNIARSWLFLRSQEYKKYQTNKTTGNTDKRAFVETWQSFYRKKLKEVWKPAV

SEQ ID NO: 37439 - protein, 979 aa, synthetic construct
  REGION 1..979: note = engineered CasX variant
QEIKRINKIRRRLVKDSNTKKAGKTGPMKTLLVRVMTPDLRERLENLRKKPENIPQPISNTSRANLNKLLTDYTEMKKAILHVYWEEFQKDPVGLMSRVAQPASKKIDQNKLKPEMDEKGNLTTAGFACSQCGQPLFVYKLEQVSEKGKAYTNYFGRCNVAEHEKLIKLAQLKPEKDSDEAVTYSLGKFGQRALDFYSIHVTKESTHPVKPLAQIAGNRYASGPVGKALSDACMGTIASFLSKYQDIIIEHQKVVKGNQKRLESLRELAGKENLEYPSVTLPPQPHTKEGVDAYNEVIARVRMWVNLNLWQKLKLSRDDAKPLLRLKGFPSFPLVERQANEVDWWDMVCNVKKLINEKKEDGKVFWQNLAGYKRQEALRPYLSSEEDRKKGKKFARYQLGDLLLHLEKKHGEDWGKVYDEAWERIDKKVEGLSKHIKLEEERRSEDAQSKAALTDWLRAKASFVIEGLKEADKDEFCRCELKLQKWYGDLRGKPFAIEAENSILDISGFSKQYNCAFIWQKDGVKKLNLYLIINYFKGGKLRFKKIKPEAFEANRFYTVINKKSGEIVPMEVNFNFDDPNLIILPLAFGKRFGREFIWNDLLSLETGSLKLANGRVIEKTLYNRRTRQDEPALFVALTFERREVLDSSNIKTPMNLIGVDRGENIPAVIALTDPEGCPLSRFKDSLGNPTHILRIGESYKEKQRTIQAKKEVEQRRAGGYSRKYASKAKNLADDMVRNTARDLLYYAVTQDAMLIFENLSRGFGRQGKRTFMAERQYTRMEDWLTAKLAYEGLPSKTYLSKTLAQYTSKTCSNCGFTITSADYDRVLEKLKKTATGWMTTINGKELKVEGQITYYNRYKRQNVVKDLSVELDRLSEESVNNDISSWTKGRSGEALSLLKKRFSHRPVQEKFVCLNCGFETHADEQAALNIARSWLFLRSQEYKKYQTNKTTGNTDKRAFVETWQSFYRKKLKEVWKPAV

SEQ ID NO: 37440 - protein, 978 aa, synthetic construct
  REGION 1..978: note = engineered CasX variant
QEIKRINKIRRRLVKDSNTKKAGKTGPMKTLLVRVMTPDLRERLENLRKKPENIPQPISNTSRANLNKLLTDYTEMKKAILHVYWEEFQKDPVGLMSRVAQPASKKIDQNKLKPEMDEKGNLTTAGFACSQCGQPLFVYKLEQVSEKGKAYTNYFGRCNVAEHEKLILLAQLKPEKDSDEAVTYSLGKFGQRALDFYSIHVTKESTHPVKPLAQIAGNRYASPVGKALSDACMGTIASFLSKYQDIIIEHQKVVKGNQKRLESLRELAGKENLEYPSVTLPPQPHTKEGVDAYNEVIARVRMWVNLNLWQKLKLSRDDAKPLLRLKGFPSFPLVERQANEVDWWDMVCNVKKLINEKKEDGKVFWQNLAGYKRQEALRPYLSSEEDRKKGKKFARYQLGDLLLHLEKKHGEDWGKVYDEAWERIDKKVEGLSKHIKLEEERRSEDAQSKAALTDWLRAKASFVIEGLKEADKDEFCRCELKLQKWYGDLRGKPFAIEAENSILDISGFSKQYNCAFIWQKDGVKKLNLYLIINYFKGGKLRFKKIKPEAFEANRFYTVINKKSGEIVPMEVNFNFDDPNLIILPLAFGKRFGREFIWNDLLSLETGSLKLANGRVIEKTLYNRRTRQDEPALFVALTFERREVLDSSNIKTPMNLIGVDRGENIPAVIALTDPEGCPLSRFKDSLGNPTHILRIGESYKEKQRTIQAKKEVEQRRAGGYSRKYASKAKNLADDMVRNTARDLLYYAVTQDAMLIFENLSRGFGRQGKRTFMAERQYTRMEDWLTAKLAYEGLPSKTYLSKTLAQYTSKTCSNCGFTITSADYDRVLEKLKKTATGWMTTINGKELKVEGQITYYNRYKRQNVVKDLSVELDRLSEESVNNDISSWTKGRSGEALSLLKKRFSHRPVQEKFVCLNCGFETHADEQAALNIARSWLFLRSQEYKKYQTNKTTGNTDKRAFVETWQSFYRKKLKEVWKPAV

SEQ ID NO: 37441 - protein, 979 aa, synthetic construct
  REGION 1..979: note = engineered CasX variant
QEIKRINKIRRRLVKDSNTKKAGKTGPMKTLLVRVMTPDLRERLENLRKKPENIPQPISNTSRANLNKLLTDYTEMKKAILHVYWEEFQKDPVGLMSRVAQPASKKIDQNKLKPEMDEKGNLTTAGFACSQCGQPLFVYKLEQVSEKGKAYTNYFGRCNVAEHEKLILLAQLKPEKDSDEAVTYSLGKFGQRALDFYSIHVTKESTHPVKPLAQIAGNRYASYPVGKALSDACMGTIASFLSKYQDIIIEHQKVVKGNQKRLESLRELAGKENLEYPSVTLPPQPHTKEGVDAYNEVIARVRMWVNLNLWQKLKLSRDDAKPLLRLKGFPSFPLVERQANEVDWWDMVCNVKKLINEKKEDGKVFWQNLAGYKRQEALRPYLSSEEDRKKGKKFARYQLGDLLLHLEKKHGEDWGKVYDEAWERIDKKVEGLSKHIKLEEERRSEDAQSKAALTDWLRAKASFVIEGLKEADKDEFCRCELKLQKWYGDLRGKPFAIEAENSILDISGFSKQYNCAFIWQKDGVKKLNLYLIINYFKGGKLRFKKIKPEAFEANRFYTVINKKSGEIVPMEVNFNFDDPNLIILPLAFGKRFGREFIWNDLLSLETGSLKLANGRVIEKTLYNRRTRQDEPALFVALTFERREVLDSSNIKPMSNLIGVDRGENIPAVIALTDPEGCPLSRFKDSLGNPTHILRIGESYKEKQRTIQAKKEVEQRRAGGYSRKYASKAKNLADDMVRNTARDLLYYAVTQDAMLIFENLSRGFGRQGKRTFMAERQYTRMEDWLTAKLAYEGLPSKTYLSKTLAQYTSKTCSNCGFTITSADYDRVLEKLKKTATGWMTTINGKELKVEGQITYYNRYKRQNVVKDLSVELDRLSEESVNNDISSWTKGRSGEALSLLKKRFSHRPVQEKFVCLNCGFETHADEQAALNIARSWLFLRSQEYKKYQTNKTTGNTDKRAFVETWQSFYRKKLKEVWKPAV

SEQ ID NO: 37442 - protein, 979 aa, synthetic construct
  REGION 1..979: note = engineered CasX variant
QEIKRINKIRRRLVKDSNTKKAGKTGPMKTLLVRVMTPDLRERLENLRKKPENIPQPISNTSRANLNKLLTDYTEMKKAILHVYWEEFQKDPVGLMSRVAQPASKKIDQNKLKPEMDEKGNLTTAGFACSQCGQPLFVYKLEQVSEKGKAYTNYFGRCNVAEHEKLILLAQLKPEKDSDEAVTYSLGKFGQRALDFYSIHVTKESTHPVKPLAQIAGNRYASHPVGKALSDACMGTIASFLSKYQDIIIEHQKVVKGNQKRLESLRELAGKENLEYPSVTLPPQPHTKEGVDAYNEVIARVRMWVNLNLWQKLKLSRDDAKPLLRLKGFPSFPLVERQANEVDWWDMVCNVKKLINEKKEDGKVFWQNLAGYKRQEALRPYLSSEEDRKKGKKFARYQLGDLLLHLEKKHGEDWGKVYDEAWERIDKKVEGLSKHIKLEEERRSEDAQSKAALTDWLRAKASFVIEGLKEADKDEFCRCELKLQKWYGDLRGKPFAIEAENSILDISGFSKQYNCAFIWQKDGVKKLNLYLIINYFKGGKLRFKKIKPEAFEANRFYTVINKKSGEIVPMEVNFNFDDPNLIILPLAFGKRFGREFIWNDLLSLETGSLKLANGRVIEKTLYNRRTRQDEPALFVALTFERREVLDSSNIKPMSNLIGVDRGENIPAVIALTDPEGCPLSRFKDSLGNPTHILRIGESYKEKQRTIQAKKEVEQRRAGGYSRKYASKAKNLADDMVRNTARDLLYYAVTQDAMLIFENLSRGFGRQGKRTFMAERQYTRMEDWLTAKLAYEGLPSKTYLSKTLAQYTSKTCSNCGFTITSADYDRVLEKLKKTATGWMTTINGKELKVEGQITYYNRYKRQNVVKDLSVELDRLSEESVNNDISSWTKGRSGEALSLLKKRFSHRPVQEKFVCLNCGFETHADEQAALNIARSWLFLRSQEYKKYQTNKTTGNTDKRAFVETWQSFYRKKLKEVWKPAV

SEQ ID NO: 37443 - protein, 979 aa, synthetic construct
  REGION 1..979: note = engineered CasX variant
QEIKRINKIRRRLVKDSNTKKAGKTGPMKTLLVRVMTPDLRERLENLRKKPENIPQPISNTSRANLNKLLTDYTEMKKAILHVYWEEFQKDPVGLMSRVAQPASKKIDQNKLKPEMDEKGNLTTAGFACSQCGQPLFVYKLEQVSEKGKAYTNYFGRCNVAEHEKLILLAQLKPEKDSDEAVTYSLGKFGQRALDFYSIHVTKESTHPVKPLAQIAGNRYASSPVGKALSDACMGTIASFLSKYQDIIIEHQKVVKGNQKRLESLRELAGKENLEYPSVTLPPQPHTKEGVDAYNEVIARVRMWVNLNLWQKLKLSRDDAKPLLRLKGFPSFPLVERQANEVDWWDMVCNVKKLINEKKEDGKVFWQNLAGYKRQEALRPYLSSEEDRKKGKKFARYQLGDLLLHLEKKHGEDWGKVYDEAWERIDKKVEGLSKHIKLEEERRSEDAQSKAALTDWLRAKASFVIEGLKEADKDEFCRCELKLQKWYGDLRGKPFAIEAENSILDISGFSKQYNCAFIWQKDGVKKLNLYLIINYFKGGKLRFKKIKPEAFEANRFYTVINKKSGEIVPMEVNFNFDDPNLIILPLAFGKRFGREFIWNDLLSLETGSLKLANGRVIEKTLYNRRTRQDEPALFVALTFERREVLDSSNIKPMSNLIGVDRGENIPAVIALTDPEGCPLSRFKDSLGNPTHILRIGESYKEKQRTIQAKKEVEQRRAGGYSRKYASKAKNLADDMVRNTARDLLYYAVTQDAMLIFENLSRGFGRQGKRTFMAERQYTRMEDWLTAKLAYEGLPSKTYLSKTLAQYTSKTCSNCGFTITSADYDRVLEKLKKTATGWMTTINGKELKVEGQITYYNRYKRQNVVKDLSVELDRLSEESVNNDISSWTKGRSGEALSLLKKRFSHRPVQEKFVCLNCGFETHADEQAALNIARSWLFLRSQEYKKYQTNKTTGNTDKRAFVETWQSFYRKKLKEVWKPAV

SEQ ID NO: 37444 - protein, 979 aa, synthetic construct
  REGION 1..979: note = engineered CasX variant
QEIKRINKIRRRLVKDSNTKKAGKTGPMKTLLVRVMTPDLRERLENLRKKPENIPQPISNTSRANLNKLLTDYTEMKKAILHVYWEEFQKDPVGLMSRVAQPASKKIDQNKLKPEMDEKGNLTTAGFACSQCGQPLFVYKLEQVSEKGKAYTNYFGRCNVAEHEKLILLAQLKPEKDSDEAVTYSLGKFGQRALDFYSIHVTKESTHPVKPLAQIAGNRYASTPVGKALSDACMGTIASFLSKYQDIIIEHQKVVKGNQKRLESLRELAGKENLEYPSVTLPPQPHTKEGVDAYNEVIARVRMWVNLNLWQKLKLSRDDAKPLLRLKGFPSFPLVERQANEVDWWDMVCNVKKLINEKKEDGKVFWQNLAGYKRQEALRPYLSSEEDRKKGKKFARYQLGDLLLHLEKKHGEDWGKVYDEAWERIDKKVEGLSKHIKLEEERRSEDAQSKAALTDWLRAKASFVIEGLKEADKDEFCRCELKLQKWYGDLRGKPFAIEAENSILDISGFSKQYNCAFIWQKDGVKKLNLYLIINYFKGGKLRFKKIKPEAFEANRFYTVINKKSGEIVPMEVNFNFDDPNLIILPLAFGKRFGREFIWNDLLSLETGSLKLANGRVIEKTLYNRRTRQDEPALFVALTFERREVLDSSNIKPMSNLIGVDRGENIPAVIALTDPEGCPLSRFKDSLGNPTHILRIGESYKEKQRTIQAKKEVEQRRAGGYSRKYASKAKNLADDMVRNTARDLLYYAVTQDAMLIFENLSRGFGRQGKRTFMAERQYTRMEDWLTAKLAYEGLPSKTYLSKTLAQYTSKTCSNCGFTITSADYDRVLEKLKKTATGWMTTINGKELKVEGQITYYNRYKRQNVVKDLSVELDRLSEESVNNDISSWTKGRSGEALSLLKKRFSHRPVQEKFVCLNCGFETHADEQAALNIARSWLFLRSQEYKKYQTNKTTGNTDKRAFVETWQSFYRKKLKEVWKPAV

SEQ ID NO: 37445 - protein, 979 aa, synthetic construct
  REGION 1..979: note = engineered CasX variant
QEIKRINKIRRRLVKDSNTKKAGKTGPMKTLLVRVMTPDLRERLENLRKKPENIPQPISNTSRANLNKLLTDYTEMKKAILHVYWEEFQKDPVGLMSRVAQPASKKIDQNKLKPEMDEKGNLTTAGFACSQCGQPLFVYKLEQVSEKGKAYTNYFGRCNVAEHEKLILLAQLKPEKDSDEAVTYSLGKFGQRALDFYSIHVTKESTHPVKPLAQIAGNRYASAPVGKALSDACMGTIASFLSKYQDIIIEHQKVVKGNQKRLESLRELAGKENLEYPSVTLPPQPHTKEGVDAYNEVIARVRMWVNLNLWQKLKLSRDDAKPLLRLKGFPSFPLVERQANEVDWWDMVCNVKKLINEKKEDGKVFWQNLAGYKRQEALRPYLSSEEDRKKGKKFARYQLGDLLLHLEKKHGEDWGKVYDEAWERIDKKVEGLSKHIKLEEERRSEDAQSKAALTDWLRAKASFVIEGLKEADKDEFCRCELKLQKWYGDLRGKPFAIEAENSILDISGFSKQYNCAFIWQKDGVKKLNLYLIINYFKGGKLRFKKIKPEAFEANRFYTVINKKSGEIVPMEVNFNFDDPNLIILPLAFGKRFGREFIWNDLLSLETGSLKLANGRVIEKTLYNRRTRQDEPALFVALTFERREVLDSSNIKPMSNLIGVDRGENIPAVIALTDPEGCPLSRFKDSLGNPTHILRIGESYKEKQRTIQAKKEVEQRRAGGYSRKYASKAKNLADDMVRNTARDLLYYAVTQDAMLIFENLSRGFGRQGKRTFMAERQYTRMEDWLTAKLAYEGLPSKTYLSKTLAQYTSKTCSNCGFTITSADYDRVLEKLKKTATGWMTTINGKELKVEGQITYYNRYKRQNVVKDLSVELDRLSEESVNNDISSWTKGRSGEALSLLKKRFSHRPVQEKFVCLNCGFETHADEQAALNIARSWLFLRSQEYKKYQTNKTTGNTDKRAFVETWQSFYRKKLKEVWKPAV

SEQ ID NO: 37446 - protein, 979 aa, synthetic construct
  REGION 1..979: note = engineered CasX variant
QEIKRINKIRRRLVKDSNTKKAGKTGPMKTLLVRVMTPDLRERLENLRKKPENIPQPISNTSRANLNKLLTDYTEMKKAILHVYWEEFQKDPVGLMSRVAQPASKKIDQNKLKPEMDEKGNLTTAGFACSQCGQPLFVYKLEQVSEKGKAYTNYFGRCNVAEHEKLILLAQLKPEKDSDEAVTYSLGKFGQRALDFYSIHVTKESTHPVKPLAQIAGNRYASVPVGKALSDACMGTIASFLSKYQDIIIEHQKVVKGNQKRLESLRELAGKENLEYPSVTLPPQPHTKEGVDAYNEVIARVRMWVNLNLWQKLKLSRDDAKPLLRLKGFPSFPLVERQANEVDWWDMVCNVKKLINEKKEDGKVFWQNLAGYKRQEALRPYLSSEEDRKKGKKFARYQLGDLLLHLEKKHGEDWGKVYDEAWERIDKKVEGLSKHIKLEEERRSEDAQSKAALTDWLRAKASFVIEGLKEADKDEFCRCELKLQKWYGDLRGKPFAIEAENSILDISGFSKQYNCAFIWQKDGVKKLNLYLIINYFKGGKLRFKKIKPEAFEANRFYTVINKKSGEIVPMEVNFNFDDPNLIILPLAFGKRFGREFIWNDLLSLETGSLKLANGRVIEKTLYNRRTRQDEPALFVALTFERREVLDSSNIKPMSNLIGVDRGENIPAVIALTDPEGCPLSRFKDSLGNPTHILRIGESYKEKQRTIQAKKEVEQRRAGGYSRKYASKAKNLADDMVRNTARDLLYYAVTQDAMLIFENLSRGFGRQGKRTFMAERQYTRMEDWLTAKLAYEGLPSKTYLSKTLAQYTSKTCSNCGFTITSADYDRVLEKLKKTATGWMTTINGKELKVEGQITYYNRYKRQNVVKDLSVELDRLSEESVNNDISSWTKGRSGEALSLLKKRFSHRPVQEKFVCLNCGFETHADEQAALNIARSWLFLRSQEYKKYQTNKTTGNTDKRAFVETWQSFYRKKLKEVWKPAV

SEQ ID NO: 37447 - protein, 979 aa, synthetic construct
  REGION 1..979: note = engineered CasX variant
QEIKRINKIRRRLVKDSNTKKAGKTGPMKTLLVRVMTPDLRERLENLRKKPENIPQPISNTSRANLNKLLTDYTEMKKAILHVYWEEFQKDPVGLMSRVAQPASKKIDQNKLKPEMDEKGNLTTAGFACSQCGQPLFVYKLEQVSEKGKAYTNYFGRCNVAEHEKLIKLAQLKPEKDSDEAVTYSLGKFGQRALDFYSIHVTKESTHPVKPLAQIAGNRYASGPVGKALSDACMGTIASFLSKYQDIIIEHQKVVKGNQKRLESLRELAGKENLEYPSVTLPPQPHTKEGVDAYNEVIARVRMWVNLNLWQKLKLSRDDAKPLLRLKGFPSFPLVERQANEVDWWDMVCNVKKLINEKKEDGKVFWQNLAGYKRQEALRPYLSSEEDRKKGKKFARYQLGDLLLHLEKKHGEDWGKVYDEAWERIDKKVEGLSKHIKLEEERRSEDAQSKAALTDWLRAKASFVIEGLKEADKDEFCRCELKLQKWYGDLRGKPFAIEAENSILDISGFSKQYNCAFIWQKDGVKKLNLYLIINYFKGGKLRFKKIKPEAFEANRFYTVINKKSGEIVPMEVNFNFDDPNLIILPLAFGKRFGREFIWNDLLSLETGSLKLANGRVIEKTLYNRRTRQDEPALFVALTFERREVLDSSNIKPMSNLIGVDRGENIPAVIALTDPEGCPLSRFKDSLGNPTHILRIGESYKEKQRTIQAKKEVEQRRAGGYSRKYASKAKNLADDMVRNTARDLLYYAVTQDAMLIFENLSRGFGRQGKRTFMAERQYTRMEDWLTAKLAYEGLPSKTYLSKTLAQYTSKTCSNCGFTITSADYDRVLEKLKKTATGWMTTINGKELKVEGQITYYNRYKRQNVVKDLSVELDRLSEESVNNDISSWTKGRSGEALSLLKKRFSHRPVQEKFVCLNCGFETHADEQAALNIARSWLFLRSQEYKKYQTNKTTGNTDKRAFVETWQSFYRKKLKEVWKPAV

SEQ ID NO: 37448 - protein, 978 aa, synthetic construct
  REGION 1..978: note = engineered CasX variant
QEIKRINKIRRRLVKDSNTKKAGKTGPMKTLLVRVMTPDLRERLENLRKKPENIPQPISNTSRANLNKLLTDYTEMKKAILHVYWEEFQKDPVGLMSRVAQPASKKIDQNKLKPEMDEKGNLTTAGFACSQCGQPLFVYKLEQVSEKGKAYTNYFGRCNVAEHEKLILLAQLKPEKDSDEAVTYSLGKFGQRALDFYSIHVTKESTHPVKPLAQIAGNRYASPVGKALSDACMGTIASFLSKYQDIIIEHQKVVKGNQKRLESLRELAGKENLEYPSVTLPPQPHTKEGVDAYNEVIARVRMWVNLNLWQKLKLSRDDAKPLLRLKGFPSFPLVERQANEVDWWDMVCNVKKLINEKKEDGKVFWQNLAGYKRQEALRPYLSSEEDRKKGKKFARYQLGDLLLHLEKKHGEDWGKVYDEAWERIDKKVEGLSKHIKLEEERRSEDAQSKAALTDWLRAKASFVIEGLKEADKDEFCRCELKLQKWYGDLRGKPFAIEAENSILDISGFSKQYNCAFIWQKDGVKKLNLYLIINYFKGGKLRFKKIKPEAFEANRFYTVINKKSGEIVPMEVNFNFDDPNLIILPLAFGKRFGREFIWNDLLSLETGSLKLANGRVIEKTLYNRRTRQDEPALFVALTFERREVLDSSNIKPMSNLIGVDRGENIPAVIALTDPEGCPLSRFKDSLGNPTHILRIGESYKEKQRTIQAKKEVEQRRAGGYSRKYASKAKNLADDMVRNTARDLLYYAVTQDAMLIFENLSRGFGRQGKRTFMAERQYTRMEDWLTAKLAYEGLPSKTYLSKTLAQYTSKTCSNCGFTITSADYDRVLEKLKKTATGWMTTINGKELKVEGQITYYNRYKRQNVVKDLSVELDRLSEESVNNDISSWTKGRSGEALSLLKKRFSHRPVQEKFVCLNCGFETHADEQAALNIARSWLFLRSQEYKKYQTNKTTGNTDKRAFVETWQSFYRKKLKEVWKPAV

SEQ ID NO: 37449 - protein, 978 aa, synthetic construct
  REGION 1..978: note = engineered CasX variant
QEIKRINKIRRRLVKDSNTKKAGKTGPMKTLLVRVMTPDLRERLENLRKKPENIPQPISNTSRANLNKLLTDYTEMKKAILHVYWEEFQKDPVGLMSRVAQPASKKIDQNKLKPEMDEKGNLTTAGFACSQCGQPLFVYKLEQVSEKGKAYTNYFGRCNVAEHEKLILLAQLKPEKDSDEAVTYSLGKFGQRALDFYSIHVTKESTHPVKPLAQIAGNRYASYPVGKALSDACMGTIASFLSKYQDIIIEHQKVVKGNQKRLESLRELAGKENLEYPSVTLPPQPHTKEGVDAYNEVIARVRMWVNLNLWQKLKLSRDDAKPLLRLKGFPSFPLVERQANEVDWWDMVCNVKKLINEKKEDGKVFWQNLAGYKRQEALRPYLSSEEDRKKGKKFARYQLGDLLLHLEKKHGEDWGKVYDEAWERIDKKVEGLSKHIKLEEERRSEDAQSKAALTDWLRAKASFVIEGLKEADKDEFCRCELKLQKWYGDLRGKPFAIEAENSILDISGFSKQYNCAFIWQKDGVKKLNLYLIINYFKGGKLRFKKIKPEAFEANRFYTVINKKSGEIVPMEVNFNFDDPNLIILPLAFGKRFGREFIWNDLLSLETGSLKLANGRVIEKTLYNRRTRQDEPALFVALTFERREVLDSSNIKPMNLIGVDRGENIPAVIALTDPEGCPLSRFKDSLGNPTHILRIRESYKEKQRTIQAKKEVEQRRAGGYSRKYASKAKNLADDMVRNTARDLLYYAVTQDAMLIFENLSRGFGRQGKRTFMAERQYTRMEDWLTAKLAYEGLPSKTYLSKTLAQYTSKTCSNCGFTITSADYDRVLEKLKKTATGWMTTINGKELKVEGQITYYNRYKRQNVVKDLSVELDRLSEESVNNDISSWTKGRSGEALSLLKKRFSHRPVQEKFVCLNCGFETHADEQAALNIARSWLFLRSQEYKKYQTNKTTGNTDKRAFVETWQSFYRKKLKEVWKPAV

SEQ ID NO: 37450 - protein, 978 aa, synthetic construct
  REGION 1..978: note = engineered CasX variant
QEIKRINKIRRRLVKDSNTKKAGKTGPMKTLLVRVMTPDLRERLENLRKKPENIPQPISNTSRANLNKLLTDYTEMKKAILHVYWEEFQKDPVGLMSRVAQPASKKIDQNKLKPEMDEKGNLTTAGFACSQCGQPLFVYKLEQVSEKGKAYTNYFGRCNVAEHEKLILLAQLKPEKDSDEAVTYSLGKFGQRALDFYSIHVTKESTHPVKPLAQIAGNRYASHPVGKALSDACMGTIASFLSKYQDIIIEHQKVVKGNQKRLESLRELAGKENLEYPSVTLPPQPHTKEGVDAYNEVIARVRMWVNLNLWQKLKLSRDDAKPLLRLKGFPSFPLVERQANEVDWWDMVCNVKKLINEKKEDGKVFWQNLAGYKRQEALRPYLSSEEDRKKGKKFARYQLGDLLLHLEKKHGEDWGKVYDEAWERIDKKVEGLSKHIKLEEERRSEDAQSKAALTDWLRAKASFVIEGLKEADKDEFCRCELKLQKWYGDLRGKPFAIEAENSILDISGFSKQYNCAFIWQKDGVKKLNLYLIINYFKGGKLRFKKIKPEAFEANRFYTVINKKSGEIVPMEVNFNFDDPNLIILPLAFGKRFGREFIWNDLLSLETGSLKLANGRVIEKTLYNRRTRQDEPALFVALTFERREVLDSSNIKPMNLIGVDRGENIPAVIALTDPEGCPLSRFKDSLGNPTHILRIRESYKEKQRTIQAKKEVEQRRAGGYSRKYASKAKNLADDMVRNTARDLLYYAVTQDAMLIFENLSRGFGRQGKRTFMAERQYTRMEDWLTAKLAYEGLPSKTYLSKTLAQYTSKTCSNCGFTITSADYDRVLEKLKKTATGWMTTINGKELKVEGQITYYNRYKRQNVVKDLSVELDRLSEESVNNDISSWTKGRSGEALSLLKKRFSHRPVQEKFVCLNCGFETHADEQAALNIARSWLFLRSQEYKKYQTNKTTGNTDKRAFVETWQSFYRKKLKEVWKPAV

SEQ ID NO: 37451 - protein, 978 aa, synthetic construct
  REGION 1..978: note = engineered CasX variant
QEIKRINKIRRRLVKDSNTKKAGKTGPMKTLLVRVMTPDLRERLENLRKKPENIPQPISNTSRANLNKLLTDYTEMKKAILHVYWEEFQKDPVGLMSRVAQPASKKIDQNKLKPEMDEKGNLTTAGFACSQCGQPLFVYKLEQVSEKGKAYTNYFGRCNVAEHEKLILLAQLKPEKDSDEAVTYSLGKFGQRALDFYSIHVTKESTHPVKPLAQIAGNRYASSPVGKALSDACMGTIASFLSKYQDIIIEHQKVVKGNQKRLESLRELAGKENLEYPSVTLPPQPHTKEGVDAYNEVIARVRMWVNLNLWQKLKLSRDDAKPLLRLKGFPSFPLVERQANEVDWWDMVCNVKKLINEKKEDGKVFWQNLAGYKRQEALRPYLSSEEDRKKGKKFARYQLGDLLLHLEKKHGEDWGKVYDEAWERIDKKVEGLSKHIKLEEERRSEDAQSKAALTDWLRAKASFVIEGLKEADKDEFCRCELKLQKWYGDLRGKPFAIEAENSILDISGFSKQYNCAFIWQKDGVKKLNLYLIINYFKGGKLRFKKIKPEAFEANRFYTVINKKSGEIVPMEVNFNFDDPNLIILPLAFGKRFGREFIWNDLLSLETGSLKLANGRVIEKTLYNRRTRQDEPALFVALTFERREVLDSSNIKPMNLIGVDRGENIPAVIALTDPEGCPLSRFKDSLGNPTHILRIRESYKEKQRTIQAKKEVEQRRAGGYSRKYASKAKNLADDMVRNTARDLLYYAVTQDAMLIFENLSRGFGRQGKRTFMAERQYTRMEDWLTAKLAYEGLPSKTYLSKTLAQYTSKTCSNCGFTITSADYDRVLEKLKKTATGWMTTINGKELKVEGQITYYNRYKRQNVVKDLSVELDRLSEESVNNDISSWTKGRSGEALSLLKKRFSHRPVQEKFVCLNCGFETHADEQAALNIARSWLFLRSQEYKKYQTNKTTGNTDKRAFVETWQSFYRKKLKEVWKPAV

SEQ ID NO: 37452 - protein, 978 aa, synthetic construct
  REGION 1..978: note = engineered CasX variant
QEIKRINKIRRRLVKDSNTKKAGKTGPMKTLLVRVMTPDLRERLENLRKKPENIPQPISNTSRANLNKLLTDYTEMKKAILHVYWEEFQKDPVGLMSRVAQPASKKIDQNKLKPEMDEKGNLTTAGFACSQCGQPLFVYKLEQVSEKGKAYTNYFGRCNVAEHEKLILLAQLKPEKDSDEAVTYSLGKFGQRALDFYSIHVTKESTHPVKPLAQIAGNRYASTPVGKALSDACMGTIASFLSKYQDIIIEHQKVVKGNQKRLESLRELAGKENLEYPSVTLPPQPHTKEGVDAYNEVIARVRMWVNLNLWQKLKLSRDDAKPLLRLKGFPSFPLVERQANEVDWWDMVCNVKKLINEKKEDGKVFWQNLAGYKRQEALRPYLSSEEDRKKGKKFARYQLGDLLLHLEKKHGEDWGKVYDEAWERIDKKVEGLSKHIKLEEERRSEDAQSKAALTDWLRAKASFVIEGLKEADKDEFCRCELKLQKWYGDLRGKPFAIEAENSILDISGFSKQYNCAFIWQKDGVKKLNLYLIINYFKGGKLRFKKIKPEAFEANRFYTVINKKSGEIVPMEVNFNFDDPNLIILPLAFGKRFGREFIWNDLLSLETGSLKLANGRVIEKTLYNRRTRQDEPALFVALTFERREVLDSSNIKPMNLIGVDRGENIPAVIALTDPEGCPLSRFKDSLGNPTHILRIRESYKEKQRTIQAKKEVEQRRAGGYSRKYASKAKNLADDMVRNTARDLLYYAVTQDAMLIFENLSRGFGRQGKRTFMAERQYTRMEDWLTAKLAYEGLPSKTYLSKTLAQYTSKTCSNCGFTITSADYDRVLEKLKKTATGWMTTINGKELKVEGQITYYNRYKRQNVVKDLSVELDRLSEESVNNDISSWTKGRSGEALSLLKKRFSHRPVQEKFVCLNCGFETHADEQAALNIARSWLFLRSQEYKKYQTNKTTGNTDKRAFVETWQSFYRKKLKEVWKPAV

SEQ ID NO: 37453 - protein, 978 aa, synthetic construct
  REGION 1..978: note = engineered CasX variant
QEIKRINKIRRRLVKDSNTKKAGKTGPMKTLLVRVMTPDLRERLENLRKKPENIPQPISNTSRANLNKLLTDYTEMKKAILHVYWEEFQKDPVGLMSRVAQPASKKIDQNKLKPEMDEKGNLTTAGFACSQCGQPLFVYKLEQVSEKGKAYTNYFGRCNVAEHEKLILLAQLKPEKDSDEAVTYSLGKFGQRALDFYSIHVTKESTHPVKPLAQIAGNRYASAPVGKALSDACMGTIASFLSKYQDIIIEHQKVVKGNQKRLESLRELAGKENLEYPSVTLPPQPHTKEGVDAYNEVIARVRMWVNLNLWQKLKLSRDDAKPLLRLKGFPSFPLVERQANEVDWWDMVCNVKKLINEKKEDGKVFWQNLAGYKRQEALRPYLSSEEDRKKGKKFARYQLGDLLLHLEKKHGEDWGKVYDEAWERIDKKVEGLSKHIKLEEERRSEDAQSKAALTDWLRAKASFVIEGLKEADKDEFCRCELKLQKWYGDLRGKPFAIEAENSILDISGFSKQYNCAFIWQKDGVKKLNLYLIINYFKGGKLRFKKIKPEAFEANRFYTVINKKSGEIVPMEVNFNFDDPNLIILPLAFGKRFGREFIWNDLLSLETGSLKLANGRVIEKTLYNRRTRQDEPALFVALTFERREVLDSSNIKPMNLIGVDRGENIPAVIALTDPEGCPLSRFKDSLGNPTHILRIRESYKEKQRTIQAKKEVEQRRAGGYSRKYASKAKNLADDMVRNTARDLLYYAVTQDAMLIFENLSRGFGRQGKRTFMAERQYTRMEDWLTAKLAYEGLPSKTYLSKTLAQYTSKTCSNCGFTITSADYDRVLEKLKKTATGWMTTINGKELKVEGQITYYNRYKRQNVVKDLSVELDRLSEESVNNDISSWTKGRSGEALSLLKKRFSHRPVQEKFVCLNCGFETHADEQAALNIARSWLFLRSQEYKKYQTNKTTGNTDKRAFVETWQSFYRKKLKEVWKPAV

SEQ ID NO: 37454 - protein, 978 aa, synthetic construct
  REGION 1..978: note = engineered CasX variant
QEIKRINKIRRRLVKDSNTKKAGKTGPMKTLLVRVMTPDLRERLENLRKKPENIPQPISNTSRANLNKLLTDYTEMKKAILHVYWEEFQKDPVGLMSRVAQPASKKIDQNKLKPEMDEKGNLTTAGFACSQCGQPLFVYKLEQVSEKGKAYTNYFGRCNVAEHEKLILLAQLKPEKDSDEAVTYSLGKFGQRALDFYSIHVTKESTHPVKPLAQIAGNRYASVPVGKALSDACMGTIASFLSKYQDIIIEHQKVVKGNQKRLESLRELAGKENLEYPSVTLPPQPHTKEGVDAYNEVIARVRMWVNLNLWQKLKLSRDDAKPLLRLKGFPSFPLVERQANEVDWWDMVCNVKKLINEKKEDGKVFWQNLAGYKRQEALRPYLSSEEDRKKGKKFARYQLGDLLLHLEKKHGEDWGKVYDEAWERIDKKVEGLSKHIKLEEERRSEDAQSKAALTDWLRAKASFVIEGLKEADKDEFCRCELKLQKWYGDLRGKPFAIEAENSILDISGFSKQYNCAFIWQKDGVKKLNLYLIINYFKGGKLRFKKIKPEAFEANRFYTVINKKSGEIVPMEVNFNFDDPNLIILPLAFGKRFGREFIWNDLLSLETGSLKLANGRVIEKTLYNRRTRQDEPALFVALTFERREVLDSSNIKPMNLIGVDRGENIPAVIALTDPEGCPLSRFKDSLGNPTHILRIRESYKEKQRTIQAKKEVEQRRAGGYSRKYASKAKNLADDMVRNTARDLLYYAVTQDAMLIFENLSRGFGRQGKRTFMAERQYTRMEDWLTAKLAYEGLPSKTYLSKTLAQYTSKTCSNCGFTITSADYDRVLEKLKKTATGWMTTINGKELKVEGQITYYNRYKRQNVVKDLSVELDRLSEESVNNDISSWTKGRSGEALSLLKKRFSHRPVQEKFVCLNCGFETHADEQAALNIARSWLFLRSQEYKKYQTNKTTGNTDKRAFVETWQSFYRKKLKEVWKPAV

SEQ ID NO: 37455 - protein, 978 aa, synthetic construct
  REGION 1..978: note = engineered CasX variant
QEIKRINKIRRRLVKDSNTKKAGKTGPMKTLLVRVMTPDLRERLENLRKKPENIPQPISNTSRANLNKLLTDYTEMKKAILHVYWEEFQKDPVGLMSRVAQPASKKIDQNKLKPEMDEKGNLTTAGFACSQCGQPLFVYKLEQVSEKGKAYTNYFGRCNVAEHEKLIKLAQLKPEKDSDEAVTYSLGKFGQRALDFYSIHVTKESTHPVKPLAQIAGNRYASGPVGKALSDACMGTIASFLSKYQDIIIEHQKVVKGNQKRLESLRELAGKENLEYPSVTLPPQPHTKEGVDAYNEVIARVRMWVNLNLWQKLKLSRDDAKPLLRLKGFPSFPLVERQANEVDWWDMVCNVKKLINEKKEDGKVFWQNLAGYKRQEALRPYLSSEEDRKKGKKFARYQLGDLLLHLEKKHGEDWGKVYDEAWERIDKKVEGLSKHIKLEEERRSEDAQSKAALTDWLRAKASFVIEGLKEADKDEFCRCELKLQKWYGDLRGKPFAIEAENSILDISGFSKQYNCAFIWQKDGVKKLNLYLIINYFKGGKLRFKKIKPEAFEANRFYTVINKKSGEIVPMEVNFNFDDPNLIILPLAFGKRFGREFIWNDLLSLETGSLKLANGRVIEKTLYNRRTRQDEPALFVALTFERREVLDSSNIKPMNLIGVDRGENIPAVIALTDPEGCPLSRFKDSLGNPTHILRIRESYKEKQRTIQAKKEVEQRRAGGYSRKYASKAKNLADDMVRNTARDLLYYAVTQDAMLIFENLSRGFGRQGKRTFMAERQYTRMEDWLTAKLAYEGLPSKTYLSKTLAQYTSKTCSNCGFTITSADYDRVLEKLKKTATGWMTTINGKELKVEGQITYYNRYKRQNVVKDLSVELDRLSEESVNNDISSWTKGRSGEALSLLKKRFSHRPVQEKFVCLNCGFETHADEQAALNIARSWLFLRSQEYKKYQTNKTTGNTDKRAFVETWQSFYRKKLKEVWKPAV

SEQ ID NO: 37456 - protein, 977 aa, synthetic construct
  REGION 1..977: note = engineered CasX variant
QEIKRINKIRRRLVKDSNTKKAGKTGPMKTLLVRVMTPDLRERLENLRKKPENIPQPISNTSRANLNKLLTDYTEMKKAILHVYWEEFQKDPVGLMSRVAQPASKKIDQNKLKPEMDEKGNLTTAGFACSQCGQPLFVYKLEQVSEKGKAYTNYFGRCNVAEHEKLILLAQLKPEKDSDEAVTYSLGKFGQRALDFYSIHVTKESTHPVKPLAQIAGNRYASPVGKALSDACMGTIASFLSKYQDIIIEHQKVVKGNQKRLESLRELAGKENLEYPSVTLPPQPHTKEGVDAYNEVIARVRMWVNLNLWQKLKLSRDDAKPLLRLKGFPSFPLVERQANEVDWWDMVCNVKKLINEKKEDGKVFWQNLAGYKRQEALRPYLSSEEDRKKGKKFARYQLGDLLLHLEKKHGEDWGKVYDEAWERIDKKVEGLSKHIKLEEERRSEDAQSKAALTDWLRAKASFVIEGLKEADKDEFCRCELKLQKWYGDLRGKPFAIEAENSILDISGFSKQYNCAFIWQKDGVKKLNLYLIINYFKGGKLRFKKIKPEAFEANRFYTVINKKSGEIVPMEVNFNFDDPNLIILPLAFGKRFGREFIWNDLLSLETGSLKLANGRVIEKTLYNRRTRQDEPALFVALTFERREVLDSSNIKPMNLIGVDRGENIPAVIALTDPEGCPLSRFKDSLGNPTHILRIRESYKEKQRTIQAKKEVEQRRAGGYSRKYASKAKNLADDMVRNTARDLLYYAVTQDAMLIFENLSRGFGRQGKRTFMAERQYTRMEDWLTAKLAYEGLPSKTYLSKTLAQYTSKTCSNCGFTITSADYDRVLEKLKKTATGWMTTINGKELKVEGQITYYNRYKRQNVVKDLSVELDRLSEESVNNDISSWTKGRSGEALSLLKKRFSHRPVQEKFVCLNCGFETHADEQAALNIARSWLFLRSQEYKKYQTNKTTGNTDKRAFVETWQSFYRKKLKEVWKPAV

SEQ ID NO: 37457 - protein, 978 aa, synthetic construct
  REGION 1..978: note = engineered CasX variant
QEIKRINKIRRRLVKDSNTKKAGKTGPMKTLLVRVMTPDLRERLENLRKKPENIPQPISNTSRANLNKLLTDYTEMKKAILHVYWEEFQKDPVGLMSRVAQPASKKIDQNKLKPEMDEKGNLTTAGFACSQCGQPLFVYKLEQVSEKGKAYTNYFGRCNVAEHEKLILLAQLKPEKDSDEAVTYSLGKFGQRALDFYSIHVTKESTHPVKPLAQIAGNRYASYPVGKALSDACMGTIASFLSKYQDIIIEHQKVVKGNQKRLESLRELAGKENLEYPSVTLPPQPHTKEGVDAYNEVIARVRMWVNLNLWQKLKLSRDDAKPLLRLKGFPSFPLVERQANEVDWWDMVCNVKKLINEKKEDGKVFWQNLAGYKRQEALRPYLSSEEDRKKGKKFARYQLGDLLLHLEKKHGEDWGKVYDEAWERIDKKVEGLSKHIKLEEERRSEDAQSKAALTDWLRAKASFVIEGLKEADKDEFCRCELKLQKWYGDLRGKPFAIEAENSILDISGFSKQYNCAFIWQKDGVKKLNLYLIINYFKGGKLRFKKIKPEAFEANRFYTVINKKSGEIVPMEVNFNFDDPNLIILPLAFGKRFGREFIWNDLLSLETGSLKLANGRVIEKTLYNRRTRQDEPALFVALTFERREVLDSSNIKPMNLIGVDRGENIPAVIALTDPEGCPLSRFKDSLGNPTHILRIGESYKEKQRTIQAKKEVEQRRAGGYSRKYASKAKNLADDMVRNTARDLLYYAVTQDAMLIFENLSRGFGRQGKRTFSAERQYTRMEDWLTAKLAYEGLPSKTYLSKTLAQYTSKTCSNCGFTITSADYDRVLEKLKKTATGWMTTINGKELKVEGQITYYNRYKRQNVVKDLSVELDRLSEESVNNDISSWTKGRSGEALSLLKKRFSHRPVQEKFVCLNCGFETHADEQAALNIARSWLFLRSQEYKKYQTNKTTGNTDKRAFVETWQSFYRKKLKEVWKPAV

SEQ ID NO: 37458 - protein, 978 aa, synthetic construct
  REGION 1..978: note = engineered CasX variant
QEIKRINKIRRRLVKDSNTKKAGKTGPMKTLLVRVMTPDLRERLENLRKKPENIPQPISNTSRANLNKLLTDYTEMKKAILHVYWEEFQKDPVGLMSRVAQPASKKIDQNKLKPEMDEKGNLTTAGFACSQCGQPLFVYKLEQVSEKGKAYTNYFGRCNVAEHEKLILLAQLKPEKDSDEAVTYSLGKFGQRALDFYSIHVTKESTHPVKPLAQIAGNRYASHPVGKALSDACMGTIASFLSKYQDIIIEHQKVVKGNQKRLESLRELAGKENLEYPSVTLPPQPHTKEGVDAYNEVIARVRMWVNLNLWQKLKLSRDDAKPLLRLKGFPSFPLVERQANEVDWWDMVCNVKKLINEKKEDGKVFWQNLAGYKRQEALRPYLSSEEDRKKGKKFARYQLGDLLLHLEKKHGEDWGKVYDEAWERIDKKVEGLSKHIKLEEERRSEDAQSKAALTDWLRAKASFVIEGLKEADKDEFCRCELKLQKWYGDLRGKPFAIEAENSILDISGFSKQYNCAFIWQKDGVKKLNLYLIINYFKGGKLRFKKIKPEAFEANRFYTVINKKSGEIVPMEVNFNFDDPNLIILPLAFGKRFGREFIWNDLLSLETGSLKLANGRVIEKTLYNRRTRQDEPALFVALTFERREVLDSSNIKPMNLIGVDRGENIPAVIALTDPEGCPLSRFKDSLGNPTHILRIGESYKEKQRTIQAKKEVEQRRAGGYSRKYASKAKNLADDMVRNTARDLLYYAVTQDAMLIFENLSRGFGRQGKRTFSAERQYTRMEDWLTAKLAYEGLPSKTYLSKTLAQYTSKTCSNCGFTITSADYDRVLEKLKKTATGWMTTINGKELKVEGQITYYNRYKRQNVVKDLSVELDRLSEESVNNDISSWTKGRSGEALSLLKKRFSHRPVQEKFVCLNCGFETHADEQAALNIARSWLFLRSQEYKKYQTNKTTGNTDKRAFVETWQSFYRKKLKEVWKPAV

SEQ ID NO: 37459 - protein, 978 aa, synthetic construct
  REGION 1..978: note = engineered CasX variant
QEIKRINKIRRRLVKDSNTKKAGKTGPMKTLLVRVMTPDLRERLENLRKKPENIPQPISNTSRANLNKLLTDYTEMKKAILHVYWEEFQKDPVGLMSRVAQPASKKIDQNKLKPEMDEKGNLTTAGFACSQCGQPLFVYKLEQVSEKGKAYTNYFGRCNVAEHEKLILLAQLKPEKDSDEAVTYSLGKFGQRALDFYSIHVTKESTHPVKPLAQIAGNRYASSPVGKALSDACMGTIASFLSKYQDIIIEHQKVVKGNQKRLESLRELAGKENLEYPSVTLPPQPHTKEGVDAYNEVIARVRMWVNLNLWQKLKLSRDDAKPLLRLKGFPSFPLVERQANEVDWWDMVCNVKKLINEKKEDGKVFWQNLAGYKRQEALRPYLSSEEDRKKGKKFARYQLGDLLLHLEKKHGEDWGKVYDEAWERIDKKVEGLSKHIKLEEERRSEDAQSKAALTDWLRAKASFVIEGLKEADKDEFCRCELKLQKWYGDLRGKPFAIEAENSILDISGFSKQYNCAFIWQKDGVKKLNLYLIINYFKGGKLRFKKIKPEAFEANRFYTVINKKSGEIVPMEVNFNFDDPNLIILPLAFGKRFGREFIWNDLLSLETGSLKLANGRVIEKTLYNRRTRQDEPALFVALTFERREVLDSSNIKPMNLIGVDRGENIPAVIALTDPEGCPLSRFKDSLGNPTHILRIGESYKEKQRTIQAKKEVEQRRAGGYSRKYASKAKNLADDMVRNTARDLLYYAVTQDAMLIFENLSRGFGRQGKRTFSAERQYTRMEDWLTAKLAYEGLPSKTYLSKTLAQYTSKTCSNCGFTITSADYDRVLEKLKKTATGWMTTINGKELKVEGQITYYNRYKRQNVVKDLSVELDRLSEESVNNDISSWTKGRSGEALSLLKKRFSHRPVQEKFVCLNCGFETHADEQAALNIARSWLFLRSQEYKKYQTNKTTGNTDKRAFVETWQSFYRKKLKEVWKPAV

SEQ ID NO: 37460 - protein, 978 aa, synthetic construct
  REGION 1..978: note = engineered CasX variant
QEIKRINKIRRRLVKDSNTKKAGKTGPMKTLLVRVMTPDLRERLENLRKKPENIPQPISNTSRANLNKLLTDYTEMKKAILHVYWEEFQKDPVGLMSRVAQPASKKIDQNKLKPEMDEKGNLTTAGFACSQCGQPLFVYKLEQVSEKGKAYTNYFGRCNVAEHEKLILLAQLKPEKDSDEAVTYSLGKFGQRALDFYSIHVTKESTHPVKPLAQIAGNRYASTPVGKALSDACMGTIASFLSKYQDIIIEHQKVVKGNQKRLESLRELAGKENLEYPSVTLPPQPHTKEGVDAYNEVIARVRMWVNLNLWQKLKLSRDDAKPLLRLKGFPSFPLVERQANEVDWWDMVCNVKKLINEKKEDGKVFWQNLAGYKRQEALRPYLSSEEDRKKGKKFARYQLGDLLLHLEKKHGEDWGKVYDEAWERIDKKVEGLSKHIKLEEERRSEDAQSKAALTDWLRAKASFVIEGLKEADKDEFCRCELKLQKWYGDLRGKPFAIEAENSILDISGFSKQYNCAFIWQKDGVKKLNLYLIINYFKGGKLRFKKIKPEAFEANRFYTVINKKSGEIVPMEVNFNFDDPNLIILPLAFGKRFGREFIWNDLLSLETGSLKLANGRVIEKTLYNRRTRQDEPALFVALTFERREVLDSSNIKPMNLIGVDRGENIPAVIALTDPEGCPLSRFKDSLGNPTHILRIGESYKEKQRTIQAKKEVEQRRAGGYSRKYASKAKNLADDMVRNTARDLLYYAVTQDAMLIFENLSRGFGRQGKRTFSAERQYTRMEDWLTAKLAYEGLPSKTYLSKTLAQYTSKTCSNCGFTITSADYDRVLEKLKKTATGWMTTINGKELKVEGQITYYNRYKRQNVVKDLSVELDRLSEESVNNDISSWTKGRSGEALSLLKKRFSHRPVQEKFVCLNCGFETHADEQAALNIARSWLFLRSQEYKKYQTNKTTGNTDKRAFVETWQSFYRKKLKEVWKPAV

SEQ ID NO: 37461 - protein, 978 aa, synthetic construct
  REGION 1..978: note = engineered CasX variant
QEIKRINKIRRRLVKDSNTKKAGKTGPMKTLLVRVMTPDLRERLENLRKKPENIPQPISNTSRANLNKLLTDYTEMKKAILHVYWEEFQKDPVGLMSRVAQPASKKIDQNKLKPEMDEKGNLTTAGFACSQCGQPLFVYKLEQVSEKGKAYTNYFGRCNVAEHEKLILLAQLKPEKDSDEAVTYSLGKFGQRALDFYSIHVTKESTHPVKPLAQIAGNRYASAPVGKALSDACMGTIASFLSKYQDIIIEHQKVVKGNQKRLESLRELAGKENLEYPSVTLPPQPHTKEGVDAYNEVIARVRMWVNLNLWQKLKLSRDDAKPLLRLKGFPSFPLVERQANEVDWWDMVCNVKKLINEKKEDGKVFWQNLAGYKRQEALRPYLSSEEDRKKGKKFARYQLGDLLLHLEKKHGEDWGKVYDEAWERIDKKVEGLSKHIKLEEERRSEDAQSKAALTDWLRAKASFVIEGLKEADKDEFCRCELKLQKWYGDLRGKPFAIEAENSILDISGFSKQYNCAFIWQKDGVKKLNLYLIINYFKGGKLRFKKIKPEAFEANRFYTVINKKSGEIVPMEVNFNFDDPNLIILPLAFGKRFGREFIWNDLLSLETGSLKLANGRVIEKTLYNRRTRQDEPALFVALTFERREVLDSSNIKPMNLIGVDRGENIPAVIALTDPEGCPLSRFKDSLGNPTHILRIGESYKEKQRTIQAKKEVEQRRAGGYSRKYASKAKNLADDMVRNTARDLLYYAVTQDAMLIFENLSRGFGRQGKRTFSAERQYTRMEDWLTAKLAYEGLPSKTYLSKTLAQYTSKTCSNCGFTITSADYDRVLEKLKKTATGWMTTINGKELKVEGQITYYNRYKRQNVVKDLSVELDRLSEESVNNDISSWTKGRSGEALSLLKKRFSHRPVQEKFVCLNCGFETHADEQAALNIARSWLFLRSQEYKKYQTNKTTGNTDKRAFVETWQSFYRKKLKEVWKPAV

SEQ ID NO: 37462 - protein, 978 aa, synthetic construct
  REGION 1..978: note = engineered CasX variant
QEIKRINKIRRRLVKDSNTKKAGKTGPMKTLLVRVMTPDLRERLENLRKKPENIPQPISNTSRANLNKLLTDYTEMKKAILHVYWEEFQKDPVGLMSRVAQPASKKIDQNKLKPEMDEKGNLTTAGFACSQCGQPLFVYKLEQVSEKGKAYTNYFGRCNVAEHEKLILLAQLKPEKDSDEAVTYSLGKFGQRALDFYSIHVTKESTHPVKPLAQIAGNRYASVPVGKALSDACMGTIASFLSKYQDIIIEHQKVVKGNQKRLESLRELAGKENLEYPSVTLPPQPHTKEGVDAYNEVIARVRMWVNLNLWQKLKLSRDDAKPLLRLKGFPSFPLVERQANEVDWWDMVCNVKKLINEKKEDGKVFWQNLAGYKRQEALRPYLSSEEDRKKGKKFARYQLGDLLLHLEKKHGEDWGKVYDEAWERIDKKVEGLSKHIKLEEERRSEDAQSKAALTDWLRAKASFVIEGLKEADKDEFCRCELKLQKWYGDLRGKPFAIEAENSILDISGFSKQYNCAFIWQKDGVKKLNLYLIINYFKGGKLRFKKIKPEAFEANRFYTVINKKSGEIVPMEVNFNFDDPNLIILPLAFGKRFGREFIWNDLLSLETGSLKLANGRVIEKTLYNRRTRQDEPALFVALTFERREVLDSSNIKPMNLIGVDRGENIPAVIALTDPEGCPLSRFKDSLGNPTHILRIGESYKEKQRTIQAKKEVEQRRAGGYSRKYASKAKNLADDMVRNTARDLLYYAVTQDAMLIFENLSRGFGRQGKRTFSAERQYTRMEDWLTAKLAYEGLPSKTYLSKTLAQYTSKTCSNCGFTITSADYDRVLEKLKKTATGWMTTINGKELKVEGQITYYNRYKRQNVVKDLSVELDRLSEESVNNDISSWTKGRSGEALSLLKKRFSHRPVQEKFVCLNCGFETHADEQAALNIARSWLFLRSQEYKKYQTNKTTGNTDKRAFVETWQSFYRKKLKEVWKPAV

SEQ ID NO: 37463 - protein, 978 aa, synthetic construct
  REGION 1..978: note = engineered CasX variant
QEIKRINKIRRRLVKDSNTKKAGKTGPMKTLLVRVMTPDLRERLENLRKKPENIPQPISNTSRANLNKLLTDYTEMKKAILHVYWEEFQKDPVGLMSRVAQPASKKIDQNKLKPEMDEKGNLTTAGFACSQCGQPLFVYKLEQVSEKGKAYTNYFGRCNVAEHEKLIKLAQLKPEKDSDEAVTYSLGKFGQRALDFYSIHVTKESTHPVKPLAQIAGNRYASGPVGKALSDACMGTIASFLSKYQDIIIEHQKVVKGNQKRLESLRELAGKENLEYPSVTLPPQPHTKEGVDAYNEVIARVRMWVNLNLWQKLKLSRDDAKPLLRLKGFPSFPLVERQANEVDWWDMVCNVKKLINEKKEDGKVFWQNLAGYKRQEALRPYLSSEEDRKKGKKFARYQLGDLLLHLEKKHGEDWGKVYDEAWERIDKKVEGLSKHIKLEEERRSEDAQSKAALTDWLRAKASFVIEGLKEADKDEFCRCELKLQKWYGDLRGKPFAIEAENSILDISGFSKQYNCAFIWQKDGVKKLNLYLIINYFKGGKLRFKKIKPEAFEANRFYTVINKKSGEIVPMEVNFNFDDPNLIILPLAFGKRFGREFIWNDLLSLETGSLKLANGRVIEKTLYNRRTRQDEPALFVALTFERREVLDSSNIKPMNLIGVDRGENIPAVIALTDPEGCPLSRFKDSLGNPTHILRIGESYKEKQRTIQAKKEVEQRRAGGYSRKYASKAKNLADDMVRNTARDLLYYAVTQDAMLIFENLSRGFGRQGKRTFSAERQYTRMEDWLTAKLAYEGLPSKTYLSKTLAQYTSKTCSNCGFTITSADYDRVLEKLKKTATGWMTTINGKELKVEGQITYYNRYKRQNVVKDLSVELDRLSEESVNNDISSWTKGRSGEALSLLKKRFSHRPVQEKFVCLNCGFETHADEQAALNIARSWLFLRSQEYKKYQTNKTTGNTDKRAFVETWQSFYRKKLKEVWKPAV

SEQ ID NO: 37464 - protein, 977 aa, synthetic construct
  REGION 1..977: note = engineered CasX variant
QEIKRINKIRRRLVKDSNTKKAGKTGPMKTLLVRVMTPDLRERLENLRKKPENIPQPISNTSRANLNKLLTDYTEMKKAILHVYWEEFQKDPVGLMSRVAQPASKKIDQNKLKPEMDEKGNLTTAGFACSQCGQPLFVYKLEQVSEKGKAYTNYFGRCNVAEHEKLILLAQLKPEKDSDEAVTYSLGKFGQRALDFYSIHVTKESTHPVKPLAQIAGNRYASPVGKALSDACMGTIASFLSKYQDIIIEHQKVVKGNQKRLESLRELAGKENLEYPSVTLPPQPHTKEGVDAYNEVIARVRMWVNLNLWQKLKLSRDDAKPLLRLKGFPSFPLVERQANEVDWWDMVCNVKKLINEKKEDGKVFWQNLAGYKRQEALRPYLSSEEDRKKGKKFARYQLGDLLLHLEKKHGEDWGKVYDEAWERIDKKVEGLSKHIKLEEERRSEDAQSKAALTDWLRAKASFVIEGLKEADKDEFCRCELKLQKWYGDLRGKPFAIEAENSILDISGFSKQYNCAFIWQKDGVKKLNLYLIINYFKGGKLRFKKIKPEAFEANRFYTVINKKSGEIVPMEVNFNFDDPNLIILPLAFGKRFGREFIWNDLLSLETGSLKLANGRVIEKTLYNRRTRQDEPALFVALTFERREVLDSSNIKPMNLIGVDRGENIPAVIALTDPEGCPLSRFKDSLGNPTHILRIGESYKEKQRTIQAKKEVEQRRAGGYSRKYASKAKNLADDMVRNTARDLLYYAVTQDAMLIFENLSRGFGRQGKRTFSAERQYTRMEDWLTAKLAYEGLPSKTYLSKTLAQYTSKTCSNCGFTITSADYDRVLEKLKKTATGWMTTINGKELKVEGQITYYNRYKRQNVVKDLSVELDRLSEESVNNDISSWTKGRSGEALSLLKKRFSHRPVQEKFVCLNCGFETHADEQAALNIARSWLFLRSQEYKKYQTNKTTGNTDKRAFVETWQSFYRKKLKEVWKPAV

SEQ ID NO: 37465 - protein, 978 aa, synthetic construct
  REGION 1..978: note = engineered CasX variant
QEIKRINKIRRRLVKDSNTKKAGKTGPMKTLLVRVMTPDLRERLENLRKKPENIPQPISNTSRANLNKLLTDYTEMKKAILHVYWEEFQKDPVGLMSRVAQPASKKIDQNKLKPEMDEKGNLTTAGFACSQCGQPLFVYKLEQVSEKGKAYTNYFGRCNVAEHEKLILLAQLKPEKDSDEAVTYSLGKFGQRALDFYSIHVTKESTHPVKPLAQIAGNRYASYPVGKALSDACMGTIASFLSKYQDIIIEHQKVVKGNQKRLESLRELAGKENLEYPSVTLPPQPHTKEGVDAYNEVIARVRMWVNLNLWQKLKLSRDDAKPLLRLKGFPSFPLVERQANEVDWWDMVCNVKKLINEKKEDGKVFWQNLAGYKRQEALRPYLSSEEDRKKGKKFARYQLGDLLLHLEKKHGEDWGKVYDEAWERIDKKVEGLSKHIKLEEERRSEDAQSKAALTDWLRAKASFVIEGLKEADKDEFCRCELKLQKWYGDLRGKPFAIEAENSILDISGFSKQYNCAFIWQKDGVKKLNLYLIINYFKGGKLRFKKIKPEAFEANRFYTVINKKSGEIVPMEVNFNFDDPNLIILPLAFGKRFGREFIWNDLLSLETGSLKLANGRVIEKTLYNRRTRQDEPALFVALTFERREVLDSSNIKPMNLIGVDRGENIPAVIALTDPEGCPLSRFKDSLGNPTHILRIGESYKEKQRTIQAKKEVEQRRAGGYSRKYASKAKNLADDMVRNTARDLLYYAVTQDAMLIFENLSRGFGRQGKRTFMAERQYTRMEDWLTAKLAYEGLPSKTYLSKTLAQYTSKTCSNCGFTITSADYDRVLEKLKKTATGWMTTINGKELKVEGQITYYNRYKRQNVVKDLSVELDRLSEESVNNDISSWDKGRSGEALSLLKKRFSHRPVQEKFVCLNCGFETHADEQAALNIARSWLFLRSQEYKKYQTNKTTGNTDKRAFVETWQSFYRKKLKEVWKPAV

SEQ ID NO: 37466 - protein, 978 aa, synthetic construct
  REGION 1..978: note = engineered CasX variant
QEIKRINKIRRRLVKDSNTKKAGKTGPMKTLLVRVMTPDLRERLENLRKKPENIPQPISNTSRANLNKLLTDYTEMKKAILHVYWEEFQKDPVGLMSRVAQPASKKIDQNKLKPEMDEKGNLTTAGFACSQCGQPLFVYKLEQVSEKGKAYTNYFGRCNVAEHEKLILLAQLKPEKDSDEAVTYSLGKFGQRALDFYSIHVTKESTHPVKPLAQIAGNRYASHPVGKALSDACMGTIASFLSKYQDIIIEHQKVVKGNQKRLESLRELAGKENLEYPSVTLPPQPHTKEGVDAYNEVIARVRMWVNLNLWQKLKLSRDDAKPLLRLKGFPSFPLVERQANEVDWWDMVCNVKKLINEKKEDGKVFWQNLAGYKRQEALRPYLSSEEDRKKGKKFARYQLGDLLLHLEKKHGEDWGKVYDEAWERIDKKVEGLSKHIKLEEERRSEDAQSKAALTDWLRAKASFVIEGLKEADKDEFCRCELKLQKWYGDLRGKPFAIEAENSILDISGFSKQYNCAFIWQKDGVKKLNLYLIINYFKGGKLRFKKIKPEAFEANRFYTVINKKSGEIVPMEVNFNFDDPNLIILPLAFGKRFGREFIWNDLLSLETGSLKLANGRVIEKTLYNRRTRQDEPALFVALTFERREVLDSSNIKPMNLIGVDRGENIPAVIALTDPEGCPLSRFKDSLGNPTHILRIGESYKEKQRTIQAKKEVEQRRAGGYSRKYASKAKNLADDMVRNTARDLLYYAVTQDAMLIFENLSRGFGRQGKRTFMAERQYTRMEDWLTAKLAYEGLPSKTYLSKTLAQYTSKTCSNCGFTITSADYDRVLEKLKKTATGWMTTINGKELKVEGQITYYNRYKRQNVVKDLSVELDRLSEESVNNDISSWDKGRSGEALSLLKKRFSHRPVQEKFVCLNCGFETHADEQAALNIARSWLFLRSQEYKKYQTNKTTGNTDKRAFVETWQSFYRKKLKEVWKPAV

SEQ ID NO: 37467 - protein, 978 aa, synthetic construct
  REGION 1..978: note = engineered CasX variant
QEIKRINKIRRRLVKDSNTKKAGKTGPMKTLLVRVMTPDLRERLENLRKKPENIPQPISNTSRANLNKLLTDYTEMKKAILHVYWEEFQKDPVGLMSRVAQPASKKIDQNKLKPEMDEKGNLTTAGFACSQCGQPLFVYKLEQVSEKGKAYTNYFGRCNVAEHEKLILLAQLKPEKDSDEAVTYSLGKFGQRALDFYSIHVTKESTHPVKPLAQIAGNRYASSPVGKALSDACMGTIASFLSKYQDIIIEHQKVVKGNQKRLESLRELAGKENLEYPSVTLPPQPHTKEGVDAYNEVIARVRMWVNLNLWQKLKLSRDDAKPLLRLKGFPSFPLVERQANEVDWWDMVCNVKKLINEKKEDGKVFWQNLAGYKRQEALRPYLSSEEDRKKGKKFARYQLGDLLLHLEKKHGEDWGKVYDEAWERIDKKVEGLSKHIKLEEERRSEDAQSKAALTDWLRAKASFVIEGLKEADKDEFCRCELKLQKWYGDLRGKPFAIEAENSILDISGFSKQYNCAFIWQKDGVKKLNLYLIINYFKGGKLRFKKIKPEAFEANRFYTVINKKSGEIVPMEVNFNFDDPNLIILPLAFGKRFGREFIWNDLLSLETGSLKLANGRVIEKTLYNRRTRQDEPALFVALTFERREVLDSSNIKPMNLIGVDRGENIPAVIALTDPEGCPLSRFKDSLGNPTHILRIGESYKEKQRTIQAKKEVEQRRAGGYSRKYASKAKNLADDMVRNTARDLLYYAVTQDAMLIFENLSRGFGRQGKRTFMAERQYTRMEDWLTAKLAYEGLPSKTYLSKTLAQYTSKTCSNCGFTITSADYDRVLEKLKKTATGWMTTINGKELKVEGQITYYNRYKRQNVVKDLSVELDRLSEESVNNDISSWDKGRSGEALSLLKKRFSHRPVQEKFVCLNCGFETHADEQAALNIARSWLFLRSQEYKKYQTNKTTGNTDKRAFVETWQSFYRKKLKEVWKPAV

SEQ ID NO: 37468 - protein, 978 aa, synthetic construct
  REGION 1..978: note = engineered CasX variant
QEIKRINKIRRRLVKDSNTKKAGKTGPMKTLLVRVMTPDLRERLENLRKKPENIPQPISNTSRANLNKLLTDYTEMKKAILHVYWEEFQKDPVGLMSRVAQPASKKIDQNKLKPEMDEKGNLTTAGFACSQCGQPLFVYKLEQVSEKGKAYTNYFGRCNVAEHEKLILLAQLKPEKDSDEAVTYSLGKFGQRALDFYSIHVTKESTHPVKPLAQIAGNRYASTPVGKALSDACMGTIASFLSKYQDIIIEHQKVVKGNQKRLESLRELAGKENLEYPSVTLPPQPHTKEGVDAYNEVIARVRMWVNLNLWQKLKLSRDDAKPLLRLKGFPSFPLVERQANEVDWWDMVCNVKKLINEKKEDGKVFWQNLAGYKRQEALRPYLSSEEDRKKGKKFARYQLGDLLLHLEKKHGEDWGKVYDEAWERIDKKVEGLSKHIKLEEERRSEDAQSKAALTDWLRAKASFVIEGLKEADKDEFCRCELKLQKWYGDLRGKPFAIEAENSILDISGFSKQYNCAFIWQKDGVKKLNLYLIINYFKGGKLRFKKIKPEAFEANRFYTVINKKSGEIVPMEVNFNFDDPNLIILPLAFGKRFGREFIWNDLLSLETGSLKLANGRVIEKTLYNRRTRQDEPALFVALTFERREVLDSSNIKPMNLIGVDRGENIPAVIALTDPEGCPLSRFKDSLGNPTHILRIGESYKEKQRTIQAKKEVEQRRAGGYSRKYASKAKNLADDMVRNTARDLLYYAVTQDAMLIFENLSRGFGRQGKRTFMAERQYTRMEDWLTAKLAYEGLPSKTYLSKTLAQYTSKTCSNCGFTITSADYDRVLEKLKKTATGWMTTINGKELKVEGQITYYNRYKRQNVVKDLSVELDRLSEESVNNDISSWDKGRSGEALSLLKKRFSHRPVQEKFVCLNCGFETHADEQAALNIARSWLFLRSQEYKKYQTNKTTGNTDKRAFVETWQSFYRKKLKEVWKPAV

SEQ ID NO: 37469 - protein, 978 aa, synthetic construct
  REGION 1..978: note = engineered CasX variant
QEIKRINKIRRRLVKDSNTKKAGKTGPMKTLLVRVMTPDLRERLENLRKKPENIPQPISNTSRANLNKLLTDYTEMKKAILHVYWEEFQKDPVGLMSRVAQPASKKIDQNKLKPEMDEKGNLTTAGFACSQCGQPLFVYKLEQVSEKGKAYTNYFGRCNVAEHEKLILLAQLKPEKDSDEAVTYSLGKFGQRALDFYSIHVTKESTHPVKPLAQIAGNRYASAPVGKALSDACMGTIASFLSKYQDIIIEHQKVVKGNQKRLESLRELAGKENLEYPSVTLPPQPHTKEGVDAYNEVIARVRMWVNLNLWQKLKLSRDDAKPLLRLKGFPSFPLVERQANEVDWWDMVCNVKKLINEKKEDGKVFWQNLAGYKRQEALRPYLSSEEDRKKGKKFARYQLGDLLLHLEKKHGEDWGKVYDEAWERIDKKVEGLSKHIKLEEERRSEDAQSKAALTDWLRAKASFVIEGLKEADKDEFCRCELKLQKWYGDLRGKPFAIEAENSILDISGFSKQYNCAFIWQKDGVKKLNLYLIINYFKGGKLRFKKIKPEAFEANRFYTVINKKSGEIVPMEVNFNFDDPNLIILPLAFGKRFGREFIWNDLLSLETGSLKLANGRVIEKTLYNRRTRQDEPALFVALTFERREVLDSSNIKPMNLIGVDRGENIPAVIALTDPEGCPLSRFKDSLGNPTHILRIGESYKEKQRTIQAKKEVEQRRAGGYSRKYASKAKNLADDMVRNTARDLLYYAVTQDAMLIFENLSRGFGRQGKRTFMAERQYTRMEDWLTAKLAYEGLPSKTYLSKTLAQYTSKTCSNCGFTITSADYDRVLEKLKKTATGWMTTINGKELKVEGQITYYNRYKRQNVVKDLSVELDRLSEESVNNDISSWDKGRSGEALSLLKKRFSHRPVQEKFVCLNCGFETHADEQAALNIARSWLFLRSQEYKKYQTNKTTGNTDKRAFVETWQSFYRKKLKEVWKPAV

SEQ ID NO: 37470 - protein, 978 aa, synthetic construct
  REGION 1..978: note = engineered CasX variant
QEIKRINKIRRRLVKDSNTKKAGKTGPMKTLLVRVMTPDLRERLENLRKKPENIPQPISNTSRANLNKLLTDYTEMKKAILHVYWEEFQKDPVGLMSRVAQPASKKIDQNKLKPEMDEKGNLTTAGFACSQCGQPLFVYKLEQVSEKGKAYTNYFGRCNVAEHEKLILLAQLKPEKDSDEAVTYSLGKFGQRALDFYSIHVTKESTHPVKPLAQIAGNRYASVPVGKALSDACMGTIASFLSKYQDIIIEHQKVVKGNQKRLESLRELAGKENLEYPSVTLPPQPHTKEGVDAYNEVIARVRMWVNLNLWQKLKLSRDDAKPLLRLKGFPSFPLVERQANEVDWWDMVCNVKKLINEKKEDGKVFWQNLAGYKRQEALRPYLSSEEDRKKGKKFARYQLGDLLLHLEKKHGEDWGKVYDEAWERIDKKVEGLSKHIKLEEERRSEDAQSKAALTDWLRAKASFVIEGLKEADKDEFCRCELKLQKWYGDLRGKPFAIEAENSILDISGFSKQYNCAFIWQKDGVKKLNLYLIINYFKGGKLRFKKIKPEAFEANRFYTVINKKSGEIVPMEVNFNFDDPNLIILPLAFGKRFGREFIWNDLLSLETGSLKLANGRVIEKTLYNRRTRQDEPALFVALTFERREVLDSSNIKPMNLIGVDRGENIPAVIALTDPEGCPLSRFKDSLGNPTHILRIGESYKEKQRTIQAKKEVEQRRAGGYSRKYASKAKNLADDMVRNTARDLLYYAVTQDAMLIFENLSRGFGRQGKRTFMAERQYTRMEDWLTAKLAYEGLPSKTYLSKTLAQYTSKTCSNCGFTITSADYDRVLEKLKKTATGWMTTINGKELKVEGQITYYNRYKRQNVVKDLSVELDRLSEESVNNDISSWDKGRSGEALSLLKKRFSHRPVQEKFVCLNCGFETHADEQAALNIARSWLFLRSQEYKKYQTNKTTGNTDKRAFVETWQSFYRKKLKEVWKPAV

SEQ ID NO: 37471 - protein, 978 aa, synthetic construct
  REGION 1..978: note = engineered CasX variant
QEIKRINKIRRRLVKDSNTKKAGKTGPMKTLLVRVMTPDLRERLENLRKKPENIPQPISNTSRANLNKLLTDYTEMKKAILHVYWEEFQKDPVGLMSRVAQPASKKIDQNKLKPEMDEKGNLTTAGFACSQCGQPLFVYKLEQVSEKGKAYTNYFGRCNVAEHEKLIKLAQLKPEKDSDEAVTYSLGKFGQRALDFYSIHVTKESTHPVKPLAQIAGNRYASGPVGKALSDACMGTIASFLSKYQDIIIEHQKVVKGNQKRLESLRELAGKENLEYPSVTLPPQPHTKEGVDAYNEVIARVRMWVNLNLWQKLKLSRDDAKPLLRLKGFPSFPLVERQANEVDWWDMVCNVKKLINEKKEDGKVFWQNLAGYKRQEALRPYLSSEEDRKKGKKFARYQLGDLLLHLEKKHGEDWGKVYDEAWERIDKKVEGLSKHIKLEEERRSEDAQSKAALTDWLRAKASFVIEGLKEADKDEFCRCELKLQKWYGDLRGKPFAIEAENSILDISGFSKQYNCAFIWQKDGVKKLNLYLIINYFKGGKLRFKKIKPEAFEANRFYTVINKKSGEIVPMEVNFNFDDPNLIILPLAFGKRFGREFIWNDLLSLETGSLKLANGRVIEKTLYNRRTRQDEPALFVALTFERREVLDSSNIKPMNLIGVDRGENIPAVIALTDPEGCPLSRFKDSLGNPTHILRIGESYKEKQRTIQAKKEVEQRRAGGYSRKYASKAKNLADDMVRNTARDLLYYAVTQDAMLIFENLSRGFGRQGKRTFMAERQYTRMEDWLTAKLAYEGLPSKTYLSKTLAQYTSKTCSNCGFTITSADYDRVLEKLKKTATGWMTTINGKELKVEGQITYYNRYKRQNVVKDLSVELDRLSEESVNNDISSWDKGRSGEALSLLKKRFSHRPVQEKFVCLNCGFETHADEQAALNIARSWLFLRSQEYKKYQTNKTTGNTDKRAFVETWQSFYRKKLKEVWKPAV

SEQ ID NO: 37472 - protein, 977 aa, synthetic construct
  REGION 1..977: note = engineered CasX variant
QEIKRINKIRRRLVKDSNTKKAGKTGPMKTLLVRVMTPDLRERLENLRKKPENIPQPISNTSRANLNKLLTDYTEMKKAILHVYWEEFQKDPVGLMSRVAQPASKKIDQNKLKPEMDEKGNLTTAGFACSQCGQPLFVYKLEQVSEKGKAYTNYFGRCNVAEHEKLILLAQLKPEKDSDEAVTYSLGKFGQRALDFYSIHVTKESTHPVKPLAQIAGNRYASPVGKALSDACMGTIASFLSKYQDIIIEHQKVVKGNQKRLESLRELAGKENLEYPSVTLPPQPHTKEGVDAYNEVIARVRMWVNLNLWQKLKLSRDDAKPLLRLKGFPSFPLVERQANEVDWWDMVCNVKKLINEKKEDGKVFWQNLAGYKRQEALRPYLSSEEDRKKGKKFARYQLGDLLLHLEKKHGEDWGKVYDEAWERIDKKVEGLSKHIKLEEERRSEDAQSKAALTDWLRAKASFVIEGLKEADKDEFCRCELKLQKWYGDLRGKPFAIEAENSILDISGFSKQYNCAFIWQKDGVKKLNLYLIINYFKGGKLRFKKIKPEAFEANRFYTVINKKSGEIVPMEVNFNFDDPNLIILPLAFGKRFGREFIWNDLLSLETGSLKLANGRVIEKTLYNRRTRQDEPALFVALTFERREVLDSSNIKPMNLIGVDRGENIPAVIALTDPEGCPLSRFKDSLGNPTHILRIGESYKEKQRTIQAKKEVEQRRAGGYSRKYASKAKNLADDMVRNTARDLLYYAVTQDAMLIFENLSRGFGRQGKRTFMAERQYTRMEDWLTAKLAYEGLPSKTYLSKTLAQYTSKTCSNCGFTITSADYDRVLEKLKKTATGWMTTINGKELKVEGQITYYNRYKRQNVVKDLSVELDRLSEESVNNDISSWDKGRSGEALSLLKKRFSHRPVQEKFVCLNCGFETHADEQAALNIARSWLFLRSQEYKKYQTNKTTGNTDKRAFVETWQSFYRKKLKEVWKPAV

SEQ ID NO: 37473 - protein, 978 aa, synthetic construct
  REGION 1..978: note = engineered CasX variant
QEIKRINKIRRRLVKDSNTKKAGKTGPMKTLLVRVMTPDLRERLENLRKKPENIPQPISNTSRANLNKLLTDYTEMKKAILHVYWEEFQVDPVGLMSRVAQPASKKIDQNKLKPEMDEKGNLTTAGFACSQCGQPLFVYKLEQVSEKGKAYTNYFGRCNVAEHEKLILLAQLKPEKDSDEAVTYSLGKFGQRALDFYSIHVTKESTHPVKPLAQIAGNRYASYPVGKALSDACMGTIASFLSKYQDIIIEHQKVVKGNQKRLESLRELAGKENLEYPSVTLPPQPHTKEGVDAYNEVIARVRMWVNLNLWQKLKLSRDDAKPLLRLKGFPSFPLVERQANEVDWWDMVCNVKKLINEKKEDGKVFWQNLAGYKRQEALRPYLSSEEDRKKGKKFARYQLGDLLLHLEKKHGEDWGKVYDEAWERIDKKVEGLSKHIKLEEERRSEDAQSKAALTDWLRAKASFVIEGLKEADKDEFCRCELKLQKWYGDLRGKPFAIEAENSILDISGFSKQYNCAFIWQKDGVKKLNLYLIINYFKGGKLRFKKIKPEAFEANRFYTVINKKSGEIVPMEVNFNFDDPNLIILPLAFGKRFGREFIWNDLLSLETGSLKLANGRVIEKTLYNRRTRQDEPALFVALTFERREVLDSSNIKPMNLIGVDRGENIPAVIALTDPEGCPLSRFKDSLGNPTHILRIGESYKEKQRTIQAKKEVEQRRAGGYSRKYASKAKNLADDMVRNTARDLLYYAVTQDAMLIFENLSRGFGRQGKRTFMAERQYTRMEDWLTAKLAYEGLPSKTYLSKTLAQYTSKTCSNCGFTITSADYDRVLEKLKKTATGWMTTINGKELKVEGQITYYNRYKRQNVVKDLSVELDRLSEESVNNDISSWTKGRSGEALSLLKKRFSHRPVQEKFVCLNCGFETHADEQAALNIARSWLFLRSQEYKKYQTNKTTGNTDKRAFVETWQSFYRKKLKEVWKPAV

SEQ ID NO: 37474 - protein, 978 aa, synthetic construct
  REGION 1..978: note = engineered CasX variant
QEIKRINKIRRRLVKDSNTKKAGKTGPMKTLLVRVMTPDLRERLENLRKKPENIPQPISNTSRANLNKLLTDYTEMKKAILHVYWEEFQVDPVGLMSRVAQPASKKIDQNKLKPEMDEKGNLTTAGFACSQCGQPLFVYKLEQVSEKGKAYTNYFGRCNVAEHEKLILLAQLKPEKDSDEAVTYSLGKFGQRALDFYSIHVTKESTHPVKPLAQIAGNRYASHPVGKALSDACMGTIASFLSKYQDIIIEHQKVVKGNQKRLESLRELAGKENLEYPSVTLPPQPHTKEGVDAYNEVIARVRMWVNLNLWQKLKLSRDDAKPLLRLKGFPSFPLVERQANEVDWWDMVCNVKKLINEKKEDGKVFWQNLAGYKRQEALRPYLSSEEDRKKGKKFARYQLGDLLLHLEKKHGEDWGKVYDEAWERIDKKVEGLSKHIKLEEERRSEDAQSKAALTDWLRAKASFVIEGLKEADKDEFCRCELKLQKWYGDLRGKPFAIEAENSILDISGFSKQYNCAFIWQKDGVKKLNLYLIINYFKGGKLRFKKIKPEAFEANRFYTVINKKSGEIVPMEVNFNFDDPNLIILPLAFGKRFGREFIWNDLLSLETGSLKLANGRVIEKTLYNRRTRQDEPALFVALTFERREVLDSSNIKPMNLIGVDRGENIPAVIALTDPEGCPLSRFKDSLGNPTHILRIGESYKEKQRTIQAKKEVEQRRAGGYSRKYASKAKNLADDMVRNTARDLLYYAVTQDAMLIFENLSRGFGRQGKRTFMAERQYTRMEDWLTAKLAYEGLPSKTYLSKTLAQYTSKTCSNCGFTITSADYDRVLEKLKKTATGWMTTINGKELKVEGQITYYNRYKRQNVVKDLSVELDRLSEESVNNDISSWTKGRSGEALSLLKKRFSHRPVQEKFVCLNCGFETHADEQAALNIARSWLFLRSQEYKKYQTNKTTGNTDKRAFVETWQSFYRKKLKEVWKPAV

SEQ ID NO: 37475 - protein, 978 aa, synthetic construct
  REGION 1..978: note = engineered CasX variant
QEIKRINKIRRRLVKDSNTKKAGKTGPMKTLLVRVMTPDLRERLENLRKKPENIPQPISNTSRANLNKLLTDYTEMKKAILHVYWEEFQVDPVGLMSRVAQPASKKIDQNKLKPEMDEKGNLTTAGFACSQCGQPLFVYKLEQVSEKGKAYTNYFGRCNVAEHEKLILLAQLKPEKDSDEAVTYSLGKFGQRALDFYSIHVTKESTHPVKPLAQIAGNRYASSPVGKALSDACMGTIASFLSKYQDIIIEHQKVVKGNQKRLESLRELAGKENLEYPSVTLPPQPHTKEGVDAYNEVIARVRMWVNLNLWQKLKLSRDDAKPLLRLKGFPSFPLVERQANEVDWWDMVCNVKKLINEKKEDGKVFWQNLAGYKRQEALRPYLSSEEDRKKGKKFARYQLGDLLLHLEKKHGEDWGKVYDEAWERIDKKVEGLSKHIKLEEERRSEDAQSKAALTDWLRAKASFVIEGLKEADKDEFCRCELKLQKWYGDLRGKPFAIEAENSILDISGFSKQYNCAFIWQKDGVKKLNLYLIINYFKGGKLRFKKIKPEAFEANRFYTVINKKSGEIVPMEVNFNFDDPNLIILPLAFGKRFGREFIWNDLLSLETGSLKLANGRVIEKTLYNRRTRQDEPALFVALTFERREVLDSSNIKPMNLIGVDRGENIPAVIALTDPEGCPLSRFKDSLGNPTHILRIGESYKEKQRTIQAKKEVEQRRAGGYSRKYASKAKNLADDMVRNTARDLLYYAVTQDAMLIFENLSRGFGRQGKRTFMAERQYTRMEDWLTAKLAYEGLPSKTYLSKTLAQYTSKTCSNCGFTITSADYDRVLEKLKKTATGWMTTINGKELKVEGQITYYNRYKRQNVVKDLSVELDRLSEESVNNDISSWTKGRSGEALSLLKKRFSHRPVQEKFVCLNCGFETHADEQAALNIARSWLFLRSQEYKKYQTNKTTGNTDKRAFVETWQSFYRKKLKEVWKPAV

SEQ ID NO: 37476 - protein, 978 aa, synthetic construct
  REGION 1..978: note = engineered CasX variant
QEIKRINKIRRRLVKDSNTKKAGKTGPMKTLLVRVMTPDLRERLENLRKKPENIPQPISNTSRANLNKLLTDYTEMKKAILHVYWEEFQVDPVGLMSRVAQPASKKIDQNKLKPEMDEKGNLTTAGFACSQCGQPLFVYKLEQVSEKGKAYTNYFGRCNVAEHEKLILLAQLKPEKDSDEAVTYSLGKFGQRALDFYSIHVTKESTHPVKPLAQIAGNRYASTPVGKALSDACMGTIASFLSKYQDIIIEHQKVVKGNQKRLESLRELAGKENLEYPSVTLPPQPHTKEGVDAYNEVIARVRMWVNLNLWQKLKLSRDDAKPLLRLKGFPSFPLVERQANEVDWWDMVCNVKKLINEKKEDGKVFWQNLAGYKRQEALRPYLSSEEDRKKGKKFARYQLGDLLLHLEKKHGEDWGKVYDEAWERIDKKVEGLSKHIKLEEERRSEDAQSKAALTDWLRAKASFVIEGLKEADKDEFCRCELKLQKWYGDLRGKPFAIEAENSILDISGFSKQYNCAFIWQKDGVKKLNLYLIINYFKGGKLRFKKIKPEAFEANRFYTVINKKSGEIVPMEVNFNFDDPNLIILPLAFGKRFGREFIWNDLLSLETGSLKLANGRVIEKTLYNRRTRQDEPALFVALTFERREVLDSSNIKPMNLIGVDRGENIPAVIALTDPEGCPLSRFKDSLGNPTHILRIGESYKEKQRTIQAKKEVEQRRAGGYSRKYASKAKNLADDMVRNTARDLLYYAVTQDAMLIFENLSRGFGRQGKRTFMAERQYTRMEDWLTAKLAYEGLPSKTYLSKTLAQYTSKTCSNCGFTITSADYDRVLEKLKKTATGWMTTINGKELKVEGQITYYNRYKRQNVVKDLSVELDRLSEESVNNDISSWTKGRSGEALSLLKKRFSHRPVQEKFVCLNCGFETHADEQAALNIARSWLFLRSQEYKKYQTNKTTGNTDKRAFVETWQSFYRKKLKEVWKPAV

SEQ ID NO: 37477 - protein, 978 aa, synthetic construct
  REGION 1..978: note = engineered CasX variant
QEIKRINKIRRRLVKDSNTKKAGKTGPMKTLLVRVMTPDLRERLENLRKKPENIPQPISNTSRANLNKLLTDYTEMKKAILHVYWEEFQVDPVGLMSRVAQPASKKIDQNKLKPEMDEKGNLTTAGFACSQCGQPLFVYKLEQVSEKGKAYTNYFGRCNVAEHEKLILLAQLKPEKDSDEAVTYSLGKFGQRALDFYSIHVTKESTHPVKPLAQIAGNRYASAPVGKALSDACMGTIASFLSKYQDIIIEHQKVVKGNQKRLESLRELAGKENLEYPSVTLPPQPHTKEGVDAYNEVIARVRMWVNLNLWQKLKLSRDDAKPLLRLKGFPSFPLVERQANEVDWWDMVCNVKKLINEKKEDGKVFWQNLAGYKRQEALRPYLSSEEDRKKGKKFARYQLGDLLLHLEKKHGEDWGKVYDEAWERIDKKVEGLSKHIKLEEERRSEDAQSKAALTDWLRAKASFVIEGLKEADKDEFCRCELKLQKWYGDLRGKPFAIEAENSILDISGFSKQYNCAFIWQKDGVKKLNLYLIINYFKGGKLRFKKIKPEAFEANRFYTVINKKSGEIVPMEVNFNFDDPNLIILPLAFGKRFGREFIWNDLLSLETGSLKLANGRVIEKTLYNRRTRQDEPALFVALTFERREVLDSSNIKPMNLIGVDRGENIPAVIALTDPEGCPLSRFKDSLGNPTHILRIGESYKEKQRTIQAKKEVEQRRAGGYSRKYASKAKNLADDMVRNTARDLLYYAVTQDAMLIFENLSRGFGRQGKRTFMAERQYTRMEDWLTAKLAYEGLPSKTYLSKTLAQYTSKTCSNCGFTITSADYDRVLEKLKKTATGWMTTINGKELKVEGQITYYNRYKRQNVVKDLSVELDRLSEESVNNDISSWTKGRSGEALSLLKKRFSHRPVQEKFVCLNCGFETHADEQAALNIARSWLFLRSQEYKKYQTNKTTGNTDKRAFVETWQSFYRKKLKEVWKPAV

SEQ ID NO: 37478 - protein, 978 aa, synthetic construct
  REGION 1..978: note = engineered CasX variant
QEIKRINKIRRRLVKDSNTKKAGKTGPMKTLLVRVMTPDLRERLENLRKKPENIPQPISNTSRANLNKLLTDYTEMKKAILHVYWEEFQVDPVGLMSRVAQPASKKIDQNKLKPEMDEKGNLTTAGFACSQCGQPLFVYKLEQVSEKGKAYTNYFGRCNVAEHEKLILLAQLKPEKDSDEAVTYSLGKFGQRALDFYSIHVTKESTHPVKPLAQIAGNRYASVPVGKALSDACMGTIASFLSKYQDIIIEHQKVVKGNQKRLESLRELAGKENLEYPSVTLPPQPHTKEGVDAYNEVIARVRMWVNLNLWQKLKLSRDDAKPLLRLKGFPSFPLVERQANEVDWWDMVCNVKKLINEKKEDGKVFWQNLAGYKRQEALRPYLSSEEDRKKGKKFARYQLGDLLLHLEKKHGEDWGKVYDEAWERIDKKVEGLSKHIKLEEERRSEDAQSKAALTDWLRAKASFVIEGLKEADKDEFCRCELKLQKWYGDLRGKPFAIEAENSILDISGFSKQYNCAFIWQKDGVKKLNLYLIINYFKGGKLRFKKIKPEAFEANRFYTVINKKSGEIVPMEVNFNFDDPNLIILPLAFGKRFGREFIWNDLLSLETGSLKLANGRVIEKTLYNRRTRQDEPALFVALTFERREVLDSSNIKPMNLIGVDRGENIPAVIALTDPEGCPLSRFKDSLGNPTHILRIGESYKEKQRTIQAKKEVEQRRAGGYSRKYASKAKNLADDMVRNTARDLLYYAVTQDAMLIFENLSRGFGRQGKRTFMAERQYTRMEDWLTAKLAYEGLPSKTYLSKTLAQYTSKTCSNCGFTITSADYDRVLEKLKKTATGWMTTINGKELKVEGQITYYNRYKRQNVVKDLSVELDRLSEESVNNDISSWTKGRSGEALSLLKKRFSHRPVQEKFVCLNCGFETHADEQAALNIARSWLFLRSQEYKKYQTNKTTGNTDKRAFVETWQSFYRKKLKEVWKPAV

SEQ ID NO: 37479 - protein, 978 aa, synthetic construct
  REGION 1..978: note = engineered CasX variant
QEIKRINKIRRRLVKDSNTKKAGKTGPMKTLLVRVMTPDLRERLENLRKKPENIPQPISNTSRANLNKLLTDYTEMKKAILHVYWEEFQVDPVGLMSRVAQPASKKIDQNKLKPEMDEKGNLTTAGFACSQCGQPLFVYKLEQVSEKGKAYTNYFGRCNVAEHEKLIKLAQLKPEKDSDEAVTYSLGKFGQRALDFYSIHVTKESTHPVKPLAQIAGNRYASGPVGKALSDACMGTIASFLSKYQDIIIEHQKVVKGNQKRLESLRELAGKENLEYPSVTLPPQPHTKEGVDAYNEVIARVRMWVNLNLWQKLKLSRDDAKPLLRLKGFPSFPLVERQANEVDWWDMVCNVKKLINEKKEDGKVFWQNLAGYKRQEALRPYLSSEEDRKKGKKFARYQLGDLLLHLEKKHGEDWGKVYDEAWERIDKKVEGLSKHIKLEEERRSEDAQSKAALTDWLRAKASFVIEGLKEADKDEFCRCELKLQKWYGDLRGKPFAIEAENSILDISGFSKQYNCAFIWQKDGVKKLNLYLIINYFKGGKLRFKKIKPEAFEANRFYTVINKKSGEIVPMEVNFNFDDPNLIILPLAFGKRFGREFIWNDLLSLETGSLKLANGRVIEKTLYNRRTRQDEPALFVALTFERREVLDSSNIKPMNLIGVDRGENIPAVIALTDPEGCPLSRFKDSLGNPTHILRIGESYKEKQRTIQAKKEVEQRRAGGYSRKYASKAKNLADDMVRNTARDLLYYAVTQDAMLIFENLSRGFGRQGKRTFMAERQYTRMEDWLTAKLAYEGLPSKTYLSKTLAQYTSKTCSNCGFTITSADYDRVLEKLKKTATGWMTTINGKELKVEGQITYYNRYKRQNVVKDLSVELDRLSEESVNNDISSWTKGRSGEALSLLKKRFSHRPVQEKFVCLNCGFETHADEQAALNIARSWLFLRSQEYKKYQTNKTTGNTDKRAFVETWQSFYRKKLKEVWKPAV

SEQ ID NO: 37480 - protein, 977 aa, synthetic construct
  REGION 1..977: note = engineered CasX variant
QEIKRINKIRRRLVKDSNTKKAGKTGPMKTLLVRVMTPDLRERLENLRKKPENIPQPISNTSRANLNKLLTDYTEMKKAILHVYWEEFQVDPVGLMSRVAQPASKKIDQNKLKPEMDEKGNLTTAGFACSQCGQPLFVYKLEQVSEKGKAYTNYFGRCNVAEHEKLILLAQLKPEKDSDEAVTYSLGKFGQRALDFYSIHVTKESTHPVKPLAQIAGNRYASPVGKALSDACMGTIASFLSKYQDIIIEHQKVVKGNQKRLESLRELAGKENLEYPSVTLPPQPHTKEGVDAYNEVIARVRMWVNLNLWQKLKLSRDDAKPLLRLKGFPSFPLVERQANEVDWWDMVCNVKKLINEKKEDGKVFWQNLAGYKRQEALRPYLSSEEDRKKGKKFARYQLGDLLLHLEKKHGEDWGKVYDEAWERIDKKVEGLSKHIKLEEERRSEDAQSKAALTDWLRAKASFVIEGLKEADKDEFCRCELKLQKWYGDLRGKPFAIEAENSILDISGFSKQYNCAFIWQKDGVKKLNLYLIINYFKGGKLRFKKIKPEAFEANRFYTVINKKSGEIVPMEVNFNFDDPNLIILPLAFGKRFGREFIWNDLLSLETGSLKLANGRVIEKTLYNRRTRQDEPALFVALTFERREVLDSSNIKPMNLIGVDRGENIPAVIALTDPEGCPLSRFKDSLGNPTHILRIGESYKEKQRTIQAKKEVEQRRAGGYSRKYASKAKNLADDMVRNTARDLLYYAVTQDAMLIFENLSRGFGRQGKRTFMAERQYTRMEDWLTAKLAYEGLPSKTYLSKTLAQYTSKTCSNCGFTITSADYDRVLEKLKKTATGWMTTINGKELKVEGQITYYNRYKRQNVVKDLSVELDRLSEESVNNDISSWTKGRSGEALSLLKKRFSHRPVQEKFVCLNCGFETHADEQAALNIARSWLFLRSQEYKKYQTNKTTGNTDKRAFVETWQSFYRKKLKEVWKPAV

SEQ ID NO: 37481 - protein, 978 aa, synthetic construct
  REGION 1..978: note = engineered CasX variant
QEIKRLNKIRRRLVKDSNTKKAGKTGPMKTLLVRVMTPDLRERLENLRKKPENIPQPISNTSRANLNKLLTDYTEMKKAILHVYWEEFQKDPVGLMSRVAQPASKKIDQNKLKPEMDEKGNLTTAGFACSQCGQPLFVYKLEQVSEKGKAYTNYFGRCNVAEHEKLILLAQLKPEKDSDEAVTYSLGKFGQRALDFYSIHVTKESTHPVKPLAQIAGNRYASYPVGKALSDACMGTIASFLSKYQDIIIEHQKVVKGNQKRLESLRELAGKENLEYPSVTLPPQPHTKEGVDAYNEVIARVRMWVNLNLWQKLKLSRDDAKPLLRLKGFPSFPLVERQANEVDWWDMVCNVKKLINEKKEDGKVFWQNLAGYKRQEALRPYLSSEEDRKKGKKFARYQLGDLLLHLEKKHGEDWGKVYDEAWERIDKKVEGLSKHIKLEEERRSEDAQSKAALTDWLRAKASFVIEGLKEADKDEFCRCELKLQKWYGDLRGKPFAIEAENSILDISGFSKQYNCAFIWQKDGVKKLNLYLIINYFKGGKLRFKKIKPEAFEANRFYTVINKKSGEIVPMEVNFNFDDPNLIILPLAFGKRFGREFIWNDLLSLETGSLKLANGRVIEKTLYNRRTRQDEPALFVALTFERREVLDSSNIKPMNLIGVDRGENIPAVIALTDPEGCPLSRFKDSLGNPTHILRIGESYKEKQRTIQAKKEVEQRRAGGYSRKYASKAKNLADDMVRNTARDLLYYAVTQDAMLIFENLSRGFGRQGKRTFMAERQYTRMEDWLTAKLAYEGLPSKTYLSKTLAQYTSKTCSNCGFTITSADYDRVLEKLKKTATGWMTTINGKELKVEGQITYYNRYKRQNVVKDLSVELDRLSEESVNNDISSWTKGRSGEALSLLKKRFSHRPVQEKFVCLNCGFETHADEQAALNIARSWLFLRSQEYKKYQTNKTTGNTDKRAFVETWQSFYRKKLKEVWKPAV

SEQ ID NO: 37482 - protein, 978 aa, synthetic construct
  REGION 1..978: note = engineered CasX variant
QEIKRLNKIRRRLVKDSNTKKAGKTGPMKTLLVRVMTPDLRERLENLRKKPENIPQPISNTSRANLNKLLTDYTEMKKAILHVYWEEFQKDPVGLMSRVAQPASKKIDQNKLKPEMDEKGNLTTAGFACSQCGQPLFVYKLEQVSEKGKAYTNYFGRCNVAEHEKLILLAQLKPEKDSDEAVTYSLGKFGQRALDFYSIHVTKESTHPVKPLAQIAGNRYASHPVGKALSDACMGTIASFLSKYQDIIIEHQKVVKGNQKRLESLRELAGKENLEYPSVTLPPQPHTKEGVDAYNEVIARVRMWVNLNLWQKLKLSRDDAKPLLRLKGFPSFPLVERQANEVDWWDMVCNVKKLINEKKEDGKVFWQNLAGYKRQEALRPYLSSEEDRKKGKKFARYQLGDLLLHLEKKHGEDWGKVYDEAWERIDKKVEGLSKHIKLEEERRSEDAQSKAALTDWLRAKASFVIEGLKEADKDEFCRCELKLQKWYGDLRGKPFAIEAENSILDISGFSKQYNCAFIWQKDGVKKLNLYLIINYFKGGKLRFKKIKPEAFEANRFYTVINKKSGEIVPMEVNFNFDDPNLIILPLAFGKRFGREFIWNDLLSLETGSLKLANGRVIEKTLYNRRTRQDEPALFVALTFERREVLDSSNIKPMNLIGVDRGENIPAVIALTDPEGCPLSRFKDSLGNPTHILRIGESYKEKQRTIQAKKEVEQRRAGGYSRKYASKAKNLADDMVRNTARDLLYYAVTQDAMLIFENLSRGFGRQGKRTFMAERQYTRMEDWLTAKLAYEGLPSKTYLSKTLAQYTSKTCSNCGFTITSADYDRVLEKLKKTATGWMTTINGKELKVEGQITYYNRYKRQNVVKDLSVELDRLSEESVNNDISSWTKGRSGEALSLLKKRFSHRPVQEKFVCLNCGFETHADEQAALNIARSWLFLRSQEYKKYQTNKTTGNTDKRAFVETWQSFYRKKLKEVWKPAV

SEQ ID NO: 37483 - protein, 978 aa, synthetic construct
  REGION 1..978: note = engineered CasX variant
QEIKRLNKIRRRLVKDSNTKKAGKTGPMKTLLVRVMTPDLRERLENLRKKPENIPQPISNTSRANLNKLLTDYTEMKKAILHVYWEEFQKDPVGLMSRVAQPASKKIDQNKLKPEMDEKGNLTTAGFACSQCGQPLFVYKLEQVSEKGKAYTNYFGRCNVAEHEKLILLAQLKPEKDSDEAVTYSLGKFGQRALDFYSIHVTKESTHPVKPLAQIAGNRYASSPVGKALSDACMGTIASFLSKYQDIIIEHQKVVKGNQKRLESLRELAGKENLEYPSVTLPPQPHTKEGVDAYNEVIARVRMWVNLNLWQKLKLSRDDAKPLLRLKGFPSFPLVERQANEVDWWDMVCNVKKLINEKKEDGKVFWQNLAGYKRQEALRPYLSSEEDRKKGKKFARYQLGDLLLHLEKKHGEDWGKVYDEAWERIDKKVEGLSKHIKLEEERRSEDAQSKAALTDWLRAKASFVIEGLKEADKDEFCRCELKLQKWYGDLRGKPFAIEAENSILDISGFSKQYNCAFIWQKDGVKKLNLYLIINYFKGGKLRFKKIKPEAFEANRFYTVINKKSGEIVPMEVNFNFDDPNLIILPLAFGKRFGREFIWNDLLSLETGSLKLANGRVIEKTLYNRRTRQDEPALFVALTFERREVLDSSNIKPMNLIGVDRGENIPAVIALTDPEGCPLSRFKDSLGNPTHILRIGESYKEKQRTIQAKKEVEQRRAGGYSRKYASKAKNLADDMVRNTARDLLYYAVTQDAMLIFENLSRGFGRQGKRTFMAERQYTRMEDWLTAKLAYEGLPSKTYLSKTLAQYTSKTCSNCGFTITSADYDRVLEKLKKTATGWMTTINGKELKVEGQITYYNRYKRQNVVKDLSVELDRLSEESVNNDISSWTKGRSGEALSLLKKRFSHRPVQEKFVCLNCGFETHADEQAALNIARSWLFLRSQEYKKYQTNKTTGNTDKRAFVETWQSFYRKKLKEVWKPAV

SEQ ID NO: 37484 - protein, 978 aa, synthetic construct
  REGION 1..978: note = engineered CasX variant
QEIKRLNKIRRRLVKDSNTKKAGKTGPMKTLLVRVMTPDLRERLENLRKKPENIPQPISNTSRANLNKLLTDYTEMKKAILHVYWEEFQKDPVGLMSRVAQPASKKIDQNKLKPEMDEKGNLTTAGFACSQCGQPLFVYKLEQVSEKGKAYTNYFGRCNVAEHEKLILLAQLKPEKDSDEAVTYSLGKFGQRALDFYSIHVTKESTHPVKPLAQIAGNRYASTPVGKALSDACMGTIASFLSKYQDIIIEHQKVVKGNQKRLESLRELAGKENLEYPSVTLPPQPHTKEGVDAYNEVIARVRMWVNLNLWQKLKLSRDDAKPLLRLKGFPSFPLVERQANEVDWWDMVCNVKKLINEKKEDGKVFWQNLAGYKRQEALRPYLSSEEDRKKGKKFARYQLGDLLLHLEKKHGEDWGKVYDEAWERIDKKVEGLSKHIKLEEERRSEDAQSKAALTDWLRAKASFVIEGLKEADKDEFCRCELKLQKWYGDLRGKPFAIEAENSILDISGFSKQYNCAFIWQKDGVKKLNLYLIINYFKGGKLRFKKIKPEAFEANRFYTVINKKSGEIVPMEVNFNFDDPNLIILPLAFGKRFGREFIWNDLLSLETGSLKLANGRVIEKTLYNRRTRQDEPALFVALTFERREVLDSSNIKPMNLIGVDRGENIPAVIALTDPEGCPLSRFKDSLGNPTHILRIGESYKEKQRTIQAKKEVEQRRAGGYSRKYASKAKNLADDMVRNTARDLLYYAVTQDAMLIFENLSRGFGRQGKRTFMAERQYTRMEDWLTAKLAYEGLPSKTYLSKTLAQYTSKTCSNCGFTITSADYDRVLEKLKKTATGWMTTINGKELKVEGQITYYNRYKRQNVVKDLSVELDRLSEESVNNDISSWTKGRSGEALSLLKKRFSHRPVQEKFVCLNCGFETHADEQAALNIARSWLFLRSQEYKKYQTNKTTGNTDKRAFVETWQSFYRKKLKEVWKPAV

SEQ ID NO: 37485 - protein, 978 aa, synthetic construct
  REGION 1..978: note = engineered CasX variant
QEIKRLNKIRRRLVKDSNTKKAGKTGPMKTLLVRVMTPDLRERLENLRKKPENIPQPISNTSRANLNKLLTDYTEMKKAILHVYWEEFQKDPVGLMSRVAQPASKKIDQNKLKPEMDEKGNLTTAGFACSQCGQPLFVYKLEQVSEKGKAYTNYFGRCNVAEHEKLILLAQLKPEKDSDEAVTYSLGKFGQRALDFYSIHVTKESTHPVKPLAQIAGNRYASAPVGKALSDACMGTIASFLSKYQDIIIEHQKVVKGNQKRLESLRELAGKENLEYPSVTLPPQPHTKEGVDAYNEVIARVRMWVNLNLWQKLKLSRDDAKPLLRLKGFPSFPLVERQANEVDWWDMVCNVKKLINEKKEDGKVFWQNLAGYKRQEALRPYLSSEEDRKKGKKFARYQLGDLLLHLEKKHGEDWGKVYDEAWERIDKKVEGLSKHIKLEEERRSEDAQSKAALTDWLRAKASFVIEGLKEADKDEFCRCELKLQKWYGDLRGKPFAIEAENSILDISGFSKQYNCAFIWQKDGVKKLNLYLIINYFKGGKLRFKKIKPEAFEANRFYTVINKKSGEIVPMEVNFNFDDPNLIILPLAFGKRFGREFIWNDLLSLETGSLKLANGRVIEKTLYNRRTRQDEPALFVALTFERREVLDSSNIKPMNLIGVDRGENIPAVIALTDPEGCPLSRFKDSLGNPTHILRIGESYKEKQRTIQAKKEVEQRRAGGYSRKYASKAKNLADDMVRNTARDLLYYAVTQDAMLIFENLSRGFGRQGKRTFMAERQYTRMEDWLTAKLAYEGLPSKTYLSKTLAQYTSKTCSNCGFTITSADYDRVLEKLKKTATGWMTTINGKELKVEGQITYYNRYKRQNVVKDLSVELDRLSEESVNNDISSWTKGRSGEALSLLKKRFSHRPVQEKFVCLNCGFETHADEQAALNIARSWLFLRSQEYKKYQTNKTTGNTDKRAFVETWQSFYRKKLKEVWKPAV

SEQ ID NO: 37486 - protein, 978 aa, synthetic construct
  REGION 1..978: note = engineered CasX variant
QEIKRLNKIRRRLVKDSNTKKAGKTGPMKTLLVRVMTPDLRERLENLRKKPENIPQPISNTSRANLNKLLTDYTEMKKAILHVYWEEFQKDPVGLMSRVAQPASKKIDQNKLKPEMDEKGNLTTAGFACSQCGQPLFVYKLEQVSEKGKAYTNYFGRCNVAEHEKLILLAQLKPEKDSDEAVTYSLGKFGQRALDFYSIHVTKESTHPVKPLAQIAGNRYASVPVGKALSDACMGTIASFLSKYQDIIIEHQKVVKGNQKRLESLRELAGKENLEYPSVTLPPQPHTKEGVDAYNEVIARVRMWVNLNLWQKLKLSRDDAKPLLRLKGFPSFPLVERQANEVDWWDMVCNVKKLINEKKEDGKVFWQNLAGYKRQEALRPYLSSEEDRKKGKKFARYQLGDLLLHLEKKHGEDWGKVYDEAWERIDKKVEGLSKHIKLEEERRSEDAQSKAALTDWLRAKASFVIEGLKEADKDEFCRCELKLQKWYGDLRGKPFAIEAENSILDISGFSKQYNCAFIWQKDGVKKLNLYLIINYFKGGKLRFKKIKPEAFEANRFYTVINKKSGEIVPMEVNFNFDDPNLIILPLAFGKRFGREFIWNDLLSLETGSLKLANGRVIEKTLYNRRTRQDEPALFVALTFERREVLDSSNIKPMNLIGVDRGENIPAVIALTDPEGCPLSRFKDSLGNPTHILRIGESYKEKQRTIQAKKEVEQRRAGGYSRKYASKAKNLADDMVRNTARDLLYYAVTQDAMLIFENLSRGFGRQGKRTFMAERQYTRMEDWLTAKLAYEGLPSKTYLSKTLAQYTSKTCSNCGFTITSADYDRVLEKLKKTATGWMTTINGKELKVEGQITYYNRYKRQNVVKDLSVELDRLSEESVNNDISSWTKGRSGEALSLLKKRFSHRPVQEKFVCLNCGFETHADEQAALNIARSWLFLRSQEYKKYQTNKTTGNTDKRAFVETWQSFYRKKLKEVWKPAV

SEQ ID NO: 37487 - protein, 978 aa, synthetic construct
  REGION 1..978: note = engineered CasX variant
QEIKRLNKIRRRLVKDSNTKKAGKTGPMKTLLVRVMTPDLRERLENLRKKPENIPQPISNTSRANLNKLLTDYTEMKKAILHVYWEEFQKDPVGLMSRVAQPASKKIDQNKLKPEMDEKGNLTTAGFACSQCGQPLFVYKLEQVSEKGKAYTNYFGRCNVAEHEKLIKLAQLKPEKDSDEAVTYSLGKFGQRALDFYSIHVTKESTHPVKPLAQIAGNRYASGPVGKALSDACMGTIASFLSKYQDIIIEHQKVVKGNQKRLESLRELAGKENLEYPSVTLPPQPHTKEGVDAYNEVIARVRMWVNLNLWQKLKLSRDDAKPLLRLKGFPSFPLVERQANEVDWWDMVCNVKKLINEKKEDGKVFWQNLAGYKRQEALRPYLSSEEDRKKGKKFARYQLGDLLLHLEKKHGEDWGKVYDEAWERIDKKVEGLSKHIKLEEERRSEDAQSKAALTDWLRAKASFVIEGLKEADKDEFCRCELKLQKWYGDLRGKPFAIEAENSILDISGFSKQYNCAFIWQKDGVKKLNLYLIINYFKGGKLRFKKIKPEAFEANRFYTVINKKSGEIVPMEVNFNFDDPNLIILPLAFGKRFGREFIWNDLLSLETGSLKLANGRVIEKTLYNRRTRQDEPALFVALTFERREVLDSSNIKPMNLIGVDRGENIPAVIALTDPEGCPLSRFKDSLGNPTHILRIGESYKEKQRTIQAKKEVEQRRAGGYSRKYASKAKNLADDMVRNTARDLLYYAVTQDAMLIFENLSRGFGRQGKRTFMAERQYTRMEDWLTAKLAYEGLPSKTYLSKTLAQYTSKTCSNCGFTITSADYDRVLEKLKKTATGWMTTINGKELKVEGQITYYNRYKRQNVVKDLSVELDRLSEESVNNDISSWTKGRSGEALSLLKKRFSHRPVQEKFVCLNCGFETHADEQAALNIARSWLFLRSQEYKKYQTNKTTGNTDKRAFVETWQSFYRKKLKEVWKPAV

SEQ ID NO: 37488 - protein, 977 aa, synthetic construct
  REGION 1..977: note = engineered CasX variant
QEIKRLNKIRRRLVKDSNTKKAGKTGPMKTLLVRVMTPDLRERLENLRKKPENIPQPISNTSRANLNKLLTDYTEMKKAILHVYWEEFQKDPVGLMSRVAQPASKKIDQNKLKPEMDEKGNLTTAGFACSQCGQPLFVYKLEQVSEKGKAYTNYFGRCNVAEHEKLILLAQLKPEKDSDEAVTYSLGKFGQRALDFYSIHVTKESTHPVKPLAQIAGNRYASPVGKALSDACMGTIASFLSKYQDIIIEHQKVVKGNQKRLESLRELAGKENLEYPSVTLPPQPHTKEGVDAYNEVIARVRMWVNLNLWQKLKLSRDDAKPLLRLKGFPSFPLVERQANEVDWWDMVCNVKKLINEKKEDGKVFWQNLAGYKRQEALRPYLSSEEDRKKGKKFARYQLGDLLLHLEKKHGEDWGKVYDEAWERIDKKVEGLSKHIKLEEERRSEDAQSKAALTDWLRAKASFVIEGLKEADKDEFCRCELKLQKWYGDLRGKPFAIEAENSILDISGFSKQYNCAFIWQKDGVKKLNLYLIINYFKGGKLRFKKIKPEAFEANRFYTVINKKSGEIVPMEVNFNFDDPNLIILPLAFGKRFGREFIWNDLLSLETGSLKLANGRVIEKTLYNRRTRQDEPALFVALTFERREVLDSSNIKPMNLIGVDRGENIPAVIALTDPEGCPLSRFKDSLGNPTHILRIGESYKEKQRTIQAKKEVEQRRAGGYSRKYASKAKNLADDMVRNTARDLLYYAVTQDAMLIFENLSRGFGRQGKRTFMAERQYTRMEDWLTAKLAYEGLPSKTYLSKTLAQYTSKTCSNCGFTITSADYDRVLEKLKKTATGWMTTINGKELKVEGQITYYNRYKRQNVVKDLSVELDRLSEESVNNDISSWTKGRSGEALSLLKKRFSHRPVQEKFVCLNCGFETHADEQAALNIARSWLFLRSQEYKKYQTNKTTGNTDKRAFVETWQSFYRKKLKEVWKPAV

SEQ ID NO: 37489 - protein, 978 aa, synthetic construct
  REGION 1..978: note = engineered CasX variant
QEIKRINKIRRRLVKDSNTKKAGKTGPMKTLLVRVMTPDLRERLENLRKKPENIPQPISNTSRANLNKLLTDYTEMKKAILHVYWEEFQKDPVGLMSRVAQPASKKIDQNKLKPEMDEKGNLTTAGFACSQCGQPLFVYKLEQVSEKGKAYTNYVGRCNVAEHEKLILLAQLKPEKDSDEAVTYSLGKFGQRALDFYSIHVTKESTHPVKPLAQIAGNRYASYPVGKALSDACMGTIASFLSKYQDIIIEHQKVVKGNQKRLESLRELAGKENLEYPSVTLPPQPHTKEGVDAYNEVIARVRMWVNLNLWQKLKLSRDDAKPLLRLKGFPSFPLVERQANEVDWWDMVCNVKKLINEKKEDGKVFWQNLAGYKRQEALRPYLSSEEDRKKGKKFARYQLGDLLLHLEKKHGEDWGKVYDEAWERIDKKVEGLSKHIKLEEERRSEDAQSKAALTDWLRAKASFVIEGLKEADKDEFCRCELKLQKWYGDLRGKPFAIEAENSILDISGFSKQYNCAFIWQKDGVKKLNLYLIINYFKGGKLRFKKIKPEAFEANRFYTVINKKSGEIVPMEVNFNFDDPNLIILPLAFGKRFGREFIWNDLLSLETGSLKLANGRVIEKTLYNRRTRQDEPALFVALTFERREVLDSSNIKPMNLIGVDRGENIPAVIALTDPEGCPLSRFKDSLGNPTHILRIGESYKEKQRTIQAKKEVEQRRAGGYSRKYASKAKNLADDMVRNTARDLLYYAVTQDAMLIFENLSRGFGRQGKRTFMAERQYTRMEDWLTAKLAYEGLPSKTYLSKTLAQYTSKTCSNCGFTITSADYDRVLEKLKKTATGWMTTINGKELKVEGQITYYNRYKRQNVVKDLSVELDRLSEESVNNDISSWTKGRSGEALSLLKKRFSHRPVQEKFVCLNCGFETHADEQAALNIARSWLFLRSQEYKKYQTNKTTGNTDKRAFVETWQSFYRKKLKEVWKPAV

SEQ ID NO: 37490 - protein, 978 aa, synthetic construct
  REGION 1..978: note = engineered CasX variant
QEIKRINKIRRRLVKDSNTKKAGKTGPMKTLLVRVMTPDLRERLENLRKKPENIPQPISNTSRANLNKLLTDYTEMKKAILHVYWEEFQKDPVGLMSRVAQPASKKIDQNKLKPEMDEKGNLTTAGFACSQCGQPLFVYKLEQVSEKGKAYTNYVGRCNVAEHEKLILLAQLKPEKDSDEAVTYSLGKFGQRALDFYSIHVTKESTHPVKPLAQIAGNRYASHPVGKALSDACMGTIASFLSKYQDIIIEHQKVVKGNQKRLESLRELAGKENLEYPSVTLPPQPHTKEGVDAYNEVIARVRMWVNLNLWQKLKLSRDDAKPLLRLKGFPSFPLVERQANEVDWWDMVCNVKKLINEKKEDGKVFWQNLAGYKRQEALRPYLSSEEDRKKGKKFARYQLGDLLLHLEKKHGEDWGKVYDEAWERIDKKVEGLSKHIKLEEERRSEDAQSKAALTDWLRAKASFVIEGLKEADKDEFCRCELKLQKWYGDLRGKPFAIEAENSILDISGFSKQYNCAFIWQKDGVKKLNLYLIINYFKGGKLRFKKIKPEAFEANRFYTVINKKSGEIVPMEVNFNFDDPNLIILPLAFGKRFGREFIWNDLLSLETGSLKLANGRVIEKTLYNRRTRQDEPALFVALTFERREVLDSSNIKPMNLIGVDRGENIPAVIALTDPEGCPLSRFKDSLGNPTHILRIGESYKEKQRTIQAKKEVEQRRAGGYSRKYASKAKNLADDMVRNTARDLLYYAVTQDAMLIFENLSRGFGRQGKRTFMAERQYTRMEDWLTAKLAYEGLPSKTYLSKTLAQYTSKTCSNCGFTITSADYDRVLEKLKKTATGWMTTINGKELKVEGQITYYNRYKRQNVVKDLSVELDRLSEESVNNDISSWTKGRSGEALSLLKKRFSHRPVQEKFVCLNCGFETHADEQAALNIARSWLFLRSQEYKKYQTNKTTGNTDKRAFVETWQSFYRKKLKEVWKPAV

SEQ ID NO: 37491 - protein, 978 aa, synthetic construct
  REGION 1..978: note = engineered CasX variant
QEIKRINKIRRRLVKDSNTKKAGKTGPMKTLLVRVMTPDLRERLENLRKKPENIPQPISNTSRANLNKLLTDYTEMKKAILHVYWEEFQKDPVGLMSRVAQPASKKIDQNKLKPEMDEKGNLTTAGFACSQCGQPLFVYKLEQVSEKGKAYTNYVGRCNVAEHEKLILLAQLKPEKDSDEAVTYSLGKFGQRALDFYSIHVTKESTHPVKPLAQIAGNRYASSPVGKALSDACMGTIASFLSKYQDIIIEHQKVVKGNQKRLESLRELAGKENLEYPSVTLPPQPHTKEGVDAYNEVIARVRMWVNLNLWQKLKLSRDDAKPLLRLKGFPSFPLVERQANEVDWWDMVCNVKKLINEKKEDGKVFWQNLAGYKRQEALRPYLSSEEDRKKGKKFARYQLGDLLLHLEKKHGEDWGKVYDEAWERIDKKVEGLSKHIKLEEERRSEDAQSKAALTDWLRAKASFVIEGLKEADKDEFCRCELKLQKWYGDLRGKPFAIEAENSILDISGFSKQYNCAFIWQKDGVKKLNLYLIINYFKGGKLRFKKIKPEAFEANRFYTVINKKSGEIVPMEVNFNFDDPNLIILPLAFGKRFGREFIWNDLLSLETGSLKLANGRVIEKTLYNRRTRQDEPALFVALTFERREVLDSSNIKPMNLIGVDRGENIPAVIALTDPEGCPLSRFKDSLGNPTHILRIGESYKEKQRTIQAKKEVEQRRAGGYSRKYASKAKNLADDMVRNTARDLLYYAVTQDAMLIFENLSRGFGRQGKRTFMAERQYTRMEDWLTAKLAYEGLPSKTYLSKTLAQYTSKTCSNCGFTITSADYDRVLEKLKKTATGWMTTINGKELKVEGQITYYNRYKRQNVVKDLSVELDRLSEESVNNDISSWTKGRSGEALSLLKKRFSHRPVQEKFVCLNCGFETHADEQAALNIARSWLFLRSQEYKKYQTNKTTGNTDKRAFVETWQSFYRKKLKEVWKPAV

SEQ ID NO: 37492 - protein, 978 aa, synthetic construct
  REGION 1..978: note = engineered CasX variant
QEIKRINKIRRRLVKDSNTKKAGKTGPMKTLLVRVMTPDLRERLENLRKKPENIPQPISNTSRANLNKLLTDYTEMKKAILHVYWEEFQKDPVGLMSRVAQPASKKIDQNKLKPEMDEKGNLTTAGFACSQCGQPLFVYKLEQVSEKGKAYTNYVGRCNVAEHEKLILLAQLKPEKDSDEAVTYSLGKFGQRALDFYSIHVTKESTHPVKPLAQIAGNRYASTPVGKALSDACMGTIASFLSKYQDIIIEHQKVVKGNQKRLESLRELAGKENLEYPSVTLPPQPHTKEGVDAYNEVIARVRMWVNLNLWQKLKLSRDDAKPLLRLKGFPSFPLVERQANEVDWWDMVCNVKKLINEKKEDGKVFWQNLAGYKRQEALRPYLSSEEDRKKGKKFARYQLGDLLLHLEKKHGEDWGKVYDEAWERIDKKVEGLSKHIKLEEERRSEDAQSKAALTDWLRAKASFVIEGLKEADKDEFCRCELKLQKWYGDLRGKPFAIEAENSILDISGFSKQYNCAFIWQKDGVKKLNLYLIINYFKGGKLRFKKIKPEAFEANRFYTVINKKSGEIVPMEVNFNFDDPNLIILPLAFGKRFGREFIWNDLLSLETGSLKLANGRVIEKTLYNRRTRQDEPALFVALTFERREVLDSSNIKPMNLIGVDRGENIPAVIALTDPEGCPLSRFKDSLGNPTHILRIGESYKEKQRTIQAKKEVEQRRAGGYSRKYASKAKNLADDMVRNTARDLLYYAVTQDAMLIFENLSRGFGRQGKRTFMAERQYTRMEDWLTAKLAYEGLPSKTYLSKTLAQYTSKTCSNCGFTITSADYDRVLEKLKKTATGWMTTINGKELKVEGQITYYNRYKRQNVVKDLSVELDRLSEESVNNDISSWTKGRSGEALSLLKKRFSHRPVQEKFVCLNCGFETHADEQAALNIARSWLFLRSQEYKKYQTNKTTGNTDKRAFVETWQSFYRKKLKEVWKPAV

SEQ ID NO: 37493 - protein, 978 aa, synthetic construct
  REGION 1..978: note = engineered CasX variant
QEIKRINKIRRRLVKDSNTKKAGKTGPMKTLLVRVMTPDLRERLENLRKKPENIPQPISNTSRANLNKLLTDYTEMKKAILHVYWEEFQKDPVGLMSRVAQPASKKIDQNKLKPEMDEKGNLTTAGFACSQCGQPLFVYKLEQVSEKGKAYTNYVGRCNVAEHEKLILLAQLKPEKDSDEAVTYSLGKFGQRALDFYSIHVTKESTHPVKPLAQIAGNRYASAPVGKALSDACMGTIASFLSKYQDIIIEHQKVVKGNQKRLESLRELAGKENLEYPSVTLPPQPHTKEGVDAYNEVIARVRMWVNLNLWQKLKLSRDDAKPLLRLKGFPSFPLVERQANEVDWWDMVCNVKKLINEKKEDGKVFWQNLAGYKRQEALRPYLSSEEDRKKGKKFARYQLGDLLLHLEKKHGEDWGKVYDEAWERIDKKVEGLSKHIKLEEERRSEDAQSKAALTDWLRAKASFVIEGLKEADKDEFCRCELKLQKWYGDLRGKPFAIEAENSILDISGFSKQYNCAFIWQKDGVKKLNLYLIINYFKGGKLRFKKIKPEAFEANRFYTVINKKSGEIVPMEVNFNFDDPNLIILPLAFGKRFGREFIWNDLLSLETGSLKLANGRVIEKTLYNRRTRQDEPALFVALTFERREVLDSSNIKPMNLIGVDRGENIPAVIALTDPEGCPLSRFKDSLGNPTHILRIGESYKEKQRTIQAKKEVEQRRAGGYSRKYASKAKNLADDMVRNTARDLLYYAVTQDAMLIFENLSRGFGRQGKRTFMAERQYTRMEDWLTAKLAYEGLPSKTYLSKTLAQYTSKTCSNCGFTITSADYDRVLEKLKKTATGWMTTINGKELKVEGQITYYNRYKRQNVVKDLSVELDRLSEESVNNDISSWTKGRSGEALSLLKKRFSHRPVQEKFVCLNCGFETHADEQAALNIARSWLFLRSQEYKKYQTNKTTGNTDKRAFVETWQSFYRKKLKEVWKPAV

SEQ ID NO: 37494 - protein, 978 aa, synthetic construct
  REGION 1..978: note = engineered CasX variant
QEIKRINKIRRRLVKDSNTKKAGKTGPMKTLLVRVMTPDLRERLENLRKKPENIPQPISNTSRANLNKLLTDYTEMKKAILHVYWEEFQKDPVGLMSRVAQPASKKIDQNKLKPEMDEKGNLTTAGFACSQCGQPLFVYKLEQVSEKGKAYTNYVGRCNVAEHEKLILLAQLKPEKDSDEAVTYSLGKFGQRALDFYSIHVTKESTHPVKPLAQIAGNRYASVPVGKALSDACMGTIASFLSKYQDIIIEHQKVVKGNQKRLESLRELAGKENLEYPSVTLPPQPHTKEGVDAYNEVIARVRMWVNLNLWQKLKLSRDDAKPLLRLKGFPSFPLVERQANEVDWWDMVCNVKKLINEKKEDGKVFWQNLAGYKRQEALRPYLSSEEDRKKGKKFARYQLGDLLLHLEKKHGEDWGKVYDEAWERIDKKVEGLSKHIKLEEERRSEDAQSKAALTDWLRAKASFVIEGLKEADKDEFCRCELKLQKWYGDLRGKPFAIEAENSILDISGFSKQYNCAFIWQKDGVKKLNLYLIINYFKGGKLRFKKIKPEAFEANRFYTVINKKSGEIVPMEVNFNFDDPNLIILPLAFGKRFGREFIWNDLLSLETGSLKLANGRVIEKTLYNRRTRQDEPALFVALTFERREVLDSSNIKPMNLIGVDRGENIPAVIALTDPEGCPLSRFKDSLGNPTHILRIGESYKEKQRTIQAKKEVEQRRAGGYSRKYASKAKNLADDMVRNTARDLLYYAVTQDAMLIFENLSRGFGRQGKRTFMAERQYTRMEDWLTAKLAYEGLPSKTYLSKTLAQYTSKTCSNCGFTITSADYDRVLEKLKKTATGWMTTINGKELKVEGQITYYNRYKRQNVVKDLSVELDRLSEESVNNDISSWTKGRSGEALSLLKKRFSHRPVQEKFVCLNCGFETHADEQAALNIARSWLFLRSQEYKKYQTNKTTGNTDKRAFVETWQSFYRKKLKEVWKPAV

SEQ ID NO: 37495 - protein, 978 aa, synthetic construct
  REGION 1..978: note = engineered CasX variant
QEIKRINKIRRRLVKDSNTKKAGKTGPMKTLLVRVMTPDLRERLENLRKKPENIPQPISNTSRANLNKLLTDYTEMKKAILHVYWEEFQKDPVGLMSRVAQPASKKIDQNKLKPEMDEKGNLTTAGFACSQCGQPLFVYKLEQVSEKGKAYTNYVGRCNVAEHEKLIKLAQLKPEKDSDEAVTYSLGKFGQRALDFYSIHVTKESTHPVKPLAQIAGNRYASGPVGKALSDACMGTIASFLSKYQDIIIEHQKVVKGNQKRLESLRELAGKENLEYPSVTLPPQPHTKEGVDAYNEVIARVRMWVNLNLWQKLKLSRDDAKPLLRLKGFPSFPLVERQANEVDWWDMVCNVKKLINEKKEDGKVFWQNLAGYKRQEALRPYLSSEEDRKKGKKFARYQLGDLLLHLEKKHGEDWGKVYDEAWERIDKKVEGLSKHIKLEEERRSEDAQSKAALTDWLRAKASFVIEGLKEADKDEFCRCELKLQKWYGDLRGKPFAIEAENSILDISGFSKQYNCAFIWQKDGVKKLNLYLIINYFKGGKLRFKKIKPEAFEANRFYTVINKKSGEIVPMEVNFNFDDPNLIILPLAFGKRFGREFIWNDLLSLETGSLKLANGRVIEKTLYNRRTRQDEPALFVALTFERREVLDSSNIKPMNLIGVDRGENIPAVIALTDPEGCPLSRFKDSLGNPTHILRIGESYKEKQRTIQAKKEVEQRRAGGYSRKYASKAKNLADDMVRNTARDLLYYAVTQDAMLIFENLSRGFGRQGKRTFMAERQYTRMEDWLTAKLAYEGLPSKTYLSKTLAQYTSKTCSNCGFTITSADYDRVLEKLKKTATGWMTTINGKELKVEGQITYYNRYKRQNVVKDLSVELDRLSEESVNNDISSWTKGRSGEALSLLKKRFSHRPVQEKFVCLNCGFETHADEQAALNIARSWLFLRSQEYKKYQTNKTTGNTDKRAFVETWQSFYRKKLKEVWKPAV

SEQ ID NO: 37496 - protein, 977 aa, synthetic construct
  REGION 1..977: note = engineered CasX variant
QEIKRINKIRRRLVKDSNTKKAGKTGPMKTLLVRVMTPDLRERLENLRKKPENIPQPISNTSRANLNKLLTDYTEMKKAILHVYWEEFQKDPVGLMSRVAQPASKKIDQNKLKPEMDEKGNLTTAGFACSQCGQPLFVYKLEQVSEKGKAYTNYVGRCNVAEHEKLILLAQLKPEKDSDEAVTYSLGKFGQRALDFYSIHVTKESTHPVKPLAQIAGNRYASPVGKALSDACMGTIASFLSKYQDIIIEHQKVVKGNQKRLESLRELAGKENLEYPSVTLPPQPHTKEGVDAYNEVIARVRMWVNLNLWQKLKLSRDDAKPLLRLKGFPSFPLVERQANEVDWWDMVCNVKKLINEKKEDGKVFWQNLAGYKRQEALRPYLSSEEDRKKGKKFARYQLGDLLLHLEKKHGEDWGKVYDEAWERIDKKVEGLSKHIKLEEERRSEDAQSKAALTDWLRAKASFVIEGLKEADKDEFCRCELKLQKWYGDLRGKPFAIEAENSILDISGFSKQYNCAFIWQKDGVKKLNLYLIINYFKGGKLRFKKIKPEAFEANRFYTVINKKSGEIVPMEVNFNFDDPNLIILPLAFGKRFGREFIWNDLLSLETGSLKLANGRVIEKTLYNRRTRQDEPALFVALTFERREVLDSSNIKPMNLIGVDRGENIPAVIALTDPEGCPLSRFKDSLGNPTHILRIGESYKEKQRTIQAKKEVEQRRAGGYSRKYASKAKNLADDMVRNTARDLLYYAVTQDAMLIFENLSRGFGRQGKRTFMAERQYTRMEDWLTAKLAYEGLPSKTYLSKTLAQYTSKTCSNCGFTITSADYDRVLEKLKKTATGWMTTINGKELKVEGQITYYNRYKRQNVVKDLSVELDRLSEESVNNDISSWTKGRSGEALSLLKKRFSHRPVQEKFVCLNCGFETHADEQAALNIARSWLFLRSQEYKKYQTNKTTGNTDKRAFVETWQSFYRKKLKEVWKPAV

SEQ ID NO: 37497 - protein, 978 aa, synthetic construct
  REGION 1..978: note = engineered CasX variant
QEIKRINKIRRRLVKDSNTKKAGKTGPMKTLLVRVMTPDLRERLENLRKKPENIPQPISNTSRANLNKLLTDYTEMKKAILHVYWEEFQKDPVGLMSRVAQPASKKIDQNKLKPEMDEKGNLTTAGFACSQCGQPLFVYKLEQVSEKGKAYTNYFGRCNVAEHEKLILLAQLKPEKDSDEAVTYSLGKFGQRALDFYSIHVTKESTHPVKPLAQIAGNRYASYPVGKALSDACMGTIASFLSKYQDIIIEHQKVVKGNQKRLESLRELAGKENLEYPSVTLPPQPHTKEGVDAYNEVIARVRMWVNLNLWQKLKLSRDDAKPLLRLKGFPSFPLVERQANEVDWWDMVCNVKKLINEKKEDGKVFWQNLAGYKRQEALRPYLSSEEDRKKGKKFARYQLGDLLLHLEKKHGEDWGKVYDEAWERIDKKVEGLSKHIKLEEERRSEDAQSKAALTDWLRAKASFVIEGLKEADKDEFCRCELKLQKWYGDLRGKPFAIEAENSILDISGFSKQYNCAFIWQKDGVKKLNLYLIINYFKGGKLRFKKIKPEAFEANRFYTVINKKSGEIVPMEVNFNFDDPNLIILPLAFGKRFGREFIWNDLLSLETGSLKLANGRVIEKTLYNRRTRQDEPALFVALTFERREVLDSSNIKPMNLIGVDRGENIPAVIALTDPEGCPLSRFKDSLGNPTHILRIGESYKEKQRTIQAKKEVEQRRAGGYSRKYASKAKNLADDMVRNTARDLLYYAVTQDAMLIFENLSRGFGRQGKRTFMAERQYTRMEDWLTAKLAYEGLASKTYLSKTLAQYTSKTCSNCGFTITSADYDRVLEKLKKTATGWMTTINGKELKVEGQITYYNRYKRQNVVKDLSVELDRLSEESVNNDISSWTKGRSGEALSLLKKRFSHRPVQEKFVCLNCGFETHADEQAALNIARSWLFLRSQEYKKYQTNKTTGNTDKRAFVETWQSFYRKKLKEVWKPAV

SEQ ID NO: 37498 - protein, 978 aa, synthetic construct
  REGION 1..978: note = engineered CasX variant
QEIKRINKIRRRLVKDSNTKKAGKTGPMKTLLVRVMTPDLRERLENLRKKPENIPQPISNTSRANLNKLLTDYTEMKKAILHVYWEEFQKDPVGLMSRVAQPASKKIDQNKLKPEMDEKGNLTTAGFACSQCGQPLFVYKLEQVSEKGKAYTNYFGRCNVAEHEKLILLAQLKPEKDSDEAVTYSLGKFGQRALDFYSIHVTKESTHPVKPLAQIAGNRYASHPVGKALSDACMGTIASFLSKYQDIIIEHQKVVKGNQKRLESLRELAGKENLEYPSVTLPPQPHTKEGVDAYNEVIARVRMWVNLNLWQKLKLSRDDAKPLLRLKGFPSFPLVERQANEVDWWDMVCNVKKLINEKKEDGKVFWQNLAGYKRQEALRPYLSSEEDRKKGKKFARYQLGDLLLHLEKKHGEDWGKVYDEAWERIDKKVEGLSKHIKLEEERRSEDAQSKAALTDWLRAKASFVIEGLKEADKDEFCRCELKLQKWYGDLRGKPFAIEAENSILDISGFSKQYNCAFIWQKDGVKKLNLYLIINYFKGGKLRFKKIKPEAFEANRFYTVINKKSGEIVPMEVNFNFDDPNLIILPLAFGKRFGREFIWNDLLSLETGSLKLANGRVIEKTLYNRRTRQDEPALFVALTFERREVLDSSNIKPMNLIGVDRGENIPAVIALTDPEGCPLSRFKDSLGNPTHILRIGESYKEKQRTIQAKKEVEQRRAGGYSRKYASKAKNLADDMVRNTARDLLYYAVTQDAMLIFENLSRGFGRQGKRTFMAERQYTRMEDWLTAKLAYEGLASKTYLSKTLAQYTSKTCSNCGFTITSADYDRVLEKLKKTATGWMTTINGKELKVEGQITYYNRYKRQNVVKDLSVELDRLSEESVNNDISSWTKGRSGEALSLLKKRFSHRPVQEKFVCLNCGFETHADEQAALNIARSWLFLRSQEYKKYQTNKTTGNTDKRAFVETWQSFYRKKLKEVWKPAV

SEQ ID NO: 37499 - protein, 978 aa, synthetic construct
  REGION 1..978: note = engineered CasX variant
QEIKRINKIRRRLVKDSNTKKAGKTGPMKTLLVRVMTPDLRERLENLRKKPENIPQPISNTSRANLNKLLTDYTEMKKAILHVYWEEFQKDPVGLMSRVAQPASKKIDQNKLKPEMDEKGNLTTAGFACSQCGQPLFVYKLEQVSEKGKAYTNYFGRCNVAEHEKLILLAQLKPEKDSDEAVTYSLGKFGQRALDFYSIHVTKESTHPVKPLAQIAGNRYASSPVGKALSDACMGTIASFLSKYQDIIIEHQKVVKGNQKRLESLRELAGKENLEYPSVTLPPQPHTKEGVDAYNEVIARVRMWVNLNLWQKLKLSRDDAKPLLRLKGFPSFPLVERQANEVDWWDMVCNVKKLINEKKEDGKVFWQNLAGYKRQEALRPYLSSEEDRKKGKKFARYQLGDLLLHLEKKHGEDWGKVYDEAWERIDKKVEGLSKHIKLEEERRSEDAQSKAALTDWLRAKASFVIEGLKEADKDEFCRCELKLQKWYGDLRGKPFAIEAENSILDISGFSKQYNCAFIWQKDGVKKLNLYLIINYFKGGKLRFKKIKPEAFEANRFYTVINKKSGEIVPMEVNFNFDDPNLIILPLAFGKRFGREFIWNDLLSLETGSLKLANGRVIEKTLYNRRTRQDEPALFVALTFERREVLDSSNIKPMNLIGVDRGENIPAVIALTDPEGCPLSRFKDSLGNPTHILRIGESYKEKQRTIQAKKEVEQRRAGGYSRKYASKAKNLADDMVRNTARDLLYYAVTQDAMLIFENLSRGFGRQGKRTFMAERQYTRMEDWLTAKLAYEGLASKTYLSKTLAQYTSKTCSNCGFTITSADYDRVLEKLKKTATGWMTTINGKELKVEGQITYYNRYKRQNVVKDLSVELDRLSEESVNNDISSWTKGRSGEALSLLKKRFSHRPVQEKFVCLNCGFETHADEQAALNIARSWLFLRSQEYKKYQTNKTTGNTDKRAFVETWQSFYRKKLKEVWKPAV

SEQ ID NO: 37500 - protein, 978 aa, synthetic construct
  REGION 1..978: note = engineered CasX variant
QEIKRINKIRRRLVKDSNTKKAGKTGPMKTLLVRVMTPDLRERLENLRKKPENIPQPISNTSRANLNKLLTDYTEMKKAILHVYWEEFQKDPVGLMSRVAQPASKKIDQNKLKPEMDEKGNLTTAGFACSQCGQPLFVYKLEQVSEKGKAYTNYFGRCNVAEHEKLILLAQLKPEKDSDEAVTYSLGKFGQRALDFYSIHVTKESTHPVKPLAQIAGNRYASTPVGKALSDACMGTIASFLSKYQDIIIEHQKVVKGNQKRLESLRELAGKENLEYPSVTLPPQPHTKEGVDAYNEVIARVRMWVNLNLWQKLKLSRDDAKPLLRLKGFPSFPLVERQANEVDWWDMVCNVKKLINEKKEDGKVFWQNLAGYKRQEALRPYLSSEEDRKKGKKFARYQLGDLLLHLEKKHGEDWGKVYDEAWERIDKKVEGLSKHIKLEEERRSEDAQSKAALTDWLRAKASFVIEGLKEADKDEFCRCELKLQKWYGDLRGKPFAIEAENSILDISGFSKQYNCAFIWQKDGVKKLNLYLIINYFKGGKLRFKKIKPEAFEANRFYTVINKKSGEIVPMEVNFNFDDPNLIILPLAFGKRFGREFIWNDLLSLETGSLKLANGRVIEKTLYNRRTRQDEPALFVALTFERREVLDSSNIKPMNLIGVDRGENIPAVIALTDPEGCPLSRFKDSLGNPTHILRIGESYKEKQRTIQAKKEVEQRRAGGYSRKYASKAKNLADDMVRNTARDLLYYAVTQDAMLIFENLSRGFGRQGKRTFMAERQYTRMEDWLTAKLAYEGLASKTYLSKTLAQYTSKTCSNCGFTITSADYDRVLEKLKKTATGWMTTINGKELKVEGQITYYNRYKRQNVVKDLSVELDRLSEESVNNDISSWTKGRSGEALSLLKKRFSHRPVQEKFVCLNCGFETHADEQAALNIARSWLFLRSQEYKKYQTNKTTGNTDKRAFVETWQSFYRKKLKEVWKPAV

SEQ ID NO: 37501 - protein, 978 aa, synthetic construct
  REGION 1..978: note = engineered CasX variant
QEIKRINKIRRRLVKDSNTKKAGKTGPMKTLLVRVMTPDLRERLENLRKKPENIPQPISNTSRANLNKLLTDYTEMKKAILHVYWEEFQKDPVGLMSRVAQPASKKIDQNKLKPEMDEKGNLTTAGFACSQCGQPLFVYKLEQVSEKGKAYTNYFGRCNVAEHEKLILLAQLKPEKDSDEAVTYSLGKFGQRALDFYSIHVTKESTHPVKPLAQIAGNRYASAPVGKALSDACMGTIASFLSKYQDIIIEHQKVVKGNQKRLESLRELAGKENLEYPSVTLPPQPHTKEGVDAYNEVIARVRMWVNLNLWQKLKLSRDDAKPLLRLKGFPSFPLVERQANEVDWWDMVCNVKKLINEKKEDGKVFWQNLAGYKRQEALRPYLSSEEDRKKGKKFARYQLGDLLLHLEKKHGEDWGKVYDEAWERIDKKVEGLSKHIKLEEERRSEDAQSKAALTDWLRAKASFVIEGLKEADKDEFCRCELKLQKWYGDLRGKPFAIEAENSILDISGFSKQYNCAFIWQKDGVKKLNLYLIINYFKGGKLRFKKIKPEAFEANRFYTVINKKSGEIVPMEVNFNFDDPNLIILPLAFGKRFGREFIWNDLLSLETGSLKLANGRVIEKTLYNRRTRQDEPALFVALTFERREVLDSSNIKPMNLIGVDRGENIPAVIALTDPEGCPLSRFKDSLGNPTHILRIGESYKEKQRTIQAKKEVEQRRAGGYSRKYASKAKNLADDMVRNTARDLLYYAVTQDAMLIFENLSRGFGRQGKRTFMAERQYTRMEDWLTAKLAYEGLASKTYLSKTLAQYTSKTCSNCGFTITSADYDRVLEKLKKTATGWMTTINGKELKVEGQITYYNRYKRQNVVKDLSVELDRLSEESVNNDISSWTKGRSGEALSLLKKRFSHRPVQEKFVCLNCGFETHADEQAALNIARSWLFLRSQEYKKYQTNKTTGNTDKRAFVETWQSFYRKKLKEVWKPAV

SEQ ID NO: 37502 - protein, 978 aa, synthetic construct
  REGION 1..978: note = engineered CasX variant
QEIKRINKIRRRLVKDSNTKKAGKTGPMKTLLVRVMTPDLRERLENLRKKPENIPQPISNTSRANLNKLLTDYTEMKKAILHVYWEEFQKDPVGLMSRVAQPASKKIDQNKLKPEMDEKGNLTTAGFACSQCGQPLFVYKLEQVSEKGKAYTNYFGRCNVAEHEKLILLAQLKPEKDSDEAVTYSLGKFGQRALDFYSIHVTKESTHPVKPLAQIAGNRYASVPVGKALSDACMGTIASFLSKYQDIIIEHQKVVKGNQKRLESLRELAGKENLEYPSVTLPPQPHTKEGVDAYNEVIARVRMWVNLNLWQKLKLSRDDAKPLLRLKGFPSFPLVERQANEVDWWDMVCNVKKLINEKKEDGKVFWQNLAGYKRQEALRPYLSSEEDRKKGKKFARYQLGDLLLHLEKKHGEDWGKVYDEAWERIDKKVEGLSKHIKLEEERRSEDAQSKAALTDWLRAKASFVIEGLKEADKDEFCRCELKLQKWYGDLRGKPFAIEAENSILDISGFSKQYNCAFIWQKDGVKKLNLYLIINYFKGGKLRFKKIKPEAFEANRFYTVINKKSGEIVPMEVNFNFDDPNLIILPLAFGKRFGREFIWNDLLSLETGSLKLANGRVIEKTLYNRRTRQDEPALFVALTFERREVLDSSNIKPMNLIGVDRGENIPAVIALTDPEGCPLSRFKDSLGNPTHILRIGESYKEKQRTIQAKKEVEQRRAGGYSRKYASKAKNLADDMVRNTARDLLYYAVTQDAMLIFENLSRGFGRQGKRTFMAERQYTRMEDWLTAKLAYEGLASKTYLSKTLAQYTSKTCSNCGFTITSADYDRVLEKLKKTATGWMTTINGKELKVEGQITYYNRYKRQNVVKDLSVELDRLSEESVNNDISSWTKGRSGEALSLLKKRFSHRPVQEKFVCLNCGFETHADEQAALNIARSWLFLRSQEYKKYQTNKTTGNTDKRAFVETWQSFYRKKLKEVWKPAV

SEQ ID NO: 37503 - protein, 978 aa, synthetic construct
  REGION 1..978: note = engineered CasX variant
QEIKRINKIRRRLVKDSNTKKAGKTGPMKTLLVRVMTPDLRERLENLRKKPENIPQPISNTSRANLNKLLTDYTEMKKAILHVYWEEFQKDPVGLMSRVAQPASKKIDQNKLKPEMDEKGNLTTAGFACSQCGQPLFVYKLEQVSEKGKAYTNYFGRCNVAEHEKLIKLAQLKPEKDSDEAVTYSLGKFGQRALDFYSIHVTKESTHPVKPLAQIAGNRYASGPVGKALSDACMGTIASFLSKYQDIIIEHQKVVKGNQKRLESLRELAGKENLEYPSVTLPPQPHTKEGVDAYNEVIARVRMWVNLNLWQKLKLSRDDAKPLLRLKGFPSFPLVERQANEVDWWDMVCNVKKLINEKKEDGKVFWQNLAGYKRQEALRPYLSSEEDRKKGKKFARYQLGDLLLHLEKKHGEDWGKVYDEAWERIDKKVEGLSKHIKLEEERRSEDAQSKAALTDWLRAKASFVIEGLKEADKDEFCRCELKLQKWYGDLRGKPFAIEAENSILDISGFSKQYNCAFIWQKDGVKKLNLYLIINYFKGGKLRFKKIKPEAFEANRFYTVINKKSGEIVPMEVNFNFDDPNLIILPLAFGKRFGREFIWNDLLSLETGSLKLANGRVIEKTLYNRRTRQDEPALFVALTFERREVLDSSNIKPMNLIGVDRGENIPAVIALTDPEGCPLSRFKDSLGNPTHILRIGESYKEKQRTIQAKKEVEQRRAGGYSRKYASKAKNLADDMVRNTARDLLYYAVTQDAMLIFENLSRGFGRQGKRTFMAERQYTRMEDWLTAKLAYEGLASKTYLSKTLAQYTSKTCSNCGFTITSADYDRVLEKLKKTATGWMTTINGKELKVEGQITYYNRYKRQNVVKDLSVELDRLSEESVNNDISSWTKGRSGEALSLLKKRFSHRPVQEKFVCLNCGFETHADEQAALNIARSWLFLRSQEYKKYQTNKTTGNTDKRAFVETWQSFYRKKLKEVWKPAV

SEQ ID NO: 37504 - protein, 977 aa, synthetic construct
  REGION 1..977: note = engineered CasX variant
QEIKRINKIRRRLVKDSNTKKAGKTGPMKTLLVRVMTPDLRERLENLRKKPENIPQPISNTSRANLNKLLTDYTEMKKAILHVYWEEFQKDPVGLMSRVAQPASKKIDQNKLKPEMDEKGNLTTAGFACSQCGQPLFVYKLEQVSEKGKAYTNYFGRCNVAEHEKLILLAQLKPEKDSDEAVTYSLGKFGQRALDFYSIHVTKESTHPVKPLAQIAGNRYASPVGKALSDACMGTIASFLSKYQDIIIEHQKVVKGNQKRLESLRELAGKENLEYPSVTLPPQPHTKEGVDAYNEVIARVRMWVNLNLWQKLKLSRDDAKPLLRLKGFPSFPLVERQANEVDWWDMVCNVKKLINEKKEDGKVFWQNLAGYKRQEALRPYLSSEEDRKKGKKFARYQLGDLLLHLEKKHGEDWGKVYDEAWERIDKKVEGLSKHIKLEEERRSEDAQSKAALTDWLRAKASFVIEGLKEADKDEFCRCELKLQKWYGDLRGKPFAIEAENSILDISGFSKQYNCAFIWQKDGVKKLNLYLIINYFKGGKLRFKKIKPEAFEANRFYTVINKKSGEIVPMEVNFNFDDPNLIILPLAFGKRFGREFIWNDLLSLETGSLKLANGRVIEKTLYNRRTRQDEPALFVALTFERREVLDSSNIKPMNLIGVDRGENIPAVIALTDPEGCPLSRFKDSLGNPTHILRIGESYKEKQRTIQAKKEVEQRRAGGYSRKYASKAKNLADDMVRNTARDLLYYAVTQDAMLIFENLSRGFGRQGKRTFMAERQYTRMEDWLTAKLAYEGLASKTYLSKTLAQYTSKTCSNCGFTITSADYDRVLEKLKKTATGWMTTINGKELKVEGQITYYNRYKRQNVVKDLSVELDRLSEESVNNDISSWTKGRSGEALSLLKKRFSHRPVQEKFVCLNCGFETHADEQAALNIARSWLFLRSQEYKKYQTNKTTGNTDKRAFVETWQSFYRKKLKEVWKPAV

SEQ ID NO: 37505 - protein, 978 aa, synthetic construct
  REGION 1..978: note = engineered CasX variant
QEIKRINKIRRRLVKDSNTKKAGKTGPMKTLLVRVMTPDLRERLENLRKKPENIPQPISNTSRANLNKLLTDYTEMKKAILHVYWEEFQKDPVGLMSRVAQPASKKIDQNKLKPEMDEKGNLTTAGFACSQCGQPLFVYKLEQVSEKGKAYTNYFGRCNVAEHEKLILLAQLKPEKDSDEAVTYSLGKFGQRALDFYSIHVTKESTHPVKPLAQIAGNRYASYPVGKALSDACMGTIASFLSKYQDIIIEHQKVVKGNQKRLESLRELAGKENLEYPSVTLPPQPHTKEGVDAYNEVIARVRMWVNLNLWQKLKLSRDDAKPLLRLKGFPSFPLVERQANEVDWWDMVCNVKKLINEKKEDGKVFWQNLAGYKRQEALRPYLSSEEDRKKGKKFARYQLGDLLLHLEKKHGEDWGKVYDEAWERIDKKVEGLSKHIKLEEERRSEDAQSKAALTDWLRAKASFVIEGLKEADKDEFCRCELKLQKWYGDLRGKPFAIEAENSILDISGFSKQYNCAFIWQKDGVKKLNLYLIINYFKGGKLRFKKIKPEAFEANRFYTVINKKSGEIVPMEVNFNFDDPNLIILPLAFGKRFGREFIWNDLLSLETGSLKLANGRVIEKTLYNRRTRQDEPALFVALTFERREVLDSSNIKPMNLIGVDRGENIPAVIALTDPEGCPLSRFKDSLGNPTHILRIGESYKEKQRTIQAKKEVEQRRAGGYSRKYASKAKNLADDMVRNTARDLLYYAVTQDAMLIFENLSRGFGRQGKRTFMAERQYTRMEDWLTAKLAYEGLPSKVYLSKTLAQYTSKTCSNCGFTITSADYDRVLEKLKKTATGWMTTINGKELKVEGQITYYNRYKRQNVVKDLSVELDRLSEESVNNDISSWTKGRSGEALSLLKKRFSHRPVQEKFVCLNCGFETHADEQAALNIARSWLFLRSQEYKKYQTNKTTGNTDKRAFVETWQSFYRKKLKEVWKPAV

SEQ ID NO: 37506 - protein, 978 aa, synthetic construct
  REGION 1..978: note = engineered CasX variant
QEIKRINKIRRRLVKDSNTKKAGKTGPMKTLLVRVMTPDLRERLENLRKKPENIPQPISNTSRANLNKLLTDYTEMKKAILHVYWEEFQKDPVGLMSRVAQPASKKIDQNKLKPEMDEKGNLTTAGFACSQCGQPLFVYKLEQVSEKGKAYTNYFGRCNVAEHEKLILLAQLKPEKDSDEAVTYSLGKFGQRALDFYSIHVTKESTHPVKPLAQIAGNRYASHPVGKALSDACMGTIASFLSKYQDIIIEHQKVVKGNQKRLESLRELAGKENLEYPSVTLPPQPHTKEGVDAYNEVIARVRMWVNLNLWQKLKLSRDDAKPLLRLKGFPSFPLVERQANEVDWWDMVCNVKKLINEKKEDGKVFWQNLAGYKRQEALRPYLSSEEDRKKGKKFARYQLGDLLLHLEKKHGEDWGKVYDEAWERIDKKVEGLSKHIKLEEERRSEDAQSKAALTDWLRAKASFVIEGLKEADKDEFCRCELKLQKWYGDLRGKPFAIEAENSILDISGFSKQYNCAFIWQKDGVKKLNLYLIINYFKGGKLRFKKIKPEAFEANRFYTVINKKSGEIVPMEVNFNFDDPNLIILPLAFGKRFGREFIWNDLLSLETGSLKLANGRVIEKTLYNRRTRQDEPALFVALTFERREVLDSSNIKPMNLIGVDRGENIPAVIALTDPEGCPLSRFKDSLGNPTHILRIGESYKEKQRTIQAKKEVEQRRAGGYSRKYASKAKNLADDMVRNTARDLLYYAVTQDAMLIFENLSRGFGRQGKRTFMAERQYTRMEDWLTAKLAYEGLPSKVYLSKTLAQYTSKTCSNCGFTITSADYDRVLEKLKKTATGWMTTINGKELKVEGQITYYNRYKRQNVVKDLSVELDRLSEESVNNDISSWTKGRSGEALSLLKKRFSHRPVQEKFVCLNCGFETHADEQAALNIARSWLFLRSQEYKKYQTNKTTGNTDKRAFVETWQSFYRKKLKEVWKPAV

SEQ ID NO: 37507 - protein, 978 aa, synthetic construct
  REGION 1..978: note = engineered CasX variant
QEIKRINKIRRRLVKDSNTKKAGKTGPMKTLLVRVMTPDLRERLENLRKKPENIPQPISNTSRANLNKLLTDYTEMKKAILHVYWEEFQKDPVGLMSRVAQPASKKIDQNKLKPEMDEKGNLTTAGFACSQCGQPLFVYKLEQVSEKGKAYTNYFGRCNVAEHEKLILLAQLKPEKDSDEAVTYSLGKFGQRALDFYSIHVTKESTHPVKPLAQIAGNRYASSPVGKALSDACMGTIASFLSKYQDIIIEHQKVVKGNQKRLESLRELAGKENLEYPSVTLPPQPHTKEGVDAYNEVIARVRMWVNLNLWQKLKLSRDDAKPLLRLKGFPSFPLVERQANEVDWWDMVCNVKKLINEKKEDGKVFWQNLAGYKRQEALRPYLSSEEDRKKGKKFARYQLGDLLLHLEKKHGEDWGKVYDEAWERIDKKVEGLSKHIKLEEERRSEDAQSKAALTDWLRAKASFVIEGLKEADKDEFCRCELKLQKWYGDLRGKPFAIEAENSILDISGFSKQYNCAFIWQKDGVKKLNLYLIINYFKGGKLRFKKIKPEAFEANRFYTVINKKSGEIVPMEVNFNFDDPNLIILPLAFGKRFGREFIWNDLLSLETGSLKLANGRVIEKTLYNRRTRQDEPALFVALTFERREVLDSSNIKPMNLIGVDRGENIPAVIALTDPEGCPLSRFKDSLGNPTHILRIGESYKEKQRTIQAKKEVEQRRAGGYSRKYASKAKNLADDMVRNTARDLLYYAVTQDAMLIFENLSRGFGRQGKRTFMAERQYTRMEDWLTAKLAYEGLPSKVYLSKTLAQYTSKTCSNCGFTITSADYDRVLEKLKKTATGWMTTINGKELKVEGQITYYNRYKRQNVVKDLSVELDRLSEESVNNDISSWTKGRSGEALSLLKKRFSHRPVQEKFVCLNCGFETHADEQAALNIARSWLFLRSQEYKKYQTNKTTGNTDKRAFVETWQSFYRKKLKEVWKPAV

SEQ ID NO: 37508 - protein, 978 aa, synthetic construct
  REGION 1..978: note = engineered CasX variant
QEIKRINKIRRRLVKDSNTKKAGKTGPMKTLLVRVMTPDLRERLENLRKKPENIPQPISNTSRANLNKLLTDYTEMKKAILHVYWEEFQKDPVGLMSRVAQPASKKIDQNKLKPEMDEKGNLTTAGFACSQCGQPLFVYKLEQVSEKGKAYTNYFGRCNVAEHEKLILLAQLKPEKDSDEAVTYSLGKFGQRALDFYSIHVTKESTHPVKPLAQIAGNRYASTPVGKALSDACMGTIASFLSKYQDIIIEHQKVVKGNQKRLESLRELAGKENLEYPSVTLPPQPHTKEGVDAYNEVIARVRMWVNLNLWQKLKLSRDDAKPLLRLKGFPSFPLVERQANEVDWWDMVCNVKKLINEKKEDGKVFWQNLAGYKRQEALRPYLSSEEDRKKGKKFARYQLGDLLLHLEKKHGEDWGKVYDEAWERIDKKVEGLSKHIKLEEERRSEDAQSKAALTDWLRAKASFVIEGLKEADKDEFCRCELKLQKWYGDLRGKPFAIEAENSILDISGFSKQYNCAFIWQKDGVKKLNLYLIINYFKGGKLRFKKIKPEAFEANRFYTVINKKSGEIVPMEVNFNFDDPNLIILPLAFGKRFGREFIWNDLLSLETGSLKLANGRVIEKTLYNRRTRQDEPALFVALTFERREVLDSSNIKPMNLIGVDRGENIPAVIALTDPEGCPLSRFKDSLGNPTHILRIGESYKEKQRTIQAKKEVEQRRAGGYSRKYASKAKNLADDMVRNTARDLLYYAVTQDAMLIFENLSRGFGRQGKRTFMAERQYTRMEDWLTAKLAYEGLPSKVYLSKTLAQYTSKTCSNCGFTITSADYDRVLEKLKKTATGWMTTINGKELKVEGQITYYNRYKRQNVVKDLSVELDRLSEESVNNDISSWTKGRSGEALSLLKKRFSHRPVQEKFVCLNCGFETHADEQAALNIARSWLFLRSQEYKKYQTNKTTGNTDKRAFVETWQSFYRKKLKEVWKPAV

SEQ ID NO: 37509 - protein, 978 aa, synthetic construct
  REGION 1..978: note = engineered CasX variant
QEIKRINKIRRRLVKDSNTKKAGKTGPMKTLLVRVMTPDLRERLENLRKKPENIPQPISNTSRANLNKLLTDYTEMKKAILHVYWEEFQKDPVGLMSRVAQPASKKIDQNKLKPEMDEKGNLTTAGFACSQCGQPLFVYKLEQVSEKGKAYTNYFGRCNVAEHEKLILLAQLKPEKDSDEAVTYSLGKFGQRALDFYSIHVTKESTHPVKPLAQIAGNRYASAPVGKALSDACMGTIASFLSKYQDIIIEHQKVVKGNQKRLESLRELAGKENLEYPSVTLPPQPHTKEGVDAYNEVIARVRMWVNLNLWQKLKLSRDDAKPLLRLKGFPSFPLVERQANEVDWWDMVCNVKKLINEKKEDGKVFWQNLAGYKRQEALRPYLSSEEDRKKGKKFARYQLGDLLLHLEKKHGEDWGKVYDEAWERIDKKVEGLSKHIKLEEERRSEDAQSKAALTDWLRAKASFVIEGLKEADKDEFCRCELKLQKWYGDLRGKPFAIEAENSILDISGFSKQYNCAFIWQKDGVKKLNLYLIINYFKGGKLRFKKIKPEAFEANRFYTVINKKSGEIVPMEVNFNFDDPNLIILPLAFGKRFGREFIWNDLLSLETGSLKLANGRVIEKTLYNRRTRQDEPALFVALTFERREVLDSSNIKPMNLIGVDRGENIPAVIALTDPEGCPLSRFKDSLGNPTHILRIGESYKEKQRTIQAKKEVEQRRAGGYSRKYASKAKNLADDMVRNTARDLLYYAVTQDAMLIFENLSRGFGRQGKRTFMAERQYTRMEDWLTAKLAYEGLPSKVYLSKTLAQYTSKTCSNCGFTITSADYDRVLEKLKKTATGWMTTINGKELKVEGQITYYNRYKRQNVVKDLSVELDRLSEESVNNDISSWTKGRSGEALSLLKKRFSHRPVQEKFVCLNCGFETHADEQAALNIARSWLFLRSQEYKKYQTNKTTGNTDKRAFVETWQSFYRKKLKEVWKPAV

SEQ ID NO: 37510 - protein, 978 aa, synthetic construct
  REGION 1..978: note = engineered CasX variant
QEIKRINKIRRRLVKDSNTKKAGKTGPMKTLLVRVMTPDLRERLENLRKKPENIPQPISNTSRANLNKLLTDYTEMKKAILHVYWEEFQKDPVGLMSRVAQPASKKIDQNKLKPEMDEKGNLTTAGFACSQCGQPLFVYKLEQVSEKGKAYTNYFGRCNVAEHEKLILLAQLKPEKDSDEAVTYSLGKFGQRALDFYSIHVTKESTHPVKPLAQIAGNRYASVPVGKALSDACMGTIASFLSKYQDIIIEHQKVVKGNQKRLESLRELAGKENLEYPSVTLPPQPHTKEGVDAYNEVIARVRMWVNLNLWQKLKLSRDDAKPLLRLKGFPSFPLVERQANEVDWWDMVCNVKKLINEKKEDGKVFWQNLAGYKRQEALRPYLSSEEDRKKGKKFARYQLGDLLLHLEKKHGEDWGKVYDEAWERIDKKVEGLSKHIKLEEERRSEDAQSKAALTDWLRAKASFVIEGLKEADKDEFCRCELKLQKWYGDLRGKPFAIEAENSILDISGFSKQYNCAFIWQKDGVKKLNLYLIINYFKGGKLRFKKIKPEAFEANRFYTVINKKSGEIVPMEVNFNFDDPNLIILPLAFGKRFGREFIWNDLLSLETGSLKLANGRVIEKTLYNRRTRQDEPALFVALTFERREVLDSSNIKPMNLIGVDRGENIPAVIALTDPEGCPLSRFKDSLGNPTHILRIGESYKEKQRTIQAKKEVEQRRAGGYSRKYASKAKNLADDMVRNTARDLLYYAVTQDAMLIFENLSRGFGRQGKRTFMAERQYTRMEDWLTAKLAYEGLPSKVYLSKTLAQYTSKTCSNCGFTITSADYDRVLEKLKKTATGWMTTINGKELKVEGQITYYNRYKRQNVVKDLSVELDRLSEESVNNDISSWTKGRSGEALSLLKKRFSHRPVQEKFVCLNCGFETHADEQAALNIARSWLFLRSQEYKKYQTNKTTGNTDKRAFVETWQSFYRKKLKEVWKPAV

SEQ ID NO: 37511 - protein, 978 aa, synthetic construct
  REGION 1..978: note = engineered CasX variant
QEIKRINKIRRRLVKDSNTKKAGKTGPMKTLLVRVMTPDLRERLENLRKKPENIPQPISNTSRANLNKLLTDYTEMKKAILHVYWEEFQKDPVGLMSRVAQPASKKIDQNKLKPEMDEKGNLTTAGFACSQCGQPLFVYKLEQVSEKGKAYTNYFGRCNVAEHEKLIKLAQLKPEKDSDEAVTYSLGKFGQRALDFYSIHVTKESTHPVKPLAQIAGNRYASGPVGKALSDACMGTIASFLSKYQDIIIEHQKVVKGNQKRLESLRELAGKENLEYPSVTLPPQPHTKEGVDAYNEVIARVRMWVNLNLWQKLKLSRDDAKPLLRLKGFPSFPLVERQANEVDWWDMVCNVKKLINEKKEDGKVFWQNLAGYKRQEALRPYLSSEEDRKKGKKFARYQLGDLLLHLEKKHGEDWGKVYDEAWERIDKKVEGLSKHIKLEEERRSEDAQSKAALTDWLRAKASFVIEGLKEADKDEFCRCELKLQKWYGDLRGKPFAIEAENSILDISGFSKQYNCAFIWQKDGVKKLNLYLIINYFKGGKLRFKKIKPEAFEANRFYTVINKKSGEIVPMEVNFNFDDPNLIILPLAFGKRFGREFIWNDLLSLETGSLKLANGRVIEKTLYNRRTRQDEPALFVALTFERREVLDSSNIKPMNLIGVDRGENIPAVIALTDPEGCPLSRFKDSLGNPTHILRIGESYKEKQRTIQAKKEVEQRRAGGYSRKYASKAKNLADDMVRNTARDLLYYAVTQDAMLIFENLSRGFGRQGKRTFMAERQYTRMEDWLTAKLAYEGLPSKVYLSKTLAQYTSKTCSNCGFTITSADYDRVLEKLKKTATGWMTTINGKELKVEGQITYYNRYKRQNVVKDLSVELDRLSEESVNNDISSWTKGRSGEALSLLKKRFSHRPVQEKFVCLNCGFETHADEQAALNIARSWLFLRSQEYKKYQTNKTTGNTDKRAFVETWQSFYRKKLKEVWKPAV

SEQ ID NO: 37512 - protein, 977 aa, synthetic construct
  REGION 1..977: note = engineered CasX variant
QEIKRINKIRRRLVKDSNTKKAGKTGPMKTLLVRVMTPDLRERLENLRKKPENIPQPISNTSRANLNKLLTDYTEMKKAILHVYWEEFQKDPVGLMSRVAQPASKKIDQNKLKPEMDEKGNLTTAGFACSQCGQPLFVYKLEQVSEKGKAYTNYFGRCNVAEHEKLILLAQLKPEKDSDEAVTYSLGKFGQRALDFYSIHVTKESTHPVKPLAQIAGNRYASPVGKALSDACMGTIASFLSKYQDIIIEHQKVVKGNQKRLESLRELAGKENLEYPSVTLPPQPHTKEGVDAYNEVIARVRMWVNLNLWQKLKLSRDDAKPLLRLKGFPSFPLVERQANEVDWWDMVCNVKKLINEKKEDGKVFWQNLAGYKRQEALRPYLSSEEDRKKGKKFARYQLGDLLLHLEKKHGEDWGKVYDEAWERIDKKVEGLSKHIKLEEERRSEDAQSKAALTDWLRAKASFVIEGLKEADKDEFCRCELKLQKWYGDLRGKPFAIEAENSILDISGFSKQYNCAFIWQKDGVKKLNLYLIINYFKGGKLRFKKIKPEAFEANRFYTVINKKSGEIVPMEVNFNFDDPNLIILPLAFGKRFGREFIWNDLLSLETGSLKLANGRVIEKTLYNRRTRQDEPALFVALTFERREVLDSSNIKPMNLIGVDRGENIPAVIALTDPEGCPLSRFKDSLGNPTHILRIGESYKEKQRTIQAKKEVEQRRAGGYSRKYASKAKNLADDMVRNTARDLLYYAVTQDAMLIFENLSRGFGRQGKRTFMAERQYTRMEDWLTAKLAYEGLPSKVYLSKTLAQYTSKTCSNCGFTITSADYDRVLEKLKKTATGWMTTINGKELKVEGQITYYNRYKRQNVVKDLSVELDRLSEESVNNDISSWTKGRSGEALSLLKKRFSHRPVQEKFVCLNCGFETHADEQAALNIARSWLFLRSQEYKKYQTNKTTGNTDKRAFVETWQSFYRKKLKEVWKPAV

SEQ ID NO: 37513 - protein, 979 aa, synthetic construct
  REGION 1..979: note = engineered CasX variant
QEIKRINKIRRRLVKDSNTKKAGKTGPMKTLLVRVMTPDLRERLENLRKKPENIPQPISNTSRANLNKLLTDYTEMKKAILHVYWEEFQKDPVGLMSRVAQPASKKIDQNKLKPEMDEKGNLTTAGFACSQCGQPLFVYKLEQVSEKGKAYTNYFGRCNVAEHEKLILLAQLKPEKDSDEAVTYSLGKFGQRALDFYSIHVTKESTHPVKPLAQIAGNRYASYPVGKALSDACMGTIASFLSKYQDIIIEHQKVVKGNQKRLESLRELAGKENLEYPSVTLPPQPHTKEGVDAYNEVIARVRMWVNLNLWQKLKLSRDDAKPLLRLKGFPSFPLVERQANEVDWWDMVCNVKKLINEKKEDGKVFWQNLAGYKRQEALRPYLSSEEDRKKGKKFARYQLGDLLLHLEKKHGEDWGKVYDEAWERIDKKVEGLSKHIKLEEERRSEDAQSKAALTDWLRAKASFVIEGLKEADKDEFCRCELKLQKWYGDLRGKPFAIEAENSILDISGFSKQYNCAFIWQKDGVKKLNLYLIINYFKGGKLRFKKIKPEAFEANRFYTVINKKSGEIVPMEVNFNFDDPNLIILPLAFGKRFGREFIWNDLLSLETGSLKLANGRVIEKTLYNRRTRQDEPALFVALTFERREVLDSSNIKPMNLIGVDRGENIPAVIALTDPEGCPLSRFKDSLGNPTHILRIGESYKEKQRTIQAKKEVEQRRAGGYSRKYASKAKNLADDMVRNTARDLLYYAVTQDAMLIFENLSRGFGRQGKRTFMAERQYTRMEDWLTAKLAYEGPLPSKTYLSKTLAQYTSKTCSNCGFTITSADYDRVLEKLKKTATGWMTTINGKELKVEGQITYYNRYKRQNVVKDLSVELDRLSEESVNNDISSWTKGRSGEALSLLKKRFSHRPVQEKFVCLNCGFETHADEQAALNIARSWLFLRSQEYKKYQTNKTTGNTDKRAFVETWQSFYRKKLKEVWKPAV

SEQ ID NO: 37514 - protein, 979 aa, synthetic construct
  REGION 1..979: note = engineered CasX variant
QEIKRINKIRRRLVKDSNTKKAGKTGPMKTLLVRVMTPDLRERLENLRKKPENIPQPISNTSRANLNKLLTDYTEMKKAILHVYWEEFQKDPVGLMSRVAQPASKKIDQNKLKPEMDEKGNLTTAGFACSQCGQPLFVYKLEQVSEKGKAYTNYFGRCNVAEHEKLILLAQLKPEKDSDEAVTYSLGKFGQRALDFYSIHVTKESTHPVKPLAQIAGNRYASHPVGKALSDACMGTIASFLSKYQDIIIEHQKVVKGNQKRLESLRELAGKENLEYPSVTLPPQPHTKEGVDAYNEVIARVRMWVNLNLWQKLKLSRDDAKPLLRLKGFPSFPLVERQANEVDWWDMVCNVKKLINEKKEDGKVFWQNLAGYKRQEALRPYLSSEEDRKKGKKFARYQLGDLLLHLEKKHGEDWGKVYDEAWERIDKKVEGLSKHIKLEEERRSEDAQSKAALTDWLRAKASFVIEGLKEADKDEFCRCELKLQKWYGDLRGKPFAIEAENSILDISGFSKQYNCAFIWQKDGVKKLNLYLIINYFKGGKLRFKKIKPEAFEANRFYTVINKKSGEIVPMEVNFNFDDPNLIILPLAFGKRFGREFIWNDLLSLETGSLKLANGRVIEKTLYNRRTRQDEPALFVALTFERREVLDSSNIKPMNLIGVDRGENIPAVIALTDPEGCPLSRFKDSLGNPTHILRIGESYKEKQRTIQAKKEVEQRRAGGYSRKYASKAKNLADDMVRNTARDLLYYAVTQDAMLIFENLSRGFGRQGKRTFMAERQYTRMEDWLTAKLAYEGPLPSKTYLSKTLAQYTSKTCSNCGFTITSADYDRVLEKLKKTATGWMTTINGKELKVEGQITYYNRYKRQNVVKDLSVELDRLSEESVNNDISSWTKGRSGEALSLLKKRFSHRPVQEKFVCLNCGFETHADEQAALNIARSWLFLRSQEYKKYQTNKTTGNTDKRAFVETWQSFYRKKLKEVWKPAV

SEQ ID NO: 37515 - protein, 979 aa, synthetic construct
  REGION 1..979: note = engineered CasX variant
QEIKRINKIRRRLVKDSNTKKAGKTGPMKTLLVRVMTPDLRERLENLRKKPENIPQPISNTSRANLNKLLTDYTEMKKAILHVYWEEFQKDPVGLMSRVAQPASKKIDQNKLKPEMDEKGNLTTAGFACSQCGQPLFVYKLEQVSEKGKAYTNYFGRCNVAEHEKLILLAQLKPEKDSDEAVTYSLGKFGQRALDFYSIHVTKESTHPVKPLAQIAGNRYASSPVGKALSDACMGTIASFLSKYQDIIIEHQKVVKGNQKRLESLRELAGKENLEYPSVTLPPQPHTKEGVDAYNEVIARVRMWVNLNLWQKLKLSRDDAKPLLRLKGFPSFPLVERQANEVDWWDMVCNVKKLINEKKEDGKVFWQNLAGYKRQEALRPYLSSEEDRKKGKKFARYQLGDLLLHLEKKHGEDWGKVYDEAWERIDKKVEGLSKHIKLEEERRSEDAQSKAALTDWLRAKASFVIEGLKEADKDEFCRCELKLQKWYGDLRGKPFAIEAENSILDISGFSKQYNCAFIWQKDGVKKLNLYLIINYFKGGKLRFKKIKPEAFEANRFYTVINKKSGEIVPMEVNFNFDDPNLIILPLAFGKRFGREFIWNDLLSLETGSLKLANGRVIEKTLYNRRTRQDEPALFVALTFERREVLDSSNIKPMNLIGVDRGENIPAVIALTDPEGCPLSRFKDSLGNPTHILRIGESYKEKQRTIQAKKEVEQRRAGGYSRKYASKAKNLADDMVRNTARDLLYYAVTQDAMLIFENLSRGFGRQGKRTFMAERQYTRMEDWLTAKLAYEGPLPSKTYLSKTLAQYTSKTCSNCGFTITSADYDRVLEKLKKTATGWMTTINGKELKVEGQITYYNRYKRQNVVKDLSVELDRLSEESVNNDISSWTKGRSGEALSLLKKRFSHRPVQEKFVCLNCGFETHADEQAALNIARSWLFLRSQEYKKYQTNKTTGNTDKRAFVETWQSFYRKKLKEVWKPAV

SEQ ID NO: 37516 - protein, 979 aa, synthetic construct
  REGION 1..979: note = engineered CasX variant
QEIKRINKIRRRLVKDSNTKKAGKTGPMKTLLVRVMTPDLRERLENLRKKPENIPQPISNTSRANLNKLLTDYTEMKKAILHVYWEEFQKDPVGLMSRVAQPASKKIDQNKLKPEMDEKGNLTTAGFACSQCGQPLFVYKLEQVSEKGKAYTNYFGRCNVAEHEKLILLAQLKPEKDSDEAVTYSLGKFGQRALDFYSIHVTKESTHPVKPLAQIAGNRYASTPVGKALSDACMGTIASFLSKYQDIIIEHQKVVKGNQKRLESLRELAGKENLEYPSVTLPPQPHTKEGVDAYNEVIARVRMWVNLNLWQKLKLSRDDAKPLLRLKGFPSFPLVERQANEVDWWDMVCNVKKLINEKKEDGKVFWQNLAGYKRQEALRPYLSSEEDRKKGKKFARYQLGDLLLHLEKKHGEDWGKVYDEAWERIDKKVEGLSKHIKLEEERRSEDAQSKAALTDWLRAKASFVIEGLKEADKDEFCRCELKLQKWYGDLRGKPFAIEAENSILDISGFSKQYNCAFIWQKDGVKKLNLYLIINYFKGGKLRFKKIKPEAFEANRFYTVINKKSGEIVPMEVNFNFDDPNLIILPLAFGKRFGREFIWNDLLSLETGSLKLANGRVIEKTLYNRRTRQDEPALFVALTFERREVLDSSNIKPMNLIGVDRGENIPAVIALTDPEGCPLSRFKDSLGNPTHILRIGESYKEKQRTIQAKKEVEQRRAGGYSRKYASKAKNLADDMVRNTARDLLYYAVTQDAMLIFENLSRGFGRQGKRTFMAERQYTRMEDWLTAKLAYEGPLPSKTYLSKTLAQYTSKTCSNCGFTITSADYDRVLEKLKKTATGWMTTINGKELKVEGQITYYNRYKRQNVVKDLSVELDRLSEESVNNDISSWTKGRSGEALSLLKKRFSHRPVQEKFVCLNCGFETHADEQAALNIARSWLFLRSQEYKKYQTNKTTGNTDKRAFVETWQSFYRKKLKEVWKPAV

SEQ ID NO: 37517 - protein, 979 aa, synthetic construct
  REGION 1..979: note = engineered CasX variant
QEIKRINKIRRRLVKDSNTKKAGKTGPMKTLLVRVMTPDLRERLENLRKKPENIPQPISNTSRANLNKLLTDYTEMKKAILHVYWEEFQKDPVGLMSRVAQPASKKIDQNKLKPEMDEKGNLTTAGFACSQCGQPLFVYKLEQVSEKGKAYTNYFGRCNVAEHEKLILLAQLKPEKDSDEAVTYSLGKFGQRALDFYSIHVTKESTHPVKPLAQIAGNRYASAPVGKALSDACMGTIASFLSKYQDIIIEHQKVVKGNQKRLESLRELAGKENLEYPSVTLPPQPHTKEGVDAYNEVIARVRMWVNLNLWQKLKLSRDDAKPLLRLKGFPSFPLVERQANEVDWWDMVCNVKKLINEKKEDGKVFWQNLAGYKRQEALRPYLSSEEDRKKGKKFARYQLGDLLLHLEKKHGEDWGKVYDEAWERIDKKVEGLSKHIKLEEERRSEDAQSKAALTDWLRAKASFVIEGLKEADKDEFCRCELKLQKWYGDLRGKPFAIEAENSILDISGFSKQYNCAFIWQKDGVKKLNLYLIINYFKGGKLRFKKIKPEAFEANRFYTVINKKSGEIVPMEVNFNFDDPNLIILPLAFGKRFGREFIWNDLLSLETGSLKLANGRVIEKTLYNRRTRQDEPALFVALTFERREVLDSSNIKPMNLIGVDRGENIPAVIALTDPEGCPLSRFKDSLGNPTHILRIGESYKEKQRTIQAKKEVEQRRAGGYSRKYASKAKNLADDMVRNTARDLLYYAVTQDAMLIFENLSRGFGRQGKRTFMAERQYTRMEDWLTAKLAYEGPLPSKTYLSKTLAQYTSKTCSNCGFTITSADYDRVLEKLKKTATGWMTTINGKELKVEGQITYYNRYKRQNVVKDLSVELDRLSEESVNNDISSWTKGRSGEALSLLKKRFSHRPVQEKFVCLNCGFETHADEQAALNIARSWLFLRSQEYKKYQTNKTTGNTDKRAFVETWQSFYRKKLKEVWKPAV

SEQ ID NO: 37518 - protein, 979 aa, synthetic construct
  REGION 1..979: note = engineered CasX variant
QEIKRINKIRRRLVKDSNTKKAGKTGPMKTLLVRVMTPDLRERLENLRKKPENIPQPISNTSRANLNKLLTDYTEMKKAILHVYWEEFQKDPVGLMSRVAQPASKKIDQNKLKPEMDEKGNLTTAGFACSQCGQPLFVYKLEQVSEKGKAYTNYFGRCNVAEHEKLILLAQLKPEKDSDEAVTYSLGKFGQRALDFYSIHVTKESTHPVKPLAQIAGNRYASVPVGKALSDACMGTIASFLSKYQDIIIEHQKVVKGNQKRLESLRELAGKENLEYPSVTLPPQPHTKEGVDAYNEVIARVRMWVNLNLWQKLKLSRDDAKPLLRLKGFPSFPLVERQANEVDWWDMVCNVKKLINEKKEDGKVFWQNLAGYKRQEALRPYLSSEEDRKKGKKFARYQLGDLLLHLEKKHGEDWGKVYDEAWERIDKKVEGLSKHIKLEEERRSEDAQSKAALTDWLRAKASFVIEGLKEADKDEFCRCELKLQKWYGDLRGKPFAIEAENSILDISGFSKQYNCAFIWQKDGVKKLNLYLIINYFKGGKLRFKKIKPEAFEANRFYTVINKKSGEIVPMEVNFNFDDPNLIILPLAFGKRFGREFIWNDLLSLETGSLKLANGRVIEKTLYNRRTRQDEPALFVALTFERREVLDSSNIKPMNLIGVDRGENIPAVIALTDPEGCPLSRFKDSLGNPTHILRIGESYKEKQRTIQAKKEVEQRRAGGYSRKYASKAKNLADDMVRNTARDLLYYAVTQDAMLIFENLSRGFGRQGKRTFMAERQYTRMEDWLTAKLAYEGPLPSKTYLSKTLAQYTSKTCSNCGFTITSADYDRVLEKLKKTATGWMTTINGKELKVEGQITYYNRYKRQNVVKDLSVELDRLSEESVNNDISSWTKGRSGEALSLLKKRFSHRPVQEKFVCLNCGFETHADEQAALNIARSWLFLRSQEYKKYQTNKTTGNTDKRAFVETWQSFYRKKLKEVWKPAV

SEQ ID NO: 37519 - protein, 979 aa, synthetic construct
  REGION 1..979: note = engineered CasX variant
QEIKRINKIRRRLVKDSNTKKAGKTGPMKTLLVRVMTPDLRERLENLRKKPENIPQPISNTSRANLNKLLTDYTEMKKAILHVYWEEFQKDPVGLMSRVAQPASKKIDQNKLKPEMDEKGNLTTAGFACSQCGQPLFVYKLEQVSEKGKAYTNYFGRCNVAEHEKLIKLAQLKPEKDSDEAVTYSLGKFGQRALDFYSIHVTKESTHPVKPLAQIAGNRYASGPVGKALSDACMGTIASFLSKYQDIIIEHQKVVKGNQKRLESLRELAGKENLEYPSVTLPPQPHTKEGVDAYNEVIARVRMWVNLNLWQKLKLSRDDAKPLLRLKGFPSFPLVERQANEVDWWDMVCNVKKLINEKKEDGKVFWQNLAGYKRQEALRPYLSSEEDRKKGKKFARYQLGDLLLHLEKKHGEDWGKVYDEAWERIDKKVEGLSKHIKLEEERRSEDAQSKAALTDWLRAKASFVIEGLKEADKDEFCRCELKLQKWYGDLRGKPFAIEAENSILDISGFSKQYNCAFIWQKDGVKKLNLYLIINYFKGGKLRFKKIKPEAFEANRFYTVINKKSGEIVPMEVNFNFDDPNLIILPLAFGKRFGREFIWNDLLSLETGSLKLANGRVIEKTLYNRRTRQDEPALFVALTFERREVLDSSNIKPMNLIGVDRGENIPAVIALTDPEGCPLSRFKDSLGNPTHILRIGESYKEKQRTIQAKKEVEQRRAGGYSRKYASKAKNLADDMVRNTARDLLYYAVTQDAMLIFENLSRGFGRQGKRTFMAERQYTRMEDWLTAKLAYEGPLPSKTYLSKTLAQYTSKTCSNCGFTITSADYDRVLEKLKKTATGWMTTINGKELKVEGQITYYNRYKRQNVVKDLSVELDRLSEESVNNDISSWTKGRSGEALSLLKKRFSHRPVQEKFVCLNCGFETHADEQAALNIARSWLFLRSQEYKKYQTNKTTGNTDKRAFVETWQSFYRKKLKEVWKPAV

SEQ ID NO: 37520 - protein, 978 aa, synthetic construct
  REGION 1..978: note = engineered CasX variant
QEIKRINKIRRRLVKDSNTKKAGKTGPMKTLLVRVMTPDLRERLENLRKKPENIPQPISNTSRANLNKLLTDYTEMKKAILHVYWEEFQKDPVGLMSRVAQPASKKIDQNKLKPEMDEKGNLTTAGFACSQCGQPLFVYKLEQVSEKGKAYTNYFGRCNVAEHEKLILLAQLKPEKDSDEAVTYSLGKFGQRALDFYSIHVTKESTHPVKPLAQIAGNRYASPVGKALSDACMGTIASFLSKYQDIIIEHQKVVKGNQKRLESLRELAGKENLEYPSVTLPPQPHTKEGVDAYNEVIARVRMWVNLNLWQKLKLSRDDAKPLLRLKGFPSFPLVERQANEVDWWDMVCNVKKLINEKKEDGKVFWQNLAGYKRQEALRPYLSSEEDRKKGKKFARYQLGDLLLHLEKKHGEDWGKVYDEAWERIDKKVEGLSKHIKLEEERRSEDAQSKAALTDWLRAKASFVIEGLKEADKDEFCRCELKLQKWYGDLRGKPFAIEAENSILDISGFSKQYNCAFIWQKDGVKKLNLYLIINYFKGGKLRFKKIKPEAFEANRFYTVINKKSGEIVPMEVNFNFDDPNLIILPLAFGKRFGREFIWNDLLSLETGSLKLANGRVIEKTLYNRRTRQDEPALFVALTFERREVLDSSNIKPMNLIGVDRGENIPAVIALTDPEGCPLSRFKDSLGNPTHILRIGESYKEKQRTIQAKKEVEQRRAGGYSRKYASKAKNLADDMVRNTARDLLYYAVTQDAMLIFENLSRGFGRQGKRTFMAERQYTRMEDWLTAKLAYEGPLPSKTYLSKTLAQYTSKTCSNCGFTITSADYDRVLEKLKKTATGWMTTINGKELKVEGQITYYNRYKRQNVVKDLSVELDRLSEESVNNDISSWTKGRSGEALSLLKKRFSHRPVQEKFVCLNCGFETHADEQAALNIARSWLFLRSQEYKKYQTNKTTGNTDKRAFVETWQSFYRKKLKEVWKPAV

SEQ ID NO: 37521 - protein, 979 aa, synthetic construct
  REGION 1..979: note = engineered CasX variant
QEIKRINKIRRRLVKDSNTKKAGKTGPMKTLLVRVMTPDLRERLENLRKKPENIPQPISNTSRANLNKLLTDYTEMKKAILHVYWEEFQKDPVGLMSRVAQPASKKIDQNKLKPEMDEKGNLTTAGFACSQCGQPLFVYKLEQVSEKGKAYTNYFGRCNVAEHEKLILLAQLKPEKDSDEAVTYSLGKFGQRALDFYSIHVTKESTHPVKPLAQIAGNRYASYPVGKALSDACMGTIASFLSKYQDIIIEHQKVVKGNQKRLESLRELAGKENLEYPSVTLPPQPHTKEGVDAYNEVIARVRMWVNLNLWQKLKLSRDDAKPLLRLKGFPSFPLVERQANEVDWWDMVCNVKKLINEKKEDGKVFWQNLAGYKRQEALRPYLSSEEDVRKKGKKFARYQLGDLLLHLEKKHGEDWGKVYDEAWERIDKKVEGLSKHIKLEEERRSEDAQSKAALTDWLRAKASFVIEGLKEADKDEFCRCELKLQKWYGDLRGKPFAIEAENSILDISGFSKQYNCAFIWQKDGVKKLNLYLIINYFKGGKLRFKKIKPEAFEANRFYTVINKKSGEIVPMEVNFNFDDPNLIILPLAFGKRFGREFIWNDLLSLETGSLKLANGRVIEKTLYNRRTRQDEPALFVALTFERREVLDSSNIKPMNLIGVDRGENIPAVIALTDPEGCPLSRFKDSLGNPTHILRIGESYKEKQRTIQAKKEVEQRRAGGYSRKYASKAKNLADDMVRNTARDLLYYAVTQDAMLIFENLSRGFGRQGKRTFMAERQYTRMEDWLTAKLAYEGLPSKTYLSKTLAQYTSKTCSNCGFTITSADYDRVLEKLKKTATGWMTTINGKELKVEGQITYYNRYKRQNVVKDLSVELDRLSEESVNNDISSWTKGRSGEALSLLKKRFSHRPVQEKFVCLNCGFETHADEQAALNIARSWLFLRSQEYKKYQTNKTTGNTDKRAFVETWQSFYRKKLKEVWKPAV

SEQ ID NO: 37522 - protein, 979 aa, synthetic construct
  REGION 1..979: note = engineered CasX variant
QEIKRINKIRRRLVKDSNTKKAGKTGPMKTLLVRVMTPDLRERLENLRKKPENIPQPISNTSRANLNKLLTDYTEMKKAILHVYWEEFQKDPVGLMSRVAQPASKKIDQNKLKPEMDEKGNLTTAGFACSQCGQPLFVYKLEQVSEKGKAYTNYFGRCNVAEHEKLILLAQLKPEKDSDEAVTYSLGKFGQRALDFYSIHVTKESTHPVKPLAQIAGNRYASHPVGKALSDACMGTIASFLSKYQDIIIEHQKVVKGNQKRLESLRELAGKENLEYPSVTLPPQPHTKEGVDAYNEVIARVRMWVNLNLWQKLKLSRDDAKPLLRLKGFPSFPLVERQANEVDWWDMVCNVKKLINEKKEDGKVFWQNLAGYKRQEALRPYLSSEEDVRKKGKKFARYQLGDLLLHLEKKHGEDWGKVYDEAWERIDKKVEGLSKHIKLEEERRSEDAQSKAALTDWLRAKASFVIEGLKEADKDEFCRCELKLQKWYGDLRGKPFAIEAENSILDISGFSKQYNCAFIWQKDGVKKLNLYLIINYFKGGKLRFKKIKPEAFEANRFYTVINKKSGEIVPMEVNFNFDDPNLIILPLAFGKRFGREFIWNDLLSLETGSLKLANGRVIEKTLYNRRTRQDEPALFVALTFERREVLDSSNIKPMNLIGVDRGENIPAVIALTDPEGCPLSRFKDSLGNPTHILRIGESYKEKQRTIQAKKEVEQRRAGGYSRKYASKAKNLADDMVRNTARDLLYYAVTQDAMLIFENLSRGFGRQGKRTFMAERQYTRMEDWLTAKLAYEGLPSKTYLSKTLAQYTSKTCSNCGFTITSADYDRVLEKLKKTATGWMTTINGKELKVEGQITYYNRYKRQNVVKDLSVELDRLSEESVNNDISSWTKGRSGEALSLLKKRFSHRPVQEKFVCLNCGFETHADEQAALNIARSWLFLRSQEYKKYQTNKTTGNTDKRAFVETWQSFYRKKLKEVWKPAV

SEQ ID NO: 37523 - protein, 979 aa, synthetic construct
  REGION 1..979: note = engineered CasX variant
QEIKRINKIRRRLVKDSNTKKAGKTGPMKTLLVRVMTPDLRERLENLRKKPENIPQPISNTSRANLNKLLTDYTEMKKAILHVYWEEFQKDPVGLMSRVAQPASKKIDQNKLKPEMDEKGNLTTAGFACSQCGQPLFVYKLEQVSEKGKAYTNYFGRCNVAEHEKLILLAQLKPEKDSDEAVTYSLGKFGQRALDFYSIHVTKESTHPVKPLAQIAGNRYASSPVGKALSDACMGTIASFLSKYQDIIIEHQKVVKGNQKRLESLRELAGKENLEYPSVTLPPQPHTKEGVDAYNEVIARVRMWVNLNLWQKLKLSRDDAKPLLRLKGFPSFPLVERQANEVDWWDMVCNVKKLINEKKEDGKVFWQNLAGYKRQEALRPYLSSEEDVRKKGKKFARYQLGDLLLHLEKKHGEDWGKVYDEAWERIDKKVEGLSKHIKLEEERRSEDAQSKAALTDWLRAKASFVIEGLKEADKDEFCRCELKLQKWYGDLRGKPFAIEAENSILDISGFSKQYNCAFIWQKDGVKKLNLYLIINYFKGGKLRFKKIKPEAFEANRFYTVINKKSGEIVPMEVNFNFDDPNLIILPLAFGKRFGREFIWNDLLSLETGSLKLANGRVIEKTLYNRRTRQDEPALFVALTFERREVLDSSNIKPMNLIGVDRGENIPAVIALTDPEGCPLSRFKDSLGNPTHILRIGESYKEKQRTIQAKKEVEQRRAGGYSRKYASKAKNLADDMVRNTARDLLYYAVTQDAMLIFENLSRGFGRQGKRTFMAERQYTRMEDWLTAKLAYEGLPSKTYLSKTLAQYTSKTCSNCGFTITSADYDRVLEKLKKTATGWMTTINGKELKVEGQITYYNRYKRQNVVKDLSVELDRLSEESVNNDISSWTKGRSGEALSLLKKRFSHRPVQEKFVCLNCGFETHADEQAALNIARSWLFLRSQEYKKYQTNKTTGNTDKRAFVETWQSFYRKKLKEVWKPAV

SEQ ID NO: 37524 - protein, 979 aa, synthetic construct
  REGION 1..979: note = engineered CasX variant
QEIKRINKIRRRLVKDSNTKKAGKTGPMKTLLVRVMTPDLRERLENLRKKPENIPQPISNTSRANLNKLLTDYTEMKKAILHVYWEEFQKDPVGLMSRVAQPASKKIDQNKLKPEMDEKGNLTTAGFACSQCGQPLFVYKLEQVSEKGKAYTNYFGRCNVAEHEKLILLAQLKPEKDSDEAVTYSLGKFGQRALDFYSIHVTKESTHPVKPLAQIAGNRYASTPVGKALSDACMGTIASFLSKYQDIIIEHQKVVKGNQKRLESLRELAGKENLEYPSVTLPPQPHTKEGVDAYNEVIARVRMWVNLNLWQKLKLSRDDAKPLLRLKGFPSFPLVERQANEVDWWDMVCNVKKLINEKKEDGKVFWQNLAGYKRQEALRPYLSSEEDVRKKGKKFARYQLGDLLLHLEKKHGEDWGKVYDEAWERIDKKVEGLSKHIKLEEERRSEDAQSKAALTDWLRAKASFVIEGLKEADKDEFCRCELKLQKWYGDLRGKPFAIEAENSILDISGFSKQYNCAFIWQKDGVKKLNLYLIINYFKGGKLRFKKIKPEAFEANRFYTVINKKSGEIVPMEVNFNFDDPNLIILPLAFGKRFGREFIWNDLLSLETGSLKLANGRVIEKTLYNRRTRQDEPALFVALTFERREVLDSSNIKPMNLIGVDRGENIPAVIALTDPEGCPLSRFKDSLGNPTHILRIGESYKEKQRTIQAKKEVEQRRAGGYSRKYASKAKNLADDMVRNTARDLLYYAVTQDAMLIFENLSRGFGRQGKRTFMAERQYTRMEDWLTAKLAYEGLPSKTYLSKTLAQYTSKTCSNCGFTITSADYDRVLEKLKKTATGWMTTINGKELKVEGQITYYNRYKRQNVVKDLSVELDRLSEESVNNDISSWTKGRSGEALSLLKKRFSHRPVQEKFVCLNCGFETHADEQAALNIARSWLFLRSQEYKKYQTNKTTGNTDKRAFVETWQSFYRKKLKEVWKPAV

SEQ ID NO: 37525 - protein, 979 aa, synthetic construct
  REGION 1..979: note = engineered CasX variant
QEIKRINKIRRRLVKDSNTKKAGKTGPMKTLLVRVMTPDLRERLENLRKKPENIPQPISNTSRANLNKLLTDYTEMKKAILHVYWEEFQKDPVGLMSRVAQPASKKIDQNKLKPEMDEKGNLTTAGFACSQCGQPLFVYKLEQVSEKGKAYTNYFGRCNVAEHEKLILLAQLKPEKDSDEAVTYSLGKFGQRALDFYSIHVTKESTHPVKPLAQIAGNRYASAPVGKALSDACMGTIASFLSKYQDIIIEHQKVVKGNQKRLESLRELAGKENLEYPSVTLPPQPHTKEGVDAYNEVIARVRMWVNLNLWQKLKLSRDDAKPLLRLKGFPSFPLVERQANEVDWWDMVCNVKKLINEKKEDGKVFWQNLAGYKRQEALRPYLSSEEDVRKKGKKFARYQLGDLLLHLEKKHGEDWGKVYDEAWERIDKKVEGLSKHIKLEEERRSEDAQSKAALTDWLRAKASFVIEGLKEADKDEFCRCELKLQKWYGDLRGKPFAIEAENSILDISGFSKQYNCAFIWQKDGVKKLNLYLIINYFKGGKLRFKKIKPEAFEANRFYTVINKKSGEIVPMEVNFNFDDPNLIILPLAFGKRFGREFIWNDLLSLETGSLKLANGRVIEKTLYNRRTRQDEPALFVALTFERREVLDSSNIKPMNLIGVDRGENIPAVIALTDPEGCPLSRFKDSLGNPTHILRIGESYKEKQRTIQAKKEVEQRRAGGYSRKYASKAKNLADDMVRNTARDLLYYAVTQDAMLIFENLSRGFGRQGKRTFMAERQYTRMEDWLTAKLAYEGLPSKTYLSKTLAQYTSKTCSNCGFTITSADYDRVLEKLKKTATGWMTTINGKELKVEGQITYYNRYKRQNVVKDLSVELDRLSEESVNNDISSWTKGRSGEALSLLKKRFSHRPVQEKFVCLNCGFETHADEQAALNIARSWLFLRSQEYKKYQTNKTTGNTDKRAFVETWQSFYRKKLKEVWKPAV

SEQ ID NO: 37526 - protein, 979 aa, synthetic construct
  REGION 1..979: note = engineered CasX variant
QEIKRINKIRRRLVKDSNTKKAGKTGPMKTLLVRVMTPDLRERLENLRKKPENIPQPISNTSRANLNKLLTDYTEMKKAILHVYWEEFQKDPVGLMSRVAQPASKKIDQNKLKPEMDEKGNLTTAGFACSQCGQPLFVYKLEQVSEKGKAYTNYFGRCNVAEHEKLILLAQLKPEKDSDEAVTYSLGKFGQRALDFYSIHVTKESTHPVKPLAQIAGNRYASVPVGKALSDACMGTIASFLSKYQDIIIEHQKVVKGNQKRLESLRELAGKENLEYPSVTLPPQPHTKEGVDAYNEVIARVRMWVNLNLWQKLKLSRDDAKPLLRLKGFPSFPLVERQANEVDWWDMVCNVKKLINEKKEDGKVFWQNLAGYKRQEALRPYLSSEEDVRKKGKKFARYQLGDLLLHLEKKHGEDWGKVYDEAWERIDKKVEGLSKHIKLEEERRSEDAQSKAALTDWLRAKASFVIEGLKEADKDEFCRCELKLQKWYGDLRGKPFAIEAENSILDISGFSKQYNCAFIWQKDGVKKLNLYLIINYFKGGKLRFKKIKPEAFEANRFYTVINKKSGEIVPMEVNFNFDDPNLIILPLAFGKRFGREFIWNDLLSLETGSLKLANGRVIEKTLYNRRTRQDEPALFVALTFERREVLDSSNIKPMNLIGVDRGENIPAVIALTDPEGCPLSRFKDSLGNPTHILRIGESYKEKQRTIQAKKEVEQRRAGGYSRKYASKAKNLADDMVRNTARDLLYYAVTQDAMLIFENLSRGFGRQGKRTFMAERQYTRMEDWLTAKLAYEGLPSKTYLSKTLAQYTSKTCSNCGFTITSADYDRVLEKLKKTATGWMTTINGKELKVEGQITYYNRYKRQNVVKDLSVELDRLSEESVNNDISSWTKGRSGEALSLLKKRFSHRPVQEKFVCLNCGFETHADEQAALNIARSWLFLRSQEYKKYQTNKTTGNTDKRAFVETWQSFYRKKLKEVWKPAV

SEQ ID NO: 37527 - protein, 979 aa, synthetic construct
  REGION 1..979: note = engineered CasX variant
QEIKRINKIRRRLVKDSNTKKAGKTGPMKTLLVRVMTPDLRERLENLRKKPENIPQPISNTSRANLNKLLTDYTEMKKAILHVYWEEFQKDPVGLMSRVAQPASKKIDQNKLKPEMDEKGNLTTAGFACSQCGQPLFVYKLEQVSEKGKAYTNYFGRCNVAEHEKLIKLAQLKPEKDSDEAVTYSLGKFGQRALDFYSIHVTKESTHPVKPLAQIAGNRYASGPVGKALSDACMGTIASFLSKYQDIIIEHQKVVKGNQKRLESLRELAGKENLEYPSVTLPPQPHTKEGVDAYNEVIARVRMWVNLNLWQKLKLSRDDAKPLLRLKGFPSFPLVERQANEVDWWDMVCNVKKLINEKKEDGKVFWQNLAGYKRQEALRPYLSSEEDVRKKGKKFARYQLGDLLLHLEKKHGEDWGKVYDEAWERIDKKVEGLSKHIKLEEERRSEDAQSKAALTDWLRAKASFVIEGLKEADKDEFCRCELKLQKWYGDLRGKPFAIEAENSILDISGFSKQYNCAFIWQKDGVKKLNLYLIINYFKGGKLRFKKIKPEAFEANRFYTVINKKSGEIVPMEVNFNFDDPNLIILPLAFGKRFGREFIWNDLLSLETGSLKLANGRVIEKTLYNRRTRQDEPALFVALTFERREVLDSSNIKPMNLIGVDRGENIPAVIALTDPEGCPLSRFKDSLGNPTHILRIGESYKEKQRTIQAKKEVEQRRAGGYSRKYASKAKNLADDMVRNTARDLLYYAVTQDAMLIFENLSRGFGRQGKRTFMAERQYTRMEDWLTAKLAYEGLPSKTYLSKTLAQYTSKTCSNCGFTITSADYDRVLEKLKKTATGWMTTINGKELKVEGQITYYNRYKRQNVVKDLSVELDRLSEESVNNDISSWTKGRSGEALSLLKKRFSHRPVQEKFVCLNCGFETHADEQAALNIARSWLFLRSQEYKKYQTNKTTGNTDKRAFVETWQSFYRKKLKEVWKPAV

SEQ ID NO: 37528 - protein, 978 aa, synthetic construct
  REGION 1..978: note = engineered CasX variant
QEIKRINKIRRRLVKDSNTKKAGKTGPMKTLLVRVMTPDLRERLENLRKKPENIPQPISNTSRANLNKLLTDYTEMKKAILHVYWEEFQKDPVGLMSRVAQPASKKIDQNKLKPEMDEKGNLTTAGFACSQCGQPLFVYKLEQVSEKGKAYTNYFGRCNVAEHEKLILLAQLKPEKDSDEAVTYSLGKFGQRALDFYSIHVTKESTHPVKPLAQIAGNRYASPVGKALSDACMGTIASFLSKYQDIIIEHQKVVKGNQKRLESLRELAGKENLEYPSVTLPPQPHTKEGVDAYNEVIARVRMWVNLNLWQKLKLSRDDAKPLLRLKGFPSFPLVERQANEVDWWDMVCNVKKLINEKKEDGKVFWQNLAGYKRQEALRPYLSSEEDVRKKGKKFARYQLGDLLLHLEKKHGEDWGKVYDEAWERIDKKVEGLSKHIKLEEERRSEDAQSKAALTDWLRAKASFVIEGLKEADKDEFCRCELKLQKWYGDLRGKPFAIEAENSILDISGFSKQYNCAFIWQKDGVKKLNLYLIINYFKGGKLRFKKIKPEAFEANRFYTVINKKSGEIVPMEVNFNFDDPNLIILPLAFGKRFGREFIWNDLLSLETGSLKLANGRVIEKTLYNRRTRQDEPALFVALTFERREVLDSSNIKPMNLIGVDRGENIPAVIALTDPEGCPLSRFKDSLGNPTHILRIGESYKEKQRTIQAKKEVEQRRAGGYSRKYASKAKNLADDMVRNTARDLLYYAVTQDAMLIFENLSRGFGRQGKRTFMAERQYTRMEDWLTAKLAYEGLPSKTYLSKTLAQYTSKTCSNCGFTITSADYDRVLEKLKKTATGWMTTINGKELKVEGQITYYNRYKRQNVVKDLSVELDRLSEESVNNDISSWTKGRSGEALSLLKKRFSHRPVQEKFVCLNCGFETHADEQAALNIARSWLFLRSQEYKKYQTNKTTGNTDKRAFVETWQSFYRKKLKEVWKPAV

SEQ ID NO: 37529 - protein, 978 aa, synthetic construct
  REGION 1..978: note = engineered CasX variant
QEIKRINKIRRRLVKDSNTKKAGKTGPMKTLLVRVMTPDLRERLENLRKKPENIPQPISNTSRANLNKLLTDYTEMKKAILHVYWEEFQKDPVGLMSRVAQPASKKIDQNKLKPEMDEKGNLTTAGFACSQCGQPLFVYKLEQVSEKGKAYTNYFGRCNVAEHEKLILLAQLKPEKDSDEAVTYSLGKFGQRALDFYSIHVTKESTHPVKPLAQIAGNRYASYPVGKALSDACMGTIASFLSKYQDIIIEHQKVVKGNQKRLESLRELAGKENLEYPSVTLPPQPHTKEGVDAYNEVIARVRMWVNLNLWQKLKLSRDDAKPLLRLKGFPSFPLVERQANEVDWWDMVCNVKKLINEKKEDGKVFWQNLAGYKRQEALRPYLSSEEDRKKGKKFARYQLGDLLLHLEKKHGEDWGKVYDEAWERIDKKVEGLSKHIKLEEERRSEDAQSKAALTDWLRAKASFVIEGLKEADKDEFCRCELKLQKWYGDLRGKPFAIEAENSILDISGFSKQYNCAFIWQKDGVKKLNLYLIINYFKGGKLRFKKIKPEAFEANRFYTVINKKSGEIVPMEVNFNFDDPNLIILPLAFGKRFGREFIWNDLLSLETGSLKLANGRVIEKTLYNRRTRQDEPALFVALTFERREVLDSSNIKPMNLIGVDRGENIPAVIALTDPEGCPLSRFKDSLGNPTHILRIGESYKEKQRTIQAKKEVEQRRAGGYSRKYASKAKNLADDMVRNTARDLLYYAVTQDAMLIFENLSRGFGRQGKRTFMAERQYTRMEDWLTAKLAYEGLPSKTYLSKTLAQYTSKTCSNCGFTITSADYDRMLEKLKKTATGWMTTINGKELKVEGQITYYNRYKRQNVVKDLSVELDRLSEESVNNDISSWTKGRSGEALSLLKKRFSHRPVQEKFVCLNCGFETHADEQAALNIARSWLFLRSQEYKKYQTNKTTGNTDKRAFVETWQSFYRKKLKEVWKPAV

SEQ ID NO: 37530 - protein, 978 aa, synthetic construct
  REGION 1..978: note = engineered CasX variant
QEIKRINKIRRRLVKDSNTKKAGKTGPMKTLLVRVMTPDLRERLENLRKKPENIPQPISNTSRANLNKLLTDYTEMKKAILHVYWEEFQKDPVGLMSRVAQPASKKIDQNKLKPEMDEKGNLTTAGFACSQCGQPLFVYKLEQVSEKGKAYTNYFGRCNVAEHEKLILLAQLKPEKDSDEAVTYSLGKFGQRALDFYSIHVTKESTHPVKPLAQIAGNRYASHPVGKALSDACMGTIASFLSKYQDIIIEHQKVVKGNQKRLESLRELAGKENLEYPSVTLPPQPHTKEGVDAYNEVIARVRMWVNLNLWQKLKLSRDDAKPLLRLKGFPSFPLVERQANEVDWWDMVCNVKKLINEKKEDGKVFWQNLAGYKRQEALRPYLSSEEDRKKGKKFARYQLGDLLLHLEKKHGEDWGKVYDEAWERIDKKVEGLSKHIKLEEERRSEDAQSKAALTDWLRAKASFVIEGLKEADKDEFCRCELKLQKWYGDLRGKPFAIEAENSILDISGFSKQYNCAFIWQKDGVKKLNLYLIINYFKGGKLRFKKIKPEAFEANRFYTVINKKSGEIVPMEVNFNFDDPNLIILPLAFGKRFGREFIWNDLLSLETGSLKLANGRVIEKTLYNRRTRQDEPALFVALTFERREVLDSSNIKPMNLIGVDRGENIPAVIALTDPEGCPLSRFKDSLGNPTHILRIGESYKEKQRTIQAKKEVEQRRAGGYSRKYASKAKNLADDMVRNTARDLLYYAVTQDAMLIFENLSRGFGRQGKRTFMAERQYTRMEDWLTAKLAYEGLPSKTYLSKTLAQYTSKTCSNCGFTITSADYDRMLEKLKKTATGWMTTINGKELKVEGQITYYNRYKRQNVVKDLSVELDRLSEESVNNDISSWTKGRSGEALSLLKKRFSHRPVQEKFVCLNCGFETHADEQAALNIARSWLFLRSQEYKKYQTNKTTGNTDKRAFVETWQSFYRKKLKEVWKPAV

SEQ ID NO: 37531 - protein, 978 aa, synthetic construct
  REGION 1..978: note = engineered CasX variant
QEIKRINKIRRRLVKDSNTKKAGKTGPMKTLLVRVMTPDLRERLENLRKKPENIPQPISNTSRANLNKLLTDYTEMKKAILHVYWEEFQKDPVGLMSRVAQPASKKIDQNKLKPEMDEKGNLTTAGFACSQCGQPLFVYKLEQVSEKGKAYTNYFGRCNVAEHEKLILLAQLKPEKDSDEAVTYSLGKFGQRALDFYSIHVTKESTHPVKPLAQIAGNRYASSPVGKALSDACMGTIASFLSKYQDIIIEHQKVVKGNQKRLESLRELAGKENLEYPSVTLPPQPHTKEGVDAYNEVIARVRMWVNLNLWQKLKLSRDDAKPLLRLKGFPSFPLVERQANEVDWWDMVCNVKKLINEKKEDGKVFWQNLAGYKRQEALRPYLSSEEDRKKGKKFARYQLGDLLLHLEKKHGEDWGKVYDEAWERIDKKVEGLSKHIKLEEERRSEDAQSKAALTDWLRAKASFVIEGLKEADKDEFCRCELKLQKWYGDLRGKPFAIEAENSILDISGFSKQYNCAFIWQKDGVKKLNLYLIINYFKGGKLRFKKIKPEAFEANRFYTVINKKSGEIVPMEVNFNFDDPNLIILPLAFGKRFGREFIWNDLLSLETGSLKLANGRVIEKTLYNRRTRQDEPALFVALTFERREVLDSSNIKPMNLIGVDRGENIPAVIALTDPEGCPLSRFKDSLGNPTHILRIGESYKEKQRTIQAKKEVEQRRAGGYSRKYASKAKNLADDMVRNTARDLLYYAVTQDAMLIFENLSRGFGRQGKRTFMAERQYTRMEDWLTAKLAYEGLPSKTYLSKTLAQYTSKTCSNCGFTITSADYDRMLEKLKKTATGWMTTINGKELKVEGQITYYNRYKRQNVVKDLSVELDRLSEESVNNDISSWTKGRSGEALSLLKKRFSHRPVQEKFVCLNCGFETHADEQAALNIARSWLFLRSQEYKKYQTNKTTGNTDKRAFVETWQSFYRKKLKEVWKPAV

SEQ ID NO: 37532 - protein, 978 aa, synthetic construct
  REGION 1..978: note = engineered CasX variant
QEIKRINKIRRRLVKDSNTKKAGKTGPMKTLLVRVMTPDLRERLENLRKKPENIPQPISNTSRANLNKLLTDYTEMKKAILHVYWEEFQKDPVGLMSRVAQPASKKIDQNKLKPEMDEKGNLTTAGFACSQCGQPLFVYKLEQVSEKGKAYTNYFGRCNVAEHEKLILLAQLKPEKDSDEAVTYSLGKFGQRALDFYSIHVTKESTHPVKPLAQIAGNRYASTPVGKALSDACMGTIASFLSKYQDIIIEHQKVVKGNQKRLESLRELAGKENLEYPSVTLPPQPHTKEGVDAYNEVIARVRMWVNLNLWQKLKLSRDDAKPLLRLKGFPSFPLVERQANEVDWWDMVCNVKKLINEKKEDGKVFWQNLAGYKRQEALRPYLSSEEDRKKGKKFARYQLGDLLLHLEKKHGEDWGKVYDEAWERIDKKVEGLSKHIKLEEERRSEDAQSKAALTDWLRAKASFVIEGLKEADKDEFCRCELKLQKWYGDLRGKPFAIEAENSILDISGFSKQYNCAFIWQKDGVKKLNLYLIINYFKGGKLRFKKIKPEAFEANRFYTVINKKSGEIVPMEVNFNFDDPNLIILPLAFGKRFGREFIWNDLLSLETGSLKLANGRVIEKTLYNRRTRQDEPALFVALTFERREVLDSSNIKPMNLIGVDRGENIPAVIALTDPEGCPLSRFKDSLGNPTHILRIGESYKEKQRTIQAKKEVEQRRAGGYSRKYASKAKNLADDMVRNTARDLLYYAVTQDAMLIFENLSRGFGRQGKRTFMAERQYTRMEDWLTAKLAYEGLPSKTYLSKTLAQYTSKTCSNCGFTITSADYDRMLEKLKKTATGWMTTINGKELKVEGQITYYNRYKRQNVVKDLSVELDRLSEESVNNDISSWTKGRSGEALSLLKKRFSHRPVQEKFVCLNCGFETHADEQAALNIARSWLFLRSQEYKKYQTNKTTGNTDKRAFVETWQSFYRKKLKEVWKPAV

SEQ ID NO: 37533 - protein, 978 aa, synthetic construct
  REGION 1..978: note = engineered CasX variant
QEIKRINKIRRRLVKDSNTKKAGKTGPMKTLLVRVMTPDLRERLENLRKKPENIPQPISNTSRANLNKLLTDYTEMKKAILHVYWEEFQKDPVGLMSRVAQPASKKIDQNKLKPEMDEKGNLTTAGFACSQCGQPLFVYKLEQVSEKGKAYTNYFGRCNVAEHEKLILLAQLKPEKDSDEAVTYSLGKFGQRALDFYSIHVTKESTHPVKPLAQIAGNRYASAPVGKALSDACMGTIASFLSKYQDIIIEHQKVVKGNQKRLESLRELAGKENLEYPSVTLPPQPHTKEGVDAYNEVIARVRMWVNLNLWQKLKLSRDDAKPLLRLKGFPSFPLVERQANEVDWWDMVCNVKKLINEKKEDGKVFWQNLAGYKRQEALRPYLSSEEDRKKGKKFARYQLGDLLLHLEKKHGEDWGKVYDEAWERIDKKVEGLSKHIKLEEERRSEDAQSKAALTDWLRAKASFVIEGLKEADKDEFCRCELKLQKWYGDLRGKPFAIEAENSILDISGFSKQYNCAFIWQKDGVKKLNLYLIINYFKGGKLRFKKIKPEAFEANRFYTVINKKSGEIVPMEVNFNFDDPNLIILPLAFGKRFGREFIWNDLLSLETGSLKLANGRVIEKTLYNRRTRQDEPALFVALTFERREVLDSSNIKPMNLIGVDRGENIPAVIALTDPEGCPLSRFKDSLGNPTHILRIGESYKEKQRTIQAKKEVEQRRAGGYSRKYASKAKNLADDMVRNTARDLLYYAVTQDAMLIFENLSRGFGRQGKRTFMAERQYTRMEDWLTAKLAYEGLPSKTYLSKTLAQYTSKTCSNCGFTITSADYDRMLEKLKKTATGWMTTINGKELKVEGQITYYNRYKRQNVVKDLSVELDRLSEESVNNDISSWTKGRSGEALSLLKKRFSHRPVQEKFVCLNCGFETHADEQAALNIARSWLFLRSQEYKKYQTNKTTGNTDKRAFVETWQSFYRKKLKEVWKPAV

SEQ ID NO: 37534 - protein, 978 aa, synthetic construct
  REGION 1..978: note = engineered CasX variant
QEIKRINKIRRRLVKDSNTKKAGKTGPMKTLLVRVMTPDLRERLENLRKKPENIPQPISNTSRANLNKLLTDYTEMKKAILHVYWEEFQKDPVGLMSRVAQPASKKIDQNKLKPEMDEKGNLTTAGFACSQCGQPLFVYKLEQVSEKGKAYTNYFGRCNVAEHEKLILLAQLKPEKDSDEAVTYSLGKFGQRALDFYSIHVTKESTHPVKPLAQIAGNRYASVPVGKALSDACMGTIASFLSKYQDIIIEHQKVVKGNQKRLESLRELAGKENLEYPSVTLPPQPHTKEGVDAYNEVIARVRMWVNLNLWQKLKLSRDDAKPLLRLKGFPSFPLVERQANEVDWWDMVCNVKKLINEKKEDGKVFWQNLAGYKRQEALRPYLSSEEDRKKGKKFARYQLGDLLLHLEKKHGEDWGKVYDEAWERIDKKVEGLSKHIKLEEERRSEDAQSKAALTDWLRAKASFVIEGLKEADKDEFCRCELKLQKWYGDLRGKPFAIEAENSILDISGFSKQYNCAFIWQKDGVKKLNLYLIINYFKGGKLRFKKIKPEAFEANRFYTVINKKSGEIVPMEVNFNFDDPNLIILPLAFGKRFGREFIWNDLLSLETGSLKLANGRVIEKTLYNRRTRQDEPALFVALTFERREVLDSSNIKPMNLIGVDRGENIPAVIALTDPEGCPLSRFKDSLGNPTHILRIGESYKEKQRTIQAKKEVEQRRAGGYSRKYASKAKNLADDMVRNTARDLLYYAVTQDAMLIFENLSRGFGRQGKRTFMAERQYTRMEDWLTAKLAYEGLPSKTYLSKTLAQYTSKTCSNCGFTITSADYDRMLEKLKKTATGWMTTINGKELKVEGQITYYNRYKRQNVVKDLSVELDRLSEESVNNDISSWTKGRSGEALSLLKKRFSHRPVQEKFVCLNCGFETHADEQAALNIARSWLFLRSQEYKKYQTNKTTGNTDKRAFVETWQSFYRKKLKEVWKPAV

SEQ ID NO: 37535 - protein, 978 aa, synthetic construct
  REGION 1..978: note = engineered CasX variant
QEIKRINKIRRRLVKDSNTKKAGKTGPMKTLLVRVMTPDLRERLENLRKKPENIPQPISNTSRANLNKLLTDYTEMKKAILHVYWEEFQKDPVGLMSRVAQPASKKIDQNKLKPEMDEKGNLTTAGFACSQCGQPLFVYKLEQVSEKGKAYTNYFGRCNVAEHEKLIKLAQLKPEKDSDEAVTYSLGKFGQRALDFYSIHVTKESTHPVKPLAQIAGNRYASGPVGKALSDACMGTIASFLSKYQDIIIEHQKVVKGNQKRLESLRELAGKENLEYPSVTLPPQPHTKEGVDAYNEVIARVRMWVNLNLWQKLKLSRDDAKPLLRLKGFPSFPLVERQANEVDWWDMVCNVKKLINEKKEDGKVFWQNLAGYKRQEALRPYLSSEEDRKKGKKFARYQLGDLLLHLEKKHGEDWGKVYDEAWERIDKKVEGLSKHIKLEEERRSEDAQSKAALTDWLRAKASFVIEGLKEADKDEFCRCELKLQKWYGDLRGKPFAIEAENSILDISGFSKQYNCAFIWQKDGVKKLNLYLIINYFKGGKLRFKKIKPEAFEANRFYTVINKKSGEIVPMEVNFNFDDPNLIILPLAFGKRFGREFIWNDLLSLETGSLKLANGRVIEKTLYNRRTRQDEPALFVALTFERREVLDSSNIKPMNLIGVDRGENIPAVIALTDPEGCPLSRFKDSLGNPTHILRIGESYKEKQRTIQAKKEVEQRRAGGYSRKYASKAKNLADDMVRNTARDLLYYAVTQDAMLIFENLSRGFGRQGKRTFMAERQYTRMEDWLTAKLAYEGLPSKTYLSKTLAQYTSKTCSNCGFTITSADYDRMLEKLKKTATGWMTTINGKELKVEGQITYYNRYKRQNVVKDLSVELDRLSEESVNNDISSWTKGRSGEALSLLKKRFSHRPVQEKFVCLNCGFETHADEQAALNIARSWLFLRSQEYKKYQTNKTTGNTDKRAFVETWQSFYRKKLKEVWKPAV

SEQ ID NO: 37536 - protein, 977 aa, synthetic construct
  REGION 1..977: note = engineered CasX variant
QEIKRINKIRRRLVKDSNTKKAGKTGPMKTLLVRVMTPDLRERLENLRKKPENIPQPISNTSRANLNKLLTDYTEMKKAILHVYWEEFQKDPVGLMSRVAQPASKKIDQNKLKPEMDEKGNLTTAGFACSQCGQPLFVYKLEQVSEKGKAYTNYFGRCNVAEHEKLILLAQLKPEKDSDEAVTYSLGKFGQRALDFYSIHVTKESTHPVKPLAQIAGNRYASPVGKALSDACMGTIASFLSKYQDIIIEHQKVVKGNQKRLESLRELAGKENLEYPSVTLPPQPHTKEGVDAYNEVIARVRMWVNLNLWQKLKLSRDDAKPLLRLKGFPSFPLVERQANEVDWWDMVCNVKKLINEKKEDGKVFWQNLAGYKRQEALRPYLSSEEDRKKGKKFARYQLGDLLLHLEKKHGEDWGKVYDEAWERIDKKVEGLSKHIKLEEERRSEDAQSKAALTDWLRAKASFVIEGLKEADKDEFCRCELKLQKWYGDLRGKPFAIEAENSILDISGFSKQYNCAFIWQKDGVKKLNLYLIINYFKGGKLRFKKIKPEAFEANRFYTVINKKSGEIVPMEVNFNFDDPNLIILPLAFGKRFGREFIWNDLLSLETGSLKLANGRVIEKTLYNRRTRQDEPALFVALTFERREVLDSSNIKPMNLIGVDRGENIPAVIALTDPEGCPLSRFKDSLGNPTHILRIGESYKEKQRTIQAKKEVEQRRAGGYSRKYASKAKNLADDMVRNTARDLLYYAVTQDAMLIFENLSRGFGRQGKRTFMAERQYTRMEDWLTAKLAYEGLPSKTYLSKTLAQYTSKTCSNCGFTITSADYDRMLEKLKKTATGWMTTINGKELKVEGQITYYNRYKRQNVVKDLSVELDRLSEESVNNDISSWTKGRSGEALSLLKKRFSHRPVQEKFVCLNCGFETHADEQAALNIARSWLFLRSQEYKKYQTNKTTGNTDKRAFVETWQSFYRKKLKEVWKPAV

SEQ ID NO: 37537 - protein, 978 aa, synthetic construct
  REGION 1..978: note = engineered CasX variant
QEIKRINKIRRRLVKDSNTKKAGKTGPMKTLLVRVMTPDLRERLENLRKKPENIPQPISNTSRANLNKLLTDYTEMKKAILHVYWEEFQKDPVGLMSRVAQPASKKIDQNKLKPEMDEKGNLTTAGFACSQCGQPLFVYKLEQVSEKGKAYTNYFGRCNVAEHEKLILLAQLKPEKDSDEAVTYSLGKFGQRALDFYSIHVTKESTHPVKPLAQIAGNRYASYPVGKALSDACMGTIASFLSKYQDIIIEHQKVVKGNQKRLESLRELAGKENLEYPSVTLPPQPHTKEGVDAYNEVIARVRMWVNLNLWQKLKLSRDDAKPLLRLKGFPSFPLVERQANEVDWWDMVCNVKKLINEKKEDGKVFWQNLAGYKRQEALRPYLSSEEDRKKGKKFARYQLGDLLLHLEKKHGEDWGKVYDEAWERIDKKVEGLSKHIKLEEERRSEDAQSKAALTDWLRAKASFVIEGLKEADKDEFCRCELKLQKWYGDLRGKPFAIEAENSILDISGFSKQYNCAFIWQKDGVKKLNLYLIINYFKGGKLRFKKIKPEAFEANRFYTVINKKSGEIVPMEVNFNFDDPNLIILPLAFGKRFGREFIWNDLLSLETGSLKLANGRVIEKTLYNRRTRQDEPALFVALTFERREVLDSSNIKPMNLIGVDRGENIPAVIALTDPEGCPLSRFKDSLGNPTHILRIGESYKEKQRTIQAKKEVEQRRAGGYSRKYASKAKNLADDMVRNTARDLLYYAVTQDAMLIFENLSRGFGRQGKRTFMAERQYTRMEDWLTAKLAYEGLPSKTYLSKTLAQYTSKTCSNCGFTITSADYDRVLEKLKKTATGWMTTINGKELKVEGQITYYNRYKRQNVVKDLSVELDRLSEESVNNDISSWTKGRQGEALSLLKKRFSHRPVQEKFVCLNCGFETHADEQAALNIARSWLFLRSQEYKKYQTNKTTGNTDKRAFVETWQSFYRKKLKEVWKPAV

SEQ ID NO: 37538 - protein, 978 aa, synthetic construct
  REGION 1..978: note = engineered CasX variant
QEIKRINKIRRRLVKDSNTKKAGKTGPMKTLLVRVMTPDLRERLENLRKKPENIPQPISNTSRANLNKLLTDYTEMKKAILHVYWEEFQKDPVGLMSRVAQPASKKIDQNKLKPEMDEKGNLTTAGFACSQCGQPLFVYKLEQVSEKGKAYTNYFGRCNVAEHEKLILLAQLKPEKDSDEAVTYSLGKFGQRALDFYSIHVTKESTHPVKPLAQIAGNRYASHPVGKALSDACMGTIASFLSKYQDIIIEHQKVVKGNQKRLESLRELAGKENLEYPSVTLPPQPHTKEGVDAYNEVIARVRMWVNLNLWQKLKLSRDDAKPLLRLKGFPSFPLVERQANEVDWWDMVCNVKKLINEKKEDGKVFWQNLAGYKRQEALRPYLSSEEDRKKGKKFARYQLGDLLLHLEKKHGEDWGKVYDEAWERIDKKVEGLSKHIKLEEERRSEDAQSKAALTDWLRAKASFVIEGLKEADKDEFCRCELKLQKWYGDLRGKPFAIEAENSILDISGFSKQYNCAFIWQKDGVKKLNLYLIINYFKGGKLRFKKIKPEAFEANRFYTVINKKSGEIVPMEVNFNFDDPNLIILPLAFGKRFGREFIWNDLLSLETGSLKLANGRVIEKTLYNRRTRQDEPALFVALTFERREVLDSSNIKPMNLIGVDRGENIPAVIALTDPEGCPLSRFKDSLGNPTHILRIGESYKEKQRTIQAKKEVEQRRAGGYSRKYASKAKNLADDMVRNTARDLLYYAVTQDAMLIFENLSRGFGRQGKRTFMAERQYTRMEDWLTAKLAYEGLPSKTYLSKTLAQYTSKTCSNCGFTITSADYDRVLEKLKKTATGWMTTINGKELKVEGQITYYNRYKRQNVVKDLSVELDRLSEESVNNDISSWTKGRQGEALSLLKKRFSHRPVQEKFVCLNCGFETHADEQAALNIARSWLFLRSQEYKKYQTNKTTGNTDKRAFVETWQSFYRKKLKEVWKPAV

SEQ ID NO: 37539 - protein, 978 aa, synthetic construct
  REGION 1..978: note = engineered CasX variant
QEIKRINKIRRRLVKDSNTKKAGKTGPMKTLLVRVMTPDLRERLENLRKKPENIPQPISNTSRANLNKLLTDYTEMKKAILHVYWEEFQKDPVGLMSRVAQPASKKIDQNKLKPEMDEKGNLTTAGFACSQCGQPLFVYKLEQVSEKGKAYTNYFGRCNVAEHEKLILLAQLKPEKDSDEAVTYSLGKFGQRALDFYSIHVTKESTHPVKPLAQIAGNRYASSPVGKALSDACMGTIASFLSKYQDIIIEHQKVVKGNQKRLESLRELAGKENLEYPSVTLPPQPHTKEGVDAYNEVIARVRMWVNLNLWQKLKLSRDDAKPLLRLKGFPSFPLVERQANEVDWWDMVCNVKKLINEKKEDGKVFWQNLAGYKRQEALRPYLSSEEDRKKGKKFARYQLGDLLLHLEKKHGEDWGKVYDEAWERIDKKVEGLSKHIKLEEERRSEDAQSKAALTDWLRAKASFVIEGLKEADKDEFCRCELKLQKWYGDLRGKPFAIEAENSILDISGFSKQYNCAFIWQKDGVKKLNLYLIINYFKGGKLRFKKIKPEAFEANRFYTVINKKSGEIVPMEVNFNFDDPNLIILPLAFGKRFGREFIWNDLLSLETGSLKLANGRVIEKTLYNRRTRQDEPALFVALTFERREVLDSSNIKPMNLIGVDRGENIPAVIALTDPEGCPLSRFKDSLGNPTHILRIGESYKEKQRTIQAKKEVEQRRAGGYSRKYASKAKNLADDMVRNTARDLLYYAVTQDAMLIFENLSRGFGRQGKRTFMAERQYTRMEDWLTAKLAYEGLPSKTYLSKTLAQYTSKTCSNCGFTITSADYDRVLEKLKKTATGWMTTINGKELKVEGQITYYNRYKRQNVVKDLSVELDRLSEESVNNDISSWTKGRQGEALSLLKKRFSHRPVQEKFVCLNCGFETHADEQAALNIARSWLFLRSQEYKKYQTNKTTGNTDKRAFVETWQSFYRKKLKEVWKPAV

SEQ ID NO: 37540 - protein, 978 aa, synthetic construct
  REGION 1..978: note = engineered CasX variant
QEIKRINKIRRRLVKDSNTKKAGKTGPMKTLLVRVMTPDLRERLENLRKKPENIPQPISNTSRANLNKLLTDYTEMKKAILHVYWEEFQKDPVGLMSRVAQPASKKIDQNKLKPEMDEKGNLTTAGFACSQCGQPLFVYKLEQVSEKGKAYTNYFGRCNVAEHEKLILLAQLKPEKDSDEAVTYSLGKFGQRALDFYSIHVTKESTHPVKPLAQIAGNRYASTPVGKALSDACMGTIASFLSKYQDIIIEHQKVVKGNQKRLESLRELAGKENLEYPSVTLPPQPHTKEGVDAYNEVIARVRMWVNLNLWQKLKLSRDDAKPLLRLKGFPSFPLVERQANEVDWWDMVCNVKKLINEKKEDGKVFWQNLAGYKRQEALRPYLSSEEDRKKGKKFARYQLGDLLLHLEKKHGEDWGKVYDEAWERIDKKVEGLSKHIKLEEERRSEDAQSKAALTDWLRAKASFVIEGLKEADKDEFCRCELKLQKWYGDLRGKPFAIEAENSILDISGFSKQYNCAFIWQKDGVKKLNLYLIINYFKGGKLRFKKIKPEAFEANRFYTVINKKSGEIVPMEVNFNFDDPNLIILPLAFGKRFGREFIWNDLLSLETGSLKLANGRVIEKTLYNRRTRQDEPALFVALTFERREVLDSSNIKPMNLIGVDRGENIPAVIALTDPEGCPLSRFKDSLGNPTHILRIGESYKEKQRTIQAKKEVEQRRAGGYSRKYASKAKNLADDMVRNTARDLLYYAVTQDAMLIFENLSRGFGRQGKRTFMAERQYTRMEDWLTAKLAYEGLPSKTYLSKTLAQYTSKTCSNCGFTITSADYDRVLEKLKKTATGWMTTINGKELKVEGQITYYNRYKRQNVVKDLSVELDRLSEESVNNDISSWTKGRQGEALSLLKKRFSHRPVQEKFVCLNCGFETHADEQAALNIARSWLFLRSQEYKKYQTNKTTGNTDKRAFVETWQSFYRKKLKEVWKPAV

SEQ ID NO: 37541 - protein, 978 aa, synthetic construct
  REGION 1..978: note = engineered CasX variant
QEIKRINKIRRRLVKDSNTKKAGKTGPMKTLLVRVMTPDLRERLENLRKKPENIPQPISNTSRANLNKLLTDYTEMKKAILHVYWEEFQKDPVGLMSRVAQPASKKIDQNKLKPEMDEKGNLTTAGFACSQCGQPLFVYKLEQVSEKGKAYTNYFGRCNVAEHEKLILLAQLKPEKDSDEAVTYSLGKFGQRALDFYSIHVTKESTHPVKPLAQIAGNRYASAPVGKALSDACMGTIASFLSKYQDIIIEHQKVVKGNQKRLESLRELAGKENLEYPSVTLPPQPHTKEGVDAYNEVIARVRMWVNLNLWQKLKLSRDDAKPLLRLKGFPSFPLVERQANEVDWWDMVCNVKKLINEKKEDGKVFWQNLAGYKRQEALRPYLSSEEDRKKGKKFARYQLGDLLLHLEKKHGEDWGKVYDEAWERIDKKVEGLSKHIKLEEERRSEDAQSKAALTDWLRAKASFVIEGLKEADKDEFCRCELKLQKWYGDLRGKPFAIEAENSILDISGFSKQYNCAFIWQKDGVKKLNLYLIINYFKGGKLRFKKIKPEAFEANRFYTVINKKSGEIVPMEVNFNFDDPNLIILPLAFGKRFGREFIWNDLLSLETGSLKLANGRVIEKTLYNRRTRQDEPALFVALTFERREVLDSSNIKPMNLIGVDRGENIPAVIALTDPEGCPLSRFKDSLGNPTHILRIGESYKEKQRTIQAKKEVEQRRAGGYSRKYASKAKNLADDMVRNTARDLLYYAVTQDAMLIFENLSRGFGRQGKRTFMAERQYTRMEDWLTAKLAYEGLPSKTYLSKTLAQYTSKTCSNCGFTITSADYDRVLEKLKKTATGWMTTINGKELKVEGQITYYNRYKRQNVVKDLSVELDRLSEESVNNDISSWTKGRQGEALSLLKKRFSHRPVQEKFVCLNCGFETHADEQAALNIARSWLFLRSQEYKKYQTNKTTGNTDKRAFVETWQSFYRKKLKEVWKPAV

SEQ ID NO: 37542 - protein, 978 aa, synthetic construct
  REGION 1..978: note = engineered CasX variant
QEIKRINKIRRRLVKDSNTKKAGKTGPMKTLLVRVMTPDLRERLENLRKKPENIPQPISNTSRANLNKLLTDYTEMKKAILHVYWEEFQKDPVGLMSRVAQPASKKIDQNKLKPEMDEKGNLTTAGFACSQCGQPLFVYKLEQVSEKGKAYTNYFGRCNVAEHEKLILLAQLKPEKDSDEAVTYSLGKFGQRALDFYSIHVTKESTHPVKPLAQIAGNRYASVPVGKALSDACMGTIASFLSKYQDIIIEHQKVVKGNQKRLESLRELAGKENLEYPSVTLPPQPHTKEGVDAYNEVIARVRMWVNLNLWQKLKLSRDDAKPLLRLKGFPSFPLVERQANEVDWWDMVCNVKKLINEKKEDGKVFWQNLAGYKRQEALRPYLSSEEDRKKGKKFARYQLGDLLLHLEKKHGEDWGKVYDEAWERIDKKVEGLSKHIKLEEERRSEDAQSKAALTDWLRAKASFVIEGLKEADKDEFCRCELKLQKWYGDLRGKPFAIEAENSILDISGFSKQYNCAFIWQKDGVKKLNLYLIINYFKGGKLRFKKIKPEAFEANRFYTVINKKSGEIVPMEVNFNFDDPNLIILPLAFGKRFGREFIWNDLLSLETGSLKLANGRVIEKTLYNRRTRQDEPALFVALTFERREVLDSSNIKPMNLIGVDRGENIPAVIALTDPEGCPLSRFKDSLGNPTHILRIGESYKEKQRTIQAKKEVEQRRAGGYSRKYASKAKNLADDMVRNTARDLLYYAVTQDAMLIFENLSRGFGRQGKRTFMAERQYTRMEDWLTAKLAYEGLPSKTYLSKTLAQYTSKTCSNCGFTITSADYDRVLEKLKKTATGWMTTINGKELKVEGQITYYNRYKRQNVVKDLSVELDRLSEESVNNDISSWTKGRQGEALSLLKKRFSHRPVQEKFVCLNCGFETHADEQAALNIARSWLFLRSQEYKKYQTNKTTGNTDKRAFVETWQSFYRKKLKEVWKPAV

SEQ ID NO: 37543 - protein, 978 aa, synthetic construct
  REGION 1..978: note = engineered CasX variant
QEIKRINKIRRRLVKDSNTKKAGKTGPMKTLLVRVMTPDLRERLENLRKKPENIPQPISNTSRANLNKLLTDYTEMKKAILHVYWEEFQKDPVGLMSRVAQPASKKIDQNKLKPEMDEKGNLTTAGFACSQCGQPLFVYKLEQVSEKGKAYTNYFGRCNVAEHEKLIKLAQLKPEKDSDEAVTYSLGKFGQRALDFYSIHVTKESTHPVKPLAQIAGNRYASGPVGKALSDACMGTIASFLSKYQDIIIEHQKVVKGNQKRLESLRELAGKENLEYPSVTLPPQPHTKEGVDAYNEVIARVRMWVNLNLWQKLKLSRDDAKPLLRLKGFPSFPLVERQANEVDWWDMVCNVKKLINEKKEDGKVFWQNLAGYKRQEALRPYLSSEEDRKKGKKFARYQLGDLLLHLEKKHGEDWGKVYDEAWERIDKKVEGLSKHIKLEEERRSEDAQSKAALTDWLRAKASFVIEGLKEADKDEFCRCELKLQKWYGDLRGKPFAIEAENSILDISGFSKQYNCAFIWQKDGVKKLNLYLIINYFKGGKLRFKKIKPEAFEANRFYTVINKKSGEIVPMEVNFNFDDPNLIILPLAFGKRFGREFIWNDLLSLETGSLKLANGRVIEKTLYNRRTRQDEPALFVALTFERREVLDSSNIKPMNLIGVDRGENIPAVIALTDPEGCPLSRFKDSLGNPTHILRIGESYKEKQRTIQAKKEVEQRRAGGYSRKYASKAKNLADDMVRNTARDLLYYAVTQDAMLIFENLSRGFGRQGKRTFMAERQYTRMEDWLTAKLAYEGLPSKTYLSKTLAQYTSKTCSNCGFTITSADYDRVLEKLKKTATGWMTTINGKELKVEGQITYYNRYKRQNVVKDLSVELDRLSEESVNNDISSWTKGRQGEALSLLKKRFSHRPVQEKFVCLNCGFETHADEQAALNIARSWLFLRSQEYKKYQTNKTTGNTDKRAFVETWQSFYRKKLKEVWKPAV

SEQ ID NO: 37544 - protein, 977 aa, synthetic construct
  REGION 1..977: note = engineered CasX variant
QEIKRINKIRRRLVKDSNTKKAGKTGPMKTLLVRVMTPDLRERLENLRKKPENIPQPISNTSRANLNKLLTDYTEMKKAILHVYWEEFQKDPVGLMSRVAQPASKKIDQNKLKPEMDEKGNLTTAGFACSQCGQPLFVYKLEQVSEKGKAYTNYFGRCNVAEHEKLILLAQLKPEKDSDEAVTYSLGKFGQRALDFYSIHVTKESTHPVKPLAQIAGNRYASPVGKALSDACMGTIASFLSKYQDIIIEHQKVVKGNQKRLESLRELAGKENLEYPSVTLPPQPHTKEGVDAYNEVIARVRMWVNLNLWQKLKLSRDDAKPLLRLKGFPSFPLVERQANEVDWWDMVCNVKKLINEKKEDGKVFWQNLAGYKRQEALRPYLSSEEDRKKGKKFARYQLGDLLLHLEKKHGEDWGKVYDEAWERIDKKVEGLSKHIKLEEERRSEDAQSKAALTDWLRAKASFVIEGLKEADKDEFCRCELKLQKWYGDLRGKPFAIEAENSILDISGFSKQYNCAFIWQKDGVKKLNLYLIINYFKGGKLRFKKIKPEAFEANRFYTVINKKSGEIVPMEVNFNFDDPNLIILPLAFGKRFGREFIWNDLLSLETGSLKLANGRVIEKTLYNRRTRQDEPALFVALTFERREVLDSSNIKPMNLIGVDRGENIPAVIALTDPEGCPLSRFKDSLGNPTHILRIGESYKEKQRTIQAKKEVEQRRAGGYSRKYASKAKNLADDMVRNTARDLLYYAVTQDAMLIFENLSRGFGRQGKRTFMAERQYTRMEDWLTAKLAYEGLPSKTYLSKTLAQYTSKTCSNCGFTITSADYDRVLEKLKKTATGWMTTINGKELKVEGQITYYNRYKRQNVVKDLSVELDRLSEESVNNDISSWTKGRQGEALSLLKKRFSHRPVQEKFVCLNCGFETHADEQAALNIARSWLFLRSQEYKKYQTNKTTGNTDKRAFVETWQSFYRKKLKEVWKPAV

SEQ ID NO: 37545 - protein, 978 aa, synthetic construct
  REGION 1..978: note = engineered CasX variant
QEIKRINKIRRRLVKDSNTKKAGKTGPMKTLLVRVMTPDLRERLENLRKKPENIPQPISNTSRANLNKLLTDYTEMKKAILHVYWEEFQKDPVGLMSRVAQPASKKIDQNKLKPEMDEKGNLTTAGFACSQCGQPLFVYKLEQVSEKGKAYTNYFGRCNVAEHEKLILLAQLKPEKDSDEAVTYSLGKFGQRALDFYSIHVTKESTHPVKPLAQIAGNRYASYPVGKALSDACMGTIASFLSKYQDIIIEHQKVVKGNQKRLESLRELAGKENLEYPSVTLPPQPHTKEGVDAYNEVIARVRMWVNLNLWQKLKLSRDDAKPLLRLKGFPSFPLVERQANEVDWWDMVCNVKKLINEKKEDGKVFWQNLAGYKRQEALRPYLSSEEDRKKGKKFARYQLGDLLLHLEKKHGEDWGKVYDEAWERIDKKVEGLSKHIKLEEERRSEDAQSKAALTDWLRAKASFVIEGLKEADKDEFCRCELKLQKWYGDLRGKPFAIEAENSILDISGFSKQYNCAFIWQKDGVKKLNLYLIINYFKGGKLRFKKIKPEAFEANRFYTVINKKSGEIVPMEVNFNFDDPNLIILPLAFGKRFGREFIWNDLLSLETGSLKLANGRVIEKTLYNRRTRQDEPALFVALTFERREVLDSSNIKPMNLIGVDRGENIPAVIALTDPEGCPLSRFKDSLGNPTHILRIGESYKEKQRTIQAKKEVEQRRAGGYSRKYASKAKNLADDMVRNTARDLLYYAVTQDAMLIFENLSRGFGRQGKRTFMAERQYTRMEDWLTAKLAYEGLPSKTYLSKTLAQYTSKTCSNCGFTITSADYDRVLEKLKKTATGWMTTINGKELKVEGQITYYNRYKRQNVVKDLSVELDRLSEESVNNDISSWTKGRSGEALSLLKKRFSHRPVQEKFVCLNCEFETHADEQAALNIARSWLFLRSQEYKKYQTNKTTGNTDKRAFVETWQSFYRKKLKEVWKPAV

SEQ ID NO: 37546 - protein, 978 aa, synthetic construct
  REGION 1..978: note = engineered CasX variant
QEIKRINKIRRRLVKDSNTKKAGKTGPMKTLLVRVMTPDLRERLENLRKKPENIPQPISNTSRANLNKLLTDYTEMKKAILHVYWEEFQKDPVGLMSRVAQPASKKIDQNKLKPEMDEKGNLTTAGFACSQCGQPLFVYKLEQVSEKGKAYTNYFGRCNVAEHEKLILLAQLKPEKDSDEAVTYSLGKFGQRALDFYSIHVTKESTHPVKPLAQIAGNRYASHPVGKALSDACMGTIASFLSKYQDIIIEHQKVVKGNQKRLESLRELAGKENLEYPSVTLPPQPHTKEGVDAYNEVIARVRMWVNLNLWQKLKLSRDDAKPLLRLKGFPSFPLVERQANEVDWWDMVCNVKKLINEKKEDGKVFWQNLAGYKRQEALRPYLSSEEDRKKGKKFARYQLGDLLLHLEKKHGEDWGKVYDEAWERIDKKVEGLSKHIKLEEERRSEDAQSKAALTDWLRAKASFVIEGLKEADKDEFCRCELKLQKWYGDLRGKPFAIEAENSILDISGFSKQYNCAFIWQKDGVKKLNLYLIINYFKGGKLRFKKIKPEAFEANRFYTVINKKSGEIVPMEVNFNFDDPNLIILPLAFGKRFGREFIWNDLLSLETGSLKLANGRVIEKTLYNRRTRQDEPALFVALTFERREVLDSSNIKPMNLIGVDRGENIPAVIALTDPEGCPLSRFKDSLGNPTHILRIGESYKEKQRTIQAKKEVEQRRAGGYSRKYASKAKNLADDMVRNTARDLLYYAVTQDAMLIFENLSRGFGRQGKRTFMAERQYTRMEDWLTAKLAYEGLPSKTYLSKTLAQYTSKTCSNCGFTITSADYDRVLEKLKKTATGWMTTINGKELKVEGQITYYNRYKRQNVVKDLSVELDRLSEESVNNDISSWTKGRSGEALSLLKKRFSHRPVQEKFVCLNCEFETHADEQAALNIARSWLFLRSQEYKKYQTNKTTGNTDKRAFVETWQSFYRKKLKEVWKPAV

SEQ ID NO: 37547 - protein, 978 aa, synthetic construct
  REGION 1..978: note = engineered CasX variant
QEIKRINKIRRRLVKDSNTKKAGKTGPMKTLLVRVMTPDLRERLENLRKKPENIPQPISNTSRANLNKLLTDYTEMKKAILHVYWEEFQKDPVGLMSRVAQPASKKIDQNKLKPEMDEKGNLTTAGFACSQCGQPLFVYKLEQVSEKGKAYTNYFGRCNVAEHEKLILLAQLKPEKDSDEAVTYSLGKFGQRALDFYSIHVTKESTHPVKPLAQIAGNRYASSPVGKALSDACMGTIASFLSKYQDIIIEHQKVVKGNQKRLESLRELAGKENLEYPSVTLPPQPHTKEGVDAYNEVIARVRMWVNLNLWQKLKLSRDDAKPLLRLKGFPSFPLVERQANEVDWWDMVCNVKKLINEKKEDGKVFWQNLAGYKRQEALRPYLSSEEDRKKGKKFARYQLGDLLLHLEKKHGEDWGKVYDEAWERIDKKVEGLSKHIKLEEERRSEDAQSKAALTDWLRAKASFVIEGLKEADKDEFCRCELKLQKWYGDLRGKPFAIEAENSILDISGFSKQYNCAFIWQKDGVKKLNLYLIINYFKGGKLRFKKIKPEAFEANRFYTVINKKSGEIVPMEVNFNFDDPNLIILPLAFGKRFGREFIWNDLLSLETGSLKLANGRVIEKTLYNRRTRQDEPALFVALTFERREVLDSSNIKPMNLIGVDRGENIPAVIALTDPEGCPLSRFKDSLGNPTHILRIGESYKEKQRTIQAKKEVEQRRAGGYSRKYASKAKNLADDMVRNTARDLLYYAVTQDAMLIFENLSRGFGRQGKRTFMAERQYTRMEDWLTAKLAYEGLPSKTYLSKTLAQYTSKTCSNCGFTITSADYDRVLEKLKKTATGWMTTINGKELKVEGQITYYNRYKRQNVVKDLSVELDRLSEESVNNDISSWTKGRSGEALSLLKKRFSHRPVQEKFVCLNCEFETHADEQAALNIARSWLFLRSQEYKKYQTNKTTGNTDKRAFVETWQSFYRKKLKEVWKPAV

SEQ ID NO: 37548 - protein, 978 aa, synthetic construct
  REGION 1..978: note = engineered CasX variant
QEIKRINKIRRRLVKDSNTKKAGKTGPMKTLLVRVMTPDLRERLENLRKKPENIPQPISNTSRANLNKLLTDYTEMKKAILHVYWEEFQKDPVGLMSRVAQPASKKIDQNKLKPEMDEKGNLTTAGFACSQCGQPLFVYKLEQVSEKGKAYTNYFGRCNVAEHEKLILLAQLKPEKDSDEAVTYSLGKFGQRALDFYSIHVTKESTHPVKPLAQIAGNRYASTPVGKALSDACMGTIASFLSKYQDIIIEHQKVVKGNQKRLESLRELAGKENLEYPSVTLPPQPHTKEGVDAYNEVIARVRMWVNLNLWQKLKLSRDDAKPLLRLKGFPSFPLVERQANEVDWWDMVCNVKKLINEKKEDGKVFWQNLAGYKRQEALRPYLSSEEDRKKGKKFARYQLGDLLLHLEKKHGEDWGKVYDEAWERIDKKVEGLSKHIKLEEERRSEDAQSKAALTDWLRAKASFVIEGLKEADKDEFCRCELKLQKWYGDLRGKPFAIEAENSILDISGFSKQYNCAFIWQKDGVKKLNLYLIINYFKGGKLRFKKIKPEAFEANRFYTVINKKSGEIVPMEVNFNFDDPNLIILPLAFGKRFGREFIWNDLLSLETGSLKLANGRVIEKTLYNRRTRQDEPALFVALTFERREVLDSSNIKPMNLIGVDRGENIPAVIALTDPEGCPLSRFKDSLGNPTHILRIGESYKEKQRTIQAKKEVEQRRAGGYSRKYASKAKNLADDMVRNTARDLLYYAVTQDAMLIFENLSRGFGRQGKRTFMAERQYTRMEDWLTAKLAYEGLPSKTYLSKTLAQYTSKTCSNCGFTITSADYDRVLEKLKKTATGWMTTINGKELKVEGQITYYNRYKRQNVVKDLSVELDRLSEESVNNDISSWTKGRSGEALSLLKKRFSHRPVQEKFVCLNCEFETHADEQAALNIARSWLFLRSQEYKKYQTNKTTGNTDKRAFVETWQSFYRKKLKEVWKPAV

SEQ ID NO: 37549 - protein, 978 aa, synthetic construct
  REGION 1..978: note = engineered CasX variant
QEIKRINKIRRRLVKDSNTKKAGKTGPMKTLLVRVMTPDLRERLENLRKKPENIPQPISNTSRANLNKLLTDYTEMKKAILHVYWEEFQKDPVGLMSRVAQPASKKIDQNKLKPEMDEKGNLTTAGFACSQCGQPLFVYKLEQVSEKGKAYTNYFGRCNVAEHEKLILLAQLKPEKDSDEAVTYSLGKFGQRALDFYSIHVTKESTHPVKPLAQIAGNRYASAPVGKALSDACMGTIASFLSKYQDIIIEHQKVVKGNQKRLESLRELAGKENLEYPSVTLPPQPHTKEGVDAYNEVIARVRMWVNLNLWQKLKLSRDDAKPLLRLKGFPSFPLVERQANEVDWWDMVCNVKKLINEKKEDGKVFWQNLAGYKRQEALRPYLSSEEDRKKGKKFARYQLGDLLLHLEKKHGEDWGKVYDEAWERIDKKVEGLSKHIKLEEERRSEDAQSKAALTDWLRAKASFVIEGLKEADKDEFCRCELKLQKWYGDLRGKPFAIEAENSILDISGFSKQYNCAFIWQKDGVKKLNLYLIINYFKGGKLRFKKIKPEAFEANRFYTVINKKSGEIVPMEVNFNFDDPNLIILPLAFGKRFGREFIWNDLLSLETGSLKLANGRVIEKTLYNRRTRQDEPALFVALTFERREVLDSSNIKPMNLIGVDRGENIPAVIALTDPEGCPLSRFKDSLGNPTHILRIGESYKEKQRTIQAKKEVEQRRAGGYSRKYASKAKNLADDMVRNTARDLLYYAVTQDAMLIFENLSRGFGRQGKRTFMAERQYTRMEDWLTAKLAYEGLPSKTYLSKTLAQYTSKTCSNCGFTITSADYDRVLEKLKKTATGWMTTINGKELKVEGQITYYNRYKRQNVVKDLSVELDRLSEESVNNDISSWTKGRSGEALSLLKKRFSHRPVQEKFVCLNCEFETHADEQAALNIARSWLFLRSQEYKKYQTNKTTGNTDKRAFVETWQSFYRKKLKEVWKPAV

SEQ ID NO: 37550 - protein, 978 aa, synthetic construct
  REGION 1..978: note = engineered CasX variant
QEIKRINKIRRRLVKDSNTKKAGKTGPMKTLLVRVMTPDLRERLENLRKKPENIPQPISNTSRANLNKLLTDYTEMKKAILHVYWEEFQKDPVGLMSRVAQPASKKIDQNKLKPEMDEKGNLTTAGFACSQCGQPLFVYKLEQVSEKGKAYTNYFGRCNVAEHEKLILLAQLKPEKDSDEAVTYSLGKFGQRALDFYSIHVTKESTHPVKPLAQIAGNRYASVPVGKALSDACMGTIASFLSKYQDIIIEHQKVVKGNQKRLESLRELAGKENLEYPSVTLPPQPHTKEGVDAYNEVIARVRMWVNLNLWQKLKLSRDDAKPLLRLKGFPSFPLVERQANEVDWWDMVCNVKKLINEKKEDGKVFWQNLAGYKRQEALRPYLSSEEDRKKGKKFARYQLGDLLLHLEKKHGEDWGKVYDEAWERIDKKVEGLSKHIKLEEERRSEDAQSKAALTDWLRAKASFVIEGLKEADKDEFCRCELKLQKWYGDLRGKPFAIEAENSILDISGFSKQYNCAFIWQKDGVKKLNLYLIINYFKGGKLRFKKIKPEAFEANRFYTVINKKSGEIVPMEVNFNFDDPNLIILPLAFGKRFGREFIWNDLLSLETGSLKLANGRVIEKTLYNRRTRQDEPALFVALTFERREVLDSSNIKPMNLIGVDRGENIPAVIALTDPEGCPLSRFKDSLGNPTHILRIGESYKEKQRTIQAKKEVEQRRAGGYSRKYASKAKNLADDMVRNTARDLLYYAVTQDAMLIFENLSRGFGRQGKRTFMAERQYTRMEDWLTAKLAYEGLPSKTYLSKTLAQYTSKTCSNCGFTITSADYDRVLEKLKKTATGWMTTINGKELKVEGQITYYNRYKRQNVVKDLSVELDRLSEESVNNDISSWTKGRSGEALSLLKKRFSHRPVQEKFVCLNCEFETHADEQAALNIARSWLFLRSQEYKKYQTNKTTGNTDKRAFVETWQSFYRKKLKEVWKPAV

SEQ ID NO: 37551 - protein, 978 aa, synthetic construct
  REGION 1..978: note = engineered CasX variant
QEIKRINKIRRRLVKDSNTKKAGKTGPMKTLLVRVMTPDLRERLENLRKKPENIPQPISNTSRANLNKLLTDYTEMKKAILHVYWEEFQKDPVGLMSRVAQPASKKIDQNKLKPEMDEKGNLTTAGFACSQCGQPLFVYKLEQVSEKGKAYTNYFGRCNVAEHEKLIKLAQLKPEKDSDEAVTYSLGKFGQRALDFYSIHVTKESTHPVKPLAQIAGNRYASGPVGKALSDACMGTIASFLSKYQDIIIEHQKVVKGNQKRLESLRELAGKENLEYPSVTLPPQPHTKEGVDAYNEVIARVRMWVNLNLWQKLKLSRDDAKPLLRLKGFPSFPLVERQANEVDWWDMVCNVKKLINEKKEDGKVFWQNLAGYKRQEALRPYLSSEEDRKKGKKFARYQLGDLLLHLEKKHGEDWGKVYDEAWERIDKKVEGLSKHIKLEEERRSEDAQSKAALTDWLRAKASFVIEGLKEADKDEFCRCELKLQKWYGDLRGKPFAIEAENSILDISGFSKQYNCAFIWQKDGVKKLNLYLIINYFKGGKLRFKKIKPEAFEANRFYTVINKKSGEIVPMEVNFNFDDPNLIILPLAFGKRFGREFIWNDLLSLETGSLKLANGRVIEKTLYNRRTRQDEPALFVALTFERREVLDSSNIKPMNLIGVDRGENIPAVIALTDPEGCPLSRFKDSLGNPTHILRIGESYKEKQRTIQAKKEVEQRRAGGYSRKYASKAKNLADDMVRNTARDLLYYAVTQDAMLIFENLSRGFGRQGKRTFMAERQYTRMEDWLTAKLAYEGLPSKTYLSKTLAQYTSKTCSNCGFTITSADYDRVLEKLKKTATGWMTTINGKELKVEGQITYYNRYKRQNVVKDLSVELDRLSEESVNNDISSWTKGRSGEALSLLKKRFSHRPVQEKFVCLNCEFETHADEQAALNIARSWLFLRSQEYKKYQTNKTTGNTDKRAFVETWQSFYRKKLKEVWKPAV

SEQ ID NO: 37552 - protein, 977 aa, synthetic construct
  REGION 1..977: note = engineered CasX variant
QEIKRINKIRRRLVKDSNTKKAGKTGPMKTLLVRVMTPDLRERLENLRKKPENIPQPISNTSRANLNKLLTDYTEMKKAILHVYWEEFQKDPVGLMSRVAQPASKKIDQNKLKPEMDEKGNLTTAGFACSQCGQPLFVYKLEQVSEKGKAYTNYFGRCNVAEHEKLILLAQLKPEKDSDEAVTYSLGKFGQRALDFYSIHVTKESTHPVKPLAQIAGNRYASPVGKALSDACMGTIASFLSKYQDIIIEHQKVVKGNQKRLESLRELAGKENLEYPSVTLPPQPHTKEGVDAYNEVIARVRMWVNLNLWQKLKLSRDDAKPLLRLKGFPSFPLVERQANEVDWWDMVCNVKKLINEKKEDGKVFWQNLAGYKRQEALRPYLSSEEDRKKGKKFARYQLGDLLLHLEKKHGEDWGKVYDEAWERIDKKVEGLSKHIKLEEERRSEDAQSKAALTDWLRAKASFVIEGLKEADKDEFCRCELKLQKWYGDLRGKPFAIEAENSILDISGFSKQYNCAFIWQKDGVKKLNLYLIINYFKGGKLRFKKIKPEAFEANRFYTVINKKSGEIVPMEVNFNFDDPNLIILPLAFGKRFGREFIWNDLLSLETGSLKLANGRVIEKTLYNRRTRQDEPALFVALTFERREVLDSSNIKPMNLIGVDRGENIPAVIALTDPEGCPLSRFKDSLGNPTHILRIGESYKEKQRTIQAKKEVEQRRAGGYSRKYASKAKNLADDMVRNTARDLLYYAVTQDAMLIFENLSRGFGRQGKRTFMAERQYTRMEDWLTAKLAYEGLPSKTYLSKTLAQYTSKTCSNCGFTITSADYDRVLEKLKKTATGWMTTINGKELKVEGQITYYNRYKRQNVVKDLSVELDRLSEESVNNDISSWTKGRSGEALSLLKKRFSHRPVQEKFVCLNCEFETHADEQAALNIARSWLFLRSQEYKKYQTNKTTGNTDKRAFVETWQSFYRKKLKEVWKPAV

SEQ ID NO: 37553 - protein, 979 aa, synthetic construct
  REGION 1..979: note = engineered CasX variant
QEIKRINKIRRRLVKDSNTKKAGKTGPMKTLLVRVMTPDLRERLENLRKKPENIPQPISNTSRANLNKLLTDYTEMKKAILHVYWEEFQKDPVGLMSRVAQPASKKIDQNKLKPEMDEKGNLTTAGFACSQCGQPLFVYKLEQVSEKGKAYTNYFGRCNVAEHEKLILLAQLKPEKDSDEAVTYSLGKFGQRALDFYSIHVTKESTHPVKPLAQIAGNRYASYPVGKALSDACMGTIASFLSKYQDIIIEHQKVVKGNQKRLESLRELAGKENLEYPSVTLPPQPHTKEGVDAYNEVIARVRMWVNLNLWQKLKLSRDDAKPLLRLKGFPSFPLVERQANEVDWWDMVCNVKKLINEKKEDGKVFWQNLAGYKRQEALRPYLSSEEDRKKGKKFARYQLGDLLLHLEKKHGEDWGKVYDEAWERIDKKVEGLSKHIKLEEERRSEDAQSKAALTDWLRAKASFVIEGLKEADKDEFCRCELKLQKWYGDLRGKPFAIEAENSILDISGFSKQYNCAFIWQKDGVKKLNLYLIINYFKGGKLRFKKIKPEAFEANRFYTVINKKSGEIVPMEVNFNFDDPNLIILPLAFGKRFGREFIWNDLLSLETGSLKLANGRVIEKTLYNRRTRQDEPALFVALTFERREVLDSSNIKPMNLIGVDRGENIPAVIALTDPEGCPLSRFKDSLGNPTHILRIGESYKEKQRTIQAKKEVEQRRAGGYSRKYASKAKNLADDMVRNTARDLLYYAVTQDAMLIFENLSRGFGRQGKRTFMAERQYTRMEDWLTAKLAYEGLPSKTYLSKTLAQYTSKTCSNCGFTITSADYDRVLEKLKKTATGWMTTINGKELKVEGQITYYNRYKRQNVVKDLSVELDRLSEESVNNDISSWTKGRSGEALSLLKKRFSHRPVQEKFVCLNCGFETHADEQAALNIARSWLFLRSQEYKKYQTNKTSTGNTDKRAFVETWQSFYRKKLKEVWKPAV

SEQ ID NO: 37554 - protein, 979 aa, synthetic construct
  REGION 1..979: note = engineered CasX variant
QEIKRINKIRRRLVKDSNTKKAGKTGPMKTLLVRVMTPDLRERLENLRKKPENIPQPISNTSRANLNKLLTDYTEMKKAILHVYWEEFQKDPVGLMSRVAQPASKKIDQNKLKPEMDEKGNLTTAGFACSQCGQPLFVYKLEQVSEKGKAYTNYFGRCNVAEHEKLILLAQLKPEKDSDEAVTYSLGKFGQRALDFYSIHVTKESTHPVKPLAQIAGNRYASHPVGKALSDACMGTIASFLSKYQDIIIEHQKVVKGNQKRLESLRELAGKENLEYPSVTLPPQPHTKEGVDAYNEVIARVRMWVNLNLWQKLKLSRDDAKPLLRLKGFPSFPLVERQANEVDWWDMVCNVKKLINEKKEDGKVFWQNLAGYKRQEALRPYLSSEEDRKKGKKFARYQLGDLLLHLEKKHGEDWGKVYDEAWERIDKKVEGLSKHIKLEEERRSEDAQSKAALTDWLRAKASFVIEGLKEADKDEFCRCELKLQKWYGDLRGKPFAIEAENSILDISGFSKQYNCAFIWQKDGVKKLNLYLIINYFKGGKLRFKKIKPEAFEANRFYTVINKKSGEIVPMEVNFNFDDPNLIILPLAFGKRFGREFIWNDLLSLETGSLKLANGRVIEKTLYNRRTRQDEPALFVALTFERREVLDSSNIKPMNLIGVDRGENIPAVIALTDPEGCPLSRFKDSLGNPTHILRIGESYKEKQRTIQAKKEVEQRRAGGYSRKYASKAKNLADDMVRNTARDLLYYAVTQDAMLIFENLSRGFGRQGKRTFMAERQYTRMEDWLTAKLAYEGLPSKTYLSKTLAQYTSKTCSNCGFTITSADYDRVLEKLKKTATGWMTTINGKELKVEGQITYYNRYKRQNVVKDLSVELDRLSEESVNNDISSWTKGRSGEALSLLKKRFSHRPVQEKFVCLNCGFETHADEQAALNIARSWLFLRSQEYKKYQTNKTSTGNTDKRAFVETWQSFYRKKLKEVWKPAV

SEQ ID NO: 37555 - protein, 979 aa, synthetic construct
  REGION 1..979: note = engineered CasX variant
QEIKRINKIRRRLVKDSNTKKAGKTGPMKTLLVRVMTPDLRERLENLRKKPENIPQPISNTSRANLNKLLTDYTEMKKAILHVYWEEFQKDPVGLMSRVAQPASKKIDQNKLKPEMDEKGNLTTAGFACSQCGQPLFVYKLEQVSEKGKAYTNYFGRCNVAEHEKLILLAQLKPEKDSDEAVTYSLGKFGQRALDFYSIHVTKESTHPVKPLAQIAGNRYASSPVGKALSDACMGTIASFLSKYQDIIIEHQKVVKGNQKRLESLRELAGKENLEYPSVTLPPQPHTKEGVDAYNEVIARVRMWVNLNLWQKLKLSRDDAKPLLRLKGFPSFPLVERQANEVDWWDMVCNVKKLINEKKEDGKVFWQNLAGYKRQEALRPYLSSEEDRKKGKKFARYQLGDLLLHLEKKHGEDWGKVYDEAWERIDKKVEGLSKHIKLEEERRSEDAQSKAALTDWLRAKASFVIEGLKEADKDEFCRCELKLQKWYGDLRGKPFAIEAENSILDISGFSKQYNCAFIWQKDGVKKLNLYLIINYFKGGKLRFKKIKPEAFEANRFYTVINKKSGEIVPMEVNFNFDDPNLIILPLAFGKRFGREFIWNDLLSLETGSLKLANGRVIEKTLYNRRTRQDEPALFVALTFERREVLDSSNIKPMNLIGVDRGENIPAVIALTDPEGCPLSRFKDSLGNPTHILRIGESYKEKQRTIQAKKEVEQRRAGGYSRKYASKAKNLADDMVRNTARDLLYYAVTQDAMLIFENLSRGFGRQGKRTFMAERQYTRMEDWLTAKLAYEGLPSKTYLSKTLAQYTSKTCSNCGFTITSADYDRVLEKLKKTATGWMTTINGKELKVEGQITYYNRYKRQNVVKDLSVELDRLSEESVNNDISSWTKGRSGEALSLLKKRFSHRPVQEKFVCLNCGFETHADEQAALNIARSWLFLRSQEYKKYQTNKTSTGNTDKRAFVETWQSFYRKKLKEVWKPAV

SEQ ID NO: 37556 - protein, 979 aa, synthetic construct
  REGION 1..979: note = engineered CasX variant
QEIKRINKIRRRLVKDSNTKKAGKTGPMKTLLVRVMTPDLRERLENLRKKPENIPQPISNTSRANLNKLLTDYTEMKKAILHVYWEEFQKDPVGLMSRVAQPASKKIDQNKLKPEMDEKGNLTTAGFACSQCGQPLFVYKLEQVSEKGKAYTNYFGRCNVAEHEKLILLAQLKPEKDSDEAVTYSLGKFGQRALDFYSIHVTKESTHPVKPLAQIAGNRYASTPVGKALSDACMGTIASFLSKYQDIIIEHQKVVKGNQKRLESLRELAGKENLEYPSVTLPPQPHTKEGVDAYNEVIARVRMWVNLNLWQKLKLSRDDAKPLLRLKGFPSFPLVERQANEVDWWDMVCNVKKLINEKKEDGKVFWQNLAGYKRQEALRPYLSSEEDRKKGKKFARYQLGDLLLHLEKKHGEDWGKVYDEAWERIDKKVEGLSKHIKLEEERRSEDAQSKAALTDWLRAKASFVIEGLKEADKDEFCRCELKLQKWYGDLRGKPFAIEAENSILDISGFSKQYNCAFIWQKDGVKKLNLYLIINYFKGGKLRFKKIKPEAFEANRFYTVINKKSGEIVPMEVNFNFDDPNLIILPLAFGKRFGREFIWNDLLSLETGSLKLANGRVIEKTLYNRRTRQDEPALFVALTFERREVLDSSNIKPMNLIGVDRGENIPAVIALTDPEGCPLSRFKDSLGNPTHILRIGESYKEKQRTIQAKKEVEQRRAGGYSRKYASKAKNLADDMVRNTARDLLYYAVTQDAMLIFENLSRGFGRQGKRTFMAERQYTRMEDWLTAKLAYEGLPSKTYLSKTLAQYTSKTCSNCGFTITSADYDRVLEKLKKTATGWMTTINGKELKVEGQITYYNRYKRQNVVKDLSVELDRLSEESVNNDISSWTKGRSGEALSLLKKRFSHRPVQEKFVCLNCGFETHADEQAALNIARSWLFLRSQEYKKYQTNKTSTGNTDKRAFVETWQSFYRKKLKEVWKPAV

SEQ ID NO: 37557 - protein, 979 aa, synthetic construct
  REGION 1..979: note = engineered CasX variant
QEIKRINKIRRRLVKDSNTKKAGKTGPMKTLLVRVMTPDLRERLENLRKKPENIPQPISNTSRANLNKLLTDYTEMKKAILHVYWEEFQKDPVGLMSRVAQPASKKIDQNKLKPEMDEKGNLTTAGFACSQCGQPLFVYKLEQVSEKGKAYTNYFGRCNVAEHEKLILLAQLKPEKDSDEAVTYSLGKFGQRALDFYSIHVTKESTHPVKPLAQIAGNRYASAPVGKALSDACMGTIASFLSKYQDIIIEHQKVVKGNQKRLESLRELAGKENLEYPSVTLPPQPHTKEGVDAYNEVIARVRMWVNLNLWQKLKLSRDDAKPLLRLKGFPSFPLVERQANEVDWWDMVCNVKKLINEKKEDGKVFWQNLAGYKRQEALRPYLSSEEDRKKGKKFARYQLGDLLLHLEKKHGEDWGKVYDEAWERIDKKVEGLSKHIKLEEERRSEDAQSKAALTDWLRAKASFVIEGLKEADKDEFCRCELKLQKWYGDLRGKPFAIEAENSILDISGFSKQYNCAFIWQKDGVKKLNLYLIINYFKGGKLRFKKIKPEAFEANRFYTVINKKSGEIVPMEVNFNFDDPNLIILPLAFGKRFGREFIWNDLLSLETGSLKLANGRVIEKTLYNRRTRQDEPALFVALTFERREVLDSSNIKPMNLIGVDRGENIPAVIALTDPEGCPLSRFKDSLGNPTHILRIGESYKEKQRTIQAKKEVEQRRAGGYSRKYASKAKNLADDMVRNTARDLLYYAVTQDAMLIFENLSRGFGRQGKRTFMAERQYTRMEDWLTAKLAYEGLPSKTYLSKTLAQYTSKTCSNCGFTITSADYDRVLEKLKKTATGWMTTINGKELKVEGQITYYNRYKRQNVVKDLSVELDRLSEESVNNDISSWTKGRSGEALSLLKKRFSHRPVQEKFVCLNCGFETHADEQAALNIARSWLFLRSQEYKKYQTNKTSTGNTDKRAFVETWQSFYRKKLKEVWKPAV

SEQ ID NO: 37558 - protein, 979 aa, synthetic construct
  REGION 1..979: note = engineered CasX variant
QEIKRINKIRRRLVKDSNTKKAGKTGPMKTLLVRVMTPDLRERLENLRKKPENIPQPISNTSRANLNKLLTDYTEMKKAILHVYWEEFQKDPVGLMSRVAQPASKKIDQNKLKPEMDEKGNLTTAGFACSQCGQPLFVYKLEQVSEKGKAYTNYFGRCNVAEHEKLILLAQLKPEKDSDEAVTYSLGKFGQRALDFYSIHVTKESTHPVKPLAQIAGNRYASVPVGKALSDACMGTIASFLSKYQDIIIEHQKVVKGNQKRLESLRELAGKENLEYPSVTLPPQPHTKEGVDAYNEVIARVRMWVNLNLWQKLKLSRDDAKPLLRLKGFPSFPLVERQANEVDWWDMVCNVKKLINEKKEDGKVFWQNLAGYKRQEALRPYLSSEEDRKKGKKFARYQLGDLLLHLEKKHGEDWGKVYDEAWERIDKKVEGLSKHIKLEEERRSEDAQSKAALTDWLRAKASFVIEGLKEADKDEFCRCELKLQKWYGDLRGKPFAIEAENSILDISGFSKQYNCAFIWQKDGVKKLNLYLIINYFKGGKLRFKKIKPEAFEANRFYTVINKKSGEIVPMEVNFNFDDPNLIILPLAFGKRFGREFIWNDLLSLETGSLKLANGRVIEKTLYNRRTRQDEPALFVALTFERREVLDSSNIKPMNLIGVDRGENIPAVIALTDPEGCPLSRFKDSLGNPTHILRIGESYKEKQRTIQAKKEVEQRRAGGYSRKYASKAKNLADDMVRNTARDLLYYAVTQDAMLIFENLSRGFGRQGKRTFMAERQYTRMEDWLTAKLAYEGLPSKTYLSKTLAQYTSKTCSNCGFTITSADYDRVLEKLKKTATGWMTTINGKELKVEGQITYYNRYKRQNVVKDLSVELDRLSEESVNNDISSWTKGRSGEALSLLKKRFSHRPVQEKFVCLNCGFETHADEQAALNIARSWLFLRSQEYKKYQTNKTSTGNTDKRAFVETWQSFYRKKLKEVWKPAV

SEQ ID NO: 37559 - protein, 979 aa, synthetic construct
  REGION 1..979: note = engineered CasX variant
QEIKRINKIRRRLVKDSNTKKAGKTGPMKTLLVRVMTPDLRERLENLRKKPENIPQPISNTSRANLNKLLTDYTEMKKAILHVYWEEFQKDPVGLMSRVAQPASKKIDQNKLKPEMDEKGNLTTAGFACSQCGQPLFVYKLEQVSEKGKAYTNYFGRCNVAEHEKLIKLAQLKPEKDSDEAVTYSLGKFGQRALDFYSIHVTKESTHPVKPLAQIAGNRYASGPVGKALSDACMGTIASFLSKYQDIIIEHQKVVKGNQKRLESLRELAGKENLEYPSVTLPPQPHTKEGVDAYNEVIARVRMWVNLNLWQKLKLSRDDAKPLLRLKGFPSFPLVERQANEVDWWDMVCNVKKLINEKKEDGKVFWQNLAGYKRQEALRPYLSSEEDRKKGKKFARYQLGDLLLHLEKKHGEDWGKVYDEAWERIDKKVEGLSKHIKLEEERRSEDAQSKAALTDWLRAKASFVIEGLKEADKDEFCRCELKLQKWYGDLRGKPFAIEAENSILDISGFSKQYNCAFIWQKDGVKKLNLYLIINYFKGGKLRFKKIKPEAFEANRFYTVINKKSGEIVPMEVNFNFDDPNLIILPLAFGKRFGREFIWNDLLSLETGSLKLANGRVIEKTLYNRRTRQDEPALFVALTFERREVLDSSNIKPMNLIGVDRGENIPAVIALTDPEGCPLSRFKDSLGNPTHILRIGESYKEKQRTIQAKKEVEQRRAGGYSRKYASKAKNLADDMVRNTARDLLYYAVTQDAMLIFENLSRGFGRQGKRTFMAERQYTRMEDWLTAKLAYEGLPSKTYLSKTLAQYTSKTCSNCGFTITSADYDRVLEKLKKTATGWMTTINGKELKVEGQITYYNRYKRQNVVKDLSVELDRLSEESVNNDISSWTKGRSGEALSLLKKRFSHRPVQEKFVCLNCGFETHADEQAALNIARSWLFLRSQEYKKYQTNKTSTGNTDKRAFVETWQSFYRKKLKEVWKPAV

SEQ ID NO: 37560 - protein, 978 aa, synthetic construct
  REGION 1..978: note = engineered CasX variant
QEIKRINKIRRRLVKDSNTKKAGKTGPMKTLLVRVMTPDLRERLENLRKKPENIPQPISNTSRANLNKLLTDYTEMKKAILHVYWEEFQKDPVGLMSRVAQPASKKIDQNKLKPEMDEKGNLTTAGFACSQCGQPLFVYKLEQVSEKGKAYTNYFGRCNVAEHEKLILLAQLKPEKDSDEAVTYSLGKFGQRALDFYSIHVTKESTHPVKPLAQIAGNRYASPVGKALSDACMGTIASFLSKYQDIIIEHQKVVKGNQKRLESLRELAGKENLEYPSVTLPPQPHTKEGVDAYNEVIARVRMWVNLNLWQKLKLSRDDAKPLLRLKGFPSFPLVERQANEVDWWDMVCNVKKLINEKKEDGKVFWQNLAGYKRQEALRPYLSSEEDRKKGKKFARYQLGDLLLHLEKKHGEDWGKVYDEAWERIDKKVEGLSKHIKLEEERRSEDAQSKAALTDWLRAKASFVIEGLKEADKDEFCRCELKLQKWYGDLRGKPFAIEAENSILDISGFSKQYNCAFIWQKDGVKKLNLYLIINYFKGGKLRFKKIKPEAFEANRFYTVINKKSGEIVPMEVNFNFDDPNLIILPLAFGKRFGREFIWNDLLSLETGSLKLANGRVIEKTLYNRRTRQDEPALFVALTFERREVLDSSNIKPMNLIGVDRGENIPAVIALTDPEGCPLSRFKDSLGNPTHILRIGESYKEKQRTIQAKKEVEQRRAGGYSRKYASKAKNLADDMVRNTARDLLYYAVTQDAMLIFENLSRGFGRQGKRTFMAERQYTRMEDWLTAKLAYEGLPSKTYLSKTLAQYTSKTCSNCGFTITSADYDRVLEKLKKTATGWMTTINGKELKVEGQITYYNRYKRQNVVKDLSVELDRLSEESVNNDISSWTKGRSGEALSLLKKRFSHRPVQEKFVCLNCGFETHADEQAALNIARSWLFLRSQEYKKYQTNKTSTGNTDKRAFVETWQSFYRKKLKEVWKPAV

SEQ ID NO: 37561 - protein, 979 aa, synthetic construct
  REGION 1..979: note = engineered CasX variant
QEIKRINKIRRRLVKDSNTKKAGKTGPMKTLLVRVMTPDLRERLENLRKKPENIPQPISNTSRANLNKLLTDYTEMKKAILHVYWEEFQKDPVGLMSRVAQPASKKIDQNKLKPEMDEKGNLTTAGFACSQCGQPLFVYKLEQVSEKGKAYTNYFGRCNVAEHEKLILLAQLKPEKDSDEAVTYSLGKFGQRALDFYSIHVTKESTHPVKPLAQIAGNRYASYPVGKALSDACMGTIASFLSKYQDIIIEHQKVVKGNQKRLESLRELAGKENLEYPSVTLPPQPHTKEGVDAYNEVIARVRMWVNLNLWQKLKLSRDDAKPLLRLKGFPSFPLVERQANEVDWWDMVCNVKKLINEKKEDGKVFWQNLAGYKRQEALRPYLSSEEDRKKGKKFARYQLGDLLLHLEKKHGEDWGKVYDEAWERIDKKVEGLSKHIKLEEERRSEDAQSKAALTDWLRAKASFVIEGLKEADKDEFCRCELKLQKWYGDLRGKPFAIEAENSILDISGFSKQYNCAFIWQKDGVKKLNLYLIINYFKGGKLRFKKIKPEAFEANRFYTVINKKSGEIVPMEVNFNFDDPNLIILPLAFGKRFGREFIWNDLLSLETGSLKLANGRVIEKTLYNRRTRQDEPALFVALTFERREVLDSSNIKPMNLIGVDRGENIPAVIALTDPEGCPLSRFKDSLGNPTHILRIGESYKEKQRTIQAKKEVEQRRAGGYSRKYASKAKNLADDMVRNTARDLLYYAVTQDAMLIFENLSRGFGRQGKRTFMAERQYTRMEDWLTAKLAYEGLPSKTYLSKTLAQYTSKTCSNCGFTITSADYDRVLEKLKKTATGWMTTINGKELKVEGQITYYNRYKRQNVVKDLSVELDRLSEESVNNDISSWTKGRSGEALSLLKKRFSHRPVQEKFVCLNCGFETHADEQAALNIARSWLFLRSQEYKKYQTNKTTGKNTDKRAFVETWQSFYRKKLKEVWKPAV

SEQ ID NO: 37562 - protein, 979 aa, synthetic construct
  REGION 1..979: note = engineered CasX variant
QEIKRINKIRRRLVKDSNTKKAGKTGPMKTLLVRVMTPDLRERLENLRKKPENIPQPISNTSRANLNKLLTDYTEMKKAILHVYWEEFQKDPVGLMSRVAQPASKKIDQNKLKPEMDEKGNLTTAGFACSQCGQPLFVYKLEQVSEKGKAYTNYFGRCNVAEHEKLILLAQLKPEKDSDEAVTYSLGKFGQRALDFYSIHVTKESTHPVKPLAQIAGNRYASHPVGKALSDACMGTIASFLSKYQDIIIEHQKVVKGNQKRLESLRELAGKENLEYPSVTLPPQPHTKEGVDAYNEVIARVRMWVNLNLWQKLKLSRDDAKPLLRLKGFPSFPLVERQANEVDWWDMVCNVKKLINEKKEDGKVFWQNLAGYKRQEALRPYLSSEEDRKKGKKFARYQLGDLLLHLEKKHGEDWGKVYDEAWERIDKKVEGLSKHIKLEEERRSEDAQSKAALTDWLRAKASFVIEGLKEADKDEFCRCELKLQKWYGDLRGKPFAIEAENSILDISGFSKQYNCAFIWQKDGVKKLNLYLIINYFKGGKLRFKKIKPEAFEANRFYTVINKKSGEIVPMEVNFNFDDPNLIILPLAFGKRFGREFIWNDLLSLETGSLKLANGRVIEKTLYNRRTRQDEPALFVALTFERREVLDSSNIKPMNLIGVDRGENIPAVIALTDPEGCPLSRFKDSLGNPTHILRIGESYKEKQRTIQAKKEVEQRRAGGYSRKYASKAKNLADDMVRNTARDLLYYAVTQDAMLIFENLSRGFGRQGKRTFMAERQYTRMEDWLTAKLAYEGLPSKTYLSKTLAQYTSKTCSNCGFTITSADYDRVLEKLKKTATGWMTTINGKELKVEGQITYYNRYKRQNVVKDLSVELDRLSEESVNNDISSWTKGRSGEALSLLKKRFSHRPVQEKFVCLNCGFETHADEQAALNIARSWLFLRSQEYKKYQTNKTTGKNTDKRAFVETWQSFYRKKLKEVWKPAV

SEQ ID NO: 37563 - protein, 979 aa, synthetic construct
  REGION 1..979: note = engineered CasX variant
QEIKRINKIRRRLVKDSNTKKAGKTGPMKTLLVRVMTPDLRERLENLRKKPENIPQPISNTSRANLNKLLTDYTEMKKAILHVYWEEFQKDPVGLMSRVAQPASKKIDQNKLKPEMDEKGNLTTAGFACSQCGQPLFVYKLEQVSEKGKAYTNYFGRCNVAEHEKLILLAQLKPEKDSDEAVTYSLGKFGQRALDFYSIHVTKESTHPVKPLAQIAGNRYASSPVGKALSDACMGTIASFLSKYQDIIIEHQKVVKGNQKRLESLRELAGKENLEYPSVTLPPQPHTKEGVDAYNEVIARVRMWVNLNLWQKLKLSRDDAKPLLRLKGFPSFPLVERQANEVDWWDMVCNVKKLINEKKEDGKVFWQNLAGYKRQEALRPYLSSEEDRKKGKKFARYQLGDLLLHLEKKHGEDWGKVYDEAWERIDKKVEGLSKHIKLEEERRSEDAQSKAALTDWLRAKASFVIEGLKEADKDEFCRCELKLQKWYGDLRGKPFAIEAENSILDISGFSKQYNCAFIWQKDGVKKLNLYLIINYFKGGKLRFKKIKPEAFEANRFYTVINKKSGEIVPMEVNFNFDDPNLIILPLAFGKRFGREFIWNDLLSLETGSLKLANGRVIEKTLYNRRTRQDEPALFVALTFERREVLDSSNIKPMNLIGVDRGENIPAVIALTDPEGCPLSRFKDSLGNPTHILRIGESYKEKQRTIQAKKEVEQRRAGGYSRKYASKAKNLADDMVRNTARDLLYYAVTQDAMLIFENLSRGFGRQGKRTFMAERQYTRMEDWLTAKLAYEGLPSKTYLSKTLAQYTSKTCSNCGFTITSADYDRVLEKLKKTATGWMTTINGKELKVEGQITYYNRYKRQNVVKDLSVELDRLSEESVNNDISSWTKGRSGEALSLLKKRFSHRPVQEKFVCLNCGFETHADEQAALNIARSWLFLRSQEYKKYQTNKTTGKNTDKRAFVETWQSFYRKKLKEVWKPAV

SEQ ID NO: 37564 - protein, 979 aa, synthetic construct
  REGION 1..979: note = engineered CasX variant
QEIKRINKIRRRLVKDSNTKKAGKTGPMKTLLVRVMTPDLRERLENLRKKPENIPQPISNTSRANLNKLLTDYTEMKKAILHVYWEEFQKDPVGLMSRVAQPASKKIDQNKLKPEMDEKGNLTTAGFACSQCGQPLFVYKLEQVSEKGKAYTNYFGRCNVAEHEKLILLAQLKPEKDSDEAVTYSLGKFGQRALDFYSIHVTKESTHPVKPLAQIAGNRYASTPVGKALSDACMGTIASFLSKYQDIIIEHQKVVKGNQKRLESLRELAGKENLEYPSVTLPPQPHTKEGVDAYNEVIARVRMWVNLNLWQKLKLSRDDAKPLLRLKGFPSFPLVERQANEVDWWDMVCNVKKLINEKKEDGKVFWQNLAGYKRQEALRPYLSSEEDRKKGKKFARYQLGDLLLHLEKKHGEDWGKVYDEAWERIDKKVEGLSKHIKLEEERRSEDAQSKAALTDWLRAKASFVIEGLKEADKDEFCRCELKLQKWYGDLRGKPFAIEAENSILDISGFSKQYNCAFIWQKDGVKKLNLYLIINYFKGGKLRFKKIKPEAFEANRFYTVINKKSGEIVPMEVNFNFDDPNLIILPLAFGKRFGREFIWNDLLSLETGSLKLANGRVIEKTLYNRRTRQDEPALFVALTFERREVLDSSNIKPMNLIGVDRGENIPAVIALTDPEGCPLSRFKDSLGNPTHILRIGESYKEKQRTIQAKKEVEQRRAGGYSRKYASKAKNLADDMVRNTARDLLYYAVTQDAMLIFENLSRGFGRQGKRTFMAERQYTRMEDWLTAKLAYEGLPSKTYLSKTLAQYTSKTCSNCGFTITSADYDRVLEKLKKTATGWMTTINGKELKVEGQITYYNRYKRQNVVKDLSVELDRLSEESVNNDISSWTKGRSGEALSLLKKRFSHRPVQEKFVCLNCGFETHADEQAALNIARSWLFLRSQEYKKYQTNKTTGKNTDKRAFVETWQSFYRKKLKEVWKPAV

SEQ ID NO: 37565 - protein, 979 aa, synthetic construct
  REGION 1..979: note = engineered CasX variant
QEIKRINKIRRRLVKDSNTKKAGKTGPMKTLLVRVMTPDLRERLENLRKKPENIPQPISNTSRANLNKLLTDYTEMKKAILHVYWEEFQKDPVGLMSRVAQPASKKIDQNKLKPEMDEKGNLTTAGFACSQCGQPLFVYKLEQVSEKGKAYTNYFGRCNVAEHEKLILLAQLKPEKDSDEAVTYSLGKFGQRALDFYSIHVTKESTHPVKPLAQIAGNRYASAPVGKALSDACMGTIASFLSKYQDIIIEHQKVVKGNQKRLESLRELAGKENLEYPSVTLPPQPHTKEGVDAYNEVIARVRMWVNLNLWQKLKLSRDDAKPLLRLKGFPSFPLVERQANEVDWWDMVCNVKKLINEKKEDGKVFWQNLAGYKRQEALRPYLSSEEDRKKGKKFARYQLGDLLLHLEKKHGEDWGKVYDEAWERIDKKVEGLSKHIKLEEERRSEDAQSKAALTDWLRAKASFVIEGLKEADKDEFCRCELKLQKWYGDLRGKPFAIEAENSILDISGFSKQYNCAFIWQKDGVKKLNLYLIINYFKGGKLRFKKIKPEAFEANRFYTVINKKSGEIVPMEVNFNFDDPNLIILPLAFGKRFGREFIWNDLLSLETGSLKLANGRVIEKTLYNRRTRQDEPALFVALTFERREVLDSSNIKPMNLIGVDRGENIPAVIALTDPEGCPLSRFKDSLGNPTHILRIGESYKEKQRTIQAKKEVEQRRAGGYSRKYASKAKNLADDMVRNTARDLLYYAVTQDAMLIFENLSRGFGRQGKRTFMAERQYTRMEDWLTAKLAYEGLPSKTYLSKTLAQYTSKTCSNCGFTITSADYDRVLEKLKKTATGWMTTINGKELKVEGQITYYNRYKRQNVVKDLSVELDRLSEESVNNDISSWTKGRSGEALSLLKKRFSHRPVQEKFVCLNCGFETHADEQAALNIARSWLFLRSQEYKKYQTNKTTGKNTDKRAFVETWQSFYRKKLKEVWKPAV

SEQ ID NO: 37566 - protein, 979 aa, synthetic construct
  REGION 1..979: note = engineered CasX variant
QEIKRINKIRRRLVKDSNTKKAGKTGPMKTLLVRVMTPDLRERLENLRKKPENIPQPISNTSRANLNKLLTDYTEMKKAILHVYWEEFQKDPVGLMSRVAQPASKKIDQNKLKPEMDEKGNLTTAGFACSQCGQPLFVYKLEQVSEKGKAYTNYFGRCNVAEHEKLILLAQLKPEKDSDEAVTYSLGKFGQRALDFYSIHVTKESTHPVKPLAQIAGNRYASVPVGKALSDACMGTIASFLSKYQDIIIEHQKVVKGNQKRLESLRELAGKENLEYPSVTLPPQPHTKEGVDAYNEVIARVRMWVNLNLWQKLKLSRDDAKPLLRLKGFPSFPLVERQANEVDWWDMVCNVKKLINEKKEDGKVFWQNLAGYKRQEALRPYLSSEEDRKKGKKFARYQLGDLLLHLEKKHGEDWGKVYDEAWERIDKKVEGLSKHIKLEEERRSEDAQSKAALTDWLRAKASFVIEGLKEADKDEFCRCELKLQKWYGDLRGKPFAIEAENSILDISGFSKQYNCAFIWQKDGVKKLNLYLIINYFKGGKLRFKKIKPEAFEANRFYTVINKKSGEIVPMEVNFNFDDPNLIILPLAFGKRFGREFIWNDLLSLETGSLKLANGRVIEKTLYNRRTRQDEPALFVALTFERREVLDSSNIKPMNLIGVDRGENIPAVIALTDPEGCPLSRFKDSLGNPTHILRIGESYKEKQRTIQAKKEVEQRRAGGYSRKYASKAKNLADDMVRNTARDLLYYAVTQDAMLIFENLSRGFGRQGKRTFMAERQYTRMEDWLTAKLAYEGLPSKTYLSKTLAQYTSKTCSNCGFTITSADYDRVLEKLKKTATGWMTTINGKELKVEGQITYYNRYKRQNVVKDLSVELDRLSEESVNNDISSWTKGRSGEALSLLKKRFSHRPVQEKFVCLNCGFETHADEQAALNIARSWLFLRSQEYKKYQTNKTTGKNTDKRAFVETWQSFYRKKLKEVWKPAV

SEQ ID NO: 37567 - protein, 979 aa, synthetic construct
  REGION 1..979: note = engineered CasX variant
QEIKRINKIRRRLVKDSNTKKAGKTGPMKTLLVRVMTPDLRERLENLRKKPENIPQPISNTSRANLNKLLTDYTEMKKAILHVYWEEFQKDPVGLMSRVAQPASKKIDQNKLKPEMDEKGNLTTAGFACSQCGQPLFVYKLEQVSEKGKAYTNYFGRCNVAEHEKLIKLAQLKPEKDSDEAVTYSLGKFGQRALDFYSIHVTKESTHPVKPLAQIAGNRYASGPVGKALSDACMGTIASFLSKYQDIIIEHQKVVKGNQKRLESLRELAGKENLEYPSVTLPPQPHTKEGVDAYNEVIARVRMWVNLNLWQKLKLSRDDAKPLLRLKGFPSFPLVERQANEVDWWDMVCNVKKLINEKKEDGKVFWQNLAGYKRQEALRPYLSSEEDRKKGKKFARYQLGDLLLHLEKKHGEDWGKVYDEAWERIDKKVEGLSKHIKLEEERRSEDAQSKAALTDWLRAKASFVIEGLKEADKDEFCRCELKLQKWYGDLRGKPFAIEAENSILDISGFSKQYNCAFIWQKDGVKKLNLYLIINYFKGGKLRFKKIKPEAFEANRFYTVINKKSGEIVPMEVNFNFDDPNLIILPLAFGKRFGREFIWNDLLSLETGSLKLANGRVIEKTLYNRRTRQDEPALFVALTFERREVLDSSNIKPMNLIGVDRGENIPAVIALTDPEGCPLSRFKDSLGNPTHILRIGESYKEKQRTIQAKKEVEQRRAGGYSRKYASKAKNLADDMVRNTARDLLYYAVTQDAMLIFENLSRGFGRQGKRTFMAERQYTRMEDWLTAKLAYEGLPSKTYLSKTLAQYTSKTCSNCGFTITSADYDRVLEKLKKTATGWMTTINGKELKVEGQITYYNRYKRQNVVKDLSVELDRLSEESVNNDISSWTKGRSGEALSLLKKRFSHRPVQEKFVCLNCGFETHADEQAALNIARSWLFLRSQEYKKYQTNKTTGKNTDKRAFVETWQSFYRKKLKEVWKPAV

SEQ ID NO: 37568 - protein, 978 aa, synthetic construct
  REGION 1..978: note = engineered CasX variant
QEIKRINKIRRRLVKDSNTKKAGKTGPMKTLLVRVMTPDLRERLENLRKKPENIPQPISNTSRANLNKLLTDYTEMKKAILHVYWEEFQKDPVGLMSRVAQPASKKIDQNKLKPEMDEKGNLTTAGFACSQCGQPLFVYKLEQVSEKGKAYTNYFGRCNVAEHEKLILLAQLKPEKDSDEAVTYSLGKFGQRALDFYSIHVTKESTHPVKPLAQIAGNRYASPVGKALSDACMGTIASFLSKYQDIIIEHQKVVKGNQKRLESLRELAGKENLEYPSVTLPPQPHTKEGVDAYNEVIARVRMWVNLNLWQKLKLSRDDAKPLLRLKGFPSFPLVERQANEVDWWDMVCNVKKLINEKKEDGKVFWQNLAGYKRQEALRPYLSSEEDRKKGKKFARYQLGDLLLHLEKKHGEDWGKVYDEAWERIDKKVEGLSKHIKLEEERRSEDAQSKAALTDWLRAKASFVIEGLKEADKDEFCRCELKLQKWYGDLRGKPFAIEAENSILDISGFSKQYNCAFIWQKDGVKKLNLYLIINYFKGGKLRFKKIKPEAFEANRFYTVINKKSGEIVPMEVNFNFDDPNLIILPLAFGKRFGREFIWNDLLSLETGSLKLANGRVIEKTLYNRRTRQDEPALFVALTFERREVLDSSNIKPMNLIGVDRGENIPAVIALTDPEGCPLSRFKDSLGNPTHILRIGESYKEKQRTIQAKKEVEQRRAGGYSRKYASKAKNLADDMVRNTARDLLYYAVTQDAMLIFENLSRGFGRQGKRTFMAERQYTRMEDWLTAKLAYEGLPSKTYLSKTLAQYTSKTCSNCGFTITSADYDRVLEKLKKTATGWMTTINGKELKVEGQITYYNRYKRQNVVKDLSVELDRLSEESVNNDISSWTKGRSGEALSLLKKRFSHRPVQEKFVCLNCGFETHADEQAALNIARSWLFLRSQEYKKYQTNKTTGKNTDKRAFVETWQSFYRKKLKEVWKPAV

SEQ ID NO: 37569 - protein, 978 aa, synthetic construct
  REGION 1..978: note = engineered CasX variant
QEIKRINKIRRRLVKDSNTKKAGKTGPMKTLLVRVMTPDLRERLENLRKKPENIPQPISNTSRANLNKLLTDYTEMKKAILHVYWEEFQKDPVGLMSRVAQPASKKIDQNKLKPEMDEKGNLTTAGFACSQCGQPLFVYKLEQVSEKGKAYTNYFGRCNVAEHEKLILLAQLKPEKDSDEAVTYSLGKFGQRALDFYSIHVTKESTHPVKPLAQIAGNRYASYPVGKALSDACMGTIASFLSKYQDIIIEHQKVVKGNQKRLESLRELAGKENLEYPSVTLPPQPHTKEGVDAYNEVIARVRMWVNLNLWQKLKLSRDDAKPLLRLKKFPSFPLVERQANEVDWWDMVCNVKKLINEKKEDGKVFWQNLAGYKRQEALRPYLSSEEDRKKGKKFARYQLGDLLLHLEKKHGEDWGKVYDEAWERIDKKVEGLSKHIKLEEERRSEDAQSKAALTDWLRAKASFVIEGLKEADKDEFCRCELKLQKWYGDLRGKPFAIEAENSILDISGFSKQYNCAFIWQKDGVKKLNLYLIINYFKGGKLRFKKIKPEAFEANRFYTVINKKSGEIVPMEVNFNFDDPNLIILPLAFGKRFGREFIWNDLLSLETGSLKLANGRVIEKTLYNRRTRQDEPALFVALTFERREVLDSSNIKPMNLIGVDRGENIPAVIALTDPEGCPLSRFKDSLGNPTHILRIGESYKEKQRTIQAKKEVEQRRAGGYSRKYASKAKNLADDMVRNTARDLLYYAVTQDAMLIFENLSRGFGRQGKRTFMAERQYTRMEDWLTAKLAYEGLPSKTYLSKTLAQYTSKTCSNCGFTITSADYDRVLEKLKKTATGWMTTINGKELKVEGQITYYNRYKRQNVVKDLSVELDRLSEESVNNDISSWTKGRSGEALSLLKKRFSHRPVQEKFVCLNCGFETHADEQAALNIARSWLFLRSQEYKKYQTNKTTGNTDKRAFVETWQSFYRKKLKEVWKPAV

SEQ ID NO: 37570 - protein, 978 aa, synthetic construct
  REGION 1..978: note = engineered CasX variant
QEIKRINKIRRRLVKDSNTKKAGKTGPMKTLLVRVMTPDLRERLENLRKKPENIPQPISNTSRANLNKLLTDYTEMKKAILHVYWEEFQKDPVGLMSRVAQPASKKIDQNKLKPEMDEKGNLTTAGFACSQCGQPLFVYKLEQVSEKGKAYTNYFGRCNVAEHEKLILLAQLKPEKDSDEAVTYSLGKFGQRALDFYSIHVTKESTHPVKPLAQIAGNRYASHPVGKALSDACMGTIASFLSKYQDIIIEHQKVVKGNQKRLESLRELAGKENLEYPSVTLPPQPHTKEGVDAYNEVIARVRMWVNLNLWQKLKLSRDDAKPLLRLKKFPSFPLVERQANEVDWWDMVCNVKKLINEKKEDGKVFWQNLAGYKRQEALRPYLSSEEDRKKGKKFARYQLGDLLLHLEKKHGEDWGKVYDEAWERIDKKVEGLSKHIKLEEERRSEDAQSKAALTDWLRAKASFVIEGLKEADKDEFCRCELKLQKWYGDLRGKPFAIEAENSILDISGFSKQYNCAFIWQKDGVKKLNLYLIINYFKGGKLRFKKIKPEAFEANRFYTVINKKSGEIVPMEVNFNFDDPNLIILPLAFGKRFGREFIWNDLLSLETGSLKLANGRVIEKTLYNRRTRQDEPALFVALTFERREVLDSSNIKPMNLIGVDRGENIPAVIALTDPEGCPLSRFKDSLGNPTHILRIGESYKEKQRTIQAKKEVEQRRAGGYSRKYASKAKNLADDMVRNTARDLLYYAVTQDAMLIFENLSRGFGRQGKRTFMAERQYTRMEDWLTAKLAYEGLPSKTYLSKTLAQYTSKTCSNCGFTITSADYDRVLEKLKKTATGWMTTINGKELKVEGQITYYNRYKRQNVVKDLSVELDRLSEESVNNDISSWTKGRSGEALSLLKKRFSHRPVQEKFVCLNCGFETHADEQAALNIARSWLFLRSQEYKKYQTNKTTGNTDKRAFVETWQSFYRKKLKEVWKPAV

SEQ ID NO: 37571 - protein, 978 aa, synthetic construct
  REGION 1..978: note = engineered CasX variant
QEIKRINKIRRRLVKDSNTKKAGKTGPMKTLLVRVMTPDLRERLENLRKKPENIPQPISNTSRANLNKLLTDYTEMKKAILHVYWEEFQKDPVGLMSRVAQPASKKIDQNKLKPEMDEKGNLTTAGFACSQCGQPLFVYKLEQVSEKGKAYTNYFGRCNVAEHEKLILLAQLKPEKDSDEAVTYSLGKFGQRALDFYSIHVTKESTHPVKPLAQIAGNRYASSPVGKALSDACMGTIASFLSKYQDIIIEHQKVVKGNQKRLESLRELAGKENLEYPSVTLPPQPHTKEGVDAYNEVIARVRMWVNLNLWQKLKLSRDDAKPLLRLKKFPSFPLVERQANEVDWWDMVCNVKKLINEKKEDGKVFWQNLAGYKRQEALRPYLSSEEDRKKGKKFARYQLGDLLLHLEKKHGEDWGKVYDEAWERIDKKVEGLSKHIKLEEERRSEDAQSKAALTDWLRAKASFVIEGLKEADKDEFCRCELKLQKWYGDLRGKPFAIEAENSILDISGFSKQYNCAFIWQKDGVKKLNLYLIINYFKGGKLRFKKIKPEAFEANRFYTVINKKSGEIVPMEVNFNFDDPNLIILPLAFGKRFGREFIWNDLLSLETGSLKLANGRVIEKTLYNRRTRQDEPALFVALTFERREVLDSSNIKPMNLIGVDRGENIPAVIALTDPEGCPLSRFKDSLGNPTHILRIGESYKEKQRTIQAKKEVEQRRAGGYSRKYASKAKNLADDMVRNTARDLLYYAVTQDAMLIFENLSRGFGRQGKRTFMAERQYTRMEDWLTAKLAYEGLPSKTYLSKTLAQYTSKTCSNCGFTITSADYDRVLEKLKKTATGWMTTINGKELKVEGQITYYNRYKRQNVVKDLSVELDRLSEESVNNDISSWTKGRSGEALSLLKKRFSHRPVQEKFVCLNCGFETHADEQAALNIARSWLFLRSQEYKKYQTNKTTGNTDKRAFVETWQSFYRKKLKEVWKPAV

SEQ ID NO: 37572 - protein, 978 aa, synthetic construct
  REGION 1..978: note = engineered CasX variant
QEIKRINKIRRRLVKDSNTKKAGKTGPMKTLLVRVMTPDLRERLENLRKKPENIPQPISNTSRANLNKLLTDYTEMKKAILHVYWEEFQKDPVGLMSRVAQPASKKIDQNKLKPEMDEKGNLTTAGFACSQCGQPLFVYKLEQVSEKGKAYTNYFGRCNVAEHEKLILLAQLKPEKDSDEAVTYSLGKFGQRALDFYSIHVTKESTHPVKPLAQIAGNRYASTPVGKALSDACMGTIASFLSKYQDIIIEHQKVVKGNQKRLESLRELAGKENLEYPSVTLPPQPHTKEGVDAYNEVIARVRMWVNLNLWQKLKLSRDDAKPLLRLKKFPSFPLVERQANEVDWWDMVCNVKKLINEKKEDGKVFWQNLAGYKRQEALRPYLSSEEDRKKGKKFARYQLGDLLLHLEKKHGEDWGKVYDEAWERIDKKVEGLSKHIKLEEERRSEDAQSKAALTDWLRAKASFVIEGLKEADKDEFCRCELKLQKWYGDLRGKPFAIEAENSILDISGFSKQYNCAFIWQKDGVKKLNLYLIINYFKGGKLRFKKIKPEAFEANRFYTVINKKSGEIVPMEVNFNFDDPNLIILPLAFGKRFGREFIWNDLLSLETGSLKLANGRVIEKTLYNRRTRQDEPALFVALTFERREVLDSSNIKPMNLIGVDRGENIPAVIALTDPEGCPLSRFKDSLGNPTHILRIGESYKEKQRTIQAKKEVEQRRAGGYSRKYASKAKNLADDMVRNTARDLLYYAVTQDAMLIFENLSRGFGRQGKRTFMAERQYTRMEDWLTAKLAYEGLPSKTYLSKTLAQYTSKTCSNCGFTITSADYDRVLEKLKKTATGWMTTINGKELKVEGQITYYNRYKRQNVVKDLSVELDRLSEESVNNDISSWTKGRSGEALSLLKKRFSHRPVQEKFVCLNCGFETHADEQAALNIARSWLFLRSQEYKKYQTNKTTGNTDKRAFVETWQSFYRKKLKEVWKPAV

SEQ ID NO: 37573 - protein, 978 aa, synthetic construct
  REGION 1..978: note = engineered CasX variant
QEIKRINKIRRRLVKDSNTKKAGKTGPMKTLLVRVMTPDLRERLENLRKKPENIPQPISNTSRANLNKLLTDYTEMKKAILHVYWEEFQKDPVGLMSRVAQPASKKIDQNKLKPEMDEKGNLTTAGFACSQCGQPLFVYKLEQVSEKGKAYTNYFGRCNVAEHEKLILLAQLKPEKDSDEAVTYSLGKFGQRALDFYSIHVTKESTHPVKPLAQIAGNRYASAPVGKALSDACMGTIASFLSKYQDIIIEHQKVVKGNQKRLESLRELAGKENLEYPSVTLPPQPHTKEGVDAYNEVIARVRMWVNLNLWQKLKLSRDDAKPLLRLKKFPSFPLVERQANEVDWWDMVCNVKKLINEKKEDGKVFWQNLAGYKRQEALRPYLSSEEDRKKGKKFARYQLGDLLLHLEKKHGEDWGKVYDEAWERIDKKVEGLSKHIKLEEERRSEDAQSKAALTDWLRAKASFVIEGLKEADKDEFCRCELKLQKWYGDLRGKPFAIEAENSILDISGFSKQYNCAFIWQKDGVKKLNLYLIINYFKGGKLRFKKIKPEAFEANRFYTVINKKSGEIVPMEVNFNFDDPNLIILPLAFGKRFGREFIWNDLLSLETGSLKLANGRVIEKTLYNRRTRQDEPALFVALTFERREVLDSSNIKPMNLIGVDRGENIPAVIALTDPEGCPLSRFKDSLGNPTHILRIGESYKEKQRTIQAKKEVEQRRAGGYSRKYASKAKNLADDMVRNTARDLLYYAVTQDAMLIFENLSRGFGRQGKRTFMAERQYTRMEDWLTAKLAYEGLPSKTYLSKTLAQYTSKTCSNCGFTITSADYDRVLEKLKKTATGWMTTINGKELKVEGQITYYNRYKRQNVVKDLSVELDRLSEESVNNDISSWTKGRSGEALSLLKKRFSHRPVQEKFVCLNCGFETHADEQAALNIARSWLFLRSQEYKKYQTNKTTGNTDKRAFVETWQSFYRKKLKEVWKPAV

SEQ ID NO: 37574 - protein, 978 aa, synthetic construct
  REGION 1..978: note = engineered CasX variant
QEIKRINKIRRRLVKDSNTKKAGKTGPMKTLLVRVMTPDLRERLENLRKKPENIPQPISNTSRANLNKLLTDYTEMKKAILHVYWEEFQKDPVGLMSRVAQPASKKIDQNKLKPEMDEKGNLTTAGFACSQCGQPLFVYKLEQVSEKGKAYTNYFGRCNVAEHEKLILLAQLKPEKDSDEAVTYSLGKFGQRALDFYSIHVTKESTHPVKPLAQIAGNRYASVPVGKALSDACMGTIASFLSKYQDIIIEHQKVVKGNQKRLESLRELAGKENLEYPSVTLPPQPHTKEGVDAYNEVIARVRMWVNLNLWQKLKLSRDDAKPLLRLKKFPSFPLVERQANEVDWWDMVCNVKKLINEKKEDGKVFWQNLAGYKRQEALRPYLSSEEDRKKGKKFARYQLGDLLLHLEKKHGEDWGKVYDEAWERIDKKVEGLSKHIKLEEERRSEDAQSKAALTDWLRAKASFVIEGLKEADKDEFCRCELKLQKWYGDLRGKPFAIEAENSILDISGFSKQYNCAFIWQKDGVKKLNLYLIINYFKGGKLRFKKIKPEAFEANRFYTVINKKSGEIVPMEVNFNFDDPNLIILPLAFGKRFGREFIWNDLLSLETGSLKLANGRVIEKTLYNRRTRQDEPALFVALTFERREVLDSSNIKPMNLIGVDRGENIPAVIALTDPEGCPLSRFKDSLGNPTHILRIGESYKEKQRTIQAKKEVEQRRAGGYSRKYASKAKNLADDMVRNTARDLLYYAVTQDAMLIFENLSRGFGRQGKRTFMAERQYTRMEDWLTAKLAYEGLPSKTYLSKTLAQYTSKTCSNCGFTITSADYDRVLEKLKKTATGWMTTINGKELKVEGQITYYNRYKRQNVVKDLSVELDRLSEESVNNDISSWTKGRSGEALSLLKKRFSHRPVQEKFVCLNCGFETHADEQAALNIARSWLFLRSQEYKKYQTNKTTGNTDKRAFVETWQSFYRKKLKEVWKPAV

SEQ ID NO: 37575 - protein, 978 aa, synthetic construct
  REGION 1..978: note = engineered CasX variant
QEIKRINKIRRRLVKDSNTKKAGKTGPMKTLLVRVMTPDLRERLENLRKKPENIPQPISNTSRANLNKLLTDYTEMKKAILHVYWEEFQKDPVGLMSRVAQPASKKIDQNKLKPEMDEKGNLTTAGFACSQCGQPLFVYKLEQVSEKGKAYTNYFGRCNVAEHEKLIKLAQLKPEKDSDEAVTYSLGKFGQRALDFYSIHVTKESTHPVKPLAQIAGNRYASGPVGKALSDACMGTIASFLSKYQDIIIEHQKVVKGNQKRLESLRELAGKENLEYPSVTLPPQPHTKEGVDAYNEVIARVRMWVNLNLWQKLKLSRDDAKPLLRLKKFPSFPLVERQANEVDWWDMVCNVKKLINEKKEDGKVFWQNLAGYKRQEALRPYLSSEEDRKKGKKFARYQLGDLLLHLEKKHGEDWGKVYDEAWERIDKKVEGLSKHIKLEEERRSEDAQSKAALTDWLRAKASFVIEGLKEADKDEFCRCELKLQKWYGDLRGKPFAIEAENSILDISGFSKQYNCAFIWQKDGVKKLNLYLIINYFKGGKLRFKKIKPEAFEANRFYTVINKKSGEIVPMEVNFNFDDPNLIILPLAFGKRFGREFIWNDLLSLETGSLKLANGRVIEKTLYNRRTRQDEPALFVALTFERREVLDSSNIKPMNLIGVDRGENIPAVIALTDPEGCPLSRFKDSLGNPTHILRIGESYKEKQRTIQAKKEVEQRRAGGYSRKYASKAKNLADDMVRNTARDLLYYAVTQDAMLIFENLSRGFGRQGKRTFMAERQYTRMEDWLTAKLAYEGLPSKTYLSKTLAQYTSKTCSNCGFTITSADYDRVLEKLKKTATGWMTTINGKELKVEGQITYYNRYKRQNVVKDLSVELDRLSEESVNNDISSWTKGRSGEALSLLKKRFSHRPVQEKFVCLNCGFETHADEQAALNIARSWLFLRSQEYKKYQTNKTTGNTDKRAFVETWQSFYRKKLKEVWKPAV

SEQ ID NO: 37576 - protein, 977 aa, synthetic construct
  REGION 1..977: note = engineered CasX variant
QEIKRINKIRRRLVKDSNTKKAGKTGPMKTLLVRVMTPDLRERLENLRKKPENIPQPISNTSRANLNKLLTDYTEMKKAILHVYWEEFQKDPVGLMSRVAQPASKKIDQNKLKPEMDEKGNLTTAGFACSQCGQPLFVYKLEQVSEKGKAYTNYFGRCNVAEHEKLILLAQLKPEKDSDEAVTYSLGKFGQRALDFYSIHVTKESTHPVKPLAQIAGNRYASPVGKALSDACMGTIASFLSKYQDIIIEHQKVVKGNQKRLESLRELAGKENLEYPSVTLPPQPHTKEGVDAYNEVIARVRMWVNLNLWQKLKLSRDDAKPLLRLKKFPSFPLVERQANEVDWWDMVCNVKKLINEKKEDGKVFWQNLAGYKRQEALRPYLSSEEDRKKGKKFARYQLGDLLLHLEKKHGEDWGKVYDEAWERIDKKVEGLSKHIKLEEERRSEDAQSKAALTDWLRAKASFVIEGLKEADKDEFCRCELKLQKWYGDLRGKPFAIEAENSILDISGFSKQYNCAFIWQKDGVKKLNLYLIINYFKGGKLRFKKIKPEAFEANRFYTVINKKSGEIVPMEVNFNFDDPNLIILPLAFGKRFGREFIWNDLLSLETGSLKLANGRVIEKTLYNRRTRQDEPALFVALTFERREVLDSSNIKPMNLIGVDRGENIPAVIALTDPEGCPLSRFKDSLGNPTHILRIGESYKEKQRTIQAKKEVEQRRAGGYSRKYASKAKNLADDMVRNTARDLLYYAVTQDAMLIFENLSRGFGRQGKRTFMAERQYTRMEDWLTAKLAYEGLPSKTYLSKTLAQYTSKTCSNCGFTITSADYDRVLEKLKKTATGWMTTINGKELKVEGQITYYNRYKRQNVVKDLSVELDRLSEESVNNDISSWTKGRSGEALSLLKKRFSHRPVQEKFVCLNCGFETHADEQAALNIARSWLFLRSQEYKKYQTNKTTGNTDKRAFVETWQSFYRKKLKEVWKPAV

SEQ ID NO: 37577 - protein, 978 aa, synthetic construct
  REGION 1..978: note = engineered CasX variant
QEIKRINKIRRRLVKDSNTKKAGKTGPMKTLLVRVMTPDLRERLENLRKKPENIPQPISNTSRANLNKLLTDYTEMKKAILHVYWEEFQKDPVGLMSRVAQPASKKIDQNKLKPEMDEKGNLTTAGFACSQCGQPLFVYKLEQVSEKGKAYTNYFGRCNVAEHEKLILLAQLKPEKDSDEAVTYSLGKFGQRALDFYSIHVTKESTHPVKPLAQIAGNRYASYPVGKALSDACMGTIASFLSKYQDIIIEHQKVVKGNQKRLESLRELAGKENLEYPSVTLPPQPHTKEGVDAYNEVIARVRMWVNLNLWQKLKLSRDDAKPLLRLKGFPSFPLVERQANEVDWWDMVCNVKKLINEKKEDGKVFWQNLAGYKRQEALRPYLSSEEDRKKGKKFARYQLGDLLLHLEKKHGEDWGKVYDEAWERIDKKVEGLSKHIKLEEERRSEDAQSKAALTDWLRAKASFVIEGLKEADKDEFCRCELKLQKWYGDLRGKPFAIEAENSILDISGFSKQYNCAFIWQKDGVKKLNLYLIINYFKGGKLRFKKIKPEAFEANRFYTVINKKSGEIVPMEVNFNFDDPNLIILPLAFGKRFGREFIWNDLLSLETGSLKLANGRVIEKTLYNRRTRQDEPALFVALTFERREVLDSSNIKPMNLIGVDRGENIPAVIALTDPEGCPLSRFKDSLGNPTHILRIGERYKEKQRTIQAKKEVEQRRAGGYSRKYASKAKNLADDMVRNTARDLLYYAVTQDAMLIFENLSRGFGRQGKRTFMAERQYTRMEDWLTAKLAYEGLPSKTYLSKTLAQYTSKTCSNCGFTITSADYDRVLEKLKKTATGWMTTINGKELKVEGQITYYNRYKRQNVVKDLSVELDRLSEESVNNDISSWTKGRSGEALSLLKKRFSHRPVQEKFVCLNCGFETHADEQAALNIARSWLFLRSQEYKKYQTNKTTGNTDKRAFVETWQSFYRKKLKEVWKPAV

SEQ ID NO: 37578 - protein, 978 aa, synthetic construct
  REGION 1..978: note = engineered CasX variant
QEIKRINKIRRRLVKDSNTKKAGKTGPMKTLLVRVMTPDLRERLENLRKKPENIPQPISNTSRANLNKLLTDYTEMKKAILHVYWEEFQKDPVGLMSRVAQPASKKIDQNKLKPEMDEKGNLTTAGFACSQCGQPLFVYKLEQVSEKGKAYTNYFGRCNVAEHEKLILLAQLKPEKDSDEAVTYSLGKFGQRALDFYSIHVTKESTHPVKPLAQIAGNRYASHPVGKALSDACMGTIASFLSKYQDIIIEHQKVVKGNQKRLESLRELAGKENLEYPSVTLPPQPHTKEGVDAYNEVIARVRMWVNLNLWQKLKLSRDDAKPLLRLKGFPSFPLVERQANEVDWWDMVCNVKKLINEKKEDGKVFWQNLAGYKRQEALRPYLSSEEDRKKGKKFARYQLGDLLLHLEKKHGEDWGKVYDEAWERIDKKVEGLSKHIKLEEERRSEDAQSKAALTDWLRAKASFVIEGLKEADKDEFCRCELKLQKWYGDLRGKPFAIEAENSILDISGFSKQYNCAFIWQKDGVKKLNLYLIINYFKGGKLRFKKIKPEAFEANRFYTVINKKSGEIVPMEVNFNFDDPNLIILPLAFGKRFGREFIWNDLLSLETGSLKLANGRVIEKTLYNRRTRQDEPALFVALTFERREVLDSSNIKPMNLIGVDRGENIPAVIALTDPEGCPLSRFKDSLGNPTHILRIGERYKEKQRTIQAKKEVEQRRAGGYSRKYASKAKNLADDMVRNTARDLLYYAVTQDAMLIFENLSRGFGRQGKRTFMAERQYTRMEDWLTAKLAYEGLPSKTYLSKTLAQYTSKTCSNCGFTITSADYDRVLEKLKKTATGWMTTINGKELKVEGQITYYNRYKRQNVVKDLSVELDRLSEESVNNDISSWTKGRSGEALSLLKKRFSHRPVQEKFVCLNCGFETHADEQAALNIARSWLFLRSQEYKKYQTNKTTGNTDKRAFVETWQSFYRKKLKEVWKPAV

SEQ ID NO: 37579 - protein, 978 aa, synthetic construct
  REGION 1..978: note = engineered CasX variant
QEIKRINKIRRRLVKDSNTKKAGKTGPMKTLLVRVMTPDLRERLENLRKKPENIPQPISNTSRANLNKLLTDYTEMKKAILHVYWEEFQKDPVGLMSRVAQPASKKIDQNKLKPEMDEKGNLTTAGFACSQCGQPLFVYKLEQVSEKGKAYTNYFGRCNVAEHEKLILLAQLKPEKDSDEAVTYSLGKFGQRALDFYSIHVTKESTHPVKPLAQIAGNRYASSPVGKALSDACMGTIASFLSKYQDIIIEHQKVVKGNQKRLESLRELAGKENLEYPSVTLPPQPHTKEGVDAYNEVIARVRMWVNLNLWQKLKLSRDDAKPLLRLKGFPSFPLVERQANEVDWWDMVCNVKKLINEKKEDGKVFWQNLAGYKRQEALRPYLSSEEDRKKGKKFARYQLGDLLLHLEKKHGEDWGKVYDEAWERIDKKVEGLSKHIKLEEERRSEDAQSKAALTDWLRAKASFVIEGLKEADKDEFCRCELKLQKWYGDLRGKPFAIEAENSILDISGFSKQYNCAFIWQKDGVKKLNLYLIINYFKGGKLRFKKIKPEAFEANRFYTVINKKSGEIVPMEVNFNFDDPNLIILPLAFGKRFGREFIWNDLLSLETGSLKLANGRVIEKTLYNRRTRQDEPALFVALTFERREVLDSSNIKPMNLIGVDRGENIPAVIALTDPEGCPLSRFKDSLGNPTHILRIGERYKEKQRTIQAKKEVEQRRAGGYSRKYASKAKNLADDMVRNTARDLLYYAVTQDAMLIFENLSRGFGRQGKRTFMAERQYTRMEDWLTAKLAYEGLPSKTYLSKTLAQYTSKTCSNCGFTITSADYDRVLEKLKKTATGWMTTINGKELKVEGQITYYNRYKRQNVVKDLSVELDRLSEESVNNDISSWTKGRSGEALSLLKKRFSHRPVQEKFVCLNCGFETHADEQAALNIARSWLFLRSQEYKKYQTNKTTGNTDKRAFVETWQSFYRKKLKEVWKPAV

SEQ ID NO: 37580 - protein, 978 aa, synthetic construct
  REGION 1..978: note = engineered CasX variant
QEIKRINKIRRRLVKDSNTKKAGKTGPMKTLLVRVMTPDLRERLENLRKKPENIPQPISNTSRANLNKLLTDYTEMKKAILHVYWEEFQKDPVGLMSRVAQPASKKIDQNKLKPEMDEKGNLTTAGFACSQCGQPLFVYKLEQVSEKGKAYTNYFGRCNVAEHEKLILLAQLKPEKDSDEAVTYSLGKFGQRALDFYSIHVTKESTHPVKPLAQIAGNRYASTPVGKALSDACMGTIASFLSKYQDIIIEHQKVVKGNQKRLESLRELAGKENLEYPSVTLPPQPHTKEGVDAYNEVIARVRMWVNLNLWQKLKLSRDDAKPLLRLKGFPSFPLVERQANEVDWWDMVCNVKKLINEKKEDGKVFWQNLAGYKRQEALRPYLSSEEDRKKGKKFARYQLGDLLLHLEKKHGEDWGKVYDEAWERIDKKVEGLSKHIKLEEERRSEDAQSKAALTDWLRAKASFVIEGLKEADKDEFCRCELKLQKWYGDLRGKPFAIEAENSILDISGFSKQYNCAFIWQKDGVKKLNLYLIINYFKGGKLRFKKIKPEAFEANRFYTVINKKSGEIVPMEVNFNFDDPNLIILPLAFGKRFGREFIWNDLLSLETGSLKLANGRVIEKTLYNRRTRQDEPALFVALTFERREVLDSSNIKPMNLIGVDRGENIPAVIALTDPEGCPLSRFKDSLGNPTHILRIGERYKEKQRTIQAKKEVEQRRAGGYSRKYASKAKNLADDMVRNTARDLLYYAVTQDAMLIFENLSRGFGRQGKRTFMAERQYTRMEDWLTAKLAYEGLPSKTYLSKTLAQYTSKTCSNCGFTITSADYDRVLEKLKKTATGWMTTINGKELKVEGQITYYNRYKRQNVVKDLSVELDRLSEESVNNDISSWTKGRSGEALSLLKKRFSHRPVQEKFVCLNCGFETHADEQAALNIARSWLFLRSQEYKKYQTNKTTGNTDKRAFVETWQSFYRKKLKEVWKPAV

SEQ ID NO: 37581 - protein, 978 aa, synthetic construct
  REGION 1..978: note = engineered CasX variant
QEIKRINKIRRRLVKDSNTKKAGKTGPMKTLLVRVMTPDLRERLENLRKKPENIPQPISNTSRANLNKLLTDYTEMKKAILHVYWEEFQKDPVGLMSRVAQPASKKIDQNKLKPEMDEKGNLTTAGFACSQCGQPLFVYKLEQVSEKGKAYTNYFGRCNVAEHEKLILLAQLKPEKDSDEAVTYSLGKFGQRALDFYSIHVTKESTHPVKPLAQIAGNRYASAPVGKALSDACMGTIASFLSKYQDIIIEHQKVVKGNQKRLESLRELAGKENLEYPSVTLPPQPHTKEGVDAYNEVIARVRMWVNLNLWQKLKLSRDDAKPLLRLKGFPSFPLVERQANEVDWWDMVCNVKKLINEKKEDGKVFWQNLAGYKRQEALRPYLSSEEDRKKGKKFARYQLGDLLLHLEKKHGEDWGKVYDEAWERIDKKVEGLSKHIKLEEERRSEDAQSKAALTDWLRAKASFVIEGLKEADKDEFCRCELKLQKWYGDLRGKPFAIEAENSILDISGFSKQYNCAFIWQKDGVKKLNLYLIINYFKGGKLRFKKIKPEAFEANRFYTVINKKSGEIVPMEVNFNFDDPNLIILPLAFGKRFGREFIWNDLLSLETGSLKLANGRVIEKTLYNRRTRQDEPALFVALTFERREVLDSSNIKPMNLIGVDRGENIPAVIALTDPEGCPLSRFKDSLGNPTHILRIGERYKEKQRTIQAKKEVEQRRAGGYSRKYASKAKNLADDMVRNTARDLLYYAVTQDAMLIFENLSRGFGRQGKRTFMAERQYTRMEDWLTAKLAYEGLPSKTYLSKTLAQYTSKTCSNCGFTITSADYDRVLEKLKKTATGWMTTINGKELKVEGQITYYNRYKRQNVVKDLSVELDRLSEESVNNDISSWTKGRSGEALSLLKKRFSHRPVQEKFVCLNCGFETHADEQAALNIARSWLFLRSQEYKKYQTNKTTGNTDKRAFVETWQSFYRKKLKEVWKPAV

SEQ ID NO: 37582 - protein, 978 aa, synthetic construct
  REGION 1..978: note = engineered CasX variant
QEIKRINKIRRRLVKDSNTKKAGKTGPMKTLLVRVMTPDLRERLENLRKKPENIPQPISNTSRANLNKLLTDYTEMKKAILHVYWEEFQKDPVGLMSRVAQPASKKIDQNKLKPEMDEKGNLTTAGFACSQCGQPLFVYKLEQVSEKGKAYTNYFGRCNVAEHEKLILLAQLKPEKDSDEAVTYSLGKFGQRALDFYSIHVTKESTHPVKPLAQIAGNRYASVPVGKALSDACMGTIASFLSKYQDIIIEHQKVVKGNQKRLESLRELAGKENLEYPSVTLPPQPHTKEGVDAYNEVIARVRMWVNLNLWQKLKLSRDDAKPLLRLKGFPSFPLVERQANEVDWWDMVCNVKKLINEKKEDGKVFWQNLAGYKRQEALRPYLSSEEDRKKGKKFARYQLGDLLLHLEKKHGEDWGKVYDEAWERIDKKVEGLSKHIKLEEERRSEDAQSKAALTDWLRAKASFVIEGLKEADKDEFCRCELKLQKWYGDLRGKPFAIEAENSILDISGFSKQYNCAFIWQKDGVKKLNLYLIINYFKGGKLRFKKIKPEAFEANRFYTVINKKSGEIVPMEVNFNFDDPNLIILPLAFGKRFGREFIWNDLLSLETGSLKLANGRVIEKTLYNRRTRQDEPALFVALTFERREVLDSSNIKPMNLIGVDRGENIPAVIALTDPEGCPLSRFKDSLGNPTHILRIGERYKEKQRTIQAKKEVEQRRAGGYSRKYASKAKNLADDMVRNTARDLLYYAVTQDAMLIFENLSRGFGRQGKRTFMAERQYTRMEDWLTAKLAYEGLPSKTYLSKTLAQYTSKTCSNCGFTITSADYDRVLEKLKKTATGWMTTINGKELKVEGQITYYNRYKRQNVVKDLSVELDRLSEESVNNDISSWTKGRSGEALSLLKKRFSHRPVQEKFVCLNCGFETHADEQAALNIARSWLFLRSQEYKKYQTNKTTGNTDKRAFVETWQSFYRKKLKEVWKPAV

SEQ ID NO: 37583 - protein, 978 aa, synthetic construct
  REGION 1..978: note = engineered CasX variant
QEIKRINKIRRRLVKDSNTKKAGKTGPMKTLLVRVMTPDLRERLENLRKKPENIPQPISNTSRANLNKLLTDYTEMKKAILHVYWEEFQKDPVGLMSRVAQPASKKIDQNKLKPEMDEKGNLTTAGFACSQCGQPLFVYKLEQVSEKGKAYTNYFGRCNVAEHEKLIKLAQLKPEKDSDEAVTYSLGKFGQRALDFYSIHVTKESTHPVKPLAQIAGNRYASGPVGKALSDACMGTIASFLSKYQDIIIEHQKVVKGNQKRLESLRELAGKENLEYPSVTLPPQPHTKEGVDAYNEVIARVRMWVNLNLWQKLKLSRDDAKPLLRLKGFPSFPLVERQANEVDWWDMVCNVKKLINEKKEDGKVFWQNLAGYKRQEALRPYLSSEEDRKKGKKFARYQLGDLLLHLEKKHGEDWGKVYDEAWERIDKKVEGLSKHIKLEEERRSEDAQSKAALTDWLRAKASFVIEGLKEADKDEFCRCELKLQKWYGDLRGKPFAIEAENSILDISGFSKQYNCAFIWQKDGVKKLNLYLIINYFKGGKLRFKKIKPEAFEANRFYTVINKKSGEIVPMEVNFNFDDPNLIILPLAFGKRFGREFIWNDLLSLETGSLKLANGRVIEKTLYNRRTRQDEPALFVALTFERREVLDSSNIKPMNLIGVDRGENIPAVIALTDPEGCPLSRFKDSLGNPTHILRIGERYKEKQRTIQAKKEVEQRRAGGYSRKYASKAKNLADDMVRNTARDLLYYAVTQDAMLIFENLSRGFGRQGKRTFMAERQYTRMEDWLTAKLAYEGLPSKTYLSKTLAQYTSKTCSNCGFTITSADYDRVLEKLKKTATGWMTTINGKELKVEGQITYYNRYKRQNVVKDLSVELDRLSEESVNNDISSWTKGRSGEALSLLKKRFSHRPVQEKFVCLNCGFETHADEQAALNIARSWLFLRSQEYKKYQTNKTTGNTDKRAFVETWQSFYRKKLKEVWKPAV

SEQ ID NO: 37584 - protein, 977 aa, synthetic construct
  REGION 1..977: note = engineered CasX variant
QEIKRINKIRRRLVKDSNTKKAGKTGPMKTLLVRVMTPDLRERLENLRKKPENIPQPISNTSRANLNKLLTDYTEMKKAILHVYWEEFQKDPVGLMSRVAQPASKKIDQNKLKPEMDEKGNLTTAGFACSQCGQPLFVYKLEQVSEKGKAYTNYFGRCNVAEHEKLILLAQLKPEKDSDEAVTYSLGKFGQRALDFYSIHVTKESTHPVKPLAQIAGNRYASPVGKALSDACMGTIASFLSKYQDIIIEHQKVVKGNQKRLESLRELAGKENLEYPSVTLPPQPHTKEGVDAYNEVIARVRMWVNLNLWQKLKLSRDDAKPLLRLKGFPSFPLVERQANEVDWWDMVCNVKKLINEKKEDGKVFWQNLAGYKRQEALRPYLSSEEDRKKGKKFARYQLGDLLLHLEKKHGEDWGKVYDEAWERIDKKVEGLSKHIKLEEERRSEDAQSKAALTDWLRAKASFVIEGLKEADKDEFCRCELKLQKWYGDLRGKPFAIEAENSILDISGFSKQYNCAFIWQKDGVKKLNLYLIINYFKGGKLRFKKIKPEAFEANRFYTVINKKSGEIVPMEVNFNFDDPNLIILPLAFGKRFGREFIWNDLLSLETGSLKLANGRVIEKTLYNRRTRQDEPALFVALTFERREVLDSSNIKPMNLIGVDRGENIPAVIALTDPEGCPLSRFKDSLGNPTHILRIGERYKEKQRTIQAKKEVEQRRAGGYSRKYASKAKNLADDMVRNTARDLLYYAVTQDAMLIFENLSRGFGRQGKRTFMAERQYTRMEDWLTAKLAYEGLPSKTYLSKTLAQYTSKTCSNCGFTITSADYDRVLEKLKKTATGWMTTINGKELKVEGQITYYNRYKRQNVVKDLSVELDRLSEESVNNDISSWTKGRSGEALSLLKKRFSHRPVQEKFVCLNCGFETHADEQAALNIARSWLFLRSQEYKKYQTNKTTGNTDKRAFVETWQSFYRKKLKEVWKPAV

SEQ ID NO: 37585 - protein, 978 aa, synthetic construct
  REGION 1..978: note = engineered CasX variant
QEIKRINKIRRRLVKDSNTKKAGKTGPMKTLLVRVMTPDLRERLENLRKKPENIPQPISNTSRANLNKLLTDYTEMKKAILHVYWEEFQKDPVGLMSRVAQPASKKIDQNKLKPEMDEKGNLTTAGFACSQCGQPLFVYKLEQVSEKGKAYTNYFGRCNVAEHEKLILLAQLKPEKDSDEAVTYSLGKFGQRALDFYSIHVTKESTHPVKPLAQIAGNRYASYPVGKALSDACMGTIASFLSKYQDIIIEHQKVVKGNQKRLESLRELAGKENLEYPSVTLPPQPHTKEGVDAYNEVIARVRMWVNLNLWQKLKLSRDDAKPLLRLKGFPSFPLVERQANEVDWWDMVCNVKKLINEKKEDGKVFWQNLAGYKRQEALRPYLSSEEDRKKGKKFARYQLGDLLLHLEKKHGEDWGKVYDEAWERIDKKVEGLSKHIKLEEERRSEDAQSKAALTDWLRAKASFVIEGLKEADKDEFCRCELKLQKWYGDLRGKPFAIEAENSILDISGFSKQYNCAFIWQKDGVKKLNLYLIINYFKGGKLRFKKIKPEAFEANRFYTVINKKSGEIVPMEVNFNFDDPNLIILPLAFGKRFGREFIWNDLLSLETGSLQLANGRVIEKTLYNRRTRQDEPALFVALTFERREVLDSSNIKPMNLIGVDRGENIPAVIALTDPEGCPLSRFKDSLGNPTHILRIGESYKEKQRTIQAKKEVEQRRAGGYSRKYASKAKNLADDMVRNTARDLLYYAVTQDAMLIFENLSRGFGRQGKRTFMAERQYTRMEDWLTAKLAYEGLPSKTYLSKTLAQYTSKTCSNCGFTITSADYDRVLEKLKKTATGWMTTINGKELKVEGQITYYNRYKRQNVVKDLSVELDRLSEESVNNDISSWTKGRSGEALSLLKKRFSHRPVQEKFVCLNCGFETHADEQAALNIARSWLFLRSQEYKKYQTNKTTGNTDKRAFVETWQSFYRKKLKEVWKPAV

SEQ ID NO: 37586 - protein, 978 aa, synthetic construct
  REGION 1..978: note = engineered CasX variant
QEIKRINKIRRRLVKDSNTKKAGKTGPMKTLLVRVMTPDLRERLENLRKKPENIPQPISNTSRANLNKLLTDYTEMKKAILHVYWEEFQKDPVGLMSRVAQPASKKIDQNKLKPEMDEKGNLTTAGFACSQCGQPLFVYKLEQVSEKGKAYTNYFGRCNVAEHEKLILLAQLKPEKDSDEAVTYSLGKFGQRALDFYSIHVTKESTHPVKPLAQIAGNRYASHPVGKALSDACMGTIASFLSKYQDIIIEHQKVVKGNQKRLESLRELAGKENLEYPSVTLPPQPHTKEGVDAYNEVIARVRMWVNLNLWQKLKLSRDDAKPLLRLKGFPSFPLVERQANEVDWWDMVCNVKKLINEKKEDGKVFWQNLAGYKRQEALRPYLSSEEDRKKGKKFARYQLGDLLLHLEKKHGEDWGKVYDEAWERIDKKVEGLSKHIKLEEERRSEDAQSKAALTDWLRAKASFVIEGLKEADKDEFCRCELKLQKWYGDLRGKPFAIEAENSILDISGFSKQYNCAFIWQKDGVKKLNLYLIINYFKGGKLRFKKIKPEAFEANRFYTVINKKSGEIVPMEVNFNFDDPNLIILPLAFGKRFGREFIWNDLLSLETGSLQLANGRVIEKTLYNRRTRQDEPALFVALTFERREVLDSSNIKPMNLIGVDRGENIPAVIALTDPEGCPLSRFKDSLGNPTHILRIGESYKEKQRTIQAKKEVEQRRAGGYSRKYASKAKNLADDMVRNTARDLLYYAVTQDAMLIFENLSRGFGRQGKRTFMAERQYTRMEDWLTAKLAYEGLPSKTYLSKTLAQYTSKTCSNCGFTITSADYDRVLEKLKKTATGWMTTINGKELKVEGQITYYNRYKRQNVVKDLSVELDRLSEESVNNDISSWTKGRSGEALSLLKKRFSHRPVQEKFVCLNCGFETHADEQAALNIARSWLFLRSQEYKKYQTNKTTGNTDKRAFVETWQSFYRKKLKEVWKPAV

SEQ ID NO: 37587 - protein, 978 aa, synthetic construct
  REGION 1..978: note = engineered CasX variant
QEIKRINKIRRRLVKDSNTKKAGKTGPMKTLLVRVMTPDLRERLENLRKKPENIPQPISNTSRANLNKLLTDYTEMKKAILHVYWEEFQKDPVGLMSRVAQPASKKIDQNKLKPEMDEKGNLTTAGFACSQCGQPLFVYKLEQVSEKGKAYTNYFGRCNVAEHEKLILLAQLKPEKDSDEAVTYSLGKFGQRALDFYSIHVTKESTHPVKPLAQIAGNRYASSPVGKALSDACMGTIASFLSKYQDIIIEHQKVVKGNQKRLESLRELAGKENLEYPSVTLPPQPHTKEGVDAYNEVIARVRMWVNLNLWQKLKLSRDDAKPLLRLKGFPSFPLVERQANEVDWWDMVCNVKKLINEKKEDGKVFWQNLAGYKRQEALRPYLSSEEDRKKGKKFARYQLGDLLLHLEKKHGEDWGKVYDEAWERIDKKVEGLSKHIKLEEERRSEDAQSKAALTDWLRAKASFVIEGLKEADKDEFCRCELKLQKWYGDLRGKPFAIEAENSILDISGFSKQYNCAFIWQKDGVKKLNLYLIINYFKGGKLRFKKIKPEAFEANRFYTVINKKSGEIVPMEVNFNFDDPNLIILPLAFGKRFGREFIWNDLLSLETGSLQLANGRVIEKTLYNRRTRQDEPALFVALTFERREVLDSSNIKPMNLIGVDRGENIPAVIALTDPEGCPLSRFKDSLGNPTHILRIGESYKEKQRTIQAKKEVEQRRAGGYSRKYASKAKNLADDMVRNTARDLLYYAVTQDAMLIFENLSRGFGRQGKRTFMAERQYTRMEDWLTAKLAYEGLPSKTYLSKTLAQYTSKTCSNCGFTITSADYDRVLEKLKKTATGWMTTINGKELKVEGQITYYNRYKRQNVVKDLSVELDRLSEESVNNDISSWTKGRSGEALSLLKKRFSHRPVQEKFVCLNCGFETHADEQAALNIARSWLFLRSQEYKKYQTNKTTGNTDKRAFVETWQSFYRKKLKEVWKPAV

SEQ ID NO: 37588 - protein, 978 aa, synthetic construct
  REGION 1..978: note = engineered CasX variant
QEIKRINKIRRRLVKDSNTKKAGKTGPMKTLLVRVMTPDLRERLENLRKKPENIPQPISNTSRANLNKLLTDYTEMKKAILHVYWEEFQKDPVGLMSRVAQPASKKIDQNKLKPEMDEKGNLTTAGFACSQCGQPLFVYKLEQVSEKGKAYTNYFGRCNVAEHEKLILLAQLKPEKDSDEAVTYSLGKFGQRALDFYSIHVTKESTHPVKPLAQIAGNRYASTPVGKALSDACMGTIASFLSKYQDIIIEHQKVVKGNQKRLESLRELAGKENLEYPSVTLPPQPHTKEGVDAYNEVIARVRMWVNLNLWQKLKLSRDDAKPLLRLKGFPSFPLVERQANEVDWWDMVCNVKKLINEKKEDGKVFWQNLAGYKRQEALRPYLSSEEDRKKGKKFARYQLGDLLLHLEKKHGEDWGKVYDEAWERIDKKVEGLSKHIKLEEERRSEDAQSKAALTDWLRAKASFVIEGLKEADKDEFCRCELKLQKWYGDLRGKPFAIEAENSILDISGFSKQYNCAFIWQKDGVKKLNLYLIINYFKGGKLRFKKIKPEAFEANRFYTVINKKSGEIVPMEVNFNFDDPNLIILPLAFGKRFGREFIWNDLLSLETGSLQLANGRVIEKTLYNRRTRQDEPALFVALTFERREVLDSSNIKPMNLIGVDRGENIPAVIALTDPEGCPLSRFKDSLGNPTHILRIGESYKEKQRTIQAKKEVEQRRAGGYSRKYASKAKNLADDMVRNTARDLLYYAVTQDAMLIFENLSRGFGRQGKRTFMAERQYTRMEDWLTAKLAYEGLPSKTYLSKTLAQYTSKTCSNCGFTITSADYDRVLEKLKKTATGWMTTINGKELKVEGQITYYNRYKRQNVVKDLSVELDRLSEESVNNDISSWTKGRSGEALSLLKKRFSHRPVQEKFVCLNCGFETHADEQAALNIARSWLFLRSQEYKKYQTNKTTGNTDKRAFVETWQSFYRKKLKEVWKPAV

SEQ ID NO: 37589 - protein, 978 aa, synthetic construct
  REGION 1..978: note = engineered CasX variant
QEIKRINKIRRRLVKDSNTKKAGKTGPMKTLLVRVMTPDLRERLENLRKKPENIPQPISNTSRANLNKLLTDYTEMKKAILHVYWEEFQKDPVGLMSRVAQPASKKIDQNKLKPEMDEKGNLTTAGFACSQCGQPLFVYKLEQVSEKGKAYTNYFGRCNVAEHEKLILLAQLKPEKDSDEAVTYSLGKFGQRALDFYSIHVTKESTHPVKPLAQIAGNRYASAPVGKALSDACMGTIASFLSKYQDIIIEHQKVVKGNQKRLESLRELAGKENLEYPSVTLPPQPHTKEGVDAYNEVIARVRMWVNLNLWQKLKLSRDDAKPLLRLKGFPSFPLVERQANEVDWWDMVCNVKKLINEKKEDGKVFWQNLAGYKRQEALRPYLSSEEDRKKGKKFARYQLGDLLLHLEKKHGEDWGKVYDEAWERIDKKVEGLSKHIKLEEERRSEDAQSKAALTDWLRAKASFVIEGLKEADKDEFCRCELKLQKWYGDLRGKPFAIEAENSILDISGFSKQYNCAFIWQKDGVKKLNLYLIINYFKGGKLRFKKIKPEAFEANRFYTVINKKSGEIVPMEVNFNFDDPNLIILPLAFGKRFGREFIWNDLLSLETGSLQLANGRVIEKTLYNRRTRQDEPALFVALTFERREVLDSSNIKPMNLIGVDRGENIPAVIALTDPEGCPLSRFKDSLGNPTHILRIGESYKEKQRTIQAKKEVEQRRAGGYSRKYASKAKNLADDMVRNTARDLLYYAVTQDAMLIFENLSRGFGRQGKRTFMAERQYTRMEDWLTAKLAYEGLPSKTYLSKTLAQYTSKTCSNCGFTITSADYDRVLEKLKKTATGWMTTINGKELKVEGQITYYNRYKRQNVVKDLSVELDRLSEESVNNDISSWTKGRSGEALSLLKKRFSHRPVQEKFVCLNCGFETHADEQAALNIARSWLFLRSQEYKKYQTNKTTGNTDKRAFVETWQSFYRKKLKEVWKPAV

SEQ ID NO: 37590 - protein, 978 aa, synthetic construct
  REGION 1..978: note = engineered CasX variant
QEIKRINKIRRRLVKDSNTKKAGKTGPMKTLLVRVMTPDLRERLENLRKKPENIPQPISNTSRANLNKLLTDYTEMKKAILHVYWEEFQKDPVGLMSRVAQPASKKIDQNKLKPEMDEKGNLTTAGFACSQCGQPLFVYKLEQVSEKGKAYTNYFGRCNVAEHEKLILLAQLKPEKDSDEAVTYSLGKFGQRALDFYSIHVTKESTHPVKPLAQIAGNRYASVPVGKALSDACMGTIASFLSKYQDIIIEHQKVVKGNQKRLESLRELAGKENLEYPSVTLPPQPHTKEGVDAYNEVIARVRMWVNLNLWQKLKLSRDDAKPLLRLKGFPSFPLVERQANEVDWWDMVCNVKKLINEKKEDGKVFWQNLAGYKRQEALRPYLSSEEDRKKGKKFARYQLGDLLLHLEKKHGEDWGKVYDEAWERIDKKVEGLSKHIKLEEERRSEDAQSKAALTDWLRAKASFVIEGLKEADKDEFCRCELKLQKWYGDLRGKPFAIEAENSILDISGFSKQYNCAFIWQKDGVKKLNLYLIINYFKGGKLRFKKIKPEAFEANRFYTVINKKSGEIVPMEVNFNFDDPNLIILPLAFGKRFGREFIWNDLLSLETGSLQLANGRVIEKTLYNRRTRQDEPALFVALTFERREVLDSSNIKPMNLIGVDRGENIPAVIALTDPEGCPLSRFKDSLGNPTHILRIGESYKEKQRTIQAKKEVEQRRAGGYSRKYASKAKNLADDMVRNTARDLLYYAVTQDAMLIFENLSRGFGRQGKRTFMAERQYTRMEDWLTAKLAYEGLPSKTYLSKTLAQYTSKTCSNCGFTITSADYDRVLEKLKKTATGWMTTINGKELKVEGQITYYNRYKRQNVVKDLSVELDRLSEESVNNDISSWTKGRSGEALSLLKKRFSHRPVQEKFVCLNCGFETHADEQAALNIARSWLFLRSQEYKKYQTNKTTGNTDKRAFVETWQSFYRKKLKEVWKPAV

SEQ ID NO: 37591 - protein, 978 aa, synthetic construct
  REGION 1..978: note = engineered CasX variant
QEIKRINKIRRRLVKDSNTKKAGKTGPMKTLLVRVMTPDLRERLENLRKKPENIPQPISNTSRANLNKLLTDYTEMKKAILHVYWEEFQKDPVGLMSRVAQPASKKIDQNKLKPEMDEKGNLTTAGFACSQCGQPLFVYKLEQVSEKGKAYTNYFGRCNVAEHEKLIKLAQLKPEKDSDEAVTYSLGKFGQRALDFYSIHVTKESTHPVKPLAQIAGNRYASGPVGKALSDACMGTIASFLSKYQDIIIEHQKVVKGNQKRLESLRELAGKENLEYPSVTLPPQPHTKEGVDAYNEVIARVRMWVNLNLWQKLKLSRDDAKPLLRLKGFPSFPLVERQANEVDWWDMVCNVKKLINEKKEDGKVFWQNLAGYKRQEALRPYLSSEEDRKKGKKFARYQLGDLLLHLEKKHGEDWGKVYDEAWERIDKKVEGLSKHIKLEEERRSEDAQSKAALTDWLRAKASFVIEGLKEADKDEFCRCELKLQKWYGDLRGKPFAIEAENSILDISGFSKQYNCAFIWQKDGVKKLNLYLIINYFKGGKLRFKKIKPEAFEANRFYTVINKKSGEIVPMEVNFNFDDPNLIILPLAFGKRFGREFIWNDLLSLETGSLQLANGRVIEKTLYNRRTRQDEPALFVALTFERREVLDSSNIKPMNLIGVDRGENIPAVIALTDPEGCPLSRFKDSLGNPTHILRIGESYKEKQRTIQAKKEVEQRRAGGYSRKYASKAKNLADDMVRNTARDLLYYAVTQDAMLIFENLSRGFGRQGKRTFMAERQYTRMEDWLTAKLAYEGLPSKTYLSKTLAQYTSKTCSNCGFTITSADYDRVLEKLKKTATGWMTTINGKELKVEGQITYYNRYKRQNVVKDLSVELDRLSEESVNNDISSWTKGRSGEALSLLKKRFSHRPVQEKFVCLNCGFETHADEQAALNIARSWLFLRSQEYKKYQTNKTTGNTDKRAFVETWQSFYRKKLKEVWKPAV

SEQ ID NO: 37592 - protein, 977 aa, synthetic construct
  REGION 1..977: note = engineered CasX variant
QEIKRINKIRRRLVKDSNTKKAGKTGPMKTLLVRVMTPDLRERLENLRKKPENIPQPISNTSRANLNKLLTDYTEMKKAILHVYWEEFQKDPVGLMSRVAQPASKKIDQNKLKPEMDEKGNLTTAGFACSQCGQPLFVYKLEQVSEKGKAYTNYFGRCNVAEHEKLILLAQLKPEKDSDEAVTYSLGKFGQRALDFYSIHVTKESTHPVKPLAQIAGNRYASPVGKALSDACMGTIASFLSKYQDIIIEHQKVVKGNQKRLESLRELAGKENLEYPSVTLPPQPHTKEGVDAYNEVIARVRMWVNLNLWQKLKLSRDDAKPLLRLKGFPSFPLVERQANEVDWWDMVCNVKKLINEKKEDGKVFWQNLAGYKRQEALRPYLSSEEDRKKGKKFARYQLGDLLLHLEKKHGEDWGKVYDEAWERIDKKVEGLSKHIKLEEERRSEDAQSKAALTDWLRAKASFVIEGLKEADKDEFCRCELKLQKWYGDLRGKPFAIEAENSILDISGFSKQYNCAFIWQKDGVKKLNLYLIINYFKGGKLRFKKIKPEAFEANRFYTVINKKSGEIVPMEVNFNFDDPNLIILPLAFGKRFGREFIWNDLLSLETGSLQLANGRVIEKTLYNRRTRQDEPALFVALTFERREVLDSSNIKPMNLIGVDRGENIPAVIALTDPEGCPLSRFKDSLGNPTHILRIGESYKEKQRTIQAKKEVEQRRAGGYSRKYASKAKNLADDMVRNTARDLLYYAVTQDAMLIFENLSRGFGRQGKRTFMAERQYTRMEDWLTAKLAYEGLPSKTYLSKTLAQYTSKTCSNCGFTITSADYDRVLEKLKKTATGWMTTINGKELKVEGQITYYNRYKRQNVVKDLSVELDRLSEESVNNDISSWTKGRSGEALSLLKKRFSHRPVQEKFVCLNCGFETHADEQAALNIARSWLFLRSQEYKKYQTNKTTGNTDKRAFVETWQSFYRKKLKEVWKPAV

SEQ ID NO: 37593 - protein, 979 aa, synthetic construct
  REGION 1..979: note = engineered CasX variant
QEIKRINKIRRRLVKDSNTKKAGKTGPMKTLLVRVMTPDLRERLENLRKKPENIPQPISNTSRANLNKLLTDYTEMKKAILHVYWEEFQKDPVGLMSRVAQPASKKIDQNKLKPEMDEKGNLTTAGFACSQCGQPLFVYKLEQVSEKGKAYTNYFGRCNVAEHEKLILLAQLKPEKDSDEAVTYSLGKFGQRALDFYSIHVTKESTHPVKPLAQIAGNRYASYPVGKALSDACMGTIASFLSKYQDIIIEHQKVVKGNQKRLESLRELAGKENLEYPSVTLPPQPHTKEGVDAYNEVIARVRMWVNLNLWQKLKLSRDDAKPLLRLKGFPSFPLVERQANEVDWWDMVCNVKKLINEKKEDGKVFWQNLAGYKRQEALRPYLSSEEDRKKGKKFARYQLGDLLLHLEKKHGEDWGKVYDEAWERIDKKVEGLSKHIKLEEERRSEDAQSKAALTDWLRAKASFVIEGLKEADKDEFCRCELKLQKWYGDLRGKPFAIEAENSILDISGFSKQYNCAFIWQKDGVKKLNLYLIINYFKGGKLRFKKIKPEAFEANRFYTVINKKSGEIVPMEVNFNFDDPNLIILPLAFGKRVFGREFIWNDLLSLETGSLKLANGRVIEKTLYNRRTRQDEPALFVALTFERREVLDSSNIKPMNLIGVDRGENIPAVIALTDPEGCPLSRFKDSLGNPTHILRIGESYKEKQRTIQAKKEVEQRRAGGYSRKYASKAKNLADDMVRNTARDLLYYAVTQDAMLIFENLSRGFGRQGKRTFMAERQYTRMEDWLTAKLAYEGLPSKTYLSKTLAQYTSKTCSNCGFTITSADYDRVLEKLKKTATGWMTTINGKELKVEGQITYYNRYKRQNVVKDLSVELDRLSEESVNNDISSWTKGRSGEALSLLKKRFSHRPVQEKFVCLNCGFETHADEQAALNIARSWLFLRSQEYKKYQTNKTTGNTDKRAFVETWQSFYRKKLKEVWKPAV

SEQ ID NO: 37594 - protein, 979 aa, synthetic construct
  REGION 1..979: note = engineered CasX variant
QEIKRINKIRRRLVKDSNTKKAGKTGPMKTLLVRVMTPDLRERLENLRKKPENIPQPISNTSRANLNKLLTDYTEMKKAILHVYWEEFQKDPVGLMSRVAQPASKKIDQNKLKPEMDEKGNLTTAGFACSQCGQPLFVYKLEQVSEKGKAYTNYFGRCNVAEHEKLILLAQLKPEKDSDEAVTYSLGKFGQRALDFYSIHVTKESTHPVKPLAQIAGNRYASHPVGKALSDACMGTIASFLSKYQDIIIEHQKVVKGNQKRLESLRELAGKENLEYPSVTLPPQPHTKEGVDAYNEVIARVRMWVNLNLWQKLKLSRDDAKPLLRLKGFPSFPLVERQANEVDWWDMVCNVKKLINEKKEDGKVFWQNLAGYKRQEALRPYLSSEEDRKKGKKFARYQLGDLLLHLEKKHGEDWGKVYDEAWERIDKKVEGLSKHIKLEEERRSEDAQSKAALTDWLRAKASFVIEGLKEADKDEFCRCELKLQKWYGDLRGKPFAIEAENSILDISGFSKQYNCAFIWQKDGVKKLNLYLIINYFKGGKLRFKKIKPEAFEANRFYTVINKKSGEIVPMEVNFNFDDPNLIILPLAFGKRVFGREFIWNDLLSLETGSLKLANGRVIEKTLYNRRTRQDEPALFVALTFERREVLDSSNIKPMNLIGVDRGENIPAVIALTDPEGCPLSRFKDSLGNPTHILRIGESYKEKQRTIQAKKEVEQRRAGGYSRKYASKAKNLADDMVRNTARDLLYYAVTQDAMLIFENLSRGFGRQGKRTFMAERQYTRMEDWLTAKLAYEGLPSKTYLSKTLAQYTSKTCSNCGFTITSADYDRVLEKLKKTATGWMTTINGKELKVEGQITYYNRYKRQNVVKDLSVELDRLSEESVNNDISSWTKGRSGEALSLLKKRFSHRPVQEKFVCLNCGFETHADEQAALNIARSWLFLRSQEYKKYQTNKTTGNTDKRAFVETWQSFYRKKLKEVWKPAV

SEQ ID NO: 37595 - protein, 979 aa, synthetic construct
  REGION 1..979: note = engineered CasX variant
QEIKRINKIRRRLVKDSNTKKAGKTGPMKTLLVRVMTPDLRERLENLRKKPENIPQPISNTSRANLNKLLTDYTEMKKAILHVYWEEFQKDPVGLMSRVAQPASKKIDQNKLKPEMDEKGNLTTAGFACSQCGQPLFVYKLEQVSEKGKAYTNYFGRCNVAEHEKLILLAQLKPEKDSDEAVTYSLGKFGQRALDFYSIHVTKESTHPVKPLAQIAGNRYASSPVGKALSDACMGTIASFLSKYQDIIIEHQKVVKGNQKRLESLRELAGKENLEYPSVTLPPQPHTKEGVDAYNEVIARVRMWVNLNLWQKLKLSRDDAKPLLRLKGFPSFPLVERQANEVDWWDMVCNVKKLINEKKEDGKVFWQNLAGYKRQEALRPYLSSEEDRKKGKKFARYQLGDLLLHLEKKHGEDWGKVYDEAWERIDKKVEGLSKHIKLEEERRSEDAQSKAALTDWLRAKASFVIEGLKEADKDEFCRCELKLQKWYGDLRGKPFAIEAENSILDISGFSKQYNCAFIWQKDGVKKLNLYLIINYFKGGKLRFKKIKPEAFEANRFYTVINKKSGEIVPMEVNFNFDDPNLIILPLAFGKRVFGREFIWNDLLSLETGSLKLANGRVIEKTLYNRRTRQDEPALFVALTFERREVLDSSNIKPMNLIGVDRGENIPAVIALTDPEGCPLSRFKDSLGNPTHILRIGESYKEKQRTIQAKKEVEQRRAGGYSRKYASKAKNLADDMVRNTARDLLYYAVTQDAMLIFENLSRGFGRQGKRTFMAERQYTRMEDWLTAKLAYEGLPSKTYLSKTLAQYTSKTCSNCGFTITSADYDRVLEKLKKTATGWMTTINGKELKVEGQITYYNRYKRQNVVKDLSVELDRLSEESVNNDISSWTKGRSGEALSLLKKRFSHRPVQEKFVCLNCGFETHADEQAALNIARSWLFLRSQEYKKYQTNKTTGNTDKRAFVETWQSFYRKKLKEVWKPAV

SEQ ID NO: 37596 - protein, 979 aa, synthetic construct
  REGION 1..979: note = engineered CasX variant
QEIKRINKIRRRLVKDSNTKKAGKTGPMKTLLVRVMTPDLRERLENLRKKPENIPQPISNTSRANLNKLLTDYTEMKKAILHVYWEEFQKDPVGLMSRVAQPASKKIDQNKLKPEMDEKGNLTTAGFACSQCGQPLFVYKLEQVSEKGKAYTNYFGRCNVAEHEKLILLAQLKPEKDSDEAVTYSLGKFGQRALDFYSIHVTKESTHPVKPLAQIAGNRYASTPVGKALSDACMGTIASFLSKYQDIIIEHQKVVKGNQKRLESLRELAGKENLEYPSVTLPPQPHTKEGVDAYNEVIARVRMWVNLNLWQKLKLSRDDAKPLLRLKGFPSFPLVERQANEVDWWDMVCNVKKLINEKKEDGKVFWQNLAGYKRQEALRPYLSSEEDRKKGKKFARYQLGDLLLHLEKKHGEDWGKVYDEAWERIDKKVEGLSKHIKLEEERRSEDAQSKAALTDWLRAKASFVIEGLKEADKDEFCRCELKLQKWYGDLRGKPFAIEAENSILDISGFSKQYNCAFIWQKDGVKKLNLYLIINYFKGGKLRFKKIKPEAFEANRFYTVINKKSGEIVPMEVNFNFDDPNLIILPLAFGKRVFGREFIWNDLLSLETGSLKLANGRVIEKTLYNRRTRQDEPALFVALTFERREVLDSSNIKPMNLIGVDRGENIPAVIALTDPEGCPLSRFKDSLGNPTHILRIGESYKEKQRTIQAKKEVEQRRAGGYSRKYASKAKNLADDMVRNTARDLLYYAVTQDAMLIFENLSRGFGRQGKRTFMAERQYTRMEDWLTAKLAYEGLPSKTYLSKTLAQYTSKTCSNCGFTITSADYDRVLEKLKKTATGWMTTINGKELKVEGQITYYNRYKRQNVVKDLSVELDRLSEESVNNDISSWTKGRSGEALSLLKKRFSHRPVQEKFVCLNCGFETHADEQAALNIARSWLFLRSQEYKKYQTNKTTGNTDKRAFVETWQSFYRKKLKEVWKPAV

SEQ ID NO: 37597 - protein, 979 aa, synthetic construct
  REGION 1..979: note = engineered CasX variant
QEIKRINKIRRRLVKDSNTKKAGKTGPMKTLLVRVMTPDLRERLENLRKKPENIPQPISNTSRANLNKLLTDYTEMKKAILHVYWEEFQKDPVGLMSRVAQPASKKIDQNKLKPEMDEKGNLTTAGFACSQCGQPLFVYKLEQVSEKGKAYTNYFGRCNVAEHEKLILLAQLKPEKDSDEAVTYSLGKFGQRALDFYSIHVTKESTHPVKPLAQIAGNRYASAPVGKALSDACMGTIASFLSKYQDIIIEHQKVVKGNQKRLESLRELAGKENLEYPSVTLPPQPHTKEGVDAYNEVIARVRMWVNLNLWQKLKLSRDDAKPLLRLKGFPSFPLVERQANEVDWWDMVCNVKKLINEKKEDGKVFWQNLAGYKRQEALRPYLSSEEDRKKGKKFARYQLGDLLLHLEKKHGEDWGKVYDEAWERIDKKVEGLSKHIKLEEERRSEDAQSKAALTDWLRAKASFVIEGLKEADKDEFCRCELKLQKWYGDLRGKPFAIEAENSILDISGFSKQYNCAFIWQKDGVKKLNLYLIINYFKGGKLRFKKIKPEAFEANRFYTVINKKSGEIVPMEVNFNFDDPNLIILPLAFGKRVFGREFIWNDLLSLETGSLKLANGRVIEKTLYNRRTRQDEPALFVALTFERREVLDSSNIKPMNLIGVDRGENIPAVIALTDPEGCPLSRFKDSLGNPTHILRIGESYKEKQRTIQAKKEVEQRRAGGYSRKYASKAKNLADDMVRNTARDLLYYAVTQDAMLIFENLSRGFGRQGKRTFMAERQYTRMEDWLTAKLAYEGLPSKTYLSKTLAQYTSKTCSNCGFTITSADYDRVLEKLKKTATGWMTTINGKELKVEGQITYYNRYKRQNVVKDLSVELDRLSEESVNNDISSWTKGRSGEALSLLKKRFSHRPVQEKFVCLNCGFETHADEQAALNIARSWLFLRSQEYKKYQTNKTTGNTDKRAFVETWQSFYRKKLKEVWKPAV

SEQ ID NO: 37598 - protein, 979 aa, synthetic construct
  REGION 1..979: note = engineered CasX variant
QEIKRINKIRRRLVKDSNTKKAGKTGPMKTLLVRVMTPDLRERLENLRKKPENIPQPISNTSRANLNKLLTDYTEMKKAILHVYWEEFQKDPVGLMSRVAQPASKKIDQNKLKPEMDEKGNLTTAGFACSQCGQPLFVYKLEQVSEKGKAYTNYFGRCNVAEHEKLILLAQLKPEKDSDEAVTYSLGKFGQRALDFYSIHVTKESTHPVKPLAQIAGNRYASVPVGKALSDACMGTIASFLSKYQDIIIEHQKVVKGNQKRLESLRELAGKENLEYPSVTLPPQPHTKEGVDAYNEVIARVRMWVNLNLWQKLKLSRDDAKPLLRLKGFPSFPLVERQANEVDWWDMVCNVKKLINEKKEDGKVFWQNLAGYKRQEALRPYLSSEEDRKKGKKFARYQLGDLLLHLEKKHGEDWGKVYDEAWERIDKKVEGLSKHIKLEEERRSEDAQSKAALTDWLRAKASFVIEGLKEADKDEFCRCELKLQKWYGDLRGKPFAIEAENSILDISGFSKQYNCAFIWQKDGVKKLNLYLIINYFKGGKLRFKKIKPEAFEANRFYTVINKKSGEIVPMEVNFNFDDPNLIILPLAFGKRVFGREFIWNDLLSLETGSLKLANGRVIEKTLYNRRTRQDEPALFVALTFERREVLDSSNIKPMNLIGVDRGENIPAVIALTDPEGCPLSRFKDSLGNPTHILRIGESYKEKQRTIQAKKEVEQRRAGGYSRKYASKAKNLADDMVRNTARDLLYYAVTQDAMLIFENLSRGFGRQGKRTFMAERQYTRMEDWLTAKLAYEGLPSKTYLSKTLAQYTSKTCSNCGFTITSADYDRVLEKLKKTATGWMTTINGKELKVEGQITYYNRYKRQNVVKDLSVELDRLSEESVNNDISSWTKGRSGEALSLLKKRFSHRPVQEKFVCLNCGFETHADEQAALNIARSWLFLRSQEYKKYQTNKTTGNTDKRAFVETWQSFYRKKLKEVWKPAV

SEQ ID NO: 37599 - protein, 979 aa, synthetic construct
  REGION 1..979: note = engineered CasX variant
QEIKRINKIRRRLVKDSNTKKAGKTGPMKTLLVRVMTPDLRERLENLRKKPENIPQPISNTSRANLNKLLTDYTEMKKAILHVYWEEFQKDPVGLMSRVAQPASKKIDQNKLKPEMDEKGNLTTAGFACSQCGQPLFVYKLEQVSEKGKAYTNYFGRCNVAEHEKLIKLAQLKPEKDSDEAVTYSLGKFGQRALDFYSIHVTKESTHPVKPLAQIAGNRYASGPVGKALSDACMGTIASFLSKYQDIIIEHQKVVKGNQKRLESLRELAGKENLEYPSVTLPPQPHTKEGVDAYNEVIARVRMWVNLNLWQKLKLSRDDAKPLLRLKGFPSFPLVERQANEVDWWDMVCNVKKLINEKKEDGKVFWQNLAGYKRQEALRPYLSSEEDRKKGKKFARYQLGDLLLHLEKKHGEDWGKVYDEAWERIDKKVEGLSKHIKLEEERRSEDAQSKAALTDWLRAKASFVIEGLKEADKDEFCRCELKLQKWYGDLRGKPFAIEAENSILDISGFSKQYNCAFIWQKDGVKKLNLYLIINYFKGGKLRFKKIKPEAFEANRFYTVINKKSGEIVPMEVNFNFDDPNLIILPLAFGKRVFGREFIWNDLLSLETGSLKLANGRVIEKTLYNRRTRQDEPALFVALTFERREVLDSSNIKPMNLIGVDRGENIPAVIALTDPEGCPLSRFKDSLGNPTHILRIGESYKEKQRTIQAKKEVEQRRAGGYSRKYASKAKNLADDMVRNTARDLLYYAVTQDAMLIFENLSRGFGRQGKRTFMAERQYTRMEDWLTAKLAYEGLPSKTYLSKTLAQYTSKTCSNCGFTITSADYDRVLEKLKKTATGWMTTINGKELKVEGQITYYNRYKRQNVVKDLSVELDRLSEESVNNDISSWTKGRSGEALSLLKKRFSHRPVQEKFVCLNCGFETHADEQAALNIARSWLFLRSQEYKKYQTNKTTGNTDKRAFVETWQSFYRKKLKEVWKPAV

SEQ ID NO: 37600 - protein, 978 aa, synthetic construct
  REGION 1..978: note = engineered CasX variant
QEIKRINKIRRRLVKDSNTKKAGKTGPMKTLLVRVMTPDLRERLENLRKKPENIPQPISNTSRANLNKLLTDYTEMKKAILHVYWEEFQKDPVGLMSRVAQPASKKIDQNKLKPEMDEKGNLTTAGFACSQCGQPLFVYKLEQVSEKGKAYTNYFGRCNVAEHEKLILLAQLKPEKDSDEAVTYSLGKFGQRALDFYSIHVTKESTHPVKPLAQIAGNRYASPVGKALSDACMGTIASFLSKYQDIIIEHQKVVKGNQKRLESLRELAGKENLEYPSVTLPPQPHTKEGVDAYNEVIARVRMWVNLNLWQKLKLSRDDAKPLLRLKGFPSFPLVERQANEVDWWDMVCNVKKLINEKKEDGKVFWQNLAGYKRQEALRPYLSSEEDRKKGKKFARYQLGDLLLHLEKKHGEDWGKVYDEAWERIDKKVEGLSKHIKLEEERRSEDAQSKAALTDWLRAKASFVIEGLKEADKDEFCRCELKLQKWYGDLRGKPFAIEAENSILDISGFSKQYNCAFIWQKDGVKKLNLYLIINYFKGGKLRFKKIKPEAFEANRFYTVINKKSGEIVPMEVNFNFDDPNLIILPLAFGKRVFGREFIWNDLLSLETGSLKLANGRVIEKTLYNRRTRQDEPALFVALTFERREVLDSSNIKPMNLIGVDRGENIPAVIALTDPEGCPLSRFKDSLGNPTHILRIGESYKEKQRTIQAKKEVEQRRAGGYSRKYASKAKNLADDMVRNTARDLLYYAVTQDAMLIFENLSRGFGRQGKRTFMAERQYTRMEDWLTAKLAYEGLPSKTYLSKTLAQYTSKTCSNCGFTITSADYDRVLEKLKKTATGWMTTINGKELKVEGQITYYNRYKRQNVVKDLSVELDRLSEESVNNDISSWTKGRSGEALSLLKKRFSHRPVQEKFVCLNCGFETHADEQAALNIARSWLFLRSQEYKKYQTNKTTGNTDKRAFVETWQSFYRKKLKEVWKPAV

SEQ ID NO: 37601 - protein, 979 aa, synthetic construct
  REGION 1..979: note = engineered CasX variant
QEIKRINKIRRRLVKDSNTKKAGKTGPMKTLLVRVMTPDLRERLENLRKKPENIPQPISNTSRANLNKLLTDYTEMKKAILHVYWEEFQKDPVGLMSRVAQPASKKIDQNKLKPEMDEKGNLTTAGFACSQCGQPLFVYKLEQVSEKGKAYTNYFGRCNVAEHEKLILLAQLKPEKDSDEAVTYSLGKFGQRALDFYSIHVTKESTHPVKPLAQIAGNRYASYPVGKALSDACMGTIASFLSKYQDIIIEHQKVVKGNQKRLESLRELAGKENLEYPSVTLPPQPHTKEGVDAYNEVIARVRMWVNLNLWQKLKLSRDDAKPLLRLKGFPSFPLVERQANEVDWWDMVCNVKKLINEKKEDGKVFWQNLAGYKRQEALRPYLSSEEDRKKGKKFARYQLGDLLLHLEKKHGEDWGKVYDEAWERIDKKVEGLSKHIKLEEERRSEDAQSKAALTDWLRAKASFVIEGLKEADKDEFCRCELKLQKWYGDLRGKPFAIEAENSILDISGFSKQYNCAFIWQKDGVKKLNLYLIINYFKGGKLRFKKIKPEAFEANRFYTVINKKSGEIVPMEVNFNFDDPNLIILPLAFGKRVGREFIWNDLLSLETGSLKLANGRVIEKTLYNRRTRQDEPALFVALTFERREVLDSSNIKTPMNLIGVDRGENIPAVIALTDPEGCPLSRFKDSLGNPTHILRIGESYKEKQRTIQAKKEVEQRRAGGYSRKYASKAKNLADDMVRNTARDLLYYAVTQDAMLIFENLSRGFGRQGKRTFMAERQYTRMEDWLTAKLAYEGLPSKTYLSKTLAQYTSKTCSNCGFTITSADYDRVLEKLKKTATGWMTTINGKELKVEGQITYYNRYKRQNVVKDLSVELDRLSEESVNNDISSWTKGRSGEALSLLKKRFSHRPVQEKFVCLNCGFETHADEQAALNIARSWLFLRSQEYKKYQTNKTTGNTDKRAFVETWQSFYRKKLKEVWKPAV

SEQ ID NO: 37602 - protein, 979 aa, synthetic construct
  REGION 1..979: note = engineered CasX variant
QEIKRINKIRRRLVKDSNTKKAGKTGPMKTLLVRVMTPDLRERLENLRKKPENIPQPISNTSRANLNKLLTDYTEMKKAILHVYWEEFQKDPVGLMSRVAQPASKKIDQNKLKPEMDEKGNLTTAGFACSQCGQPLFVYKLEQVSEKGKAYTNYFGRCNVAEHEKLILLAQLKPEKDSDEAVTYSLGKFGQRALDFYSIHVTKESTHPVKPLAQIAGNRYASHPVGKALSDACMGTIASFLSKYQDIIIEHQKVVKGNQKRLESLRELAGKENLEYPSVTLPPQPHTKEGVDAYNEVIARVRMWVNLNLWQKLKLSRDDAKPLLRLKGFPSFPLVERQANEVDWWDMVCNVKKLINEKKEDGKVFWQNLAGYKRQEALRPYLSSEEDRKKGKKFARYQLGDLLLHLEKKHGEDWGKVYDEAWERIDKKVEGLSKHIKLEEERRSEDAQSKAALTDWLRAKASFVIEGLKEADKDEFCRCELKLQKWYGDLRGKPFAIEAENSILDISGFSKQYNCAFIWQKDGVKKLNLYLIINYFKGGKLRFKKIKPEAFEANRFYTVINKKSGEIVPMEVNFNFDDPNLIILPLAFGKRVGREFIWNDLLSLETGSLKLANGRVIEKTLYNRRTRQDEPALFVALTFERREVLDSSNIKTPMNLIGVDRGENIPAVIALTDPEGCPLSRFKDSLGNPTHILRIGESYKEKQRTIQAKKEVEQRRAGGYSRKYASKAKNLADDMVRNTARDLLYYAVTQDAMLIFENLSRGFGRQGKRTFMAERQYTRMEDWLTAKLAYEGLPSKTYLSKTLAQYTSKTCSNCGFTITSADYDRVLEKLKKTATGWMTTINGKELKVEGQITYYNRYKRQNVVKDLSVELDRLSEESVNNDISSWTKGRSGEALSLLKKRFSHRPVQEKFVCLNCGFETHADEQAALNIARSWLFLRSQEYKKYQTNKTTGNTDKRAFVETWQSFYRKKLKEVWKPAV

SEQ ID NO: 37603 - protein, 979 aa, synthetic construct
  REGION 1..979: note = engineered CasX variant
QEIKRINKIRRRLVKDSNTKKAGKTGPMKTLLVRVMTPDLRERLENLRKKPENIPQPISNTSRANLNKLLTDYTEMKKAILHVYWEEFQKDPVGLMSRVAQPASKKIDQNKLKPEMDEKGNLTTAGFACSQCGQPLFVYKLEQVSEKGKAYTNYFGRCNVAEHEKLILLAQLKPEKDSDEAVTYSLGKFGQRALDFYSIHVTKESTHPVKPLAQIAGNRYASSPVGKALSDACMGTIASFLSKYQDIIIEHQKVVKGNQKRLESLRELAGKENLEYPSVTLPPQPHTKEGVDAYNEVIARVRMWVNLNLWQKLKLSRDDAKPLLRLKGFPSFPLVERQANEVDWWDMVCNVKKLINEKKEDGKVFWQNLAGYKRQEALRPYLSSEEDRKKGKKFARYQLGDLLLHLEKKHGEDWGKVYDEAWERIDKKVEGLSKHIKLEEERRSEDAQSKAALTDWLRAKASFVIEGLKEADKDEFCRCELKLQKWYGDLRGKPFAIEAENSILDISGFSKQYNCAFIWQKDGVKKLNLYLIINYFKGGKLRFKKIKPEAFEANRFYTVINKKSGEIVPMEVNFNFDDPNLIILPLAFGKRVGREFIWNDLLSLETGSLKLANGRVIEKTLYNRRTRQDEPALFVALTFERREVLDSSNIKTPMNLIGVDRGENIPAVIALTDPEGCPLSRFKDSLGNPTHILRIGESYKEKQRTIQAKKEVEQRRAGGYSRKYASKAKNLADDMVRNTARDLLYYAVTQDAMLIFENLSRGFGRQGKRTFMAERQYTRMEDWLTAKLAYEGLPSKTYLSKTLAQYTSKTCSNCGFTITSADYDRVLEKLKKTATGWMTTINGKELKVEGQITYYNRYKRQNVVKDLSVELDRLSEESVNNDISSWTKGRSGEALSLLKKRFSHRPVQEKFVCLNCGFETHADEQAALNIARSWLFLRSQEYKKYQTNKTTGNTDKRAFVETWQSFYRKKLKEVWKPAV

SEQ ID NO: 37604 - protein, 979 aa, synthetic construct
  REGION 1..979: note = engineered CasX variant
QEIKRINKIRRRLVKDSNTKKAGKTGPMKTLLVRVMTPDLRERLENLRKKPENIPQPISNTSRANLNKLLTDYTEMKKAILHVYWEEFQKDPVGLMSRVAQPASKKIDQNKLKPEMDEKGNLTTAGFACSQCGQPLFVYKLEQVSEKGKAYTNYFGRCNVAEHEKLILLAQLKPEKDSDEAVTYSLGKFGQRALDFYSIHVTKESTHPVKPLAQIAGNRYASTPVGKALSDACMGTIASFLSKYQDIIIEHQKVVKGNQKRLESLRELAGKENLEYPSVTLPPQPHTKEGVDAYNEVIARVRMWVNLNLWQKLKLSRDDAKPLLRLKGFPSFPLVERQANEVDWWDMVCNVKKLINEKKEDGKVFWQNLAGYKRQEALRPYLSSEEDRKKGKKFARYQLGDLLLHLEKKHGEDWGKVYDEAWERIDKKVEGLSKHIKLEEERRSEDAQSKAALTDWLRAKASFVIEGLKEADKDEFCRCELKLQKWYGDLRGKPFAIEAENSILDISGFSKQYNCAFIWQKDGVKKLNLYLIINYFKGGKLRFKKIKPEAFEANRFYTVINKKSGEIVPMEVNFNFDDPNLIILPLAFGKRVGREFIWNDLLSLETGSLKLANGRVIEKTLYNRRTRQDEPALFVALTFERREVLDSSNIKTPMNLIGVDRGENIPAVIALTDPEGCPLSRFKDSLGNPTHILRIGESYKEKQRTIQAKKEVEQRRAGGYSRKYASKAKNLADDMVRNTARDLLYYAVTQDAMLIFENLSRGFGRQGKRTFMAERQYTRMEDWLTAKLAYEGLPSKTYLSKTLAQYTSKTCSNCGFTITSADYDRVLEKLKKTATGWMTTINGKELKVEGQITYYNRYKRQNVVKDLSVELDRLSEESVNNDISSWTKGRSGEALSLLKKRFSHRPVQEKFVCLNCGFETHADEQAALNIARSWLFLRSQEYKKYQTNKTTGNTDKRAFVETWQSFYRKKLKEVWKPAV

SEQ ID NO: 37605 - protein, 979 aa, synthetic construct
  REGION 1..979: note = engineered CasX variant
QEIKRINKIRRRLVKDSNTKKAGKTGPMKTLLVRVMTPDLRERLENLRKKPENIPQPISNTSRANLNKLLTDYTEMKKAILHVYWEEFQKDPVGLMSRVAQPASKKIDQNKLKPEMDEKGNLTTAGFACSQCGQPLFVYKLEQVSEKGKAYTNYFGRCNVAEHEKLILLAQLKPEKDSDEAVTYSLGKFGQRALDFYSIHVTKESTHPVKPLAQIAGNRYASAPVGKALSDACMGTIASFLSKYQDIIIEHQKVVKGNQKRLESLRELAGKENLEYPSVTLPPQPHTKEGVDAYNEVIARVRMWVNLNLWQKLKLSRDDAKPLLRLKGFPSFPLVERQANEVDWWDMVCNVKKLINEKKEDGKVFWQNLAGYKRQEALRPYLSSEEDRKKGKKFARYQLGDLLLHLEKKHGEDWGKVYDEAWERIDKKVEGLSKHIKLEEERRSEDAQSKAALTDWLRAKASFVIEGLKEADKDEFCRCELKLQKWYGDLRGKPFAIEAENSILDISGFSKQYNCAFIWQKDGVKKLNLYLIINYFKGGKLRFKKIKPEAFEANRFYTVINKKSGEIVPMEVNFNFDDPNLIILPLAFGKRVGREFIWNDLLSLETGSLKLANGRVIEKTLYNRRTRQDEPALFVALTFERREVLDSSNIKTPMNLIGVDRGENIPAVIALTDPEGCPLSRFKDSLGNPTHILRIGESYKEKQRTIQAKKEVEQRRAGGYSRKYASKAKNLADDMVRNTARDLLYYAVTQDAMLIFENLSRGFGRQGKRTFMAERQYTRMEDWLTAKLAYEGLPSKTYLSKTLAQYTSKTCSNCGFTITSADYDRVLEKLKKTATGWMTTINGKELKVEGQITYYNRYKRQNVVKDLSVELDRLSEESVNNDISSWTKGRSGEALSLLKKRFSHRPVQEKFVCLNCGFETHADEQAALNIARSWLFLRSQEYKKYQTNKTTGNTDKRAFVETWQSFYRKKLKEVWKPAV

SEQ ID NO: 37606 - protein, 979 aa, synthetic construct
  REGION 1..979: note = engineered CasX variant
QEIKRINKIRRRLVKDSNTKKAGKTGPMKTLLVRVMTPDLRERLENLRKKPENIPQPISNTSRANLNKLLTDYTEMKKAILHVYWEEFQKDPVGLMSRVAQPASKKIDQNKLKPEMDEKGNLTTAGFACSQCGQPLFVYKLEQVSEKGKAYTNYFGRCNVAEHEKLILLAQLKPEKDSDEAVTYSLGKFGQRALDFYSIHVTKESTHPVKPLAQIAGNRYASVPVGKALSDACMGTIASFLSKYQDIIIEHQKVVKGNQKRLESLRELAGKENLEYPSVTLPPQPHTKEGVDAYNEVIARVRMWVNLNLWQKLKLSRDDAKPLLRLKGFPSFPLVERQANEVDWWDMVCNVKKLINEKKEDGKVFWQNLAGYKRQEALRPYLSSEEDRKKGKKFARYQLGDLLLHLEKKHGEDWGKVYDEAWERIDKKVEGLSKHIKLEEERRSEDAQSKAALTDWLRAKASFVIEGLKEADKDEFCRCELKLQKWYGDLRGKPFAIEAENSILDISGFSKQYNCAFIWQKDGVKKLNLYLIINYFKGGKLRFKKIKPEAFEANRFYTVINKKSGEIVPMEVNFNFDDPNLIILPLAFGKRVGREFIWNDLLSLETGSLKLANGRVIEKTLYNRRTRQDEPALFVALTFERREVLDSSNIKTPMNLIGVDRGENIPAVIALTDPEGCPLSRFKDSLGNPTHILRIGESYKEKQRTIQAKKEVEQRRAGGYSRKYASKAKNLADDMVRNTARDLLYYAVTQDAMLIFENLSRGFGRQGKRTFMAERQYTRMEDWLTAKLAYEGLPSKTYLSKTLAQYTSKTCSNCGFTITSADYDRVLEKLKKTATGWMTTINGKELKVEGQITYYNRYKRQNVVKDLSVELDRLSEESVNNDISSWTKGRSGEALSLLKKRFSHRPVQEKFVCLNCGFETHADEQAALNIARSWLFLRSQEYKKYQTNKTTGNTDKRAFVETWQSFYRKKLKEVWKPAV

SEQ ID NO: 37607 - protein, 979 aa, synthetic construct
  REGION 1..979: note = engineered CasX variant
QEIKRINKIRRRLVKDSNTKKAGKTGPMKTLLVRVMTPDLRERLENLRKKPENIPQPISNTSRANLNKLLTDYTEMKKAILHVYWEEFQKDPVGLMSRVAQPASKKIDQNKLKPEMDEKGNLTTAGFACSQCGQPLFVYKLEQVSEKGKAYTNYFGRCNVAEHEKLIKLAQLKPEKDSDEAVTYSLGKFGQRALDFYSIHVTKESTHPVKPLAQIAGNRYASGPVGKALSDACMGTIASFLSKYQDIIIEHQKVVKGNQKRLESLRELAGKENLEYPSVTLPPQPHTKEGVDAYNEVIARVRMWVNLNLWQKLKLSRDDAKPLLRLKGFPSFPLVERQANEVDWWDMVCNVKKLINEKKEDGKVFWQNLAGYKRQEALRPYLSSEEDRKKGKKFARYQLGDLLLHLEKKHGEDWGKVYDEAWERIDKKVEGLSKHIKLEEERRSEDAQSKAALTDWLRAKASFVIEGLKEADKDEFCRCELKLQKWYGDLRGKPFAIEAENSILDISGFSKQYNCAFIWQKDGVKKLNLYLIINYFKGGKLRFKKIKPEAFEANRFYTVINKKSGEIVPMEVNFNFDDPNLIILPLAFGKRVGREFIWNDLLSLETGSLKLANGRVIEKTLYNRRTRQDEPALFVALTFERREVLDSSNIKTPMNLIGVDRGENIPAVIALTDPEGCPLSRFKDSLGNPTHILRIGESYKEKQRTIQAKKEVEQRRAGGYSRKYASKAKNLADDMVRNTARDLLYYAVTQDAMLIFENLSRGFGRQGKRTFMAERQYTRMEDWLTAKLAYEGLPSKTYLSKTLAQYTSKTCSNCGFTITSADYDRVLEKLKKTATGWMTTINGKELKVEGQITYYNRYKRQNVVKDLSVELDRLSEESVNNDISSWTKGRSGEALSLLKKRFSHRPVQEKFVCLNCGFETHADEQAALNIARSWLFLRSQEYKKYQTNKTTGNTDKRAFVETWQSFYRKKLKEVWKPAV

SEQ ID NO: 37608 - protein, 978 aa, synthetic construct
  REGION 1..978: note = engineered CasX variant
QEIKRINKIRRRLVKDSNTKKAGKTGPMKTLLVRVMTPDLRERLENLRKKPENIPQPISNTSRANLNKLLTDYTEMKKAILHVYWEEFQKDPVGLMSRVAQPASKKIDQNKLKPEMDEKGNLTTAGFACSQCGQPLFVYKLEQVSEKGKAYTNYFGRCNVAEHEKLILLAQLKPEKDSDEAVTYSLGKFGQRALDFYSIHVTKESTHPVKPLAQIAGNRYASPVGKALSDACMGTIASFLSKYQDIIIEHQKVVKGNQKRLESLRELAGKENLEYPSVTLPPQPHTKEGVDAYNEVIARVRMWVNLNLWQKLKLSRDDAKPLLRLKGFPSFPLVERQANEVDWWDMVCNVKKLINEKKEDGKVFWQNLAGYKRQEALRPYLSSEEDRKKGKKFARYQLGDLLLHLEKKHGEDWGKVYDEAWERIDKKVEGLSKHIKLEEERRSEDAQSKAALTDWLRAKASFVIEGLKEADKDEFCRCELKLQKWYGDLRGKPFAIEAENSILDISGFSKQYNCAFIWQKDGVKKLNLYLIINYFKGGKLRFKKIKPEAFEANRFYTVINKKSGEIVPMEVNFNFDDPNLIILPLAFGKRVGREFIWNDLLSLETGSLKLANGRVIEKTLYNRRTRQDEPALFVALTFERREVLDSSNIKTPMNLIGVDRGENIPAVIALTDPEGCPLSRFKDSLGNPTHILRIGESYKEKQRTIQAKKEVEQRRAGGYSRKYASKAKNLADDMVRNTARDLLYYAVTQDAMLIFENLSRGFGRQGKRTFMAERQYTRMEDWLTAKLAYEGLPSKTYLSKTLAQYTSKTCSNCGFTITSADYDRVLEKLKKTATGWMTTINGKELKVEGQITYYNRYKRQNVVKDLSVELDRLSEESVNNDISSWTKGRSGEALSLLKKRFSHRPVQEKFVCLNCGFETHADEQAALNIARSWLFLRSQEYKKYQTNKTTGNTDKRAFVETWQSFYRKKLKEVWKPAV

SEQ ID NO: 37609 - protein, 979 aa, synthetic construct
  REGION 1..979: note = engineered CasX variant
QEIKRINKIRRRLVKDSNTKKAGKTGPMKTLLVRVMTPDLRERLENLRKKPENIPQPISNTSRANLNKLLTDYTEMKKAILHVYWEEFQKDPVGLMSRVAQPASKKIDQNKLKPEMDEKGNLTTAGFACSQCGQPLFVYKLEQVSEKGKAYTNYFGRCNVAEHEKLILLAQLKPEKDSDEAVTYSLGKFGQRALDFYSIHVTKESTHPVKPLAQIAGNRYASYPVGKALSDACMGTIASFLSKYQDIIIEHQKVVKGNQKRLESLRELAGKENLEYPSVTLPPQPHTKEGVDAYNEVIARVRMWVNLNLWQKLKLSRDDAKPLLRLKGFPSFPLVERQANEVDWWDMVCNVKKLINEKKEDGKVFWQNLAGYKRQEALRPYLSSEEDRKKGKKFARYQLGDLLLHLEKKHGEDWGKVYDEAWERIDKKVEGLSKHIKLEEERRSEDAQSKAALTDWLRAKASFVIEGLKEADKDEFCRCELKLQKWYGDLRGKPFAIEAENSILDISGFSKQYNCAFIWQKDGVKKLNLYLIINYFKGGKLRFKKIKPEAFEANRFYTVINKKSGEIVPMEVNFNFDDPNLIILPLAFGKRVGREFIWNDLLSLETGSLKLANGRVIEKTLYNRRTRQDEPALFVALTFERREVLDSSNIKPMSNLIGVDRGENIPAVIALTDPEGCPLSRFKDSLGNPTHILRIGESYKEKQRTIQAKKEVEQRRAGGYSRKYASKAKNLADDMVRNTARDLLYYAVTQDAMLIFENLSRGFGRQGKRTFMAERQYTRMEDWLTAKLAYEGLPSKTYLSKTLAQYTSKTCSNCGFTITSADYDRVLEKLKKTATGWMTTINGKELKVEGQITYYNRYKRQNVVKDLSVELDRLSEESVNNDISSWTKGRSGEALSLLKKRFSHRPVQEKFVCLNCGFETHADEQAALNIARSWLFLRSQEYKKYQTNKTTGNTDKRAFVETWQSFYRKKLKEVWKPAV

SEQ ID NO: 37610 - protein, 979 aa, synthetic construct
  REGION 1..979: note = engineered CasX variant
QEIKRINKIRRRLVKDSNTKKAGKTGPMKTLLVRVMTPDLRERLENLRKKPENIPQPISNTSRANLNKLLTDYTEMKKAILHVYWEEFQKDPVGLMSRVAQPASKKIDQNKLKPEMDEKGNLTTAGFACSQCGQPLFVYKLEQVSEKGKAYTNYFGRCNVAEHEKLILLAQLKPEKDSDEAVTYSLGKFGQRALDFYSIHVTKESTHPVKPLAQIAGNRYASHPVGKALSDACMGTIASFLSKYQDIIIEHQKVVKGNQKRLESLRELAGKENLEYPSVTLPPQPHTKEGVDAYNEVIARVRMWVNLNLWQKLKLSRDDAKPLLRLKGFPSFPLVERQANEVDWWDMVCNVKKLINEKKEDGKVFWQNLAGYKRQEALRPYLSSEEDRKKGKKFARYQLGDLLLHLEKKHGEDWGKVYDEAWERIDKKVEGLSKHIKLEEERRSEDAQSKAALTDWLRAKASFVIEGLKEADKDEFCRCELKLQKWYGDLRGKPFAIEAENSILDISGFSKQYNCAFIWQKDGVKKLNLYLIINYFKGGKLRFKKIKPEAFEANRFYTVINKKSGEIVPMEVNFNFDDPNLIILPLAFGKRVGREFIWNDLLSLETGSLKLANGRVIEKTLYNRRTRQDEPALFVALTFERREVLDSSNIKPMSNLIGVDRGENIPAVIALTDPEGCPLSRFKDSLGNPTHILRIGESYKEKQRTIQAKKEVEQRRAGGYSRKYASKAKNLADDMVRNTARDLLYYAVTQDAMLIFENLSRGFGRQGKRTFMAERQYTRMEDWLTAKLAYEGLPSKTYLSKTLAQYTSKTCSNCGFTITSADYDRVLEKLKKTATGWMTTINGKELKVEGQITYYNRYKRQNVVKDLSVELDRLSEESVNNDISSWTKGRSGEALSLLKKRFSHRPVQEKFVCLNCGFETHADEQAALNIARSWLFLRSQEYKKYQTNKTTGNTDKRAFVETWQSFYRKKLKEVWKPAV

SEQ ID NO: 37611 - protein, 979 aa, synthetic construct
  REGION 1..979: note = engineered CasX variant
QEIKRINKIRRRLVKDSNTKKAGKTGPMKTLLVRVMTPDLRERLENLRKKPENIPQPISNTSRANLNKLLTDYTEMKKAILHVYWEEFQKDPVGLMSRVAQPASKKIDQNKLKPEMDEKGNLTTAGFACSQCGQPLFVYKLEQVSEKGKAYTNYFGRCNVAEHEKLILLAQLKPEKDSDEAVTYSLGKFGQRALDFYSIHVTKESTHPVKPLAQIAGNRYASSPVGKALSDACMGTIASFLSKYQDIIIEHQKVVKGNQKRLESLRELAGKENLEYPSVTLPPQPHTKEGVDAYNEVIARVRMWVNLNLWQKLKLSRDDAKPLLRLKGFPSFPLVERQANEVDWWDMVCNVKKLINEKKEDGKVFWQNLAGYKRQEALRPYLSSEEDRKKGKKFARYQLGDLLLHLEKKHGEDWGKVYDEAWERIDKKVEGLSKHIKLEEERRSEDAQSKAALTDWLRAKASFVIEGLKEADKDEFCRCELKLQKWYGDLRGKPFAIEAENSILDISGFSKQYNCAFIWQKDGVKKLNLYLIINYFKGGKLRFKKIKPEAFEANRFYTVINKKSGEIVPMEVNFNFDDPNLIILPLAFGKRVGREFIWNDLLSLETGSLKLANGRVIEKTLYNRRTRQDEPALFVALTFERREVLDSSNIKPMSNLIGVDRGENIPAVIALTDPEGCPLSRFKDSLGNPTHILRIGESYKEKQRTIQAKKEVEQRRAGGYSRKYASKAKNLADDMVRNTARDLLYYAVTQDAMLIFENLSRGFGRQGKRTFMAERQYTRMEDWLTAKLAYEGLPSKTYLSKTLAQYTSKTCSNCGFTITSADYDRVLEKLKKTATGWMTTINGKELKVEGQITYYNRYKRQNVVKDLSVELDRLSEESVNNDISSWTKGRSGEALSLLKKRFSHRPVQEKFVCLNCGFETHADEQAALNIARSWLFLRSQEYKKYQTNKTTGNTDKRAFVETWQSFYRKKLKEVWKPAV

SEQ ID NO: 37612 - protein, 979 aa, synthetic construct
  REGION 1..979: note = engineered CasX variant
QEIKRINKIRRRLVKDSNTKKAGKTGPMKTLLVRVMTPDLRERLENLRKKPENIPQPISNTSRANLNKLLTDYTEMKKAILHVYWEEFQKDPVGLMSRVAQPASKKIDQNKLKPEMDEKGNLTTAGFACSQCGQPLFVYKLEQVSEKGKAYTNYFGRCNVAEHEKLILLAQLKPEKDSDEAVTYSLGKFGQRALDFYSIHVTKESTHPVKPLAQIAGNRYASTPVGKALSDACMGTIASFLSKYQDIIIEHQKVVKGNQKRLESLRELAGKENLEYPSVTLPPQPHTKEGVDAYNEVIARVRMWVNLNLWQKLKLSRDDAKPLLRLKGFPSFPLVERQANEVDWWDMVCNVKKLINEKKEDGKVFWQNLAGYKRQEALRPYLSSEEDRKKGKKFARYQLGDLLLHLEKKHGEDWGKVYDEAWERIDKKVEGLSKHIKLEEERRSEDAQSKAALTDWLRAKASFVIEGLKEADKDEFCRCELKLQKWYGDLRGKPFAIEAENSILDISGFSKQYNCAFIWQKDGVKKLNLYLIINYFKGGKLRFKKIKPEAFEANRFYTVINKKSGEIVPMEVNFNFDDPNLIILPLAFGKRVGREFIWNDLLSLETGSLKLANGRVIEKTLYNRRTRQDEPALFVALTFERREVLDSSNIKPMSNLIGVDRGENIPAVIALTDPEGCPLSRFKDSLGNPTHILRIGESYKEKQRTIQAKKEVEQRRAGGYSRKYASKAKNLADDMVRNTARDLLYYAVTQDAMLIFENLSRGFGRQGKRTFMAERQYTRMEDWLTAKLAYEGLPSKTYLSKTLAQYTSKTCSNCGFTITSADYDRVLEKLKKTATGWMTTINGKELKVEGQITYYNRYKRQNVVKDLSVELDRLSEESVNNDISSWTKGRSGEALSLLKKRFSHRPVQEKFVCLNCGFETHADEQAALNIARSWLFLRSQEYKKYQTNKTTGNTDKRAFVETWQSFYRKKLKEVWKPAV

SEQ ID NO: 37613 - protein, 979 aa, synthetic construct
  REGION 1..979: note = engineered CasX variant
QEIKRINKIRRRLVKDSNTKKAGKTGPMKTLLVRVMTPDLRERLENLRKKPENIPQPISNTSRANLNKLLTDYTEMKKAILHVYWEEFQKDPVGLMSRVAQPASKKIDQNKLKPEMDEKGNLTTAGFACSQCGQPLFVYKLEQVSEKGKAYTNYFGRCNVAEHEKLILLAQLKPEKDSDEAVTYSLGKFGQRALDFYSIHVTKESTHPVKPLAQIAGNRYASAPVGKALSDACMGTIASFLSKYQDIIIEHQKVVKGNQKRLESLRELAGKENLEYPSVTLPPQPHTKEGVDAYNEVIARVRMWVNLNLWQKLKLSRDDAKPLLRLKGFPSFPLVERQANEVDWWDMVCNVKKLINEKKEDGKVFWQNLAGYKRQEALRPYLSSEEDRKKGKKFARYQLGDLLLHLEKKHGEDWGKVYDEAWERIDKKVEGLSKHIKLEEERRSEDAQSKAALTDWLRAKASFVIEGLKEADKDEFCRCELKLQKWYGDLRGKPFAIEAENSILDISGFSKQYNCAFIWQKDGVKKLNLYLIINYFKGGKLRFKKIKPEAFEANRFYTVINKKSGEIVPMEVNFNFDDPNLIILPLAFGKRVGREFIWNDLLSLETGSLKLANGRVIEKTLYNRRTRQDEPALFVALTFERREVLDSSNIKPMSNLIGVDRGENIPAVIALTDPEGCPLSRFKDSLGNPTHILRIGESYKEKQRTIQAKKEVEQRRAGGYSRKYASKAKNLADDMVRNTARDLLYYAVTQDAMLIFENLSRGFGRQGKRTFMAERQYTRMEDWLTAKLAYEGLPSKTYLSKTLAQYTSKTCSNCGFTITSADYDRVLEKLKKTATGWMTTINGKELKVEGQITYYNRYKRQNVVKDLSVELDRLSEESVNNDISSWTKGRSGEALSLLKKRFSHRPVQEKFVCLNCGFETHADEQAALNIARSWLFLRSQEYKKYQTNKTTGNTDKRAFVETWQSFYRKKLKEVWKPAV

SEQ ID NO: 37614 - protein, 979 aa, synthetic construct
  REGION 1..979: note = engineered CasX variant
QEIKRINKIRRRLVKDSNTKKAGKTGPMKTLLVRVMTPDLRERLENLRKKPENIPQPISNTSRANLNKLLTDYTEMKKAILHVYWEEFQKDPVGLMSRVAQPASKKIDQNKLKPEMDEKGNLTTAGFACSQCGQPLFVYKLEQVSEKGKAYTNYFGRCNVAEHEKLILLAQLKPEKDSDEAVTYSLGKFGQRALDFYSIHVTKESTHPVKPLAQIAGNRYASVPVGKALSDACMGTIASFLSKYQDIIIEHQKVVKGNQKRLESLRELAGKENLEYPSVTLPPQPHTKEGVDAYNEVIARVRMWVNLNLWQKLKLSRDDAKPLLRLKGFPSFPLVERQANEVDWWDMVCNVKKLINEKKEDGKVFWQNLAGYKRQEALRPYLSSEEDRKKGKKFARYQLGDLLLHLEKKHGEDWGKVYDEAWERIDKKVEGLSKHIKLEEERRSEDAQSKAALTDWLRAKASFVIEGLKEADKDEFCRCELKLQKWYGDLRGKPFAIEAENSILDISGFSKQYNCAFIWQKDGVKKLNLYLIINYFKGGKLRFKKIKPEAFEANRFYTVINKKSGEIVPMEVNFNFDDPNLIILPLAFGKRVGREFIWNDLLSLETGSLKLANGRVIEKTLYNRRTRQDEPALFVALTFERREVLDSSNIKPMSNLIGVDRGENIPAVIALTDPEGCPLSRFKDSLGNPTHILRIGESYKEKQRTIQAKKEVEQRRAGGYSRKYASKAKNLADDMVRNTARDLLYYAVTQDAMLIFENLSRGFGRQGKRTFMAERQYTRMEDWLTAKLAYEGLPSKTYLSKTLAQYTSKTCSNCGFTITSADYDRVLEKLKKTATGWMTTINGKELKVEGQITYYNRYKRQNVVKDLSVELDRLSEESVNNDISSWTKGRSGEALSLLKKRFSHRPVQEKFVCLNCGFETHADEQAALNIARSWLFLRSQEYKKYQTNKTTGNTDKRAFVETWQSFYRKKLKEVWKPAV

SEQ ID NO: 37615 - protein, 979 aa, synthetic construct
  REGION 1..979: note = engineered CasX variant
QEIKRINKIRRRLVKDSNTKKAGKTGPMKTLLVRVMTPDLRERLENLRKKPENIPQPISNTSRANLNKLLTDYTEMKKAILHVYWEEFQKDPVGLMSRVAQPASKKIDQNKLKPEMDEKGNLTTAGFACSQCGQPLFVYKLEQVSEKGKAYTNYFGRCNVAEHEKLIKLAQLKPEKDSDEAVTYSLGKFGQRALDFYSIHVTKESTHPVKPLAQIAGNRYASGPVGKALSDACMGTIASFLSKYQDIIIEHQKVVKGNQKRLESLRELAGKENLEYPSVTLPPQPHTKEGVDAYNEVIARVRMWVNLNLWQKLKLSRDDAKPLLRLKGFPSFPLVERQANEVDWWDMVCNVKKLINEKKEDGKVFWQNLAGYKRQEALRPYLSSEEDRKKGKKFARYQLGDLLLHLEKKHGEDWGKVYDEAWERIDKKVEGLSKHIKLEEERRSEDAQSKAALTDWLRAKASFVIEGLKEADKDEFCRCELKLQKWYGDLRGKPFAIEAENSILDISGFSKQYNCAFIWQKDGVKKLNLYLIINYFKGGKLRFKKIKPEAFEANRFYTVINKKSGEIVPMEVNFNFDDPNLIILPLAFGKRVGREFIWNDLLSLETGSLKLANGRVIEKTLYNRRTRQDEPALFVALTFERREVLDSSNIKPMSNLIGVDRGENIPAVIALTDPEGCPLSRFKDSLGNPTHILRIGESYKEKQRTIQAKKEVEQRRAGGYSRKYASKAKNLADDMVRNTARDLLYYAVTQDAMLIFENLSRGFGRQGKRTFMAERQYTRMEDWLTAKLAYEGLPSKTYLSKTLAQYTSKTCSNCGFTITSADYDRVLEKLKKTATGWMTTINGKELKVEGQITYYNRYKRQNVVKDLSVELDRLSEESVNNDISSWTKGRSGEALSLLKKRFSHRPVQEKFVCLNCGFETHADEQAALNIARSWLFLRSQEYKKYQTNKTTGNTDKRAFVETWQSFYRKKLKEVWKPAV

SEQ ID NO: 37616 - protein, 978 aa, synthetic construct
  REGION 1..978: note = engineered CasX variant
QEIKRINKIRRRLVKDSNTKKAGKTGPMKTLLVRVMTPDLRERLENLRKKPENIPQPISNTSRANLNKLLTDYTEMKKAILHVYWEEFQKDPVGLMSRVAQPASKKIDQNKLKPEMDEKGNLTTAGFACSQCGQPLFVYKLEQVSEKGKAYTNYFGRCNVAEHEKLILLAQLKPEKDSDEAVTYSLGKFGQRALDFYSIHVTKESTHPVKPLAQIAGNRYASPVGKALSDACMGTIASFLSKYQDIIIEHQKVVKGNQKRLESLRELAGKENLEYPSVTLPPQPHTKEGVDAYNEVIARVRMWVNLNLWQKLKLSRDDAKPLLRLKGFPSFPLVERQANEVDWWDMVCNVKKLINEKKEDGKVFWQNLAGYKRQEALRPYLSSEEDRKKGKKFARYQLGDLLLHLEKKHGEDWGKVYDEAWERIDKKVEGLSKHIKLEEERRSEDAQSKAALTDWLRAKASFVIEGLKEADKDEFCRCELKLQKWYGDLRGKPFAIEAENSILDISGFSKQYNCAFIWQKDGVKKLNLYLIINYFKGGKLRFKKIKPEAFEANRFYTVINKKSGEIVPMEVNFNFDDPNLIILPLAFGKRVGREFIWNDLLSLETGSLKLANGRVIEKTLYNRRTRQDEPALFVALTFERREVLDSSNIKPMSNLIGVDRGENIPAVIALTDPEGCPLSRFKDSLGNPTHILRIGESYKEKQRTIQAKKEVEQRRAGGYSRKYASKAKNLADDMVRNTARDLLYYAVTQDAMLIFENLSRGFGRQGKRTFMAERQYTRMEDWLTAKLAYEGLPSKTYLSKTLAQYTSKTCSNCGFTITSADYDRVLEKLKKTATGWMTTINGKELKVEGQITYYNRYKRQNVVKDLSVELDRLSEESVNNDISSWTKGRSGEALSLLKKRFSHRPVQEKFVCLNCGFETHADEQAALNIARSWLFLRSQEYKKYQTNKTTGNTDKRAFVETWQSFYRKKLKEVWKPAV

SEQ ID NO: 37617 - protein, 978 aa, synthetic construct
  REGION 1..978: note = engineered CasX variant
QEIKRINKIRRRLVKDSNTKKAGKTGPMKTLLVRVMTPDLRERLENLRKKPENIPQPISNTSRANLNKLLTDYTEMKKAILHVYWEEFQKDPVGLMSRVAQPASKKIDQNKLKPEMDEKGNLTTAGFACSQCGQPLFVYKLEQVSEKGKAYTNYFGRCNVAEHEKLILLAQLKPEKDSDEAVTYSLGKFGQRALDFYSIHVTKESTHPVKPLAQIAGNRYASYPVGKALSDACMGTIASFLSKYQDIIIEHQKVVKGNQKRLESLRELAGKENLEYPSVTLPPQPHTKEGVDAYNEVIARVRMWVNLNLWQKLKLSRDDAKPLLRLKGFPSFPLVERQANEVDWWDMVCNVKKLINEKKEDGKVFWQNLAGYKRQEALRPYLSSEEDRKKGKKFARYQLGDLLLHLEKKHGEDWGKVYDEAWERIDKKVEGLSKHIKLEEERRSEDAQSKAALTDWLRAKASFVIEGLKEADKDEFCRCELKLQKWYGDLRGKPFAIEAENSILDISGFSKQYNCAFIWQKDGVKKLNLYLIINYFKGGKLRFKKIKPEAFEANRFYTVINKKSGEIVPMEVNFNFDDPNLIILPLAFGKRVGREFIWNDLLSLETGSLKLANGRVIEKTLYNRRTRQDEPALFVALTFERREVLDSSNIKPMNLIGVDRGENIPAVIALTDPEGCPLSRFKDSLGNPTHILRIRESYKEKQRTIQAKKEVEQRRAGGYSRKYASKAKNLADDMVRNTARDLLYYAVTQDAMLIFENLSRGFGRQGKRTFMAERQYTRMEDWLTAKLAYEGLPSKTYLSKTLAQYTSKTCSNCGFTITSADYDRVLEKLKKTATGWMTTINGKELKVEGQITYYNRYKRQNVVKDLSVELDRLSEESVNNDISSWTKGRSGEALSLLKKRFSHRPVQEKFVCLNCGFETHADEQAALNIARSWLFLRSQEYKKYQTNKTTGNTDKRAFVETWQSFYRKKLKEVWKPAV

SEQ ID NO: 37618 - protein, 978 aa, synthetic construct
  REGION 1..978: note = engineered CasX variant
QEIKRINKIRRRLVKDSNTKKAGKTGPMKTLLVRVMTPDLRERLENLRKKPENIPQPISNTSRANLNKLLTDYTEMKKAILHVYWEEFQKDPVGLMSRVAQPASKKIDQNKLKPEMDEKGNLTTAGFACSQCGQPLFVYKLEQVSEKGKAYTNYFGRCNVAEHEKLILLAQLKPEKDSDEAVTYSLGKFGQRALDFYSIHVTKESTHPVKPLAQIAGNRYASHPVGKALSDACMGTIASFLSKYQDIIIEHQKVVKGNQKRLESLRELAGKENLEYPSVTLPPQPHTKEGVDAYNEVIARVRMWVNLNLWQKLKLSRDDAKPLLRLKGFPSFPLVERQANEVDWWDMVCNVKKLINEKKEDGKVFWQNLAGYKRQEALRPYLSSEEDRKKGKKFARYQLGDLLLHLEKKHGEDWGKVYDEAWERIDKKVEGLSKHIKLEEERRSEDAQSKAALTDWLRAKASFVIEGLKEADKDEFCRCELKLQKWYGDLRGKPFAIEAENSILDISGFSKQYNCAFIWQKDGVKKLNLYLIINYFKGGKLRFKKIKPEAFEANRFYTVINKKSGEIVPMEVNFNFDDPNLIILPLAFGKRVGREFIWNDLLSLETGSLKLANGRVIEKTLYNRRTRQDEPALFVALTFERREVLDSSNIKPMNLIGVDRGENIPAVIALTDPEGCPLSRFKDSLGNPTHILRIRESYKEKQRTIQAKKEVEQRRAGGYSRKYASKAKNLADDMVRNTARDLLYYAVTQDAMLIFENLSRGFGRQGKRTFMAERQYTRMEDWLTAKLAYEGLPSKTYLSKTLAQYTSKTCSNCGFTITSADYDRVLEKLKKTATGWMTTINGKELKVEGQITYYNRYKRQNVVKDLSVELDRLSEESVNNDISSWTKGRSGEALSLLKKRFSHRPVQEKFVCLNCGFETHADEQAALNIARSWLFLRSQEYKKYQTNKTTGNTDKRAFVETWQSFYRKKLKEVWKPAV

SEQ ID NO: 37619 - protein, 978 aa, synthetic construct
  REGION 1..978: note = engineered CasX variant
QEIKRINKIRRRLVKDSNTKKAGKTGPMKTLLVRVMTPDLRERLENLRKKPENIPQPISNTSRANLNKLLTDYTEMKKAILHVYWEEFQKDPVGLMSRVAQPASKKIDQNKLKPEMDEKGNLTTAGFACSQCGQPLFVYKLEQVSEKGKAYTNYFGRCNVAEHEKLILLAQLKPEKDSDEAVTYSLGKFGQRALDFYSIHVTKESTHPVKPLAQIAGNRYASSPVGKALSDACMGTIASFLSKYQDIIIEHQKVVKGNQKRLESLRELAGKENLEYPSVTLPPQPHTKEGVDAYNEVIARVRMWVNLNLWQKLKLSRDDAKPLLRLKGFPSFPLVERQANEVDWWDMVCNVKKLINEKKEDGKVFWQNLAGYKRQEALRPYLSSEEDRKKGKKFARYQLGDLLLHLEKKHGEDWGKVYDEAWERIDKKVEGLSKHIKLEEERRSEDAQSKAALTDWLRAKASFVIEGLKEADKDEFCRCELKLQKWYGDLRGKPFAIEAENSILDISGFSKQYNCAFIWQKDGVKKLNLYLIINYFKGGKLRFKKIKPEAFEANRFYTVINKKSGEIVPMEVNFNFDDPNLIILPLAFGKRVGREFIWNDLLSLETGSLKLANGRVIEKTLYNRRTRQDEPALFVALTFERREVLDSSNIKPMNLIGVDRGENIPAVIALTDPEGCPLSRFKDSLGNPTHILRIRESYKEKQRTIQAKKEVEQRRAGGYSRKYASKAKNLADDMVRNTARDLLYYAVTQDAMLIFENLSRGFGRQGKRTFMAERQYTRMEDWLTAKLAYEGLPSKTYLSKTLAQYTSKTCSNCGFTITSADYDRVLEKLKKTATGWMTTINGKELKVEGQITYYNRYKRQNVVKDLSVELDRLSEESVNNDISSWTKGRSGEALSLLKKRFSHRPVQEKFVCLNCGFETHADEQAALNIARSWLFLRSQEYKKYQTNKTTGNTDKRAFVETWQSFYRKKLKEVWKPAV

SEQ ID NO: 37620 - protein, 978 aa, synthetic construct
  REGION 1..978: note = engineered CasX variant
QEIKRINKIRRRLVKDSNTKKAGKTGPMKTLLVRVMTPDLRERLENLRKKPENIPQPISNTSRANLNKLLTDYTEMKKAILHVYWEEFQKDPVGLMSRVAQPASKKIDQNKLKPEMDEKGNLTTAGFACSQCGQPLFVYKLEQVSEKGKAYTNYFGRCNVAEHEKLILLAQLKPEKDSDEAVTYSLGKFGQRALDFYSIHVTKESTHPVKPLAQIAGNRYASTPVGKALSDACMGTIASFLSKYQDIIIEHQKVVKGNQKRLESLRELAGKENLEYPSVTLPPQPHTKEGVDAYNEVIARVRMWVNLNLWQKLKLSRDDAKPLLRLKGFPSFPLVERQANEVDWWDMVCNVKKLINEKKEDGKVFWQNLAGYKRQEALRPYLSSEEDRKKGKKFARYQLGDLLLHLEKKHGEDWGKVYDEAWERIDKKVEGLSKHIKLEEERRSEDAQSKAALTDWLRAKASFVIEGLKEADKDEFCRCELKLQKWYGDLRGKPFAIEAENSILDISGFSKQYNCAFIWQKDGVKKLNLYLIINYFKGGKLRFKKIKPEAFEANRFYTVINKKSGEIVPMEVNFNFDDPNLIILPLAFGKRVGREFIWNDLLSLETGSLKLANGRVIEKTLYNRRTRQDEPALFVALTFERREVLDSSNIKPMNLIGVDRGENIPAVIALTDPEGCPLSRFKDSLGNPTHILRIRESYKEKQRTIQAKKEVEQRRAGGYSRKYASKAKNLADDMVRNTARDLLYYAVTQDAMLIFENLSRGFGRQGKRTFMAERQYTRMEDWLTAKLAYEGLPSKTYLSKTLAQYTSKTCSNCGFTITSADYDRVLEKLKKTATGWMTTINGKELKVEGQITYYNRYKRQNVVKDLSVELDRLSEESVNNDISSWTKGRSGEALSLLKKRFSHRPVQEKFVCLNCGFETHADEQAALNIARSWLFLRSQEYKKYQTNKTTGNTDKRAFVETWQSFYRKKLKEVWKPAV

SEQ ID NO: 37621 - protein, 978 aa, synthetic construct
  REGION 1..978: note = engineered CasX variant
QEIKRINKIRRRLVKDSNTKKAGKTGPMKTLLVRVMTPDLRERLENLRKKPENIPQPISNTSRANLNKLLTDYTEMKKAILHVYWEEFQKDPVGLMSRVAQPASKKIDQNKLKPEMDEKGNLTTAGFACSQCGQPLFVYKLEQVSEKGKAYTNYFGRCNVAEHEKLILLAQLKPEKDSDEAVTYSLGKFGQRALDFYSIHVTKESTHPVKPLAQIAGNRYASAPVGKALSDACMGTIASFLSKYQDIIIEHQKVVKGNQKRLESLRELAGKENLEYPSVTLPPQPHTKEGVDAYNEVIARVRMWVNLNLWQKLKLSRDDAKPLLRLKGFPSFPLVERQANEVDWWDMVCNVKKLINEKKEDGKVFWQNLAGYKRQEALRPYLSSEEDRKKGKKFARYQLGDLLLHLEKKHGEDWGKVYDEAWERIDKKVEGLSKHIKLEEERRSEDAQSKAALTDWLRAKASFVIEGLKEADKDEFCRCELKLQKWYGDLRGKPFAIEAENSILDISGFSKQYNCAFIWQKDGVKKLNLYLIINYFKGGKLRFKKIKPEAFEANRFYTVINKKSGEIVPMEVNFNFDDPNLIILPLAFGKRVGREFIWNDLLSLETGSLKLANGRVIEKTLYNRRTRQDEPALFVALTFERREVLDSSNIKPMNLIGVDRGENIPAVIALTDPEGCPLSRFKDSLGNPTHILRIRESYKEKQRTIQAKKEVEQRRAGGYSRKYASKAKNLADDMVRNTARDLLYYAVTQDAMLIFENLSRGFGRQGKRTFMAERQYTRMEDWLTAKLAYEGLPSKTYLSKTLAQYTSKTCSNCGFTITSADYDRVLEKLKKTATGWMTTINGKELKVEGQITYYNRYKRQNVVKDLSVELDRLSEESVNNDISSWTKGRSGEALSLLKKRFSHRPVQEKFVCLNCGFETHADEQAALNIARSWLFLRSQEYKKYQTNKTTGNTDKRAFVETWQSFYRKKLKEVWKPAV

SEQ ID NO: 37622 - protein, 978 aa, synthetic construct
  REGION 1..978: note = engineered CasX variant
QEIKRINKIRRRLVKDSNTKKAGKTGPMKTLLVRVMTPDLRERLENLRKKPENIPQPISNTSRANLNKLLTDYTEMKKAILHVYWEEFQKDPVGLMSRVAQPASKKIDQNKLKPEMDEKGNLTTAGFACSQCGQPLFVYKLEQVSEKGKAYTNYFGRCNVAEHEKLILLAQLKPEKDSDEAVTYSLGKFGQRALDFYSIHVTKESTHPVKPLAQIAGNRYASVPVGKALSDACMGTIASFLSKYQDIIIEHQKVVKGNQKRLESLRELAGKENLEYPSVTLPPQPHTKEGVDAYNEVIARVRMWVNLNLWQKLKLSRDDAKPLLRLKGFPSFPLVERQANEVDWWDMVCNVKKLINEKKEDGKVFWQNLAGYKRQEALRPYLSSEEDRKKGKKFARYQLGDLLLHLEKKHGEDWGKVYDEAWERIDKKVEGLSKHIKLEEERRSEDAQSKAALTDWLRAKASFVIEGLKEADKDEFCRCELKLQKWYGDLRGKPFAIEAENSILDISGFSKQYNCAFIWQKDGVKKLNLYLIINYFKGGKLRFKKIKPEAFEANRFYTVINKKSGEIVPMEVNFNFDDPNLIILPLAFGKRVGREFIWNDLLSLETGSLKLANGRVIEKTLYNRRTRQDEPALFVALTFERREVLDSSNIKPMNLIGVDRGENIPAVIALTDPEGCPLSRFKDSLGNPTHILRIRESYKEKQRTIQAKKEVEQRRAGGYSRKYASKAKNLADDMVRNTARDLLYYAVTQDAMLIFENLSRGFGRQGKRTFMAERQYTRMEDWLTAKLAYEGLPSKTYLSKTLAQYTSKTCSNCGFTITSADYDRVLEKLKKTATGWMTTINGKELKVEGQITYYNRYKRQNVVKDLSVELDRLSEESVNNDISSWTKGRSGEALSLLKKRFSHRPVQEKFVCLNCGFETHADEQAALNIARSWLFLRSQEYKKYQTNKTTGNTDKRAFVETWQSFYRKKLKEVWKPAV

SEQ ID NO: 37623 - protein, 978 aa, synthetic construct
  REGION 1..978: note = engineered CasX variant
QEIKRINKIRRRLVKDSNTKKAGKTGPMKTLLVRVMTPDLRERLENLRKKPENIPQPISNTSRANLNKLLTDYTEMKKAILHVYWEEFQKDPVGLMSRVAQPASKKIDQNKLKPEMDEKGNLTTAGFACSQCGQPLFVYKLEQVSEKGKAYTNYFGRCNVAEHEKLIKLAQLKPEKDSDEAVTYSLGKFGQRALDFYSIHVTKESTHPVKPLAQIAGNRYASGPVGKALSDACMGTIASFLSKYQDIIIEHQKVVKGNQKRLESLRELAGKENLEYPSVTLPPQPHTKEGVDAYNEVIARVRMWVNLNLWQKLKLSRDDAKPLLRLKGFPSFPLVERQANEVDWWDMVCNVKKLINEKKEDGKVFWQNLAGYKRQEALRPYLSSEEDRKKGKKFARYQLGDLLLHLEKKHGEDWGKVYDEAWERIDKKVEGLSKHIKLEEERRSEDAQSKAALTDWLRAKASFVIEGLKEADKDEFCRCELKLQKWYGDLRGKPFAIEAENSILDISGFSKQYNCAFIWQKDGVKKLNLYLIINYFKGGKLRFKKIKPEAFEANRFYTVINKKSGEIVPMEVNFNFDDPNLIILPLAFGKRVGREFIWNDLLSLETGSLKLANGRVIEKTLYNRRTRQDEPALFVALTFERREVLDSSNIKPMNLIGVDRGENIPAVIALTDPEGCPLSRFKDSLGNPTHILRIRESYKEKQRTIQAKKEVEQRRAGGYSRKYASKAKNLADDMVRNTARDLLYYAVTQDAMLIFENLSRGFGRQGKRTFMAERQYTRMEDWLTAKLAYEGLPSKTYLSKTLAQYTSKTCSNCGFTITSADYDRVLEKLKKTATGWMTTINGKELKVEGQITYYNRYKRQNVVKDLSVELDRLSEESVNNDISSWTKGRSGEALSLLKKRFSHRPVQEKFVCLNCGFETHADEQAALNIARSWLFLRSQEYKKYQTNKTTGNTDKRAFVETWQSFYRKKLKEVWKPAV

SEQ ID NO: 37624 - protein, 977 aa, synthetic construct
  REGION 1..977: note = engineered CasX variant
QEIKRINKIRRRLVKDSNTKKAGKTGPMKTLLVRVMTPDLRERLENLRKKPENIPQPISNTSRANLNKLLTDYTEMKKAILHVYWEEFQKDPVGLMSRVAQPASKKIDQNKLKPEMDEKGNLTTAGFACSQCGQPLFVYKLEQVSEKGKAYTNYFGRCNVAEHEKLILLAQLKPEKDSDEAVTYSLGKFGQRALDFYSIHVTKESTHPVKPLAQIAGNRYASPVGKALSDACMGTIASFLSKYQDIIIEHQKVVKGNQKRLESLRELAGKENLEYPSVTLPPQPHTKEGVDAYNEVIARVRMWVNLNLWQKLKLSRDDAKPLLRLKGFPSFPLVERQANEVDWWDMVCNVKKLINEKKEDGKVFWQNLAGYKRQEALRPYLSSEEDRKKGKKFARYQLGDLLLHLEKKHGEDWGKVYDEAWERIDKKVEGLSKHIKLEEERRSEDAQSKAALTDWLRAKASFVIEGLKEADKDEFCRCELKLQKWYGDLRGKPFAIEAENSILDISGFSKQYNCAFIWQKDGVKKLNLYLIINYFKGGKLRFKKIKPEAFEANRFYTVINKKSGEIVPMEVNFNFDDPNLIILPLAFGKRVGREFIWNDLLSLETGSLKLANGRVIEKTLYNRRTRQDEPALFVALTFERREVLDSSNIKPMNLIGVDRGENIPAVIALTDPEGCPLSRFKDSLGNPTHILRIRESYKEKQRTIQAKKEVEQRRAGGYSRKYASKAKNLADDMVRNTARDLLYYAVTQDAMLIFENLSRGFGRQGKRTFMAERQYTRMEDWLTAKLAYEGLPSKTYLSKTLAQYTSKTCSNCGFTITSADYDRVLEKLKKTATGWMTTINGKELKVEGQITYYNRYKRQNVVKDLSVELDRLSEESVNNDISSWTKGRSGEALSLLKKRFSHRPVQEKFVCLNCGFETHADEQAALNIARSWLFLRSQEYKKYQTNKTTGNTDKRAFVETWQSFYRKKLKEVWKPAV

SEQ ID NO: 37625 - protein, 978 aa, synthetic construct
  REGION 1..978: note = engineered CasX variant
QEIKRINKIRRRLVKDSNTKKAGKTGPMKTLLVRVMTPDLRERLENLRKKPENIPQPISNTSRANLNKLLTDYTEMKKAILHVYWEEFQKDPVGLMSRVAQPASKKIDQNKLKPEMDEKGNLTTAGFACSQCGQPLFVYKLEQVSEKGKAYTNYFGRCNVAEHEKLILLAQLKPEKDSDEAVTYSLGKFGQRALDFYSIHVTKESTHPVKPLAQIAGNRYASYPVGKALSDACMGTIASFLSKYQDIIIEHQKVVKGNQKRLESLRELAGKENLEYPSVTLPPQPHTKEGVDAYNEVIARVRMWVNLNLWQKLKLSRDDAKPLLRLKGFPSFPLVERQANEVDWWDMVCNVKKLINEKKEDGKVFWQNLAGYKRQEALRPYLSSEEDRKKGKKFARYQLGDLLLHLEKKHGEDWGKVYDEAWERIDKKVEGLSKHIKLEEERRSEDAQSKAALTDWLRAKASFVIEGLKEADKDEFCRCELKLQKWYGDLRGKPFAIEAENSILDISGFSKQYNCAFIWQKDGVKKLNLYLIINYFKGGKLRFKKIKPEAFEANRFYTVINKKSGEIVPMEVNFNFDDPNLIILPLAFGKRVGREFIWNDLLSLETGSLKLANGRVIEKTLYNRRTRQDEPALFVALTFERREVLDSSNIKPMNLIGVDRGENIPAVIALTDPEGCPLSRFKDSLGNPTHILRIGESYKEKQRTIQAKKEVEQRRAGGYSRKYASKAKNLADDMVRNTARDLLYYAVTQDAMLIFENLSRGFGRQGKRTFSAERQYTRMEDWLTAKLAYEGLPSKTYLSKTLAQYTSKTCSNCGFTITSADYDRVLEKLKKTATGWMTTINGKELKVEGQITYYNRYKRQNVVKDLSVELDRLSEESVNNDISSWTKGRSGEALSLLKKRFSHRPVQEKFVCLNCGFETHADEQAALNIARSWLFLRSQEYKKYQTNKTTGNTDKRAFVETWQSFYRKKLKEVWKPAV

SEQ ID NO: 37626 - protein, 978 aa, synthetic construct
  REGION 1..978: note = engineered CasX variant
QEIKRINKIRRRLVKDSNTKKAGKTGPMKTLLVRVMTPDLRERLENLRKKPENIPQPISNTSRANLNKLLTDYTEMKKAILHVYWEEFQKDPVGLMSRVAQPASKKIDQNKLKPEMDEKGNLTTAGFACSQCGQPLFVYKLEQVSEKGKAYTNYFGRCNVAEHEKLILLAQLKPEKDSDEAVTYSLGKFGQRALDFYSIHVTKESTHPVKPLAQIAGNRYASHPVGKALSDACMGTIASFLSKYQDIIIEHQKVVKGNQKRLESLRELAGKENLEYPSVTLPPQPHTKEGVDAYNEVIARVRMWVNLNLWQKLKLSRDDAKPLLRLKGFPSFPLVERQANEVDWWDMVCNVKKLINEKKEDGKVFWQNLAGYKRQEALRPYLSSEEDRKKGKKFARYQLGDLLLHLEKKHGEDWGKVYDEAWERIDKKVEGLSKHIKLEEERRSEDAQSKAALTDWLRAKASFVIEGLKEADKDEFCRCELKLQKWYGDLRGKPFAIEAENSILDISGFSKQYNCAFIWQKDGVKKLNLYLIINYFKGGKLRFKKIKPEAFEANRFYTVINKKSGEIVPMEVNFNFDDPNLIILPLAFGKRVGREFIWNDLLSLETGSLKLANGRVIEKTLYNRRTRQDEPALFVALTFERREVLDSSNIKPMNLIGVDRGENIPAVIALTDPEGCPLSRFKDSLGNPTHILRIGESYKEKQRTIQAKKEVEQRRAGGYSRKYASKAKNLADDMVRNTARDLLYYAVTQDAMLIFENLSRGFGRQGKRTFSAERQYTRMEDWLTAKLAYEGLPSKTYLSKTLAQYTSKTCSNCGFTITSADYDRVLEKLKKTATGWMTTINGKELKVEGQITYYNRYKRQNVVKDLSVELDRLSEESVNNDISSWTKGRSGEALSLLKKRFSHRPVQEKFVCLNCGFETHADEQAALNIARSWLFLRSQEYKKYQTNKTTGNTDKRAFVETWQSFYRKKLKEVWKPAV

SEQ ID NO: 37627 - protein, 978 aa, synthetic construct
  REGION 1..978: note = engineered CasX variant
QEIKRINKIRRRLVKDSNTKKAGKTGPMKTLLVRVMTPDLRERLENLRKKPENIPQPISNTSRANLNKLLTDYTEMKKAILHVYWEEFQKDPVGLMSRVAQPASKKIDQNKLKPEMDEKGNLTTAGFACSQCGQPLFVYKLEQVSEKGKAYTNYFGRCNVAEHEKLILLAQLKPEKDSDEAVTYSLGKFGQRALDFYSIHVTKESTHPVKPLAQIAGNRYASSPVGKALSDACMGTIASFLSKYQDIIIEHQKVVKGNQKRLESLRELAGKENLEYPSVTLPPQPHTKEGVDAYNEVIARVRMWVNLNLWQKLKLSRDDAKPLLRLKGFPSFPLVERQANEVDWWDMVCNVKKLINEKKEDGKVFWQNLAGYKRQEALRPYLSSEEDRKKGKKFARYQLGDLLLHLEKKHGEDWGKVYDEAWERIDKKVEGLSKHIKLEEERRSEDAQSKAALTDWLRAKASFVIEGLKEADKDEFCRCELKLQKWYGDLRGKPFAIEAENSILDISGFSKQYNCAFIWQKDGVKKLNLYLIINYFKGGKLRFKKIKPEAFEANRFYTVINKKSGEIVPMEVNFNFDDPNLIILPLAFGKRVGREFIWNDLLSLETGSLKLANGRVIEKTLYNRRTRQDEPALFVALTFERREVLDSSNIKPMNLIGVDRGENIPAVIALTDPEGCPLSRFKDSLGNPTHILRIGESYKEKQRTIQAKKEVEQRRAGGYSRKYASKAKNLADDMVRNTARDLLYYAVTQDAMLIFENLSRGFGRQGKRTFSAERQYTRMEDWLTAKLAYEGLPSKTYLSKTLAQYTSKTCSNCGFTITSADYDRVLEKLKKTATGWMTTINGKELKVEGQITYYNRYKRQNVVKDLSVELDRLSEESVNNDISSWTKGRSGEALSLLKKRFSHRPVQEKFVCLNCGFETHADEQAALNIARSWLFLRSQEYKKYQTNKTTGNTDKRAFVETWQSFYRKKLKEVWKPAV

SEQ ID NO: 37628 - protein, 978 aa, synthetic construct
  REGION 1..978: note = engineered CasX variant
QEIKRINKIRRRLVKDSNTKKAGKTGPMKTLLVRVMTPDLRERLENLRKKPENIPQPISNTSRANLNKLLTDYTEMKKAILHVYWEEFQKDPVGLMSRVAQPASKKIDQNKLKPEMDEKGNLTTAGFACSQCGQPLFVYKLEQVSEKGKAYTNYFGRCNVAEHEKLILLAQLKPEKDSDEAVTYSLGKFGQRALDFYSIHVTKESTHPVKPLAQIAGNRYASTPVGKALSDACMGTIASFLSKYQDIIIEHQKVVKGNQKRLESLRELAGKENLEYPSVTLPPQPHTKEGVDAYNEVIARVRMWVNLNLWQKLKLSRDDAKPLLRLKGFPSFPLVERQANEVDWWDMVCNVKKLINEKKEDGKVFWQNLAGYKRQEALRPYLSSEEDRKKGKKFARYQLGDLLLHLEKKHGEDWGKVYDEAWERIDKKVEGLSKHIKLEEERRSEDAQSKAALTDWLRAKASFVIEGLKEADKDEFCRCELKLQKWYGDLRGKPFAIEAENSILDISGFSKQYNCAFIWQKDGVKKLNLYLIINYFKGGKLRFKKIKPEAFEANRFYTVINKKSGEIVPMEVNFNFDDPNLIILPLAFGKRVGREFIWNDLLSLETGSLKLANGRVIEKTLYNRRTRQDEPALFVALTFERREVLDSSNIKPMNLIGVDRGENIPAVIALTDPEGCPLSRFKDSLGNPTHILRIGESYKEKQRTIQAKKEVEQRRAGGYSRKYASKAKNLADDMVRNTARDLLYYAVTQDAMLIFENLSRGFGRQGKRTFSAERQYTRMEDWLTAKLAYEGLPSKTYLSKTLAQYTSKTCSNCGFTITSADYDRVLEKLKKTATGWMTTINGKELKVEGQITYYNRYKRQNVVKDLSVELDRLSEESVNNDISSWTKGRSGEALSLLKKRFSHRPVQEKFVCLNCGFETHADEQAALNIARSWLFLRSQEYKKYQTNKTTGNTDKRAFVETWQSFYRKKLKEVWKPAV

SEQ ID NO: 37629 - protein, 978 aa, synthetic construct
  REGION 1..978: note = engineered CasX variant
QEIKRINKIRRRLVKDSNTKKAGKTGPMKTLLVRVMTPDLRERLENLRKKPENIPQPISNTSRANLNKLLTDYTEMKKAILHVYWEEFQKDPVGLMSRVAQPASKKIDQNKLKPEMDEKGNLTTAGFACSQCGQPLFVYKLEQVSEKGKAYTNYFGRCNVAEHEKLILLAQLKPEKDSDEAVTYSLGKFGQRALDFYSIHVTKESTHPVKPLAQIAGNRYASAPVGKALSDACMGTIASFLSKYQDIIIEHQKVVKGNQKRLESLRELAGKENLEYPSVTLPPQPHTKEGVDAYNEVIARVRMWVNLNLWQKLKLSRDDAKPLLRLKGFPSFPLVERQANEVDWWDMVCNVKKLINEKKEDGKVFWQNLAGYKRQEALRPYLSSEEDRKKGKKFARYQLGDLLLHLEKKHGEDWGKVYDEAWERIDKKVEGLSKHIKLEEERRSEDAQSKAALTDWLRAKASFVIEGLKEADKDEFCRCELKLQKWYGDLRGKPFAIEAENSILDISGFSKQYNCAFIWQKDGVKKLNLYLIINYFKGGKLRFKKIKPEAFEANRFYTVINKKSGEIVPMEVNFNFDDPNLIILPLAFGKRVGREFIWNDLLSLETGSLKLANGRVIEKTLYNRRTRQDEPALFVALTFERREVLDSSNIKPMNLIGVDRGENIPAVIALTDPEGCPLSRFKDSLGNPTHILRIGESYKEKQRTIQAKKEVEQRRAGGYSRKYASKAKNLADDMVRNTARDLLYYAVTQDAMLIFENLSRGFGRQGKRTFSAERQYTRMEDWLTAKLAYEGLPSKTYLSKTLAQYTSKTCSNCGFTITSADYDRVLEKLKKTATGWMTTINGKELKVEGQITYYNRYKRQNVVKDLSVELDRLSEESVNNDISSWTKGRSGEALSLLKKRFSHRPVQEKFVCLNCGFETHADEQAALNIARSWLFLRSQEYKKYQTNKTTGNTDKRAFVETWQSFYRKKLKEVWKPAV

SEQ ID NO: 37630 - protein, 978 aa, synthetic construct
  REGION 1..978: note = engineered CasX variant
QEIKRINKIRRRLVKDSNTKKAGKTGPMKTLLVRVMTPDLRERLENLRKKPENIPQPISNTSRANLNKLLTDYTEMKKAILHVYWEEFQKDPVGLMSRVAQPASKKIDQNKLKPEMDEKGNLTTAGFACSQCGQPLFVYKLEQVSEKGKAYTNYFGRCNVAEHEKLILLAQLKPEKDSDEAVTYSLGKFGQRALDFYSIHVTKESTHPVKPLAQIAGNRYASVPVGKALSDACMGTIASFLSKYQDIIIEHQKVVKGNQKRLESLRELAGKENLEYPSVTLPPQPHTKEGVDAYNEVIARVRMWVNLNLWQKLKLSRDDAKPLLRLKGFPSFPLVERQANEVDWWDMVCNVKKLINEKKEDGKVFWQNLAGYKRQEALRPYLSSEEDRKKGKKFARYQLGDLLLHLEKKHGEDWGKVYDEAWERIDKKVEGLSKHIKLEEERRSEDAQSKAALTDWLRAKASFVIEGLKEADKDEFCRCELKLQKWYGDLRGKPFAIEAENSILDISGFSKQYNCAFIWQKDGVKKLNLYLIINYFKGGKLRFKKIKPEAFEANRFYTVINKKSGEIVPMEVNFNFDDPNLIILPLAFGKRVGREFIWNDLLSLETGSLKLANGRVIEKTLYNRRTRQDEPALFVALTFERREVLDSSNIKPMNLIGVDRGENIPAVIALTDPEGCPLSRFKDSLGNPTHILRIGESYKEKQRTIQAKKEVEQRRAGGYSRKYASKAKNLADDMVRNTARDLLYYAVTQDAMLIFENLSRGFGRQGKRTFSAERQYTRMEDWLTAKLAYEGLPSKTYLSKTLAQYTSKTCSNCGFTITSADYDRVLEKLKKTATGWMTTINGKELKVEGQITYYNRYKRQNVVKDLSVELDRLSEESVNNDISSWTKGRSGEALSLLKKRFSHRPVQEKFVCLNCGFETHADEQAALNIARSWLFLRSQEYKKYQTNKTTGNTDKRAFVETWQSFYRKKLKEVWKPAV

SEQ ID NO: 37631 - protein, 978 aa, synthetic construct
  REGION 1..978: note = engineered CasX variant
QEIKRINKIRRRLVKDSNTKKAGKTGPMKTLLVRVMTPDLRERLENLRKKPENIPQPISNTSRANLNKLLTDYTEMKKAILHVYWEEFQKDPVGLMSRVAQPASKKIDQNKLKPEMDEKGNLTTAGFACSQCGQPLFVYKLEQVSEKGKAYTNYFGRCNVAEHEKLIKLAQLKPEKDSDEAVTYSLGKFGQRALDFYSIHVTKESTHPVKPLAQIAGNRYASGPVGKALSDACMGTIASFLSKYQDIIIEHQKVVKGNQKRLESLRELAGKENLEYPSVTLPPQPHTKEGVDAYNEVIARVRMWVNLNLWQKLKLSRDDAKPLLRLKGFPSFPLVERQANEVDWWDMVCNVKKLINEKKEDGKVFWQNLAGYKRQEALRPYLSSEEDRKKGKKFARYQLGDLLLHLEKKHGEDWGKVYDEAWERIDKKVEGLSKHIKLEEERRSEDAQSKAALTDWLRAKASFVIEGLKEADKDEFCRCELKLQKWYGDLRGKPFAIEAENSILDISGFSKQYNCAFIWQKDGVKKLNLYLIINYFKGGKLRFKKIKPEAFEANRFYTVINKKSGEIVPMEVNFNFDDPNLIILPLAFGKRVGREFIWNDLLSLETGSLKLANGRVIEKTLYNRRTRQDEPALFVALTFERREVLDSSNIKPMNLIGVDRGENIPAVIALTDPEGCPLSRFKDSLGNPTHILRIGESYKEKQRTIQAKKEVEQRRAGGYSRKYASKAKNLADDMVRNTARDLLYYAVTQDAMLIFENLSRGFGRQGKRTFSAERQYTRMEDWLTAKLAYEGLPSKTYLSKTLAQYTSKTCSNCGFTITSADYDRVLEKLKKTATGWMTTINGKELKVEGQITYYNRYKRQNVVKDLSVELDRLSEESVNNDISSWTKGRSGEALSLLKKRFSHRPVQEKFVCLNCGFETHADEQAALNIARSWLFLRSQEYKKYQTNKTTGNTDKRAFVETWQSFYRKKLKEVWKPAV

SEQ ID NO: 37632 - protein, 977 aa, synthetic construct
  REGION 1..977: note = engineered CasX variant
QEIKRINKIRRRLVKDSNTKKAGKTGPMKTLLVRVMTPDLRERLENLRKKPENIPQPISNTSRANLNKLLTDYTEMKKAILHVYWEEFQKDPVGLMSRVAQPASKKIDQNKLKPEMDEKGNLTTAGFACSQCGQPLFVYKLEQVSEKGKAYTNYFGRCNVAEHEKLILLAQLKPEKDSDEAVTYSLGKFGQRALDFYSIHVTKESTHPVKPLAQIAGNRYASPVGKALSDACMGTIASFLSKYQDIIIEHQKVVKGNQKRLESLRELAGKENLEYPSVTLPPQPHTKEGVDAYNEVIARVRMWVNLNLWQKLKLSRDDAKPLLRLKGFPSFPLVERQANEVDWWDMVCNVKKLINEKKEDGKVFWQNLAGYKRQEALRPYLSSEEDRKKGKKFARYQLGDLLLHLEKKHGEDWGKVYDEAWERIDKKVEGLSKHIKLEEERRSEDAQSKAALTDWLRAKASFVIEGLKEADKDEFCRCELKLQKWYGDLRGKPFAIEAENSILDISGFSKQYNCAFIWQKDGVKKLNLYLIINYFKGGKLRFKKIKPEAFEANRFYTVINKKSGEIVPMEVNFNFDDPNLIILPLAFGKRVGREFIWNDLLSLETGSLKLANGRVIEKTLYNRRTRQDEPALFVALTFERREVLDSSNIKPMNLIGVDRGENIPAVIALTDPEGCPLSRFKDSLGNPTHILRIGESYKEKQRTIQAKKEVEQRRAGGYSRKYASKAKNLADDMVRNTARDLLYYAVTQDAMLIFENLSRGFGRQGKRTFSAERQYTRMEDWLTAKLAYEGLPSKTYLSKTLAQYTSKTCSNCGFTITSADYDRVLEKLKKTATGWMTTINGKELKVEGQITYYNRYKRQNVVKDLSVELDRLSEESVNNDISSWTKGRSGEALSLLKKRFSHRPVQEKFVCLNCGFETHADEQAALNIARSWLFLRSQEYKKYQTNKTTGNTDKRAFVETWQSFYRKKLKEVWKPAV

SEQ ID NO: 37633 - protein, 978 aa, synthetic construct
  REGION 1..978: note = engineered CasX variant
QEIKRINKIRRRLVKDSNTKKAGKTGPMKTLLVRVMTPDLRERLENLRKKPENIPQPISNTSRANLNKLLTDYTEMKKAILHVYWEEFQKDPVGLMSRVAQPASKKIDQNKLKPEMDEKGNLTTAGFACSQCGQPLFVYKLEQVSEKGKAYTNYFGRCNVAEHEKLILLAQLKPEKDSDEAVTYSLGKFGQRALDFYSIHVTKESTHPVKPLAQIAGNRYASYPVGKALSDACMGTIASFLSKYQDIIIEHQKVVKGNQKRLESLRELAGKENLEYPSVTLPPQPHTKEGVDAYNEVIARVRMWVNLNLWQKLKLSRDDAKPLLRLKGFPSFPLVERQANEVDWWDMVCNVKKLINEKKEDGKVFWQNLAGYKRQEALRPYLSSEEDRKKGKKFARYQLGDLLLHLEKKHGEDWGKVYDEAWERIDKKVEGLSKHIKLEEERRSEDAQSKAALTDWLRAKASFVIEGLKEADKDEFCRCELKLQKWYGDLRGKPFAIEAENSILDISGFSKQYNCAFIWQKDGVKKLNLYLIINYFKGGKLRFKKIKPEAFEANRFYTVINKKSGEIVPMEVNFNFDDPNLIILPLAFGKRVGREFIWNDLLSLETGSLKLANGRVIEKTLYNRRTRQDEPALFVALTFERREVLDSSNIKPMNLIGVDRGENIPAVIALTDPEGCPLSRFKDSLGNPTHILRIGESYKEKQRTIQAKKEVEQRRAGGYSRKYASKAKNLADDMVRNTARDLLYYAVTQDAMLIFENLSRGFGRQGKRTFMAERQYTRMEDWLTAKLAYEGLPSKTYLSKTLAQYTSKTCSNCGFTITSADYDRVLEKLKKTATGWMTTINGKELKVEGQITYYNRYKRQNVVKDLSVELDRLSEESVNNDISSWDKGRSGEALSLLKKRFSHRPVQEKFVCLNCGFETHADEQAALNIARSWLFLRSQEYKKYQTNKTTGNTDKRAFVETWQSFYRKKLKEVWKPAV

SEQ ID NO: 37634 - protein, 978 aa, synthetic construct
  REGION 1..978: note = engineered CasX variant
QEIKRINKIRRRLVKDSNTKKAGKTGPMKTLLVRVMTPDLRERLENLRKKPENIPQPISNTSRANLNKLLTDYTEMKKAILHVYWEEFQKDPVGLMSRVAQPASKKIDQNKLKPEMDEKGNLTTAGFACSQCGQPLFVYKLEQVSEKGKAYTNYFGRCNVAEHEKLILLAQLKPEKDSDEAVTYSLGKFGQRALDFYSIHVTKESTHPVKPLAQIAGNRYASHPVGKALSDACMGTIASFLSKYQDIIIEHQKVVKGNQKRLESLRELAGKENLEYPSVTLPPQPHTKEGVDAYNEVIARVRMWVNLNLWQKLKLSRDDAKPLLRLKGFPSFPLVERQANEVDWWDMVCNVKKLINEKKEDGKVFWQNLAGYKRQEALRPYLSSEEDRKKGKKFARYQLGDLLLHLEKKHGEDWGKVYDEAWERIDKKVEGLSKHIKLEEERRSEDAQSKAALTDWLRAKASFVIEGLKEADKDEFCRCELKLQKWYGDLRGKPFAIEAENSILDISGFSKQYNCAFIWQKDGVKKLNLYLIINYFKGGKLRFKKIKPEAFEANRFYTVINKKSGEIVPMEVNFNFDDPNLIILPLAFGKRVGREFIWNDLLSLETGSLKLANGRVIEKTLYNRRTRQDEPALFVALTFERREVLDSSNIKPMNLIGVDRGENIPAVIALTDPEGCPLSRFKDSLGNPTHILRIGESYKEKQRTIQAKKEVEQRRAGGYSRKYASKAKNLADDMVRNTARDLLYYAVTQDAMLIFENLSRGFGRQGKRTFMAERQYTRMEDWLTAKLAYEGLPSKTYLSKTLAQYTSKTCSNCGFTITSADYDRVLEKLKKTATGWMTTINGKELKVEGQITYYNRYKRQNVVKDLSVELDRLSEESVNNDISSWDKGRSGEALSLLKKRFSHRPVQEKFVCLNCGFETHADEQAALNIARSWLFLRSQEYKKYQTNKTTGNTDKRAFVETWQSFYRKKLKEVWKPAV

SEQ ID NO: 37635 - protein, 978 aa, synthetic construct
  REGION 1..978: note = engineered CasX variant
QEIKRINKIRRRLVKDSNTKKAGKTGPMKTLLVRVMTPDLRERLENLRKKPENIPQPISNTSRANLNKLLTDYTEMKKAILHVYWEEFQKDPVGLMSRVAQPASKKIDQNKLKPEMDEKGNLTTAGFACSQCGQPLFVYKLEQVSEKGKAYTNYFGRCNVAEHEKLILLAQLKPEKDSDEAVTYSLGKFGQRALDFYSIHVTKESTHPVKPLAQIAGNRYASSPVGKALSDACMGTIASFLSKYQDIIIEHQKVVKGNQKRLESLRELAGKENLEYPSVTLPPQPHTKEGVDAYNEVIARVRMWVNLNLWQKLKLSRDDAKPLLRLKGFPSFPLVERQANEVDWWDMVCNVKKLINEKKEDGKVFWQNLAGYKRQEALRPYLSSEEDRKKGKKFARYQLGDLLLHLEKKHGEDWGKVYDEAWERIDKKVEGLSKHIKLEEERRSEDAQSKAALTDWLRAKASFVIEGLKEADKDEFCRCELKLQKWYGDLRGKPFAIEAENSILDISGFSKQYNCAFIWQKDGVKKLNLYLIINYFKGGKLRFKKIKPEAFEANRFYTVINKKSGEIVPMEVNFNFDDPNLIILPLAFGKRVGREFIWNDLLSLETGSLKLANGRVIEKTLYNRRTRQDEPALFVALTFERREVLDSSNIKPMNLIGVDRGENIPAVIALTDPEGCPLSRFKDSLGNPTHILRIGESYKEKQRTIQAKKEVEQRRAGGYSRKYASKAKNLADDMVRNTARDLLYYAVTQDAMLIFENLSRGFGRQGKRTFMAERQYTRMEDWLTAKLAYEGLPSKTYLSKTLAQYTSKTCSNCGFTITSADYDRVLEKLKKTATGWMTTINGKELKVEGQITYYNRYKRQNVVKDLSVELDRLSEESVNNDISSWDKGRSGEALSLLKKRFSHRPVQEKFVCLNCGFETHADEQAALNIARSWLFLRSQEYKKYQTNKTTGNTDKRAFVETWQSFYRKKLKEVWKPAV

SEQ ID NO: 37636 - protein, 978 aa, synthetic construct
  REGION 1..978: note = engineered CasX variant
QEIKRINKIRRRLVKDSNTKKAGKTGPMKTLLVRVMTPDLRERLENLRKKPENIPQPISNTSRANLNKLLTDYTEMKKAILHVYWEEFQKDPVGLMSRVAQPASKKIDQNKLKPEMDEKGNLTTAGFACSQCGQPLFVYKLEQVSEKGKAYTNYFGRCNVAEHEKLILLAQLKPEKDSDEAVTYSLGKFGQRALDFYSIHVTKESTHPVKPLAQIAGNRYASTPVGKALSDACMGTIASFLSKYQDIIIEHQKVVKGNQKRLESLRELAGKENLEYPSVTLPPQPHTKEGVDAYNEVIARVRMWVNLNLWQKLKLSRDDAKPLLRLKGFPSFPLVERQANEVDWWDMVCNVKKLINEKKEDGKVFWQNLAGYKRQEALRPYLSSEEDRKKGKKFARYQLGDLLLHLEKKHGEDWGKVYDEAWERIDKKVEGLSKHIKLEEERRSEDAQSKAALTDWLRAKASFVIEGLKEADKDEFCRCELKLQKWYGDLRGKPFAIEAENSILDISGFSKQYNCAFIWQKDGVKKLNLYLIINYFKGGKLRFKKIKPEAFEANRFYTVINKKSGEIVPMEVNFNFDDPNLIILPLAFGKRVGREFIWNDLLSLETGSLKLANGRVIEKTLYNRRTRQDEPALFVALTFERREVLDSSNIKPMNLIGVDRGENIPAVIALTDPEGCPLSRFKDSLGNPTHILRIGESYKEKQRTIQAKKEVEQRRAGGYSRKYASKAKNLADDMVRNTARDLLYYAVTQDAMLIFENLSRGFGRQGKRTFMAERQYTRMEDWLTAKLAYEGLPSKTYLSKTLAQYTSKTCSNCGFTITSADYDRVLEKLKKTATGWMTTINGKELKVEGQITYYNRYKRQNVVKDLSVELDRLSEESVNNDISSWDKGRSGEALSLLKKRFSHRPVQEKFVCLNCGFETHADEQAALNIARSWLFLRSQEYKKYQTNKTTGNTDKRAFVETWQSFYRKKLKEVWKPAV

SEQ ID NO: 37637 - protein, 978 aa, synthetic construct
  REGION 1..978: note = engineered CasX variant
QEIKRINKIRRRLVKDSNTKKAGKTGPMKTLLVRVMTPDLRERLENLRKKPENIPQPISNTSRANLNKLLTDYTEMKKAILHVYWEEFQKDPVGLMSRVAQPASKKIDQNKLKPEMDEKGNLTTAGFACSQCGQPLFVYKLEQVSEKGKAYTNYFGRCNVAEHEKLILLAQLKPEKDSDEAVTYSLGKFGQRALDFYSIHVTKESTHPVKPLAQIAGNRYASAPVGKALSDACMGTIASFLSKYQDIIIEHQKVVKGNQKRLESLRELAGKENLEYPSVTLPPQPHTKEGVDAYNEVIARVRMWVNLNLWQKLKLSRDDAKPLLRLKGFPSFPLVERQANEVDWWDMVCNVKKLINEKKEDGKVFWQNLAGYKRQEALRPYLSSEEDRKKGKKFARYQLGDLLLHLEKKHGEDWGKVYDEAWERIDKKVEGLSKHIKLEEERRSEDAQSKAALTDWLRAKASFVIEGLKEADKDEFCRCELKLQKWYGDLRGKPFAIEAENSILDISGFSKQYNCAFIWQKDGVKKLNLYLIINYFKGGKLRFKKIKPEAFEANRFYTVINKKSGEIVPMEVNFNFDDPNLIILPLAFGKRVGREFIWNDLLSLETGSLKLANGRVIEKTLYNRRTRQDEPALFVALTFERREVLDSSNIKPMNLIGVDRGENIPAVIALTDPEGCPLSRFKDSLGNPTHILRIGESYKEKQRTIQAKKEVEQRRAGGYSRKYASKAKNLADDMVRNTARDLLYYAVTQDAMLIFENLSRGFGRQGKRTFMAERQYTRMEDWLTAKLAYEGLPSKTYLSKTLAQYTSKTCSNCGFTITSADYDRVLEKLKKTATGWMTTINGKELKVEGQITYYNRYKRQNVVKDLSVELDRLSEESVNNDISSWDKGRSGEALSLLKKRFSHRPVQEKFVCLNCGFETHADEQAALNIARSWLFLRSQEYKKYQTNKTTGNTDKRAFVETWQSFYRKKLKEVWKPAV

SEQ ID NO: 37638 - protein, 978 aa, synthetic construct
  REGION 1..978: note = engineered CasX variant
QEIKRINKIRRRLVKDSNTKKAGKTGPMKTLLVRVMTPDLRERLENLRKKPENIPQPISNTSRANLNKLLTDYTEMKKAILHVYWEEFQKDPVGLMSRVAQPASKKIDQNKLKPEMDEKGNLTTAGFACSQCGQPLFVYKLEQVSEKGKAYTNYFGRCNVAEHEKLILLAQLKPEKDSDEAVTYSLGKFGQRALDFYSIHVTKESTHPVKPLAQIAGNRYASVPVGKALSDACMGTIASFLSKYQDIIIEHQKVVKGNQKRLESLRELAGKENLEYPSVTLPPQPHTKEGVDAYNEVIARVRMWVNLNLWQKLKLSRDDAKPLLRLKGFPSFPLVERQANEVDWWDMVCNVKKLINEKKEDGKVFWQNLAGYKRQEALRPYLSSEEDRKKGKKFARYQLGDLLLHLEKKHGEDWGKVYDEAWERIDKKVEGLSKHIKLEEERRSEDAQSKAALTDWLRAKASFVIEGLKEADKDEFCRCELKLQKWYGDLRGKPFAIEAENSILDISGFSKQYNCAFIWQKDGVKKLNLYLIINYFKGGKLRFKKIKPEAFEANRFYTVINKKSGEIVPMEVNFNFDDPNLIILPLAFGKRVGREFIWNDLLSLETGSLKLANGRVIEKTLYNRRTRQDEPALFVALTFERREVLDSSNIKPMNLIGVDRGENIPAVIALTDPEGCPLSRFKDSLGNPTHILRIGESYKEKQRTIQAKKEVEQRRAGGYSRKYASKAKNLADDMVRNTARDLLYYAVTQDAMLIFENLSRGFGRQGKRTFMAERQYTRMEDWLTAKLAYEGLPSKTYLSKTLAQYTSKTCSNCGFTITSADYDRVLEKLKKTATGWMTTINGKELKVEGQITYYNRYKRQNVVKDLSVELDRLSEESVNNDISSWDKGRSGEALSLLKKRFSHRPVQEKFVCLNCGFETHADEQAALNIARSWLFLRSQEYKKYQTNKTTGNTDKRAFVETWQSFYRKKLKEVWKPAV

SEQ ID NO: 37639 - protein, 978 aa, synthetic construct
  REGION 1..978: note = engineered CasX variant
QEIKRINKIRRRLVKDSNTKKAGKTGPMKTLLVRVMTPDLRERLENLRKKPENIPQPISNTSRANLNKLLTDYTEMKKAILHVYWEEFQKDPVGLMSRVAQPASKKIDQNKLKPEMDEKGNLTTAGFACSQCGQPLFVYKLEQVSEKGKAYTNYFGRCNVAEHEKLIKLAQLKPEKDSDEAVTYSLGKFGQRALDFYSIHVTKESTHPVKPLAQIAGNRYASGPVGKALSDACMGTIASFLSKYQDIIIEHQKVVKGNQKRLESLRELAGKENLEYPSVTLPPQPHTKEGVDAYNEVIARVRMWVNLNLWQKLKLSRDDAKPLLRLKGFPSFPLVERQANEVDWWDMVCNVKKLINEKKEDGKVFWQNLAGYKRQEALRPYLSSEEDRKKGKKFARYQLGDLLLHLEKKHGEDWGKVYDEAWERIDKKVEGLSKHIKLEEERRSEDAQSKAALTDWLRAKASFVIEGLKEADKDEFCRCELKLQKWYGDLRGKPFAIEAENSILDISGFSKQYNCAFIWQKDGVKKLNLYLIINYFKGGKLRFKKIKPEAFEANRFYTVINKKSGEIVPMEVNFNFDDPNLIILPLAFGKRVGREFIWNDLLSLETGSLKLANGRVIEKTLYNRRTRQDEPALFVALTFERREVLDSSNIKPMNLIGVDRGENIPAVIALTDPEGCPLSRFKDSLGNPTHILRIGESYKEKQRTIQAKKEVEQRRAGGYSRKYASKAKNLADDMVRNTARDLLYYAVTQDAMLIFENLSRGFGRQGKRTFMAERQYTRMEDWLTAKLAYEGLPSKTYLSKTLAQYTSKTCSNCGFTITSADYDRVLEKLKKTATGWMTTINGKELKVEGQITYYNRYKRQNVVKDLSVELDRLSEESVNNDISSWDKGRSGEALSLLKKRFSHRPVQEKFVCLNCGFETHADEQAALNIARSWLFLRSQEYKKYQTNKTTGNTDKRAFVETWQSFYRKKLKEVWKPAV

SEQ ID NO: 37640 - protein, 977 aa, synthetic construct
  REGION 1..977: note = engineered CasX variant
QEIKRINKIRRRLVKDSNTKKAGKTGPMKTLLVRVMTPDLRERLENLRKKPENIPQPISNTSRANLNKLLTDYTEMKKAILHVYWEEFQKDPVGLMSRVAQPASKKIDQNKLKPEMDEKGNLTTAGFACSQCGQPLFVYKLEQVSEKGKAYTNYFGRCNVAEHEKLILLAQLKPEKDSDEAVTYSLGKFGQRALDFYSIHVTKESTHPVKPLAQIAGNRYASPVGKALSDACMGTIASFLSKYQDIIIEHQKVVKGNQKRLESLRELAGKENLEYPSVTLPPQPHTKEGVDAYNEVIARVRMWVNLNLWQKLKLSRDDAKPLLRLKGFPSFPLVERQANEVDWWDMVCNVKKLINEKKEDGKVFWQNLAGYKRQEALRPYLSSEEDRKKGKKFARYQLGDLLLHLEKKHGEDWGKVYDEAWERIDKKVEGLSKHIKLEEERRSEDAQSKAALTDWLRAKASFVIEGLKEADKDEFCRCELKLQKWYGDLRGKPFAIEAENSILDISGFSKQYNCAFIWQKDGVKKLNLYLIINYFKGGKLRFKKIKPEAFEANRFYTVINKKSGEIVPMEVNFNFDDPNLIILPLAFGKRVGREFIWNDLLSLETGSLKLANGRVIEKTLYNRRTRQDEPALFVALTFERREVLDSSNIKPMNLIGVDRGENIPAVIALTDPEGCPLSRFKDSLGNPTHILRIGESYKEKQRTIQAKKEVEQRRAGGYSRKYASKAKNLADDMVRNTARDLLYYAVTQDAMLIFENLSRGFGRQGKRTFMAERQYTRMEDWLTAKLAYEGLPSKTYLSKTLAQYTSKTCSNCGFTITSADYDRVLEKLKKTATGWMTTINGKELKVEGQITYYNRYKRQNVVKDLSVELDRLSEESVNNDISSWDKGRSGEALSLLKKRFSHRPVQEKFVCLNCGFETHADEQAALNIARSWLFLRSQEYKKYQTNKTTGNTDKRAFVETWQSFYRKKLKEVWKPAV

SEQ ID NO: 37641 - protein, 978 aa, synthetic construct
  REGION 1..978: note = engineered CasX variant
QEIKRINKIRRRLVKDSNTKKAGKTGPMKTLLVRVMTPDLRERLENLRKKPENIPQPISNTSRANLNKLLTDYTEMKKAILHVYWEEFQVDPVGLMSRVAQPASKKIDQNKLKPEMDEKGNLTTAGFACSQCGQPLFVYKLEQVSEKGKAYTNYFGRCNVAEHEKLILLAQLKPEKDSDEAVTYSLGKFGQRALDFYSIHVTKESTHPVKPLAQIAGNRYASYPVGKALSDACMGTIASFLSKYQDIIIEHQKVVKGNQKRLESLRELAGKENLEYPSVTLPPQPHTKEGVDAYNEVIARVRMWVNLNLWQKLKLSRDDAKPLLRLKGFPSFPLVERQANEVDWWDMVCNVKKLINEKKEDGKVFWQNLAGYKRQEALRPYLSSEEDRKKGKKFARYQLGDLLLHLEKKHGEDWGKVYDEAWERIDKKVEGLSKHIKLEEERRSEDAQSKAALTDWLRAKASFVIEGLKEADKDEFCRCELKLQKWYGDLRGKPFAIEAENSILDISGFSKQYNCAFIWQKDGVKKLNLYLIINYFKGGKLRFKKIKPEAFEANRFYTVINKKSGEIVPMEVNFNFDDPNLIILPLAFGKRVGREFIWNDLLSLETGSLKLANGRVIEKTLYNRRTRQDEPALFVALTFERREVLDSSNIKPMNLIGVDRGENIPAVIALTDPEGCPLSRFKDSLGNPTHILRIGESYKEKQRTIQAKKEVEQRRAGGYSRKYASKAKNLADDMVRNTARDLLYYAVTQDAMLIFENLSRGFGRQGKRTFMAERQYTRMEDWLTAKLAYEGLPSKTYLSKTLAQYTSKTCSNCGFTITSADYDRVLEKLKKTATGWMTTINGKELKVEGQITYYNRYKRQNVVKDLSVELDRLSEESVNNDISSWTKGRSGEALSLLKKRFSHRPVQEKFVCLNCGFETHADEQAALNIARSWLFLRSQEYKKYQTNKTTGNTDKRAFVETWQSFYRKKLKEVWKPAV

SEQ ID NO: 37642 - protein, 978 aa, synthetic construct
  REGION 1..978: note = engineered CasX variant
QEIKRINKIRRRLVKDSNTKKAGKTGPMKTLLVRVMTPDLRERLENLRKKPENIPQPISNTSRANLNKLLTDYTEMKKAILHVYWEEFQVDPVGLMSRVAQPASKKIDQNKLKPEMDEKGNLTTAGFACSQCGQPLFVYKLEQVSEKGKAYTNYFGRCNVAEHEKLILLAQLKPEKDSDEAVTYSLGKFGQRALDFYSIHVTKESTHPVKPLAQIAGNRYASHPVGKALSDACMGTIASFLSKYQDIIIEHQKVVKGNQKRLESLRELAGKENLEYPSVTLPPQPHTKEGVDAYNEVIARVRMWVNLNLWQKLKLSRDDAKPLLRLKGFPSFPLVERQANEVDWWDMVCNVKKLINEKKEDGKVFWQNLAGYKRQEALRPYLSSEEDRKKGKKFARYQLGDLLLHLEKKHGEDWGKVYDEAWERIDKKVEGLSKHIKLEEERRSEDAQSKAALTDWLRAKASFVIEGLKEADKDEFCRCELKLQKWYGDLRGKPFAIEAENSILDISGFSKQYNCAFIWQKDGVKKLNLYLIINYFKGGKLRFKKIKPEAFEANRFYTVINKKSGEIVPMEVNFNFDDPNLIILPLAFGKRVGREFIWNDLLSLETGSLKLANGRVIEKTLYNRRTRQDEPALFVALTFERREVLDSSNIKPMNLIGVDRGENIPAVIALTDPEGCPLSRFKDSLGNPTHILRIGESYKEKQRTIQAKKEVEQRRAGGYSRKYASKAKNLADDMVRNTARDLLYYAVTQDAMLIFENLSRGFGRQGKRTFMAERQYTRMEDWLTAKLAYEGLPSKTYLSKTLAQYTSKTCSNCGFTITSADYDRVLEKLKKTATGWMTTINGKELKVEGQITYYNRYKRQNVVKDLSVELDRLSEESVNNDISSWTKGRSGEALSLLKKRFSHRPVQEKFVCLNCGFETHADEQAALNIARSWLFLRSQEYKKYQTNKTTGNTDKRAFVETWQSFYRKKLKEVWKPAV

SEQ ID NO: 37643 - protein, 978 aa, synthetic construct
  REGION 1..978: note = engineered CasX variant
QEIKRINKIRRRLVKDSNTKKAGKTGPMKTLLVRVMTPDLRERLENLRKKPENIPQPISNTSRANLNKLLTDYTEMKKAILHVYWEEFQVDPVGLMSRVAQPASKKIDQNKLKPEMDEKGNLTTAGFACSQCGQPLFVYKLEQVSEKGKAYTNYFGRCNVAEHEKLILLAQLKPEKDSDEAVTYSLGKFGQRALDFYSIHVTKESTHPVKPLAQIAGNRYASSPVGKALSDACMGTIASFLSKYQDIIIEHQKVVKGNQKRLESLRELAGKENLEYPSVTLPPQPHTKEGVDAYNEVIARVRMWVNLNLWQKLKLSRDDAKPLLRLKGFPSFPLVERQANEVDWWDMVCNVKKLINEKKEDGKVFWQNLAGYKRQEALRPYLSSEEDRKKGKKFARYQLGDLLLHLEKKHGEDWGKVYDEAWERIDKKVEGLSKHIKLEEERRSEDAQSKAALTDWLRAKASFVIEGLKEADKDEFCRCELKLQKWYGDLRGKPFAIEAENSILDISGFSKQYNCAFIWQKDGVKKLNLYLIINYFKGGKLRFKKIKPEAFEANRFYTVINKKSGEIVPMEVNFNFDDPNLIILPLAFGKRVGREFIWNDLLSLETGSLKLANGRVIEKTLYNRRTRQDEPALFVALTFERREVLDSSNIKPMNLIGVDRGENIPAVIALTDPEGCPLSRFKDSLGNPTHILRIGESYKEKQRTIQAKKEVEQRRAGGYSRKYASKAKNLADDMVRNTARDLLYYAVTQDAMLIFENLSRGFGRQGKRTFMAERQYTRMEDWLTAKLAYEGLPSKTYLSKTLAQYTSKTCSNCGFTITSADYDRVLEKLKKTATGWMTTINGKELKVEGQITYYNRYKRQNVVKDLSVELDRLSEESVNNDISSWTKGRSGEALSLLKKRFSHRPVQEKFVCLNCGFETHADEQAALNIARSWLFLRSQEYKKYQTNKTTGNTDKRAFVETWQSFYRKKLKEVWKPAV

SEQ ID NO: 37644 - protein, 978 aa, synthetic construct
  REGION 1..978: note = engineered CasX variant
QEIKRINKIRRRLVKDSNTKKAGKTGPMKTLLVRVMTPDLRERLENLRKKPENIPQPISNTSRANLNKLLTDYTEMKKAILHVYWEEFQVDPVGLMSRVAQPASKKIDQNKLKPEMDEKGNLTTAGFACSQCGQPLFVYKLEQVSEKGKAYTNYFGRCNVAEHEKLILLAQLKPEKDSDEAVTYSLGKFGQRALDFYSIHVTKESTHPVKPLAQIAGNRYASTPVGKALSDACMGTIASFLSKYQDIIIEHQKVVKGNQKRLESLRELAGKENLEYPSVTLPPQPHTKEGVDAYNEVIARVRMWVNLNLWQKLKLSRDDAKPLLRLKGFPSFPLVERQANEVDWWDMVCNVKKLINEKKEDGKVFWQNLAGYKRQEALRPYLSSEEDRKKGKKFARYQLGDLLLHLEKKHGEDWGKVYDEAWERIDKKVEGLSKHIKLEEERRSEDAQSKAALTDWLRAKASFVIEGLKEADKDEFCRCELKLQKWYGDLRGKPFAIEAENSILDISGFSKQYNCAFIWQKDGVKKLNLYLIINYFKGGKLRFKKIKPEAFEANRFYTVINKKSGEIVPMEVNFNFDDPNLIILPLAFGKRVGREFIWNDLLSLETGSLKLANGRVIEKTLYNRRTRQDEPALFVALTFERREVLDSSNIKPMNLIGVDRGENIPAVIALTDPEGCPLSRFKDSLGNPTHILRIGESYKEKQRTIQAKKEVEQRRAGGYSRKYASKAKNLADDMVRNTARDLLYYAVTQDAMLIFENLSRGFGRQGKRTFMAERQYTRMEDWLTAKLAYEGLPSKTYLSKTLAQYTSKTCSNCGFTITSADYDRVLEKLKKTATGWMTTINGKELKVEGQITYYNRYKRQNVVKDLSVELDRLSEESVNNDISSWTKGRSGEALSLLKKRFSHRPVQEKFVCLNCGFETHADEQAALNIARSWLFLRSQEYKKYQTNKTTGNTDKRAFVETWQSFYRKKLKEVWKPAV

SEQ ID NO: 37645 - protein, 978 aa, synthetic construct
  REGION 1..978: note = engineered CasX variant
QEIKRINKIRRRLVKDSNTKKAGKTGPMKTLLVRVMTPDLRERLENLRKKPENIPQPISNTSRANLNKLLTDYTEMKKAILHVYWEEFQVDPVGLMSRVAQPASKKIDQNKLKPEMDEKGNLTTAGFACSQCGQPLFVYKLEQVSEKGKAYTNYFGRCNVAEHEKLILLAQLKPEKDSDEAVTYSLGKFGQRALDFYSIHVTKESTHPVKPLAQIAGNRYASAPVGKALSDACMGTIASFLSKYQDIIIEHQKVVKGNQKRLESLRELAGKENLEYPSVTLPPQPHTKEGVDAYNEVIARVRMWVNLNLWQKLKLSRDDAKPLLRLKGFPSFPLVERQANEVDWWDMVCNVKKLINEKKEDGKVFWQNLAGYKRQEALRPYLSSEEDRKKGKKFARYQLGDLLLHLEKKHGEDWGKVYDEAWERIDKKVEGLSKHIKLEEERRSEDAQSKAALTDWLRAKASFVIEGLKEADKDEFCRCELKLQKWYGDLRGKPFAIEAENSILDISGFSKQYNCAFIWQKDGVKKLNLYLIINYFKGGKLRFKKIKPEAFEANRFYTVINKKSGEIVPMEVNFNFDDPNLIILPLAFGKRVGREFIWNDLLSLETGSLKLANGRVIEKTLYNRRTRQDEPALFVALTFERREVLDSSNIKPMNLIGVDRGENIPAVIALTDPEGCPLSRFKDSLGNPTHILRIGESYKEKQRTIQAKKEVEQRRAGGYSRKYASKAKNLADDMVRNTARDLLYYAVTQDAMLIFENLSRGFGRQGKRTFMAERQYTRMEDWLTAKLAYEGLPSKTYLSKTLAQYTSKTCSNCGFTITSADYDRVLEKLKKTATGWMTTINGKELKVEGQITYYNRYKRQNVVKDLSVELDRLSEESVNNDISSWTKGRSGEALSLLKKRFSHRPVQEKFVCLNCGFETHADEQAALNIARSWLFLRSQEYKKYQTNKTTGNTDKRAFVETWQSFYRKKLKEVWKPAV

SEQ ID NO: 37646 - protein, 978 aa, synthetic construct
  REGION 1..978: note = engineered CasX variant
QEIKRINKIRRRLVKDSNTKKAGKTGPMKTLLVRVMTPDLRERLENLRKKPENIPQPISNTSRANLNKLLTDYTEMKKAILHVYWEEFQVDPVGLMSRVAQPASKKIDQNKLKPEMDEKGNLTTAGFACSQCGQPLFVYKLEQVSEKGKAYTNYFGRCNVAEHEKLILLAQLKPEKDSDEAVTYSLGKFGQRALDFYSIHVTKESTHPVKPLAQIAGNRYASVPVGKALSDACMGTIASFLSKYQDIIIEHQKVVKGNQKRLESLRELAGKENLEYPSVTLPPQPHTKEGVDAYNEVIARVRMWVNLNLWQKLKLSRDDAKPLLRLKGFPSFPLVERQANEVDWWDMVCNVKKLINEKKEDGKVFWQNLAGYKRQEALRPYLSSEEDRKKGKKFARYQLGDLLLHLEKKHGEDWGKVYDEAWERIDKKVEGLSKHIKLEEERRSEDAQSKAALTDWLRAKASFVIEGLKEADKDEFCRCELKLQKWYGDLRGKPFAIEAENSILDISGFSKQYNCAFIWQKDGVKKLNLYLIINYFKGGKLRFKKIKPEAFEANRFYTVINKKSGEIVPMEVNFNFDDPNLIILPLAFGKRVGREFIWNDLLSLETGSLKLANGRVIEKTLYNRRTRQDEPALFVALTFERREVLDSSNIKPMNLIGVDRGENIPAVIALTDPEGCPLSRFKDSLGNPTHILRIGESYKEKQRTIQAKKEVEQRRAGGYSRKYASKAKNLADDMVRNTARDLLYYAVTQDAMLIFENLSRGFGRQGKRTFMAERQYTRMEDWLTAKLAYEGLPSKTYLSKTLAQYTSKTCSNCGFTITSADYDRVLEKLKKTATGWMTTINGKELKVEGQITYYNRYKRQNVVKDLSVELDRLSEESVNNDISSWTKGRSGEALSLLKKRFSHRPVQEKFVCLNCGFETHADEQAALNIARSWLFLRSQEYKKYQTNKTTGNTDKRAFVETWQSFYRKKLKEVWKPAV

SEQ ID NO: 37647 - protein, 978 aa, synthetic construct
  REGION 1..978: note = engineered CasX variant
QEIKRINKIRRRLVKDSNTKKAGKTGPMKTLLVRVMTPDLRERLENLRKKPENIPQPISNTSRANLNKLLTDYTEMKKAILHVYWEEFQVDPVGLMSRVAQPASKKIDQNKLKPEMDEKGNLTTAGFACSQCGQPLFVYKLEQVSEKGKAYTNYFGRCNVAEHEKLIKLAQLKPEKDSDEAVTYSLGKFGQRALDFYSIHVTKESTHPVKPLAQIAGNRYASGPVGKALSDACMGTIASFLSKYQDIIIEHQKVVKGNQKRLESLRELAGKENLEYPSVTLPPQPHTKEGVDAYNEVIARVRMWVNLNLWQKLKLSRDDAKPLLRLKGFPSFPLVERQANEVDWWDMVCNVKKLINEKKEDGKVFWQNLAGYKRQEALRPYLSSEEDRKKGKKFARYQLGDLLLHLEKKHGEDWGKVYDEAWERIDKKVEGLSKHIKLEEERRSEDAQSKAALTDWLRAKASFVIEGLKEADKDEFCRCELKLQKWYGDLRGKPFAIEAENSILDISGFSKQYNCAFIWQKDGVKKLNLYLIINYFKGGKLRFKKIKPEAFEANRFYTVINKKSGEIVPMEVNFNFDDPNLIILPLAFGKRVGREFIWNDLLSLETGSLKLANGRVIEKTLYNRRTRQDEPALFVALTFERREVLDSSNIKPMNLIGVDRGENIPAVIALTDPEGCPLSRFKDSLGNPTHILRIGESYKEKQRTIQAKKEVEQRRAGGYSRKYASKAKNLADDMVRNTARDLLYYAVTQDAMLIFENLSRGFGRQGKRTFMAERQYTRMEDWLTAKLAYEGLPSKTYLSKTLAQYTSKTCSNCGFTITSADYDRVLEKLKKTATGWMTTINGKELKVEGQITYYNRYKRQNVVKDLSVELDRLSEESVNNDISSWTKGRSGEALSLLKKRFSHRPVQEKFVCLNCGFETHADEQAALNIARSWLFLRSQEYKKYQTNKTTGNTDKRAFVETWQSFYRKKLKEVWKPAV

SEQ ID NO: 37648 - protein, 977 aa, synthetic construct
  REGION 1..977: note = engineered CasX variant
QEIKRINKIRRRLVKDSNTKKAGKTGPMKTLLVRVMTPDLRERLENLRKKPENIPQPISNTSRANLNKLLTDYTEMKKAILHVYWEEFQVDPVGLMSRVAQPASKKIDQNKLKPEMDEKGNLTTAGFACSQCGQPLFVYKLEQVSEKGKAYTNYFGRCNVAEHEKLILLAQLKPEKDSDEAVTYSLGKFGQRALDFYSIHVTKESTHPVKPLAQIAGNRYASPVGKALSDACMGTIASFLSKYQDIIIEHQKVVKGNQKRLESLRELAGKENLEYPSVTLPPQPHTKEGVDAYNEVIARVRMWVNLNLWQKLKLSRDDAKPLLRLKGFPSFPLVERQANEVDWWDMVCNVKKLINEKKEDGKVFWQNLAGYKRQEALRPYLSSEEDRKKGKKFARYQLGDLLLHLEKKHGEDWGKVYDEAWERIDKKVEGLSKHIKLEEERRSEDAQSKAALTDWLRAKASFVIEGLKEADKDEFCRCELKLQKWYGDLRGKPFAIEAENSILDISGFSKQYNCAFIWQKDGVKKLNLYLIINYFKGGKLRFKKIKPEAFEANRFYTVINKKSGEIVPMEVNFNFDDPNLIILPLAFGKRVGREFIWNDLLSLETGSLKLANGRVIEKTLYNRRTRQDEPALFVALTFERREVLDSSNIKPMNLIGVDRGENIPAVIALTDPEGCPLSRFKDSLGNPTHILRIGESYKEKQRTIQAKKEVEQRRAGGYSRKYASKAKNLADDMVRNTARDLLYYAVTQDAMLIFENLSRGFGRQGKRTFMAERQYTRMEDWLTAKLAYEGLPSKTYLSKTLAQYTSKTCSNCGFTITSADYDRVLEKLKKTATGWMTTINGKELKVEGQITYYNRYKRQNVVKDLSVELDRLSEESVNNDISSWTKGRSGEALSLLKKRFSHRPVQEKFVCLNCGFETHADEQAALNIARSWLFLRSQEYKKYQTNKTTGNTDKRAFVETWQSFYRKKLKEVWKPAV

SEQ ID NO: 37649 - protein, 978 aa, synthetic construct
  REGION 1..978: note = engineered CasX variant
QEIKRLNKIRRRLVKDSNTKKAGKTGPMKTLLVRVMTPDLRERLENLRKKPENIPQPISNTSRANLNKLLTDYTEMKKAILHVYWEEFQKDPVGLMSRVAQPASKKIDQNKLKPEMDEKGNLTTAGFACSQCGQPLFVYKLEQVSEKGKAYTNYFGRCNVAEHEKLILLAQLKPEKDSDEAVTYSLGKFGQRALDFYSIHVTKESTHPVKPLAQIAGNRYASYPVGKALSDACMGTIASFLSKYQDIIIEHQKVVKGNQKRLESLRELAGKENLEYPSVTLPPQPHTKEGVDAYNEVIARVRMWVNLNLWQKLKLSRDDAKPLLRLKGFPSFPLVERQANEVDWWDMVCNVKKLINEKKEDGKVFWQNLAGYKRQEALRPYLSSEEDRKKGKKFARYQLGDLLLHLEKKHGEDWGKVYDEAWERIDKKVEGLSKHIKLEEERRSEDAQSKAALTDWLRAKASFVIEGLKEADKDEFCRCELKLQKWYGDLRGKPFAIEAENSILDISGFSKQYNCAFIWQKDGVKKLNLYLIINYFKGGKLRFKKIKPEAFEANRFYTVINKKSGEIVPMEVNFNFDDPNLIILPLAFGKRVGREFIWNDLLSLETGSLKLANGRVIEKTLYNRRTRQDEPALFVALTFERREVLDSSNIKPMNLIGVDRGENIPAVIALTDPEGCPLSRFKDSLGNPTHILRIGESYKEKQRTIQAKKEVEQRRAGGYSRKYASKAKNLADDMVRNTARDLLYYAVTQDAMLIFENLSRGFGRQGKRTFMAERQYTRMEDWLTAKLAYEGLPSKTYLSKTLAQYTSKTCSNCGFTITSADYDRVLEKLKKTATGWMTTINGKELKVEGQITYYNRYKRQNVVKDLSVELDRLSEESVNNDISSWTKGRSGEALSLLKKRFSHRPVQEKFVCLNCGFETHADEQAALNIARSWLFLRSQEYKKYQTNKTTGNTDKRAFVETWQSFYRKKLKEVWKPAV

SEQ ID NO: 37650 - protein, 978 aa, synthetic construct
  REGION 1..978: note = engineered CasX variant
QEIKRLNKIRRRLVKDSNTKKAGKTGPMKTLLVRVMTPDLRERLENLRKKPENIPQPISNTSRANLNKLLTDYTEMKKAILHVYWEEFQKDPVGLMSRVAQPASKKIDQNKLKPEMDEKGNLTTAGFACSQCGQPLFVYKLEQVSEKGKAYTNYFGRCNVAEHEKLILLAQLKPEKDSDEAVTYSLGKFGQRALDFYSIHVTKESTHPVKPLAQIAGNRYASHPVGKALSDACMGTIASFLSKYQDIIIEHQKVVKGNQKRLESLRELAGKENLEYPSVTLPPQPHTKEGVDAYNEVIARVRMWVNLNLWQKLKLSRDDAKPLLRLKGFPSFPLVERQANEVDWWDMVCNVKKLINEKKEDGKVFWQNLAGYKRQEALRPYLSSEEDRKKGKKFARYQLGDLLLHLEKKHGEDWGKVYDEAWERIDKKVEGLSKHIKLEEERRSEDAQSKAALTDWLRAKASFVIEGLKEADKDEFCRCELKLQKWYGDLRGKPFAIEAENSILDISGFSKQYNCAFIWQKDGVKKLNLYLIINYFKGGKLRFKKIKPEAFEANRFYTVINKKSGEIVPMEVNFNFDDPNLIILPLAFGKRVGREFIWNDLLSLETGSLKLANGRVIEKTLYNRRTRQDEPALFVALTFERREVLDSSNIKPMNLIGVDRGENIPAVIALTDPEGCPLSRFKDSLGNPTHILRIGESYKEKQRTIQAKKEVEQRRAGGYSRKYASKAKNLADDMVRNTARDLLYYAVTQDAMLIFENLSRGFGRQGKRTFMAERQYTRMEDWLTAKLAYEGLPSKTYLSKTLAQYTSKTCSNCGFTITSADYDRVLEKLKKTATGWMTTINGKELKVEGQITYYNRYKRQNVVKDLSVELDRLSEESVNNDISSWTKGRSGEALSLLKKRFSHRPVQEKFVCLNCGFETHADEQAALNIARSWLFLRSQEYKKYQTNKTTGNTDKRAFVETWQSFYRKKLKEVWKPAV

SEQ ID NO: 37651 - protein, 978 aa, synthetic construct
  REGION 1..978: note = engineered CasX variant
QEIKRLNKIRRRLVKDSNTKKAGKTGPMKTLLVRVMTPDLRERLENLRKKPENIPQPISNTSRANLNKLLTDYTEMKKAILHVYWEEFQKDPVGLMSRVAQPASKKIDQNKLKPEMDEKGNLTTAGFACSQCGQPLFVYKLEQVSEKGKAYTNYFGRCNVAEHEKLILLAQLKPEKDSDEAVTYSLGKFGQRALDFYSIHVTKESTHPVKPLAQIAGNRYASSPVGKALSDACMGTIASFLSKYQDIIIEHQKVVKGNQKRLESLRELAGKENLEYPSVTLPPQPHTKEGVDAYNEVIARVRMWVNLNLWQKLKLSRDDAKPLLRLKGFPSFPLVERQANEVDWWDMVCNVKKLINEKKEDGKVFWQNLAGYKRQEALRPYLSSEEDRKKGKKFARYQLGDLLLHLEKKHGEDWGKVYDEAWERIDKKVEGLSKHIKLEEERRSEDAQSKAALTDWLRAKASFVIEGLKEADKDEFCRCELKLQKWYGDLRGKPFAIEAENSILDISGFSKQYNCAFIWQKDGVKKLNLYLIINYFKGGKLRFKKIKPEAFEANRFYTVINKKSGEIVPMEVNFNFDDPNLIILPLAFGKRVGREFIWNDLLSLETGSLKLANGRVIEKTLYNRRTRQDEPALFVALTFERREVLDSSNIKPMNLIGVDRGENIPAVIALTDPEGCPLSRFKDSLGNPTHILRIGESYKEKQRTIQAKKEVEQRRAGGYSRKYASKAKNLADDMVRNTARDLLYYAVTQDAMLIFENLSRGFGRQGKRTFMAERQYTRMEDWLTAKLAYEGLPSKTYLSKTLAQYTSKTCSNCGFTITSADYDRVLEKLKKTATGWMTTINGKELKVEGQITYYNRYKRQNVVKDLSVELDRLSEESVNNDISSWTKGRSGEALSLLKKRFSHRPVQEKFVCLNCGFETHADEQAALNIARSWLFLRSQEYKKYQTNKTTGNTDKRAFVETWQSFYRKKLKEVWKPAV

SEQ ID NO: 37652 - protein, 978 aa, synthetic construct
  REGION 1..978: note = engineered CasX variant
QEIKRLNKIRRRLVKDSNTKKAGKTGPMKTLLVRVMTPDLRERLENLRKKPENIPQPISNTSRANLNKLLTDYTEMKKAILHVYWEEFQKDPVGLMSRVAQPASKKIDQNKLKPEMDEKGNLTTAGFACSQCGQPLFVYKLEQVSEKGKAYTNYFGRCNVAEHEKLILLAQLKPEKDSDEAVTYSLGKFGQRALDFYSIHVTKESTHPVKPLAQIAGNRYASTPVGKALSDACMGTIASFLSKYQDIIIEHQKVVKGNQKRLESLRELAGKENLEYPSVTLPPQPHTKEGVDAYNEVIARVRMWVNLNLWQKLKLSRDDAKPLLRLKGFPSFPLVERQANEVDWWDMVCNVKKLINEKKEDGKVFWQNLAGYKRQEALRPYLSSEEDRKKGKKFARYQLGDLLLHLEKKHGEDWGKVYDEAWERIDKKVEGLSKHIKLEEERRSEDAQSKAALTDWLRAKASFVIEGLKEADKDEFCRCELKLQKWYGDLRGKPFAIEAENSILDISGFSKQYNCAFIWQKDGVKKLNLYLIINYFKGGKLRFKKIKPEAFEANRFYTVINKKSGEIVPMEVNFNFDDPNLIILPLAFGKRVGREFIWNDLLSLETGSLKLANGRVIEKTLYNRRTRQDEPALFVALTFERREVLDSSNIKPMNLIGVDRGENIPAVIALTDPEGCPLSRFKDSLGNPTHILRIGESYKEKQRTIQAKKEVEQRRAGGYSRKYASKAKNLADDMVRNTARDLLYYAVTQDAMLIFENLSRGFGRQGKRTFMAERQYTRMEDWLTAKLAYEGLPSKTYLSKTLAQYTSKTCSNCGFTITSADYDRVLEKLKKTATGWMTTINGKELKVEGQITYYNRYKRQNVVKDLSVELDRLSEESVNNDISSWTKGRSGEALSLLKKRFSHRPVQEKFVCLNCGFETHADEQAALNIARSWLFLRSQEYKKYQTNKTTGNTDKRAFVETWQSFYRKKLKEVWKPAV

SEQ ID NO: 37653 - protein, 978 aa, synthetic construct
  REGION 1..978: note = engineered CasX variant
QEIKRLNKIRRRLVKDSNTKKAGKTGPMKTLLVRVMTPDLRERLENLRKKPENIPQPISNTSRANLNKLLTDYTEMKKAILHVYWEEFQKDPVGLMSRVAQPASKKIDQNKLKPEMDEKGNLTTAGFACSQCGQPLFVYKLEQVSEKGKAYTNYFGRCNVAEHEKLILLAQLKPEKDSDEAVTYSLGKFGQRALDFYSIHVTKESTHPVKPLAQIAGNRYASAPVGKALSDACMGTIASFLSKYQDIIIEHQKVVKGNQKRLESLRELAGKENLEYPSVTLPPQPHTKEGVDAYNEVIARVRMWVNLNLWQKLKLSRDDAKPLLRLKGFPSFPLVERQANEVDWWDMVCNVKKLINEKKEDGKVFWQNLAGYKRQEALRPYLSSEEDRKKGKKFARYQLGDLLLHLEKKHGEDWGKVYDEAWERIDKKVEGLSKHIKLEEERRSEDAQSKAALTDWLRAKASFVIEGLKEADKDEFCRCELKLQKWYGDLRGKPFAIEAENSILDISGFSKQYNCAFIWQKDGVKKLNLYLIINYFKGGKLRFKKIKPEAFEANRFYTVINKKSGEIVPMEVNFNFDDPNLIILPLAFGKRVGREFIWNDLLSLETGSLKLANGRVIEKTLYNRRTRQDEPALFVALTFERREVLDSSNIKPMNLIGVDRGENIPAVIALTDPEGCPLSRFKDSLGNPTHILRIGESYKEKQRTIQAKKEVEQRRAGGYSRKYASKAKNLADDMVRNTARDLLYYAVTQDAMLIFENLSRGFGRQGKRTFMAERQYTRMEDWLTAKLAYEGLPSKTYLSKTLAQYTSKTCSNCGFTITSADYDRVLEKLKKTATGWMTTINGKELKVEGQITYYNRYKRQNVVKDLSVELDRLSEESVNNDISSWTKGRSGEALSLLKKRFSHRPVQEKFVCLNCGFETHADEQAALNIARSWLFLRSQEYKKYQTNKTTGNTDKRAFVETWQSFYRKKLKEVWKPAV

SEQ ID NO: 37654 - protein, 978 aa, synthetic construct
  REGION 1..978: note = engineered CasX variant
QEIKRLNKIRRRLVKDSNTKKAGKTGPMKTLLVRVMTPDLRERLENLRKKPENIPQPISNTSRANLNKLLTDYTEMKKAILHVYWEEFQKDPVGLMSRVAQPASKKIDQNKLKPEMDEKGNLTTAGFACSQCGQPLFVYKLEQVSEKGKAYTNYFGRCNVAEHEKLILLAQLKPEKDSDEAVTYSLGKFGQRALDFYSIHVTKESTHPVKPLAQIAGNRYASVPVGKALSDACMGTIASFLSKYQDIIIEHQKVVKGNQKRLESLRELAGKENLEYPSVTLPPQPHTKEGVDAYNEVIARVRMWVNLNLWQKLKLSRDDAKPLLRLKGFPSFPLVERQANEVDWWDMVCNVKKLINEKKEDGKVFWQNLAGYKRQEALRPYLSSEEDRKKGKKFARYQLGDLLLHLEKKHGEDWGKVYDEAWERIDKKVEGLSKHIKLEEERRSEDAQSKAALTDWLRAKASFVIEGLKEADKDEFCRCELKLQKWYGDLRGKPFAIEAENSILDISGFSKQYNCAFIWQKDGVKKLNLYLIINYFKGGKLRFKKIKPEAFEANRFYTVINKKSGEIVPMEVNFNFDDPNLIILPLAFGKRVGREFIWNDLLSLETGSLKLANGRVIEKTLYNRRTRQDEPALFVALTFERREVLDSSNIKPMNLIGVDRGENIPAVIALTDPEGCPLSRFKDSLGNPTHILRIGESYKEKQRTIQAKKEVEQRRAGGYSRKYASKAKNLADDMVRNTARDLLYYAVTQDAMLIFENLSRGFGRQGKRTFMAERQYTRMEDWLTAKLAYEGLPSKTYLSKTLAQYTSKTCSNCGFTITSADYDRVLEKLKKTATGWMTTINGKELKVEGQITYYNRYKRQNVVKDLSVELDRLSEESVNNDISSWTKGRSGEALSLLKKRFSHRPVQEKFVCLNCGFETHADEQAALNIARSWLFLRSQEYKKYQTNKTTGNTDKRAFVETWQSFYRKKLKEVWKPAV

SEQ ID NO: 37655 - protein, 978 aa, synthetic construct
  REGION 1..978: note = engineered CasX variant
QEIKRLNKIRRRLVKDSNTKKAGKTGPMKTLLVRVMTPDLRERLENLRKKPENIPQPISNTSRANLNKLLTDYTEMKKAILHVYWEEFQKDPVGLMSRVAQPASKKIDQNKLKPEMDEKGNLTTAGFACSQCGQPLFVYKLEQVSEKGKAYTNYFGRCNVAEHEKLIKLAQLKPEKDSDEAVTYSLGKFGQRALDFYSIHVTKESTHPVKPLAQIAGNRYASGPVGKALSDACMGTIASFLSKYQDIIIEHQKVVKGNQKRLESLRELAGKENLEYPSVTLPPQPHTKEGVDAYNEVIARVRMWVNLNLWQKLKLSRDDAKPLLRLKGFPSFPLVERQANEVDWWDMVCNVKKLINEKKEDGKVFWQNLAGYKRQEALRPYLSSEEDRKKGKKFARYQLGDLLLHLEKKHGEDWGKVYDEAWERIDKKVEGLSKHIKLEEERRSEDAQSKAALTDWLRAKASFVIEGLKEADKDEFCRCELKLQKWYGDLRGKPFAIEAENSILDISGFSKQYNCAFIWQKDGVKKLNLYLIINYFKGGKLRFKKIKPEAFEANRFYTVINKKSGEIVPMEVNFNFDDPNLIILPLAFGKRVGREFIWNDLLSLETGSLKLANGRVIEKTLYNRRTRQDEPALFVALTFERREVLDSSNIKPMNLIGVDRGENIPAVIALTDPEGCPLSRFKDSLGNPTHILRIGESYKEKQRTIQAKKEVEQRRAGGYSRKYASKAKNLADDMVRNTARDLLYYAVTQDAMLIFENLSRGFGRQGKRTFMAERQYTRMEDWLTAKLAYEGLPSKTYLSKTLAQYTSKTCSNCGFTITSADYDRVLEKLKKTATGWMTTINGKELKVEGQITYYNRYKRQNVVKDLSVELDRLSEESVNNDISSWTKGRSGEALSLLKKRFSHRPVQEKFVCLNCGFETHADEQAALNIARSWLFLRSQEYKKYQTNKTTGNTDKRAFVETWQSFYRKKLKEVWKPAV

SEQ ID NO: 37656 - protein, 977 aa, synthetic construct
  REGION 1..977: note = engineered CasX variant
QEIKRLNKIRRRLVKDSNTKKAGKTGPMKTLLVRVMTPDLRERLENLRKKPENIPQPISNTSRANLNKLLTDYTEMKKAILHVYWEEFQKDPVGLMSRVAQPASKKIDQNKLKPEMDEKGNLTTAGFACSQCGQPLFVYKLEQVSEKGKAYTNYFGRCNVAEHEKLILLAQLKPEKDSDEAVTYSLGKFGQRALDFYSIHVTKESTHPVKPLAQIAGNRYASPVGKALSDACMGTIASFLSKYQDIIIEHQKVVKGNQKRLESLRELAGKENLEYPSVTLPPQPHTKEGVDAYNEVIARVRMWVNLNLWQKLKLSRDDAKPLLRLKGFPSFPLVERQANEVDWWDMVCNVKKLINEKKEDGKVFWQNLAGYKRQEALRPYLSSEEDRKKGKKFARYQLGDLLLHLEKKHGEDWGKVYDEAWERIDKKVEGLSKHIKLEEERRSEDAQSKAALTDWLRAKASFVIEGLKEADKDEFCRCELKLQKWYGDLRGKPFAIEAENSILDISGFSKQYNCAFIWQKDGVKKLNLYLIINYFKGGKLRFKKIKPEAFEANRFYTVINKKSGEIVPMEVNFNFDDPNLIILPLAFGKRVGREFIWNDLLSLETGSLKLANGRVIEKTLYNRRTRQDEPALFVALTFERREVLDSSNIKPMNLIGVDRGENIPAVIALTDPEGCPLSRFKDSLGNPTHILRIGESYKEKQRTIQAKKEVEQRRAGGYSRKYASKAKNLADDMVRNTARDLLYYAVTQDAMLIFENLSRGFGRQGKRTFMAERQYTRMEDWLTAKLAYEGLPSKTYLSKTLAQYTSKTCSNCGFTITSADYDRVLEKLKKTATGWMTTINGKELKVEGQITYYNRYKRQNVVKDLSVELDRLSEESVNNDISSWTKGRSGEALSLLKKRFSHRPVQEKFVCLNCGFETHADEQAALNIARSWLFLRSQEYKKYQTNKTTGNTDKRAFVETWQSFYRKKLKEVWKPAV

SEQ ID NO: 37657 - protein, 978 aa, synthetic construct
  REGION 1..978: note = engineered CasX variant
QEIKRINKIRRRLVKDSNTKKAGKTGPMKTLLVRVMTPDLRERLENLRKKPENIPQPISNTSRANLNKLLTDYTEMKKAILHVYWEEFQKDPVGLMSRVAQPASKKIDQNKLKPEMDEKGNLTTAGFACSQCGQPLFVYKLEQVSEKGKAYTNYVGRCNVAEHEKLILLAQLKPEKDSDEAVTYSLGKFGQRALDFYSIHVTKESTHPVKPLAQIAGNRYASYPVGKALSDACMGTIASFLSKYQDIIIEHQKVVKGNQKRLESLRELAGKENLEYPSVTLPPQPHTKEGVDAYNEVIARVRMWVNLNLWQKLKLSRDDAKPLLRLKGFPSFPLVERQANEVDWWDMVCNVKKLINEKKEDGKVFWQNLAGYKRQEALRPYLSSEEDRKKGKKFARYQLGDLLLHLEKKHGEDWGKVYDEAWERIDKKVEGLSKHIKLEEERRSEDAQSKAALTDWLRAKASFVIEGLKEADKDEFCRCELKLQKWYGDLRGKPFAIEAENSILDISGFSKQYNCAFIWQKDGVKKLNLYLIINYFKGGKLRFKKIKPEAFEANRFYTVINKKSGEIVPMEVNFNFDDPNLIILPLAFGKRVGREFIWNDLLSLETGSLKLANGRVIEKTLYNRRTRQDEPALFVALTFERREVLDSSNIKPMNLIGVDRGENIPAVIALTDPEGCPLSRFKDSLGNPTHILRIGESYKEKQRTIQAKKEVEQRRAGGYSRKYASKAKNLADDMVRNTARDLLYYAVTQDAMLIFENLSRGFGRQGKRTFMAERQYTRMEDWLTAKLAYEGLPSKTYLSKTLAQYTSKTCSNCGFTITSADYDRVLEKLKKTATGWMTTINGKELKVEGQITYYNRYKRQNVVKDLSVELDRLSEESVNNDISSWTKGRSGEALSLLKKRFSHRPVQEKFVCLNCGFETHADEQAALNIARSWLFLRSQEYKKYQTNKTTGNTDKRAFVETWQSFYRKKLKEVWKPAV

SEQ ID NO: 37658 - protein, 978 aa, synthetic construct
  REGION 1..978: note = engineered CasX variant
QEIKRINKIRRRLVKDSNTKKAGKTGPMKTLLVRVMTPDLRERLENLRKKPENIPQPISNTSRANLNKLLTDYTEMKKAILHVYWEEFQKDPVGLMSRVAQPASKKIDQNKLKPEMDEKGNLTTAGFACSQCGQPLFVYKLEQVSEKGKAYTNYVGRCNVAEHEKLILLAQLKPEKDSDEAVTYSLGKFGQRALDFYSIHVTKESTHPVKPLAQIAGNRYASHPVGKALSDACMGTIASFLSKYQDIIIEHQKVVKGNQKRLESLRELAGKENLEYPSVTLPPQPHTKEGVDAYNEVIARVRMWVNLNLWQKLKLSRDDAKPLLRLKGFPSFPLVERQANEVDWWDMVCNVKKLINEKKEDGKVFWQNLAGYKRQEALRPYLSSEEDRKKGKKFARYQLGDLLLHLEKKHGEDWGKVYDEAWERIDKKVEGLSKHIKLEEERRSEDAQSKAALTDWLRAKASFVIEGLKEADKDEFCRCELKLQKWYGDLRGKPFAIEAENSILDISGFSKQYNCAFIWQKDGVKKLNLYLIINYFKGGKLRFKKIKPEAFEANRFYTVINKKSGEIVPMEVNFNFDDPNLIILPLAFGKRVGREFIWNDLLSLETGSLKLANGRVIEKTLYNRRTRQDEPALFVALTFERREVLDSSNIKPMNLIGVDRGENIPAVIALTDPEGCPLSRFKDSLGNPTHILRIGESYKEKQRTIQAKKEVEQRRAGGYSRKYASKAKNLADDMVRNTARDLLYYAVTQDAMLIFENLSRGFGRQGKRTFMAERQYTRMEDWLTAKLAYEGLPSKTYLSKTLAQYTSKTCSNCGFTITSADYDRVLEKLKKTATGWMTTINGKELKVEGQITYYNRYKRQNVVKDLSVELDRLSEESVNNDISSWTKGRSGEALSLLKKRFSHRPVQEKFVCLNCGFETHADEQAALNIARSWLFLRSQEYKKYQTNKTTGNTDKRAFVETWQSFYRKKLKEVWKPAV

SEQ ID NO: 37659 - protein, 978 aa, synthetic construct
  REGION 1..978: note = engineered CasX variant
QEIKRINKIRRRLVKDSNTKKAGKTGPMKTLLVRVMTPDLRERLENLRKKPENIPQPISNTSRANLNKLLTDYTEMKKAILHVYWEEFQKDPVGLMSRVAQPASKKIDQNKLKPEMDEKGNLTTAGFACSQCGQPLFVYKLEQVSEKGKAYTNYVGRCNVAEHEKLILLAQLKPEKDSDEAVTYSLGKFGQRALDFYSIHVTKESTHPVKPLAQIAGNRYASSPVGKALSDACMGTIASFLSKYQDIIIEHQKVVKGNQKRLESLRELAGKENLEYPSVTLPPQPHTKEGVDAYNEVIARVRMWVNLNLWQKLKLSRDDAKPLLRLKGFPSFPLVERQANEVDWWDMVCNVKKLINEKKEDGKVFWQNLAGYKRQEALRPYLSSEEDRKKGKKFARYQLGDLLLHLEKKHGEDWGKVYDEAWERIDKKVEGLSKHIKLEEERRSEDAQSKAALTDWLRAKASFVIEGLKEADKDEFCRCELKLQKWYGDLRGKPFAIEAENSILDISGFSKQYNCAFIWQKDGVKKLNLYLIINYFKGGKLRFKKIKPEAFEANRFYTVINKKSGEIVPMEVNFNFDDPNLIILPLAFGKRVGREFIWNDLLSLETGSLKLANGRVIEKTLYNRRTRQDEPALFVALTFERREVLDSSNIKPMNLIGVDRGENIPAVIALTDPEGCPLSRFKDSLGNPTHILRIGESYKEKQRTIQAKKEVEQRRAGGYSRKYASKAKNLADDMVRNTARDLLYYAVTQDAMLIFENLSRGFGRQGKRTFMAERQYTRMEDWLTAKLAYEGLPSKTYLSKTLAQYTSKTCSNCGFTITSADYDRVLEKLKKTATGWMTTINGKELKVEGQITYYNRYKRQNVVKDLSVELDRLSEESVNNDISSWTKGRSGEALSLLKKRFSHRPVQEKFVCLNCGFETHADEQAALNIARSWLFLRSQEYKKYQTNKTTGNTDKRAFVETWQSFYRKKLKEVWKPAV

SEQ ID NO: 37660 - protein, 978 aa, synthetic construct
  REGION 1..978: note = engineered CasX variant
QEIKRINKIRRRLVKDSNTKKAGKTGPMKTLLVRVMTPDLRERLENLRKKPENIPQPISNTSRANLNKLLTDYTEMKKAILHVYWEEFQKDPVGLMSRVAQPASKKIDQNKLKPEMDEKGNLTTAGFACSQCGQPLFVYKLEQVSEKGKAYTNYVGRCNVAEHEKLILLAQLKPEKDSDEAVTYSLGKFGQRALDFYSIHVTKESTHPVKPLAQIAGNRYASTPVGKALSDACMGTIASFLSKYQDIIIEHQKVVKGNQKRLESLRELAGKENLEYPSVTLPPQPHTKEGVDAYNEVIARVRMWVNLNLWQKLKLSRDDAKPLLRLKGFPSFPLVERQANEVDWWDMVCNVKKLINEKKEDGKVFWQNLAGYKRQEALRPYLSSEEDRKKGKKFARYQLGDLLLHLEKKHGEDWGKVYDEAWERIDKKVEGLSKHIKLEEERRSEDAQSKAALTDWLRAKASFVIEGLKEADKDEFCRCELKLQKWYGDLRGKPFAIEAENSILDISGFSKQYNCAFIWQKDGVKKLNLYLIINYFKGGKLRFKKIKPEAFEANRFYTVINKKSGEIVPMEVNFNFDDPNLIILPLAFGKRVGREFIWNDLLSLETGSLKLANGRVIEKTLYNRRTRQDEPALFVALTFERREVLDSSNIKPMNLIGVDRGENIPAVIALTDPEGCPLSRFKDSLGNPTHILRIGESYKEKQRTIQAKKEVEQRRAGGYSRKYASKAKNLADDMVRNTARDLLYYAVTQDAMLIFENLSRGFGRQGKRTFMAERQYTRMEDWLTAKLAYEGLPSKTYLSKTLAQYTSKTCSNCGFTITSADYDRVLEKLKKTATGWMTTINGKELKVEGQITYYNRYKRQNVVKDLSVELDRLSEESVNNDISSWTKGRSGEALSLLKKRFSHRPVQEKFVCLNCGFETHADEQAALNIARSWLFLRSQEYKKYQTNKTTGNTDKRAFVETWQSFYRKKLKEVWKPAV

SEQ ID NO: 37661 - protein, 978 aa, synthetic construct
  REGION 1..978: note = engineered CasX variant
QEIKRINKIRRRLVKDSNTKKAGKTGPMKTLLVRVMTPDLRERLENLRKKPENIPQPISNTSRANLNKLLTDYTEMKKAILHVYWEEFQKDPVGLMSRVAQPASKKIDQNKLKPEMDEKGNLTTAGFACSQCGQPLFVYKLEQVSEKGKAYTNYVGRCNVAEHEKLILLAQLKPEKDSDEAVTYSLGKFGQRALDFYSIHVTKESTHPVKPLAQIAGNRYASAPVGKALSDACMGTIASFLSKYQDIIIEHQKVVKGNQKRLESLRELAGKENLEYPSVTLPPQPHTKEGVDAYNEVIARVRMWVNLNLWQKLKLSRDDAKPLLRLKGFPSFPLVERQANEVDWWDMVCNVKKLINEKKEDGKVFWQNLAGYKRQEALRPYLSSEEDRKKGKKFARYQLGDLLLHLEKKHGEDWGKVYDEAWERIDKKVEGLSKHIKLEEERRSEDAQSKAALTDWLRAKASFVIEGLKEADKDEFCRCELKLQKWYGDLRGKPFAIEAENSILDISGFSKQYNCAFIWQKDGVKKLNLYLIINYFKGGKLRFKKIKPEAFEANRFYTVINKKSGEIVPMEVNFNFDDPNLIILPLAFGKRVGREFIWNDLLSLETGSLKLANGRVIEKTLYNRRTRQDEPALFVALTFERREVLDSSNIKPMNLIGVDRGENIPAVIALTDPEGCPLSRFKDSLGNPTHILRIGESYKEKQRTIQAKKEVEQRRAGGYSRKYASKAKNLADDMVRNTARDLLYYAVTQDAMLIFENLSRGFGRQGKRTFMAERQYTRMEDWLTAKLAYEGLPSKTYLSKTLAQYTSKTCSNCGFTITSADYDRVLEKLKKTATGWMTTINGKELKVEGQITYYNRYKRQNVVKDLSVELDRLSEESVNNDISSWTKGRSGEALSLLKKRFSHRPVQEKFVCLNCGFETHADEQAALNIARSWLFLRSQEYKKYQTNKTTGNTDKRAFVETWQSFYRKKLKEVWKPAV

SEQ ID NO: 37662 - protein, 978 aa, synthetic construct
  REGION 1..978: note = engineered CasX variant
QEIKRINKIRRRLVKDSNTKKAGKTGPMKTLLVRVMTPDLRERLENLRKKPENIPQPISNTSRANLNKLLTDYTEMKKAILHVYWEEFQKDPVGLMSRVAQPASKKIDQNKLKPEMDEKGNLTTAGFACSQCGQPLFVYKLEQVSEKGKAYTNYVGRCNVAEHEKLILLAQLKPEKDSDEAVTYSLGKFGQRALDFYSIHVTKESTHPVKPLAQIAGNRYASVPVGKALSDACMGTIASFLSKYQDIIIEHQKVVKGNQKRLESLRELAGKENLEYPSVTLPPQPHTKEGVDAYNEVIARVRMWVNLNLWQKLKLSRDDAKPLLRLKGFPSFPLVERQANEVDWWDMVCNVKKLINEKKEDGKVFWQNLAGYKRQEALRPYLSSEEDRKKGKKFARYQLGDLLLHLEKKHGEDWGKVYDEAWERIDKKVEGLSKHIKLEEERRSEDAQSKAALTDWLRAKASFVIEGLKEADKDEFCRCELKLQKWYGDLRGKPFAIEAENSILDISGFSKQYNCAFIWQKDGVKKLNLYLIINYFKGGKLRFKKIKPEAFEANRFYTVINKKSGEIVPMEVNFNFDDPNLIILPLAFGKRVGREFIWNDLLSLETGSLKLANGRVIEKTLYNRRTRQDEPALFVALTFERREVLDSSNIKPMNLIGVDRGENIPAVIALTDPEGCPLSRFKDSLGNPTHILRIGESYKEKQRTIQAKKEVEQRRAGGYSRKYASKAKNLADDMVRNTARDLLYYAVTQDAMLIFENLSRGFGRQGKRTFMAERQYTRMEDWLTAKLAYEGLPSKTYLSKTLAQYTSKTCSNCGFTITSADYDRVLEKLKKTATGWMTTINGKELKVEGQITYYNRYKRQNVVKDLSVELDRLSEESVNNDISSWTKGRSGEALSLLKKRFSHRPVQEKFVCLNCGFETHADEQAALNIARSWLFLRSQEYKKYQTNKTTGNTDKRAFVETWQSFYRKKLKEVWKPAV

SEQ ID NO: 37663 - protein, 978 aa, synthetic construct
  REGION 1..978: note = engineered CasX variant
QEIKRINKIRRRLVKDSNTKKAGKTGPMKTLLVRVMTPDLRERLENLRKKPENIPQPISNTSRANLNKLLTDYTEMKKAILHVYWEEFQKDPVGLMSRVAQPASKKIDQNKLKPEMDEKGNLTTAGFACSQCGQPLFVYKLEQVSEKGKAYTNYVGRCNVAEHEKLIKLAQLKPEKDSDEAVTYSLGKFGQRALDFYSIHVTKESTHPVKPLAQIAGNRYASGPVGKALSDACMGTIASFLSKYQDIIIEHQKVVKGNQKRLESLRELAGKENLEYPSVTLPPQPHTKEGVDAYNEVIARVRMWVNLNLWQKLKLSRDDAKPLLRLKGFPSFPLVERQANEVDWWDMVCNVKKLINEKKEDGKVFWQNLAGYKRQEALRPYLSSEEDRKKGKKFARYQLGDLLLHLEKKHGEDWGKVYDEAWERIDKKVEGLSKHIKLEEERRSEDAQSKAALTDWLRAKASFVIEGLKEADKDEFCRCELKLQKWYGDLRGKPFAIEAENSILDISGFSKQYNCAFIWQKDGVKKLNLYLIINYFKGGKLRFKKIKPEAFEANRFYTVINKKSGEIVPMEVNFNFDDPNLIILPLAFGKRVGREFIWNDLLSLETGSLKLANGRVIEKTLYNRRTRQDEPALFVALTFERREVLDSSNIKPMNLIGVDRGENIPAVIALTDPEGCPLSRFKDSLGNPTHILRIGESYKEKQRTIQAKKEVEQRRAGGYSRKYASKAKNLADDMVRNTARDLLYYAVTQDAMLIFENLSRGFGRQGKRTFMAERQYTRMEDWLTAKLAYEGLPSKTYLSKTLAQYTSKTCSNCGFTITSADYDRVLEKLKKTATGWMTTINGKELKVEGQITYYNRYKRQNVVKDLSVELDRLSEESVNNDISSWTKGRSGEALSLLKKRFSHRPVQEKFVCLNCGFETHADEQAALNIARSWLFLRSQEYKKYQTNKTTGNTDKRAFVETWQSFYRKKLKEVWKPAV

SEQ ID NO: 37664 - protein, 977 aa, synthetic construct
  REGION 1..977: note = engineered CasX variant
QEIKRINKIRRRLVKDSNTKKAGKTGPMKTLLVRVMTPDLRERLENLRKKPENIPQPISNTSRANLNKLLTDYTEMKKAILHVYWEEFQKDPVGLMSRVAQPASKKIDQNKLKPEMDEKGNLTTAGFACSQCGQPLFVYKLEQVSEKGKAYTNYVGRCNVAEHEKLILLAQLKPEKDSDEAVTYSLGKFGQRALDFYSIHVTKESTHPVKPLAQIAGNRYASPVGKALSDACMGTIASFLSKYQDIIIEHQKVVKGNQKRLESLRELAGKENLEYPSVTLPPQPHTKEGVDAYNEVIARVRMWVNLNLWQKLKLSRDDAKPLLRLKGFPSFPLVERQANEVDWWDMVCNVKKLINEKKEDGKVFWQNLAGYKRQEALRPYLSSEEDRKKGKKFARYQLGDLLLHLEKKHGEDWGKVYDEAWERIDKKVEGLSKHIKLEEERRSEDAQSKAALTDWLRAKASFVIEGLKEADKDEFCRCELKLQKWYGDLRGKPFAIEAENSILDISGFSKQYNCAFIWQKDGVKKLNLYLIINYFKGGKLRFKKIKPEAFEANRFYTVINKKSGEIVPMEVNFNFDDPNLIILPLAFGKRVGREFIWNDLLSLETGSLKLANGRVIEKTLYNRRTRQDEPALFVALTFERREVLDSSNIKPMNLIGVDRGENIPAVIALTDPEGCPLSRFKDSLGNPTHILRIGESYKEKQRTIQAKKEVEQRRAGGYSRKYASKAKNLADDMVRNTARDLLYYAVTQDAMLIFENLSRGFGRQGKRTFMAERQYTRMEDWLTAKLAYEGLPSKTYLSKTLAQYTSKTCSNCGFTITSADYDRVLEKLKKTATGWMTTINGKELKVEGQITYYNRYKRQNVVKDLSVELDRLSEESVNNDISSWTKGRSGEALSLLKKRFSHRPVQEKFVCLNCGFETHADEQAALNIARSWLFLRSQEYKKYQTNKTTGNTDKRAFVETWQSFYRKKLKEVWKPAV

SEQ ID NO: 37665 - protein, 978 aa, synthetic construct
  REGION 1..978: note = engineered CasX variant
QEIKRINKIRRRLVKDSNTKKAGKTGPMKTLLVRVMTPDLRERLENLRKKPENIPQPISNTSRANLNKLLTDYTEMKKAILHVYWEEFQKDPVGLMSRVAQPASKKIDQNKLKPEMDEKGNLTTAGFACSQCGQPLFVYKLEQVSEKGKAYTNYFGRCNVAEHEKLILLAQLKPEKDSDEAVTYSLGKFGQRALDFYSIHVTKESTHPVKPLAQIAGNRYASYPVGKALSDACMGTIASFLSKYQDIIIEHQKVVKGNQKRLESLRELAGKENLEYPSVTLPPQPHTKEGVDAYNEVIARVRMWVNLNLWQKLKLSRDDAKPLLRLKGFPSFPLVERQANEVDWWDMVCNVKKLINEKKEDGKVFWQNLAGYKRQEALRPYLSSEEDRKKGKKFARYQLGDLLLHLEKKHGEDWGKVYDEAWERIDKKVEGLSKHIKLEEERRSEDAQSKAALTDWLRAKASFVIEGLKEADKDEFCRCELKLQKWYGDLRGKPFAIEAENSILDISGFSKQYNCAFIWQKDGVKKLNLYLIINYFKGGKLRFKKIKPEAFEANRFYTVINKKSGEIVPMEVNFNFDDPNLIILPLAFGKRVGREFIWNDLLSLETGSLKLANGRVIEKTLYNRRTRQDEPALFVALTFERREVLDSSNIKPMNLIGVDRGENIPAVIALTDPEGCPLSRFKDSLGNPTHILRIGESYKEKQRTIQAKKEVEQRRAGGYSRKYASKAKNLADDMVRNTARDLLYYAVTQDAMLIFENLSRGFGRQGKRTFMAERQYTRMEDWLTAKLAYEGLASKTYLSKTLAQYTSKTCSNCGFTITSADYDRVLEKLKKTATGWMTTINGKELKVEGQITYYNRYKRQNVVKDLSVELDRLSEESVNNDISSWTKGRSGEALSLLKKRFSHRPVQEKFVCLNCGFETHADEQAALNIARSWLFLRSQEYKKYQTNKTTGNTDKRAFVETWQSFYRKKLKEVWKPAV

SEQ ID NO: 37666 - protein, 978 aa, synthetic construct
  REGION 1..978: note = engineered CasX variant
QEIKRINKIRRRLVKDSNTKKAGKTGPMKTLLVRVMTPDLRERLENLRKKPENIPQPISNTSRANLNKLLTDYTEMKKAILHVYWEEFQKDPVGLMSRVAQPASKKIDQNKLKPEMDEKGNLTTAGFACSQCGQPLFVYKLEQVSEKGKAYTNYFGRCNVAEHEKLILLAQLKPEKDSDEAVTYSLGKFGQRALDFYSIHVTKESTHPVKPLAQIAGNRYASHPVGKALSDACMGTIASFLSKYQDIIIEHQKVVKGNQKRLESLRELAGKENLEYPSVTLPPQPHTKEGVDAYNEVIARVRMWVNLNLWQKLKLSRDDAKPLLRLKGFPSFPLVERQANEVDWWDMVCNVKKLINEKKEDGKVFWQNLAGYKRQEALRPYLSSEEDRKKGKKFARYQLGDLLLHLEKKHGEDWGKVYDEAWERIDKKVEGLSKHIKLEEERRSEDAQSKAALTDWLRAKASFVIEGLKEADKDEFCRCELKLQKWYGDLRGKPFAIEAENSILDISGFSKQYNCAFIWQKDGVKKLNLYLIINYFKGGKLRFKKIKPEAFEANRFYTVINKKSGEIVPMEVNFNFDDPNLIILPLAFGKRVGREFIWNDLLSLETGSLKLANGRVIEKTLYNRRTRQDEPALFVALTFERREVLDSSNIKPMNLIGVDRGENIPAVIALTDPEGCPLSRFKDSLGNPTHILRIGESYKEKQRTIQAKKEVEQRRAGGYSRKYASKAKNLADDMVRNTARDLLYYAVTQDAMLIFENLSRGFGRQGKRTFMAERQYTRMEDWLTAKLAYEGLASKTYLSKTLAQYTSKTCSNCGFTITSADYDRVLEKLKKTATGWMTTINGKELKVEGQITYYNRYKRQNVVKDLSVELDRLSEESVNNDISSWTKGRSGEALSLLKKRFSHRPVQEKFVCLNCGFETHADEQAALNIARSWLFLRSQEYKKYQTNKTTGNTDKRAFVETWQSFYRKKLKEVWKPAV

SEQ ID NO: 37667 - protein, 978 aa, synthetic construct
  REGION 1..978: note = engineered CasX variant
QEIKRINKIRRRLVKDSNTKKAGKTGPMKTLLVRVMTPDLRERLENLRKKPENIPQPISNTSRANLNKLLTDYTEMKKAILHVYWEEFQKDPVGLMSRVAQPASKKIDQNKLKPEMDEKGNLTTAGFACSQCGQPLFVYKLEQVSEKGKAYTNYFGRCNVAEHEKLILLAQLKPEKDSDEAVTYSLGKFGQRALDFYSIHVTKESTHPVKPLAQIAGNRYASSPVGKALSDACMGTIASFLSKYQDIIIEHQKVVKGNQKRLESLRELAGKENLEYPSVTLPPQPHTKEGVDAYNEVIARVRMWVNLNLWQKLKLSRDDAKPLLRLKGFPSFPLVERQANEVDWWDMVCNVKKLINEKKEDGKVFWQNLAGYKRQEALRPYLSSEEDRKKGKKFARYQLGDLLLHLEKKHGEDWGKVYDEAWERIDKKVEGLSKHIKLEEERRSEDAQSKAALTDWLRAKASFVIEGLKEADKDEFCRCELKLQKWYGDLRGKPFAIEAENSILDISGFSKQYNCAFIWQKDGVKKLNLYLIINYFKGGKLRFKKIKPEAFEANRFYTVINKKSGEIVPMEVNFNFDDPNLIILPLAFGKRVGREFIWNDLLSLETGSLKLANGRVIEKTLYNRRTRQDEPALFVALTFERREVLDSSNIKPMNLIGVDRGENIPAVIALTDPEGCPLSRFKDSLGNPTHILRIGESYKEKQRTIQAKKEVEQRRAGGYSRKYASKAKNLADDMVRNTARDLLYYAVTQDAMLIFENLSRGFGRQGKRTFMAERQYTRMEDWLTAKLAYEGLASKTYLSKTLAQYTSKTCSNCGFTITSADYDRVLEKLKKTATGWMTTINGKELKVEGQITYYNRYKRQNVVKDLSVELDRLSEESVNNDISSWTKGRSGEALSLLKKRFSHRPVQEKFVCLNCGFETHADEQAALNIARSWLFLRSQEYKKYQTNKTTGNTDKRAFVETWQSFYRKKLKEVWKPAV

SEQ ID NO: 37668 - protein, 978 aa, synthetic construct
  REGION 1..978: note = engineered CasX variant
QEIKRINKIRRRLVKDSNTKKAGKTGPMKTLLVRVMTPDLRERLENLRKKPENIPQPISNTSRANLNKLLTDYTEMKKAILHVYWEEFQKDPVGLMSRVAQPASKKIDQNKLKPEMDEKGNLTTAGFACSQCGQPLFVYKLEQVSEKGKAYTNYFGRCNVAEHEKLILLAQLKPEKDSDEAVTYSLGKFGQRALDFYSIHVTKESTHPVKPLAQIAGNRYASTPVGKALSDACMGTIASFLSKYQDIIIEHQKVVKGNQKRLESLRELAGKENLEYPSVTLPPQPHTKEGVDAYNEVIARVRMWVNLNLWQKLKLSRDDAKPLLRLKGFPSFPLVERQANEVDWWDMVCNVKKLINEKKEDGKVFWQNLAGYKRQEALRPYLSSEEDRKKGKKFARYQLGDLLLHLEKKHGEDWGKVYDEAWERIDKKVEGLSKHIKLEEERRSEDAQSKAALTDWLRAKASFVIEGLKEADKDEFCRCELKLQKWYGDLRGKPFAIEAENSILDISGFSKQYNCAFIWQKDGVKKLNLYLIINYFKGGKLRFKKIKPEAFEANRFYTVINKKSGEIVPMEVNFNFDDPNLIILPLAFGKRVGREFIWNDLLSLETGSLKLANGRVIEKTLYNRRTRQDEPALFVALTFERREVLDSSNIKPMNLIGVDRGENIPAVIALTDPEGCPLSRFKDSLGNPTHILRIGESYKEKQRTIQAKKEVEQRRAGGYSRKYASKAKNLADDMVRNTARDLLYYAVTQDAMLIFENLSRGFGRQGKRTFMAERQYTRMEDWLTAKLAYEGLASKTYLSKTLAQYTSKTCSNCGFTITSADYDRVLEKLKKTATGWMTTINGKELKVEGQITYYNRYKRQNVVKDLSVELDRLSEESVNNDISSWTKGRSGEALSLLKKRFSHRPVQEKFVCLNCGFETHADEQAALNIARSWLFLRSQEYKKYQTNKTTGNTDKRAFVETWQSFYRKKLKEVWKPAV

SEQ ID NO: 37669 - protein, 978 aa, synthetic construct
  REGION 1..978: note = engineered CasX variant
QEIKRINKIRRRLVKDSNTKKAGKTGPMKTLLVRVMTPDLRERLENLRKKPENIPQPISNTSRANLNKLLTDYTEMKKAILHVYWEEFQKDPVGLMSRVAQPASKKIDQNKLKPEMDEKGNLTTAGFACSQCGQPLFVYKLEQVSEKGKAYTNYFGRCNVAEHEKLILLAQLKPEKDSDEAVTYSLGKFGQRALDFYSIHVTKESTHPVKPLAQIAGNRYASAPVGKALSDACMGTIASFLSKYQDIIIEHQKVVKGNQKRLESLRELAGKENLEYPSVTLPPQPHTKEGVDAYNEVIARVRMWVNLNLWQKLKLSRDDAKPLLRLKGFPSFPLVERQANEVDWWDMVCNVKKLINEKKEDGKVFWQNLAGYKRQEALRPYLSSEEDRKKGKKFARYQLGDLLLHLEKKHGEDWGKVYDEAWERIDKKVEGLSKHIKLEEERRSEDAQSKAALTDWLRAKASFVIEGLKEADKDEFCRCELKLQKWYGDLRGKPFAIEAENSILDISGFSKQYNCAFIWQKDGVKKLNLYLIINYFKGGKLRFKKIKPEAFEANRFYTVINKKSGEIVPMEVNFNFDDPNLIILPLAFGKRVGREFIWNDLLSLETGSLKLANGRVIEKTLYNRRTRQDEPALFVALTFERREVLDSSNIKPMNLIGVDRGENIPAVIALTDPEGCPLSRFKDSLGNPTHILRIGESYKEKQRTIQAKKEVEQRRAGGYSRKYASKAKNLADDMVRNTARDLLYYAVTQDAMLIFENLSRGFGRQGKRTFMAERQYTRMEDWLTAKLAYEGLASKTYLSKTLAQYTSKTCSNCGFTITSADYDRVLEKLKKTATGWMTTINGKELKVEGQITYYNRYKRQNVVKDLSVELDRLSEESVNNDISSWTKGRSGEALSLLKKRFSHRPVQEKFVCLNCGFETHADEQAALNIARSWLFLRSQEYKKYQTNKTTGNTDKRAFVETWQSFYRKKLKEVWKPAV

SEQ ID NO: 37670 - protein, 978 aa, synthetic construct
  REGION 1..978: note = engineered CasX variant
QEIKRINKIRRRLVKDSNTKKAGKTGPMKTLLVRVMTPDLRERLENLRKKPENIPQPISNTSRANLNKLLTDYTEMKKAILHVYWEEFQKDPVGLMSRVAQPASKKIDQNKLKPEMDEKGNLTTAGFACSQCGQPLFVYKLEQVSEKGKAYTNYFGRCNVAEHEKLILLAQLKPEKDSDEAVTYSLGKFGQRALDFYSIHVTKESTHPVKPLAQIAGNRYASVPVGKALSDACMGTIASFLSKYQDIIIEHQKVVKGNQKRLESLRELAGKENLEYPSVTLPPQPHTKEGVDAYNEVIARVRMWVNLNLWQKLKLSRDDAKPLLRLKGFPSFPLVERQANEVDWWDMVCNVKKLINEKKEDGKVFWQNLAGYKRQEALRPYLSSEEDRKKGKKFARYQLGDLLLHLEKKHGEDWGKVYDEAWERIDKKVEGLSKHIKLEEERRSEDAQSKAALTDWLRAKASFVIEGLKEADKDEFCRCELKLQKWYGDLRGKPFAIEAENSILDISGFSKQYNCAFIWQKDGVKKLNLYLIINYFKGGKLRFKKIKPEAFEANRFYTVINKKSGEIVPMEVNFNFDDPNLIILPLAFGKRVGREFIWNDLLSLETGSLKLANGRVIEKTLYNRRTRQDEPALFVALTFERREVLDSSNIKPMNLIGVDRGENIPAVIALTDPEGCPLSRFKDSLGNPTHILRIGESYKEKQRTIQAKKEVEQRRAGGYSRKYASKAKNLADDMVRNTARDLLYYAVTQDAMLIFENLSRGFGRQGKRTFMAERQYTRMEDWLTAKLAYEGLASKTYLSKTLAQYTSKTCSNCGFTITSADYDRVLEKLKKTATGWMTTINGKELKVEGQITYYNRYKRQNVVKDLSVELDRLSEESVNNDISSWTKGRSGEALSLLKKRFSHRPVQEKFVCLNCGFETHADEQAALNIARSWLFLRSQEYKKYQTNKTTGNTDKRAFVETWQSFYRKKLKEVWKPAV

SEQ ID NO: 37671 - protein, 978 aa, synthetic construct
  REGION 1..978: note = engineered CasX variant
QEIKRINKIRRRLVKDSNTKKAGKTGPMKTLLVRVMTPDLRERLENLRKKPENIPQPISNTSRANLNKLLTDYTEMKKAILHVYWEEFQKDPVGLMSRVAQPASKKIDQNKLKPEMDEKGNLTTAGFACSQCGQPLFVYKLEQVSEKGKAYTNYFGRCNVAEHEKLIKLAQLKPEKDSDEAVTYSLGKFGQRALDFYSIHVTKESTHPVKPLAQIAGNRYASGPVGKALSDACMGTIASFLSKYQDIIIEHQKVVKGNQKRLESLRELAGKENLEYPSVTLPPQPHTKEGVDAYNEVIARVRMWVNLNLWQKLKLSRDDAKPLLRLKGFPSFPLVERQANEVDWWDMVCNVKKLINEKKEDGKVFWQNLAGYKRQEALRPYLSSEEDRKKGKKFARYQLGDLLLHLEKKHGEDWGKVYDEAWERIDKKVEGLSKHIKLEEERRSEDAQSKAALTDWLRAKASFVIEGLKEADKDEFCRCELKLQKWYGDLRGKPFAIEAENSILDISGFSKQYNCAFIWQKDGVKKLNLYLIINYFKGGKLRFKKIKPEAFEANRFYTVINKKSGEIVPMEVNFNFDDPNLIILPLAFGKRVGREFIWNDLLSLETGSLKLANGRVIEKTLYNRRTRQDEPALFVALTFERREVLDSSNIKPMNLIGVDRGENIPAVIALTDPEGCPLSRFKDSLGNPTHILRIGESYKEKQRTIQAKKEVEQRRAGGYSRKYASKAKNLADDMVRNTARDLLYYAVTQDAMLIFENLSRGFGRQGKRTFMAERQYTRMEDWLTAKLAYEGLASKTYLSKTLAQYTSKTCSNCGFTITSADYDRVLEKLKKTATGWMTTINGKELKVEGQITYYNRYKRQNVVKDLSVELDRLSEESVNNDISSWTKGRSGEALSLLKKRFSHRPVQEKFVCLNCGFETHADEQAALNIARSWLFLRSQEYKKYQTNKTTGNTDKRAFVETWQSFYRKKLKEVWKPAV

SEQ ID NO: 37672 - protein, 977 aa, synthetic construct
  REGION 1..977: note = engineered CasX variant
QEIKRINKIRRRLVKDSNTKKAGKTGPMKTLLVRVMTPDLRERLENLRKKPENIPQPISNTSRANLNKLLTDYTEMKKAILHVYWEEFQKDPVGLMSRVAQPASKKIDQNKLKPEMDEKGNLTTAGFACSQCGQPLFVYKLEQVSEKGKAYTNYFGRCNVAEHEKLILLAQLKPEKDSDEAVTYSLGKFGQRALDFYSIHVTKESTHPVKPLAQIAGNRYASPVGKALSDACMGTIASFLSKYQDIIIEHQKVVKGNQKRLESLRELAGKENLEYPSVTLPPQPHTKEGVDAYNEVIARVRMWVNLNLWQKLKLSRDDAKPLLRLKGFPSFPLVERQANEVDWWDMVCNVKKLINEKKEDGKVFWQNLAGYKRQEALRPYLSSEEDRKKGKKFARYQLGDLLLHLEKKHGEDWGKVYDEAWERIDKKVEGLSKHIKLEEERRSEDAQSKAALTDWLRAKASFVIEGLKEADKDEFCRCELKLQKWYGDLRGKPFAIEAENSILDISGFSKQYNCAFIWQKDGVKKLNLYLIINYFKGGKLRFKKIKPEAFEANRFYTVINKKSGEIVPMEVNFNFDDPNLIILPLAFGKRVGREFIWNDLLSLETGSLKLANGRVIEKTLYNRRTRQDEPALFVALTFERREVLDSSNIKPMNLIGVDRGENIPAVIALTDPEGCPLSRFKDSLGNPTHILRIGESYKEKQRTIQAKKEVEQRRAGGYSRKYASKAKNLADDMVRNTARDLLYYAVTQDAMLIFENLSRGFGRQGKRTFMAERQYTRMEDWLTAKLAYEGLASKTYLSKTLAQYTSKTCSNCGFTITSADYDRVLEKLKKTATGWMTTINGKELKVEGQITYYNRYKRQNVVKDLSVELDRLSEESVNNDISSWTKGRSGEALSLLKKRFSHRPVQEKFVCLNCGFETHADEQAALNIARSWLFLRSQEYKKYQTNKTTGNTDKRAFVETWQSFYRKKLKEVWKPAV

SEQ ID NO: 37673 - protein, 978 aa, synthetic construct
  REGION 1..978: note = engineered CasX variant
QEIKRINKIRRRLVKDSNTKKAGKTGPMKTLLVRVMTPDLRERLENLRKKPENIPQPISNTSRANLNKLLTDYTEMKKAILHVYWEEFQKDPVGLMSRVAQPASKKIDQNKLKPEMDEKGNLTTAGFACSQCGQPLFVYKLEQVSEKGKAYTNYFGRCNVAEHEKLILLAQLKPEKDSDEAVTYSLGKFGQRALDFYSIHVTKESTHPVKPLAQIAGNRYASYPVGKALSDACMGTIASFLSKYQDIIIEHQKVVKGNQKRLESLRELAGKENLEYPSVTLPPQPHTKEGVDAYNEVIARVRMWVNLNLWQKLKLSRDDAKPLLRLKGFPSFPLVERQANEVDWWDMVCNVKKLINEKKEDGKVFWQNLAGYKRQEALRPYLSSEEDRKKGKKFARYQLGDLLLHLEKKHGEDWGKVYDEAWERIDKKVEGLSKHIKLEEERRSEDAQSKAALTDWLRAKASFVIEGLKEADKDEFCRCELKLQKWYGDLRGKPFAIEAENSILDISGFSKQYNCAFIWQKDGVKKLNLYLIINYFKGGKLRFKKIKPEAFEANRFYTVINKKSGEIVPMEVNFNFDDPNLIILPLAFGKRVGREFIWNDLLSLETGSLKLANGRVIEKTLYNRRTRQDEPALFVALTFERREVLDSSNIKPMNLIGVDRGENIPAVIALTDPEGCPLSRFKDSLGNPTHILRIGESYKEKQRTIQAKKEVEQRRAGGYSRKYASKAKNLADDMVRNTARDLLYYAVTQDAMLIFENLSRGFGRQGKRTFMAERQYTRMEDWLTAKLAYEGLPSKVYLSKTLAQYTSKTCSNCGFTITSADYDRVLEKLKKTATGWMTTINGKELKVEGQITYYNRYKRQNVVKDLSVELDRLSEESVNNDISSWTKGRSGEALSLLKKRFSHRPVQEKFVCLNCGFETHADEQAALNIARSWLFLRSQEYKKYQTNKTTGNTDKRAFVETWQSFYRKKLKEVWKPAV

SEQ ID NO: 37674 - protein, 978 aa, synthetic construct
  REGION 1..978: note = engineered CasX variant
QEIKRINKIRRRLVKDSNTKKAGKTGPMKTLLVRVMTPDLRERLENLRKKPENIPQPISNTSRANLNKLLTDYTEMKKAILHVYWEEFQKDPVGLMSRVAQPASKKIDQNKLKPEMDEKGNLTTAGFACSQCGQPLFVYKLEQVSEKGKAYTNYFGRCNVAEHEKLILLAQLKPEKDSDEAVTYSLGKFGQRALDFYSIHVTKESTHPVKPLAQIAGNRYASHPVGKALSDACMGTIASFLSKYQDIIIEHQKVVKGNQKRLESLRELAGKENLEYPSVTLPPQPHTKEGVDAYNEVIARVRMWVNLNLWQKLKLSRDDAKPLLRLKGFPSFPLVERQANEVDWWDMVCNVKKLINEKKEDGKVFWQNLAGYKRQEALRPYLSSEEDRKKGKKFARYQLGDLLLHLEKKHGEDWGKVYDEAWERIDKKVEGLSKHIKLEEERRSEDAQSKAALTDWLRAKASFVIEGLKEADKDEFCRCELKLQKWYGDLRGKPFAIEAENSILDISGFSKQYNCAFIWQKDGVKKLNLYLIINYFKGGKLRFKKIKPEAFEANRFYTVINKKSGEIVPMEVNFNFDDPNLIILPLAFGKRVGREFIWNDLLSLETGSLKLANGRVIEKTLYNRRTRQDEPALFVALTFERREVLDSSNIKPMNLIGVDRGENIPAVIALTDPEGCPLSRFKDSLGNPTHILRIGESYKEKQRTIQAKKEVEQRRAGGYSRKYASKAKNLADDMVRNTARDLLYYAVTQDAMLIFENLSRGFGRQGKRTFMAERQYTRMEDWLTAKLAYEGLPSKVYLSKTLAQYTSKTCSNCGFTITSADYDRVLEKLKKTATGWMTTINGKELKVEGQITYYNRYKRQNVVKDLSVELDRLSEESVNNDISSWTKGRSGEALSLLKKRFSHRPVQEKFVCLNCGFETHADEQAALNIARSWLFLRSQEYKKYQTNKTTGNTDKRAFVETWQSFYRKKLKEVWKPAV

SEQ ID NO: 37675 - protein, 978 aa, synthetic construct
  REGION 1..978: note = engineered CasX variant
QEIKRINKIRRRLVKDSNTKKAGKTGPMKTLLVRVMTPDLRERLENLRKKPENIPQPISNTSRANLNKLLTDYTEMKKAILHVYWEEFQKDPVGLMSRVAQPASKKIDQNKLKPEMDEKGNLTTAGFACSQCGQPLFVYKLEQVSEKGKAYTNYFGRCNVAEHEKLILLAQLKPEKDSDEAVTYSLGKFGQRALDFYSIHVTKESTHPVKPLAQIAGNRYASSPVGKALSDACMGTIASFLSKYQDIIIEHQKVVKGNQKRLESLRELAGKENLEYPSVTLPPQPHTKEGVDAYNEVIARVRMWVNLNLWQKLKLSRDDAKPLLRLKGFPSFPLVERQANEVDWWDMVCNVKKLINEKKEDGKVFWQNLAGYKRQEALRPYLSSEEDRKKGKKFARYQLGDLLLHLEKKHGEDWGKVYDEAWERIDKKVEGLSKHIKLEEERRSEDAQSKAALTDWLRAKASFVIEGLKEADKDEFCRCELKLQKWYGDLRGKPFAIEAENSILDISGFSKQYNCAFIWQKDGVKKLNLYLIINYFKGGKLRFKKIKPEAFEANRFYTVINKKSGEIVPMEVNFNFDDPNLIILPLAFGKRVGREFIWNDLLSLETGSLKLANGRVIEKTLYNRRTRQDEPALFVALTFERREVLDSSNIKPMNLIGVDRGENIPAVIALTDPEGCPLSRFKDSLGNPTHILRIGESYKEKQRTIQAKKEVEQRRAGGYSRKYASKAKNLADDMVRNTARDLLYYAVTQDAMLIFENLSRGFGRQGKRTFMAERQYTRMEDWLTAKLAYEGLPSKVYLSKTLAQYTSKTCSNCGFTITSADYDRVLEKLKKTATGWMTTINGKELKVEGQITYYNRYKRQNVVKDLSVELDRLSEESVNNDISSWTKGRSGEALSLLKKRFSHRPVQEKFVCLNCGFETHADEQAALNIARSWLFLRSQEYKKYQTNKTTGNTDKRAFVETWQSFYRKKLKEVWKPAV

SEQ ID NO: 37676 - protein, 978 aa, synthetic construct
  REGION 1..978: note = engineered CasX variant
QEIKRINKIRRRLVKDSNTKKAGKTGPMKTLLVRVMTPDLRERLENLRKKPENIPQPISNTSRANLNKLLTDYTEMKKAILHVYWEEFQKDPVGLMSRVAQPASKKIDQNKLKPEMDEKGNLTTAGFACSQCGQPLFVYKLEQVSEKGKAYTNYFGRCNVAEHEKLILLAQLKPEKDSDEAVTYSLGKFGQRALDFYSIHVTKESTHPVKPLAQIAGNRYASTPVGKALSDACMGTIASFLSKYQDIIIEHQKVVKGNQKRLESLRELAGKENLEYPSVTLPPQPHTKEGVDAYNEVIARVRMWVNLNLWQKLKLSRDDAKPLLRLKGFPSFPLVERQANEVDWWDMVCNVKKLINEKKEDGKVFWQNLAGYKRQEALRPYLSSEEDRKKGKKFARYQLGDLLLHLEKKHGEDWGKVYDEAWERIDKKVEGLSKHIKLEEERRSEDAQSKAALTDWLRAKASFVIEGLKEADKDEFCRCELKLQKWYGDLRGKPFAIEAENSILDISGFSKQYNCAFIWQKDGVKKLNLYLIINYFKGGKLRFKKIKPEAFEANRFYTVINKKSGEIVPMEVNFNFDDPNLIILPLAFGKRVGREFIWNDLLSLETGSLKLANGRVIEKTLYNRRTRQDEPALFVALTFERREVLDSSNIKPMNLIGVDRGENIPAVIALTDPEGCPLSRFKDSLGNPTHILRIGESYKEKQRTIQAKKEVEQRRAGGYSRKYASKAKNLADDMVRNTARDLLYYAVTQDAMLIFENLSRGFGRQGKRTFMAERQYTRMEDWLTAKLAYEGLPSKVYLSKTLAQYTSKTCSNCGFTITSADYDRVLEKLKKTATGWMTTINGKELKVEGQITYYNRYKRQNVVKDLSVELDRLSEESVNNDISSWTKGRSGEALSLLKKRFSHRPVQEKFVCLNCGFETHADEQAALNIARSWLFLRSQEYKKYQTNKTTGNTDKRAFVETWQSFYRKKLKEVWKPAV

SEQ ID NO: 37677 - protein, 978 aa, synthetic construct
  REGION 1..978: note = engineered CasX variant
QEIKRINKIRRRLVKDSNTKKAGKTGPMKTLLVRVMTPDLRERLENLRKKPENIPQPISNTSRANLNKLLTDYTEMKKAILHVYWEEFQKDPVGLMSRVAQPASKKIDQNKLKPEMDEKGNLTTAGFACSQCGQPLFVYKLEQVSEKGKAYTNYFGRCNVAEHEKLILLAQLKPEKDSDEAVTYSLGKFGQRALDFYSIHVTKESTHPVKPLAQIAGNRYASAPVGKALSDACMGTIASFLSKYQDIIIEHQKVVKGNQKRLESLRELAGKENLEYPSVTLPPQPHTKEGVDAYNEVIARVRMWVNLNLWQKLKLSRDDAKPLLRLKGFPSFPLVERQANEVDWWDMVCNVKKLINEKKEDGKVFWQNLAGYKRQEALRPYLSSEEDRKKGKKFARYQLGDLLLHLEKKHGEDWGKVYDEAWERIDKKVEGLSKHIKLEEERRSEDAQSKAALTDWLRAKASFVIEGLKEADKDEFCRCELKLQKWYGDLRGKPFAIEAENSILDISGFSKQYNCAFIWQKDGVKKLNLYLIINYFKGGKLRFKKIKPEAFEANRFYTVINKKSGEIVPMEVNFNFDDPNLIILPLAFGKRVGREFIWNDLLSLETGSLKLANGRVIEKTLYNRRTRQDEPALFVALTFERREVLDSSNIKPMNLIGVDRGENIPAVIALTDPEGCPLSRFKDSLGNPTHILRIGESYKEKQRTIQAKKEVEQRRAGGYSRKYASKAKNLADDMVRNTARDLLYYAVTQDAMLIFENLSRGFGRQGKRTFMAERQYTRMEDWLTAKLAYEGLPSKVYLSKTLAQYTSKTCSNCGFTITSADYDRVLEKLKKTATGWMTTINGKELKVEGQITYYNRYKRQNVVKDLSVELDRLSEESVNNDISSWTKGRSGEALSLLKKRFSHRPVQEKFVCLNCGFETHADEQAALNIARSWLFLRSQEYKKYQTNKTTGNTDKRAFVETWQSFYRKKLKEVWKPAV

SEQ ID NO: 37678 - protein, 978 aa, synthetic construct
  REGION 1..978: note = engineered CasX variant
QEIKRINKIRRRLVKDSNTKKAGKTGPMKTLLVRVMTPDLRERLENLRKKPENIPQPISNTSRANLNKLLTDYTEMKKAILHVYWEEFQKDPVGLMSRVAQPASKKIDQNKLKPEMDEKGNLTTAGFACSQCGQPLFVYKLEQVSEKGKAYTNYFGRCNVAEHEKLILLAQLKPEKDSDEAVTYSLGKFGQRALDFYSIHVTKESTHPVKPLAQIAGNRYASVPVGKALSDACMGTIASFLSKYQDIIIEHQKVVKGNQKRLESLRELAGKENLEYPSVTLPPQPHTKEGVDAYNEVIARVRMWVNLNLWQKLKLSRDDAKPLLRLKGFPSFPLVERQANEVDWWDMVCNVKKLINEKKEDGKVFWQNLAGYKRQEALRPYLSSEEDRKKGKKFARYQLGDLLLHLEKKHGEDWGKVYDEAWERIDKKVEGLSKHIKLEEERRSEDAQSKAALTDWLRAKASFVIEGLKEADKDEFCRCELKLQKWYGDLRGKPFAIEAENSILDISGFSKQYNCAFIWQKDGVKKLNLYLIINYFKGGKLRFKKIKPEAFEANRFYTVINKKSGEIVPMEVNFNFDDPNLIILPLAFGKRVGREFIWNDLLSLETGSLKLANGRVIEKTLYNRRTRQDEPALFVALTFERREVLDSSNIKPMNLIGVDRGENIPAVIALTDPEGCPLSRFKDSLGNPTHILRIGESYKEKQRTIQAKKEVEQRRAGGYSRKYASKAKNLADDMVRNTARDLLYYAVTQDAMLIFENLSRGFGRQGKRTFMAERQYTRMEDWLTAKLAYEGLPSKVYLSKTLAQYTSKTCSNCGFTITSADYDRVLEKLKKTATGWMTTINGKELKVEGQITYYNRYKRQNVVKDLSVELDRLSEESVNNDISSWTKGRSGEALSLLKKRFSHRPVQEKFVCLNCGFETHADEQAALNIARSWLFLRSQEYKKYQTNKTTGNTDKRAFVETWQSFYRKKLKEVWKPAV

SEQ ID NO: 37679 - protein, 978 aa, synthetic construct
  REGION 1..978: note = engineered CasX variant
QEIKRINKIRRRLVKDSNTKKAGKTGPMKTLLVRVMTPDLRERLENLRKKPENIPQPISNTSRANLNKLLTDYTEMKKAILHVYWEEFQKDPVGLMSRVAQPASKKIDQNKLKPEMDEKGNLTTAGFACSQCGQPLFVYKLEQVSEKGKAYTNYFGRCNVAEHEKLIKLAQLKPEKDSDEAVTYSLGKFGQRALDFYSIHVTKESTHPVKPLAQIAGNRYASGPVGKALSDACMGTIASFLSKYQDIIIEHQKVVKGNQKRLESLRELAGKENLEYPSVTLPPQPHTKEGVDAYNEVIARVRMWVNLNLWQKLKLSRDDAKPLLRLKGFPSFPLVERQANEVDWWDMVCNVKKLINEKKEDGKVFWQNLAGYKRQEALRPYLSSEEDRKKGKKFARYQLGDLLLHLEKKHGEDWGKVYDEAWERIDKKVEGLSKHIKLEEERRSEDAQSKAALTDWLRAKASFVIEGLKEADKDEFCRCELKLQKWYGDLRGKPFAIEAENSILDISGFSKQYNCAFIWQKDGVKKLNLYLIINYFKGGKLRFKKIKPEAFEANRFYTVINKKSGEIVPMEVNFNFDDPNLIILPLAFGKRVGREFIWNDLLSLETGSLKLANGRVIEKTLYNRRTRQDEPALFVALTFERREVLDSSNIKPMNLIGVDRGENIPAVIALTDPEGCPLSRFKDSLGNPTHILRIGESYKEKQRTIQAKKEVEQRRAGGYSRKYASKAKNLADDMVRNTARDLLYYAVTQDAMLIFENLSRGFGRQGKRTFMAERQYTRMEDWLTAKLAYEGLPSKVYLSKTLAQYTSKTCSNCGFTITSADYDRVLEKLKKTATGWMTTINGKELKVEGQITYYNRYKRQNVVKDLSVELDRLSEESVNNDISSWTKGRSGEALSLLKKRFSHRPVQEKFVCLNCGFETHADEQAALNIARSWLFLRSQEYKKYQTNKTTGNTDKRAFVETWQSFYRKKLKEVWKPAV

SEQ ID NO: 37680 - protein, 977 aa, synthetic construct
  REGION 1..977: note = engineered CasX variant
QEIKRINKIRRRLVKDSNTKKAGKTGPMKTLLVRVMTPDLRERLENLRKKPENIPQPISNTSRANLNKLLTDYTEMKKAILHVYWEEFQKDPVGLMSRVAQPASKKIDQNKLKPEMDEKGNLTTAGFACSQCGQPLFVYKLEQVSEKGKAYTNYFGRCNVAEHEKLILLAQLKPEKDSDEAVTYSLGKFGQRALDFYSIHVTKESTHPVKPLAQIAGNRYASPVGKALSDACMGTIASFLSKYQDIIIEHQKVVKGNQKRLESLRELAGKENLEYPSVTLPPQPHTKEGVDAYNEVIARVRMWVNLNLWQKLKLSRDDAKPLLRLKGFPSFPLVERQANEVDWWDMVCNVKKLINEKKEDGKVFWQNLAGYKRQEALRPYLSSEEDRKKGKKFARYQLGDLLLHLEKKHGEDWGKVYDEAWERIDKKVEGLSKHIKLEEERRSEDAQSKAALTDWLRAKASFVIEGLKEADKDEFCRCELKLQKWYGDLRGKPFAIEAENSILDISGFSKQYNCAFIWQKDGVKKLNLYLIINYFKGGKLRFKKIKPEAFEANRFYTVINKKSGEIVPMEVNFNFDDPNLIILPLAFGKRVGREFIWNDLLSLETGSLKLANGRVIEKTLYNRRTRQDEPALFVALTFERREVLDSSNIKPMNLIGVDRGENIPAVIALTDPEGCPLSRFKDSLGNPTHILRIGESYKEKQRTIQAKKEVEQRRAGGYSRKYASKAKNLADDMVRNTARDLLYYAVTQDAMLIFENLSRGFGRQGKRTFMAERQYTRMEDWLTAKLAYEGLPSKVYLSKTLAQYTSKTCSNCGFTITSADYDRVLEKLKKTATGWMTTINGKELKVEGQITYYNRYKRQNVVKDLSVELDRLSEESVNNDISSWTKGRSGEALSLLKKRFSHRPVQEKFVCLNCGFETHADEQAALNIARSWLFLRSQEYKKYQTNKTTGNTDKRAFVETWQSFYRKKLKEVWKPAV

SEQ ID NO: 37681 - protein, 979 aa, synthetic construct
  REGION 1..979: note = engineered CasX variant
QEIKRINKIRRRLVKDSNTKKAGKTGPMKTLLVRVMTPDLRERLENLRKKPENIPQPISNTSRANLNKLLTDYTEMKKAILHVYWEEFQKDPVGLMSRVAQPASKKIDQNKLKPEMDEKGNLTTAGFACSQCGQPLFVYKLEQVSEKGKAYTNYFGRCNVAEHEKLILLAQLKPEKDSDEAVTYSLGKFGQRALDFYSIHVTKESTHPVKPLAQIAGNRYASYPVGKALSDACMGTIASFLSKYQDIIIEHQKVVKGNQKRLESLRELAGKENLEYPSVTLPPQPHTKEGVDAYNEVIARVRMWVNLNLWQKLKLSRDDAKPLLRLKGFPSFPLVERQANEVDWWDMVCNVKKLINEKKEDGKVFWQNLAGYKRQEALRPYLSSEEDRKKGKKFARYQLGDLLLHLEKKHGEDWGKVYDEAWERIDKKVEGLSKHIKLEEERRSEDAQSKAALTDWLRAKASFVIEGLKEADKDEFCRCELKLQKWYGDLRGKPFAIEAENSILDISGFSKQYNCAFIWQKDGVKKLNLYLIINYFKGGKLRFKKIKPEAFEANRFYTVINKKSGEIVPMEVNFNFDDPNLIILPLAFGKRVGREFIWNDLLSLETGSLKLANGRVIEKTLYNRRTRQDEPALFVALTFERREVLDSSNIKPMNLIGVDRGENIPAVIALTDPEGCPLSRFKDSLGNPTHILRIGESYKEKQRTIQAKKEVEQRRAGGYSRKYASKAKNLADDMVRNTARDLLYYAVTQDAMLIFENLSRGFGRQGKRTFMAERQYTRMEDWLTAKLAYEGPLPSKTYLSKTLAQYTSKTCSNCGFTITSADYDRVLEKLKKTATGWMTTINGKELKVEGQITYYNRYKRQNVVKDLSVELDRLSEESVNNDISSWTKGRSGEALSLLKKRFSHRPVQEKFVCLNCGFETHADEQAALNIARSWLFLRSQEYKKYQTNKTTGNTDKRAFVETWQSFYRKKLKEVWKPAV

SEQ ID NO: 37682 - protein, 979 aa, synthetic construct
  REGION 1..979: note = engineered CasX variant
QEIKRINKIRRRLVKDSNTKKAGKTGPMKTLLVRVMTPDLRERLENLRKKPENIPQPISNTSRANLNKLLTDYTEMKKAILHVYWEEFQKDPVGLMSRVAQPASKKIDQNKLKPEMDEKGNLTTAGFACSQCGQPLFVYKLEQVSEKGKAYTNYFGRCNVAEHEKLILLAQLKPEKDSDEAVTYSLGKFGQRALDFYSIHVTKESTHPVKPLAQIAGNRYASHPVGKALSDACMGTIASFLSKYQDIIIEHQKVVKGNQKRLESLRELAGKENLEYPSVTLPPQPHTKEGVDAYNEVIARVRMWVNLNLWQKLKLSRDDAKPLLRLKGFPSFPLVERQANEVDWWDMVCNVKKLINEKKEDGKVFWQNLAGYKRQEALRPYLSSEEDRKKGKKFARYQLGDLLLHLEKKHGEDWGKVYDEAWERIDKKVEGLSKHIKLEEERRSEDAQSKAALTDWLRAKASFVIEGLKEADKDEFCRCELKLQKWYGDLRGKPFAIEAENSILDISGFSKQYNCAFIWQKDGVKKLNLYLIINYFKGGKLRFKKIKPEAFEANRFYTVINKKSGEIVPMEVNFNFDDPNLIILPLAFGKRVGREFIWNDLLSLETGSLKLANGRVIEKTLYNRRTRQDEPALFVALTFERREVLDSSNIKPMNLIGVDRGENIPAVIALTDPEGCPLSRFKDSLGNPTHILRIGESYKEKQRTIQAKKEVEQRRAGGYSRKYASKAKNLADDMVRNTARDLLYYAVTQDAMLIFENLSRGFGRQGKRTFMAERQYTRMEDWLTAKLAYEGPLPSKTYLSKTLAQYTSKTCSNCGFTITSADYDRVLEKLKKTATGWMTTINGKELKVEGQITYYNRYKRQNVVKDLSVELDRLSEESVNNDISSWTKGRSGEALSLLKKRFSHRPVQEKFVCLNCGFETHADEQAALNIARSWLFLRSQEYKKYQTNKTTGNTDKRAFVETWQSFYRKKLKEVWKPAV

SEQ ID NO: 37683 - protein, 979 aa, synthetic construct
  REGION 1..979: note = engineered CasX variant
QEIKRINKIRRRLVKDSNTKKAGKTGPMKTLLVRVMTPDLRERLENLRKKPENIPQPISNTSRANLNKLLTDYTEMKKAILHVYWEEFQKDPVGLMSRVAQPASKKIDQNKLKPEMDEKGNLTTAGFACSQCGQPLFVYKLEQVSEKGKAYTNYFGRCNVAEHEKLILLAQLKPEKDSDEAVTYSLGKFGQRALDFYSIHVTKESTHPVKPLAQIAGNRYASSPVGKALSDACMGTIASFLSKYQDIIIEHQKVVKGNQKRLESLRELAGKENLEYPSVTLPPQPHTKEGVDAYNEVIARVRMWVNLNLWQKLKLSRDDAKPLLRLKGFPSFPLVERQANEVDWWDMVCNVKKLINEKKEDGKVFWQNLAGYKRQEALRPYLSSEEDRKKGKKFARYQLGDLLLHLEKKHGEDWGKVYDEAWERIDKKVEGLSKHIKLEEERRSEDAQSKAALTDWLRAKASFVIEGLKEADKDEFCRCELKLQKWYGDLRGKPFAIEAENSILDISGFSKQYNCAFIWQKDGVKKLNLYLIINYFKGGKLRFKKIKPEAFEANRFYTVINKKSGEIVPMEVNFNFDDPNLIILPLAFGKRVGREFIWNDLLSLETGSLKLANGRVIEKTLYNRRTRQDEPALFVALTFERREVLDSSNIKPMNLIGVDRGENIPAVIALTDPEGCPLSRFKDSLGNPTHILRIGESYKEKQRTIQAKKEVEQRRAGGYSRKYASKAKNLADDMVRNTARDLLYYAVTQDAMLIFENLSRGFGRQGKRTFMAERQYTRMEDWLTAKLAYEGPLPSKTYLSKTLAQYTSKTCSNCGFTITSADYDRVLEKLKKTATGWMTTINGKELKVEGQITYYNRYKRQNVVKDLSVELDRLSEESVNNDISSWTKGRSGEALSLLKKRFSHRPVQEKFVCLNCGFETHADEQAALNIARSWLFLRSQEYKKYQTNKTTGNTDKRAFVETWQSFYRKKLKEVWKPAV

SEQ ID NO: 37684 - protein, 979 aa, synthetic construct
  REGION 1..979: note = engineered CasX variant
QEIKRINKIRRRLVKDSNTKKAGKTGPMKTLLVRVMTPDLRERLENLRKKPENIPQPISNTSRANLNKLLTDYTEMKKAILHVYWEEFQKDPVGLMSRVAQPASKKIDQNKLKPEMDEKGNLTTAGFACSQCGQPLFVYKLEQVSEKGKAYTNYFGRCNVAEHEKLILLAQLKPEKDSDEAVTYSLGKFGQRALDFYSIHVTKESTHPVKPLAQIAGNRYASTPVGKALSDACMGTIASFLSKYQDIIIEHQKVVKGNQKRLESLRELAGKENLEYPSVTLPPQPHTKEGVDAYNEVIARVRMWVNLNLWQKLKLSRDDAKPLLRLKGFPSFPLVERQANEVDWWDMVCNVKKLINEKKEDGKVFWQNLAGYKRQEALRPYLSSEEDRKKGKKFARYQLGDLLLHLEKKHGEDWGKVYDEAWERIDKKVEGLSKHIKLEEERRSEDAQSKAALTDWLRAKASFVIEGLKEADKDEFCRCELKLQKWYGDLRGKPFAIEAENSILDISGFSKQYNCAFIWQKDGVKKLNLYLIINYFKGGKLRFKKIKPEAFEANRFYTVINKKSGEIVPMEVNFNFDDPNLIILPLAFGKRVGREFIWNDLLSLETGSLKLANGRVIEKTLYNRRTRQDEPALFVALTFERREVLDSSNIKPMNLIGVDRGENIPAVIALTDPEGCPLSRFKDSLGNPTHILRIGESYKEKQRTIQAKKEVEQRRAGGYSRKYASKAKNLADDMVRNTARDLLYYAVTQDAMLIFENLSRGFGRQGKRTFMAERQYTRMEDWLTAKLAYEGPLPSKTYLSKTLAQYTSKTCSNCGFTITSADYDRVLEKLKKTATGWMTTINGKELKVEGQITYYNRYKRQNVVKDLSVELDRLSEESVNNDISSWTKGRSGEALSLLKKRFSHRPVQEKFVCLNCGFETHADEQAALNIARSWLFLRSQEYKKYQTNKTTGNTDKRAFVETWQSFYRKKLKEVWKPAV

SEQ ID NO: 37685 - protein, 979 aa, synthetic construct
  REGION 1..979: note = engineered CasX variant
QEIKRINKIRRRLVKDSNTKKAGKTGPMKTLLVRVMTPDLRERLENLRKKPENIPQPISNTSRANLNKLLTDYTEMKKAILHVYWEEFQKDPVGLMSRVAQPASKKIDQNKLKPEMDEKGNLTTAGFACSQCGQPLFVYKLEQVSEKGKAYTNYFGRCNVAEHEKLILLAQLKPEKDSDEAVTYSLGKFGQRALDFYSIHVTKESTHPVKPLAQIAGNRYASAPVGKALSDACMGTIASFLSKYQDIIIEHQKVVKGNQKRLESLRELAGKENLEYPSVTLPPQPHTKEGVDAYNEVIARVRMWVNLNLWQKLKLSRDDAKPLLRLKGFPSFPLVERQANEVDWWDMVCNVKKLINEKKEDGKVFWQNLAGYKRQEALRPYLSSEEDRKKGKKFARYQLGDLLLHLEKKHGEDWGKVYDEAWERIDKKVEGLSKHIKLEEERRSEDAQSKAALTDWLRAKASFVIEGLKEADKDEFCRCELKLQKWYGDLRGKPFAIEAENSILDISGFSKQYNCAFIWQKDGVKKLNLYLIINYFKGGKLRFKKIKPEAFEANRFYTVINKKSGEIVPMEVNFNFDDPNLIILPLAFGKRVGREFIWNDLLSLETGSLKLANGRVIEKTLYNRRTRQDEPALFVALTFERREVLDSSNIKPMNLIGVDRGENIPAVIALTDPEGCPLSRFKDSLGNPTHILRIGESYKEKQRTIQAKKEVEQRRAGGYSRKYASKAKNLADDMVRNTARDLLYYAVTQDAMLIFENLSRGFGRQGKRTFMAERQYTRMEDWLTAKLAYEGPLPSKTYLSKTLAQYTSKTCSNCGFTITSADYDRVLEKLKKTATGWMTTINGKELKVEGQITYYNRYKRQNVVKDLSVELDRLSEESVNNDISSWTKGRSGEALSLLKKRFSHRPVQEKFVCLNCGFETHADEQAALNIARSWLFLRSQEYKKYQTNKTTGNTDKRAFVETWQSFYRKKLKEVWKPAV

SEQ ID NO: 37686 - protein, 979 aa, synthetic construct
  REGION 1..979: note = engineered CasX variant
QEIKRINKIRRRLVKDSNTKKAGKTGPMKTLLVRVMTPDLRERLENLRKKPENIPQPISNTSRANLNKLLTDYTEMKKAILHVYWEEFQKDPVGLMSRVAQPASKKIDQNKLKPEMDEKGNLTTAGFACSQCGQPLFVYKLEQVSEKGKAYTNYFGRCNVAEHEKLILLAQLKPEKDSDEAVTYSLGKFGQRALDFYSIHVTKESTHPVKPLAQIAGNRYASVPVGKALSDACMGTIASFLSKYQDIIIEHQKVVKGNQKRLESLRELAGKENLEYPSVTLPPQPHTKEGVDAYNEVIARVRMWVNLNLWQKLKLSRDDAKPLLRLKGFPSFPLVERQANEVDWWDMVCNVKKLINEKKEDGKVFWQNLAGYKRQEALRPYLSSEEDRKKGKKFARYQLGDLLLHLEKKHGEDWGKVYDEAWERIDKKVEGLSKHIKLEEERRSEDAQSKAALTDWLRAKASFVIEGLKEADKDEFCRCELKLQKWYGDLRGKPFAIEAENSILDISGFSKQYNCAFIWQKDGVKKLNLYLIINYFKGGKLRFKKIKPEAFEANRFYTVINKKSGEIVPMEVNFNFDDPNLIILPLAFGKRVGREFIWNDLLSLETGSLKLANGRVIEKTLYNRRTRQDEPALFVALTFERREVLDSSNIKPMNLIGVDRGENIPAVIALTDPEGCPLSRFKDSLGNPTHILRIGESYKEKQRTIQAKKEVEQRRAGGYSRKYASKAKNLADDMVRNTARDLLYYAVTQDAMLIFENLSRGFGRQGKRTFMAERQYTRMEDWLTAKLAYEGPLPSKTYLSKTLAQYTSKTCSNCGFTITSADYDRVLEKLKKTATGWMTTINGKELKVEGQITYYNRYKRQNVVKDLSVELDRLSEESVNNDISSWTKGRSGEALSLLKKRFSHRPVQEKFVCLNCGFETHADEQAALNIARSWLFLRSQEYKKYQTNKTTGNTDKRAFVETWQSFYRKKLKEVWKPAV

SEQ ID NO: 37687 - protein, 979 aa, synthetic construct
  REGION 1..979: note = engineered CasX variant
QEIKRINKIRRRLVKDSNTKKAGKTGPMKTLLVRVMTPDLRERLENLRKKPENIPQPISNTSRANLNKLLTDYTEMKKAILHVYWEEFQKDPVGLMSRVAQPASKKIDQNKLKPEMDEKGNLTTAGFACSQCGQPLFVYKLEQVSEKGKAYTNYFGRCNVAEHEKLIKLAQLKPEKDSDEAVTYSLGKFGQRALDFYSIHVTKESTHPVKPLAQIAGNRYASGPVGKALSDACMGTIASFLSKYQDIIIEHQKVVKGNQKRLESLRELAGKENLEYPSVTLPPQPHTKEGVDAYNEVIARVRMWVNLNLWQKLKLSRDDAKPLLRLKGFPSFPLVERQANEVDWWDMVCNVKKLINEKKEDGKVFWQNLAGYKRQEALRPYLSSEEDRKKGKKFARYQLGDLLLHLEKKHGEDWGKVYDEAWERIDKKVEGLSKHIKLEEERRSEDAQSKAALTDWLRAKASFVIEGLKEADKDEFCRCELKLQKWYGDLRGKPFAIEAENSILDISGFSKQYNCAFIWQKDGVKKLNLYLIINYFKGGKLRFKKIKPEAFEANRFYTVINKKSGEIVPMEVNFNFDDPNLIILPLAFGKRVGREFIWNDLLSLETGSLKLANGRVIEKTLYNRRTRQDEPALFVALTFERREVLDSSNIKPMNLIGVDRGENIPAVIALTDPEGCPLSRFKDSLGNPTHILRIGESYKEKQRTIQAKKEVEQRRAGGYSRKYASKAKNLADDMVRNTARDLLYYAVTQDAMLIFENLSRGFGRQGKRTFMAERQYTRMEDWLTAKLAYEGPLPSKTYLSKTLAQYTSKTCSNCGFTITSADYDRVLEKLKKTATGWMTTINGKELKVEGQITYYNRYKRQNVVKDLSVELDRLSEESVNNDISSWTKGRSGEALSLLKKRFSHRPVQEKFVCLNCGFETHADEQAALNIARSWLFLRSQEYKKYQTNKTTGNTDKRAFVETWQSFYRKKLKEVWKPAV

SEQ ID NO: 37688 - protein, 978 aa, synthetic construct
  REGION 1..978: note = engineered CasX variant
QEIKRINKIRRRLVKDSNTKKAGKTGPMKTLLVRVMTPDLRERLENLRKKPENIPQPISNTSRANLNKLLTDYTEMKKAILHVYWEEFQKDPVGLMSRVAQPASKKIDQNKLKPEMDEKGNLTTAGFACSQCGQPLFVYKLEQVSEKGKAYTNYFGRCNVAEHEKLILLAQLKPEKDSDEAVTYSLGKFGQRALDFYSIHVTKESTHPVKPLAQIAGNRYASPVGKALSDACMGTIASFLSKYQDIIIEHQKVVKGNQKRLESLRELAGKENLEYPSVTLPPQPHTKEGVDAYNEVIARVRMWVNLNLWQKLKLSRDDAKPLLRLKGFPSFPLVERQANEVDWWDMVCNVKKLINEKKEDGKVFWQNLAGYKRQEALRPYLSSEEDRKKGKKFARYQLGDLLLHLEKKHGEDWGKVYDEAWERIDKKVEGLSKHIKLEEERRSEDAQSKAALTDWLRAKASFVIEGLKEADKDEFCRCELKLQKWYGDLRGKPFAIEAENSILDISGFSKQYNCAFIWQKDGVKKLNLYLIINYFKGGKLRFKKIKPEAFEANRFYTVINKKSGEIVPMEVNFNFDDPNLIILPLAFGKRVGREFIWNDLLSLETGSLKLANGRVIEKTLYNRRTRQDEPALFVALTFERREVLDSSNIKPMNLIGVDRGENIPAVIALTDPEGCPLSRFKDSLGNPTHILRIGESYKEKQRTIQAKKEVEQRRAGGYSRKYASKAKNLADDMVRNTARDLLYYAVTQDAMLIFENLSRGFGRQGKRTFMAERQYTRMEDWLTAKLAYEGPLPSKTYLSKTLAQYTSKTCSNCGFTITSADYDRVLEKLKKTATGWMTTINGKELKVEGQITYYNRYKRQNVVKDLSVELDRLSEESVNNDISSWTKGRSGEALSLLKKRFSHRPVQEKFVCLNCGFETHADEQAALNIARSWLFLRSQEYKKYQTNKTTGNTDKRAFVETWQSFYRKKLKEVWKPAV

SEQ ID NO: 37689 - protein, 979 aa, synthetic construct
  REGION 1..979: note = engineered CasX variant
QEIKRINKIRRRLVKDSNTKKAGKTGPMKTLLVRVMTPDLRERLENLRKKPENIPQPISNTSRANLNKLLTDYTEMKKAILHVYWEEFQKDPVGLMSRVAQPASKKIDQNKLKPEMDEKGNLTTAGFACSQCGQPLFVYKLEQVSEKGKAYTNYFGRCNVAEHEKLILLAQLKPEKDSDEAVTYSLGKFGQRALDFYSIHVTKESTHPVKPLAQIAGNRYASYPVGKALSDACMGTIASFLSKYQDIIIEHQKVVKGNQKRLESLRELAGKENLEYPSVTLPPQPHTKEGVDAYNEVIARVRMWVNLNLWQKLKLSRDDAKPLLRLKGFPSFPLVERQANEVDWWDMVCNVKKLINEKKEDGKVFWQNLAGYKRQEALRPYLSSEEDVRKKGKKFARYQLGDLLLHLEKKHGEDWGKVYDEAWERIDKKVEGLSKHIKLEEERRSEDAQSKAALTDWLRAKASFVIEGLKEADKDEFCRCELKLQKWYGDLRGKPFAIEAENSILDISGFSKQYNCAFIWQKDGVKKLNLYLIINYFKGGKLRFKKIKPEAFEANRFYTVINKKSGEIVPMEVNFNFDDPNLIILPLAFGKRVGREFIWNDLLSLETGSLKLANGRVIEKTLYNRRTRQDEPALFVALTFERREVLDSSNIKPMNLIGVDRGENIPAVIALTDPEGCPLSRFKDSLGNPTHILRIGESYKEKQRTIQAKKEVEQRRAGGYSRKYASKAKNLADDMVRNTARDLLYYAVTQDAMLIFENLSRGFGRQGKRTFMAERQYTRMEDWLTAKLAYEGLPSKTYLSKTLAQYTSKTCSNCGFTITSADYDRVLEKLKKTATGWMTTINGKELKVEGQITYYNRYKRQNVVKDLSVELDRLSEESVNNDISSWTKGRSGEALSLLKKRFSHRPVQEKFVCLNCGFETHADEQAALNIARSWLFLRSQEYKKYQTNKTTGNTDKRAFVETWQSFYRKKLKEVWKPAV

SEQ ID NO: 37690 - protein, 979 aa, synthetic construct
  REGION 1..979: note = engineered CasX variant
QEIKRINKIRRRLVKDSNTKKAGKTGPMKTLLVRVMTPDLRERLENLRKKPENIPQPISNTSRANLNKLLTDYTEMKKAILHVYWEEFQKDPVGLMSRVAQPASKKIDQNKLKPEMDEKGNLTTAGFACSQCGQPLFVYKLEQVSEKGKAYTNYFGRCNVAEHEKLILLAQLKPEKDSDEAVTYSLGKFGQRALDFYSIHVTKESTHPVKPLAQIAGNRYASHPVGKALSDACMGTIASFLSKYQDIIIEHQKVVKGNQKRLESLRELAGKENLEYPSVTLPPQPHTKEGVDAYNEVIARVRMWVNLNLWQKLKLSRDDAKPLLRLKGFPSFPLVERQANEVDWWDMVCNVKKLINEKKEDGKVFWQNLAGYKRQEALRPYLSSEEDVRKKGKKFARYQLGDLLLHLEKKHGEDWGKVYDEAWERIDKKVEGLSKHIKLEEERRSEDAQSKAALTDWLRAKASFVIEGLKEADKDEFCRCELKLQKWYGDLRGKPFAIEAENSILDISGFSKQYNCAFIWQKDGVKKLNLYLIINYFKGGKLRFKKIKPEAFEANRFYTVINKKSGEIVPMEVNFNFDDPNLIILPLAFGKRVGREFIWNDLLSLETGSLKLANGRVIEKTLYNRRTRQDEPALFVALTFERREVLDSSNIKPMNLIGVDRGENIPAVIALTDPEGCPLSRFKDSLGNPTHILRIGESYKEKQRTIQAKKEVEQRRAGGYSRKYASKAKNLADDMVRNTARDLLYYAVTQDAMLIFENLSRGFGRQGKRTFMAERQYTRMEDWLTAKLAYEGLPSKTYLSKTLAQYTSKTCSNCGFTITSADYDRVLEKLKKTATGWMTTINGKELKVEGQITYYNRYKRQNVVKDLSVELDRLSEESVNNDISSWTKGRSGEALSLLKKRFSHRPVQEKFVCLNCGFETHADEQAALNIARSWLFLRSQEYKKYQTNKTTGNTDKRAFVETWQSFYRKKLKEVWKPAV

SEQ ID NO: 37691 - protein, 979 aa, synthetic construct
  REGION 1..979: note = engineered CasX variant
QEIKRINKIRRRLVKDSNTKKAGKTGPMKTLLVRVMTPDLRERLENLRKKPENIPQPISNTSRANLNKLLTDYTEMKKAILHVYWEEFQKDPVGLMSRVAQPASKKIDQNKLKPEMDEKGNLTTAGFACSQCGQPLFVYKLEQVSEKGKAYTNYFGRCNVAEHEKLILLAQLKPEKDSDEAVTYSLGKFGQRALDFYSIHVTKESTHPVKPLAQIAGNRYASSPVGKALSDACMGTIASFLSKYQDIIIEHQKVVKGNQKRLESLRELAGKENLEYPSVTLPPQPHTKEGVDAYNEVIARVRMWVNLNLWQKLKLSRDDAKPLLRLKGFPSFPLVERQANEVDWWDMVCNVKKLINEKKEDGKVFWQNLAGYKRQEALRPYLSSEEDVRKKGKKFARYQLGDLLLHLEKKHGEDWGKVYDEAWERIDKKVEGLSKHIKLEEERRSEDAQSKAALTDWLRAKASFVIEGLKEADKDEFCRCELKLQKWYGDLRGKPFAIEAENSILDISGFSKQYNCAFIWQKDGVKKLNLYLIINYFKGGKLRFKKIKPEAFEANRFYTVINKKSGEIVPMEVNFNFDDPNLIILPLAFGKRVGREFIWNDLLSLETGSLKLANGRVIEKTLYNRRTRQDEPALFVALTFERREVLDSSNIKPMNLIGVDRGENIPAVIALTDPEGCPLSRFKDSLGNPTHILRIGESYKEKQRTIQAKKEVEQRRAGGYSRKYASKAKNLADDMVRNTARDLLYYAVTQDAMLIFENLSRGFGRQGKRTFMAERQYTRMEDWLTAKLAYEGLPSKTYLSKTLAQYTSKTCSNCGFTITSADYDRVLEKLKKTATGWMTTINGKELKVEGQITYYNRYKRQNVVKDLSVELDRLSEESVNNDISSWTKGRSGEALSLLKKRFSHRPVQEKFVCLNCGFETHADEQAALNIARSWLFLRSQEYKKYQTNKTTGNTDKRAFVETWQSFYRKKLKEVWKPAV

SEQ ID NO: 37692 - protein, 979 aa, synthetic construct
  REGION 1..979: note = engineered CasX variant
QEIKRINKIRRRLVKDSNTKKAGKTGPMKTLLVRVMTPDLRERLENLRKKPENIPQPISNTSRANLNKLLTDYTEMKKAILHVYWEEFQKDPVGLMSRVAQPASKKIDQNKLKPEMDEKGNLTTAGFACSQCGQPLFVYKLEQVSEKGKAYTNYFGRCNVAEHEKLILLAQLKPEKDSDEAVTYSLGKFGQRALDFYSIHVTKESTHPVKPLAQIAGNRYASTPVGKALSDACMGTIASFLSKYQDIIIEHQKVVKGNQKRLESLRELAGKENLEYPSVTLPPQPHTKEGVDAYNEVIARVRMWVNLNLWQKLKLSRDDAKPLLRLKGFPSFPLVERQANEVDWWDMVCNVKKLINEKKEDGKVFWQNLAGYKRQEALRPYLSSEEDVRKKGKKFARYQLGDLLLHLEKKHGEDWGKVYDEAWERIDKKVEGLSKHIKLEEERRSEDAQSKAALTDWLRAKASFVIEGLKEADKDEFCRCELKLQKWYGDLRGKPFAIEAENSILDISGFSKQYNCAFIWQKDGVKKLNLYLIINYFKGGKLRFKKIKPEAFEANRFYTVINKKSGEIVPMEVNFNFDDPNLIILPLAFGKRVGREFIWNDLLSLETGSLKLANGRVIEKTLYNRRTRQDEPALFVALTFERREVLDSSNIKPMNLIGVDRGENIPAVIALTDPEGCPLSRFKDSLGNPTHILRIGESYKEKQRTIQAKKEVEQRRAGGYSRKYASKAKNLADDMVRNTARDLLYYAVTQDAMLIFENLSRGFGRQGKRTFMAERQYTRMEDWLTAKLAYEGLPSKTYLSKTLAQYTSKTCSNCGFTITSADYDRVLEKLKKTATGWMTTINGKELKVEGQITYYNRYKRQNVVKDLSVELDRLSEESVNNDISSWTKGRSGEALSLLKKRFSHRPVQEKFVCLNCGFETHADEQAALNIARSWLFLRSQEYKKYQTNKTTGNTDKRAFVETWQSFYRKKLKEVWKPAV

SEQ ID NO: 37693 - protein, 979 aa, synthetic construct
  REGION 1..979: note = engineered CasX variant
QEIKRINKIRRRLVKDSNTKKAGKTGPMKTLLVRVMTPDLRERLENLRKKPENIPQPISNTSRANLNKLLTDYTEMKKAILHVYWEEFQKDPVGLMSRVAQPASKKIDQNKLKPEMDEKGNLTTAGFACSQCGQPLFVYKLEQVSEKGKAYTNYFGRCNVAEHEKLILLAQLKPEKDSDEAVTYSLGKFGQRALDFYSIHVTKESTHPVKPLAQIAGNRYASAPVGKALSDACMGTIASFLSKYQDIIIEHQKVVKGNQKRLESLRELAGKENLEYPSVTLPPQPHTKEGVDAYNEVIARVRMWVNLNLWQKLKLSRDDAKPLLRLKGFPSFPLVERQANEVDWWDMVCNVKKLINEKKEDGKVFWQNLAGYKRQEALRPYLSSEEDVRKKGKKFARYQLGDLLLHLEKKHGEDWGKVYDEAWERIDKKVEGLSKHIKLEEERRSEDAQSKAALTDWLRAKASFVIEGLKEADKDEFCRCELKLQKWYGDLRGKPFAIEAENSILDISGFSKQYNCAFIWQKDGVKKLNLYLIINYFKGGKLRFKKIKPEAFEANRFYTVINKKSGEIVPMEVNFNFDDPNLIILPLAFGKRVGREFIWNDLLSLETGSLKLANGRVIEKTLYNRRTRQDEPALFVALTFERREVLDSSNIKPMNLIGVDRGENIPAVIALTDPEGCPLSRFKDSLGNPTHILRIGESYKEKQRTIQAKKEVEQRRAGGYSRKYASKAKNLADDMVRNTARDLLYYAVTQDAMLIFENLSRGFGRQGKRTFMAERQYTRMEDWLTAKLAYEGLPSKTYLSKTLAQYTSKTCSNCGFTITSADYDRVLEKLKKTATGWMTTINGKELKVEGQITYYNRYKRQNVVKDLSVELDRLSEESVNNDISSWTKGRSGEALSLLKKRFSHRPVQEKFVCLNCGFETHADEQAALNIARSWLFLRSQEYKKYQTNKTTGNTDKRAFVETWQSFYRKKLKEVWKPAV

SEQ ID NO: 37694 - protein, 979 aa, synthetic construct
  REGION 1..979: note = engineered CasX variant
QEIKRINKIRRRLVKDSNTKKAGKTGPMKTLLVRVMTPDLRERLENLRKKPENIPQPISNTSRANLNKLLTDYTEMKKAILHVYWEEFQKDPVGLMSRVAQPASKKIDQNKLKPEMDEKGNLTTAGFACSQCGQPLFVYKLEQVSEKGKAYTNYFGRCNVAEHEKLILLAQLKPEKDSDEAVTYSLGKFGQRALDFYSIHVTKESTHPVKPLAQIAGNRYASVPVGKALSDACMGTIASFLSKYQDIIIEHQKVVKGNQKRLESLRELAGKENLEYPSVTLPPQPHTKEGVDAYNEVIARVRMWVNLNLWQKLKLSRDDAKPLLRLKGFPSFPLVERQANEVDWWDMVCNVKKLINEKKEDGKVFWQNLAGYKRQEALRPYLSSEEDVRKKGKKFARYQLGDLLLHLEKKHGEDWGKVYDEAWERIDKKVEGLSKHIKLEEERRSEDAQSKAALTDWLRAKASFVIEGLKEADKDEFCRCELKLQKWYGDLRGKPFAIEAENSILDISGFSKQYNCAFIWQKDGVKKLNLYLIINYFKGGKLRFKKIKPEAFEANRFYTVINKKSGEIVPMEVNFNFDDPNLIILPLAFGKRVGREFIWNDLLSLETGSLKLANGRVIEKTLYNRRTRQDEPALFVALTFERREVLDSSNIKPMNLIGVDRGENIPAVIALTDPEGCPLSRFKDSLGNPTHILRIGESYKEKQRTIQAKKEVEQRRAGGYSRKYASKAKNLADDMVRNTARDLLYYAVTQDAMLIFENLSRGFGRQGKRTFMAERQYTRMEDWLTAKLAYEGLPSKTYLSKTLAQYTSKTCSNCGFTITSADYDRVLEKLKKTATGWMTTINGKELKVEGQITYYNRYKRQNVVKDLSVELDRLSEESVNNDISSWTKGRSGEALSLLKKRFSHRPVQEKFVCLNCGFETHADEQAALNIARSWLFLRSQEYKKYQTNKTTGNTDKRAFVETWQSFYRKKLKEVWKPAV

SEQ ID NO: 37695 - protein, 979 aa, synthetic construct
  REGION 1..979: note = engineered CasX variant
QEIKRINKIRRRLVKDSNTKKAGKTGPMKTLLVRVMTPDLRERLENLRKKPENIPQPISNTSRANLNKLLTDYTEMKKAILHVYWEEFQKDPVGLMSRVAQPASKKIDQNKLKPEMDEKGNLTTAGFACSQCGQPLFVYKLEQVSEKGKAYTNYFGRCNVAEHEKLIKLAQLKPEKDSDEAVTYSLGKFGQRALDFYSIHVTKESTHPVKPLAQIAGNRYASGPVGKALSDACMGTIASFLSKYQDIIIEHQKVVKGNQKRLESLRELAGKENLEYPSVTLPPQPHTKEGVDAYNEVIARVRMWVNLNLWQKLKLSRDDAKPLLRLKGFPSFPLVERQANEVDWWDMVCNVKKLINEKKEDGKVFWQNLAGYKRQEALRPYLSSEEDVRKKGKKFARYQLGDLLLHLEKKHGEDWGKVYDEAWERIDKKVEGLSKHIKLEEERRSEDAQSKAALTDWLRAKASFVIEGLKEADKDEFCRCELKLQKWYGDLRGKPFAIEAENSILDISGFSKQYNCAFIWQKDGVKKLNLYLIINYFKGGKLRFKKIKPEAFEANRFYTVINKKSGEIVPMEVNFNFDDPNLIILPLAFGKRVGREFIWNDLLSLETGSLKLANGRVIEKTLYNRRTRQDEPALFVALTFERREVLDSSNIKPMNLIGVDRGENIPAVIALTDPEGCPLSRFKDSLGNPTHILRIGESYKEKQRTIQAKKEVEQRRAGGYSRKYASKAKNLADDMVRNTARDLLYYAVTQDAMLIFENLSRGFGRQGKRTFMAERQYTRMEDWLTAKLAYEGLPSKTYLSKTLAQYTSKTCSNCGFTITSADYDRVLEKLKKTATGWMTTINGKELKVEGQITYYNRYKRQNVVKDLSVELDRLSEESVNNDISSWTKGRSGEALSLLKKRFSHRPVQEKFVCLNCGFETHADEQAALNIARSWLFLRSQEYKKYQTNKTTGNTDKRAFVETWQSFYRKKLKEVWKPAV

SEQ ID NO: 37696 - protein, 978 aa, synthetic construct
  REGION 1..978: note = engineered CasX variant
QEIKRINKIRRRLVKDSNTKKAGKTGPMKTLLVRVMTPDLRERLENLRKKPENIPQPISNTSRANLNKLLTDYTEMKKAILHVYWEEFQKDPVGLMSRVAQPASKKIDQNKLKPEMDEKGNLTTAGFACSQCGQPLFVYKLEQVSEKGKAYTNYFGRCNVAEHEKLILLAQLKPEKDSDEAVTYSLGKFGQRALDFYSIHVTKESTHPVKPLAQIAGNRYASPVGKALSDACMGTIASFLSKYQDIIIEHQKVVKGNQKRLESLRELAGKENLEYPSVTLPPQPHTKEGVDAYNEVIARVRMWVNLNLWQKLKLSRDDAKPLLRLKGFPSFPLVERQANEVDWWDMVCNVKKLINEKKEDGKVFWQNLAGYKRQEALRPYLSSEEDVRKKGKKFARYQLGDLLLHLEKKHGEDWGKVYDEAWERIDKKVEGLSKHIKLEEERRSEDAQSKAALTDWLRAKASFVIEGLKEADKDEFCRCELKLQKWYGDLRGKPFAIEAENSILDISGFSKQYNCAFIWQKDGVKKLNLYLIINYFKGGKLRFKKIKPEAFEANRFYTVINKKSGEIVPMEVNFNFDDPNLIILPLAFGKRVGREFIWNDLLSLETGSLKLANGRVIEKTLYNRRTRQDEPALFVALTFERREVLDSSNIKPMNLIGVDRGENIPAVIALTDPEGCPLSRFKDSLGNPTHILRIGESYKEKQRTIQAKKEVEQRRAGGYSRKYASKAKNLADDMVRNTARDLLYYAVTQDAMLIFENLSRGFGRQGKRTFMAERQYTRMEDWLTAKLAYEGLPSKTYLSKTLAQYTSKTCSNCGFTITSADYDRVLEKLKKTATGWMTTINGKELKVEGQITYYNRYKRQNVVKDLSVELDRLSEESVNNDISSWTKGRSGEALSLLKKRFSHRPVQEKFVCLNCGFETHADEQAALNIARSWLFLRSQEYKKYQTNKTTGNTDKRAFVETWQSFYRKKLKEVWKPAV

SEQ ID NO: 37697 - protein, 978 aa, synthetic construct
  REGION 1..978: note = engineered CasX variant
QEIKRINKIRRRLVKDSNTKKAGKTGPMKTLLVRVMTPDLRERLENLRKKPENIPQPISNTSRANLNKLLTDYTEMKKAILHVYWEEFQKDPVGLMSRVAQPASKKIDQNKLKPEMDEKGNLTTAGFACSQCGQPLFVYKLEQVSEKGKAYTNYFGRCNVAEHEKLILLAQLKPEKDSDEAVTYSLGKFGQRALDFYSIHVTKESTHPVKPLAQIAGNRYASYPVGKALSDACMGTIASFLSKYQDIIIEHQKVVKGNQKRLESLRELAGKENLEYPSVTLPPQPHTKEGVDAYNEVIARVRMWVNLNLWQKLKLSRDDAKPLLRLKGFPSFPLVERQANEVDWWDMVCNVKKLINEKKEDGKVFWQNLAGYKRQEALRPYLSSEEDRKKGKKFARYQLGDLLLHLEKKHGEDWGKVYDEAWERIDKKVEGLSKHIKLEEERRSEDAQSKAALTDWLRAKASFVIEGLKEADKDEFCRCELKLQKWYGDLRGKPFAIEAENSILDISGFSKQYNCAFIWQKDGVKKLNLYLIINYFKGGKLRFKKIKPEAFEANRFYTVINKKSGEIVPMEVNFNFDDPNLIILPLAFGKRVGREFIWNDLLSLETGSLKLANGRVIEKTLYNRRTRQDEPALFVALTFERREVLDSSNIKPMNLIGVDRGENIPAVIALTDPEGCPLSRFKDSLGNPTHILRIGESYKEKQRTIQAKKEVEQRRAGGYSRKYASKAKNLADDMVRNTARDLLYYAVTQDAMLIFENLSRGFGRQGKRTFMAERQYTRMEDWLTAKLAYEGLPSKTYLSKTLAQYTSKTCSNCGFTITSADYDRMLEKLKKTATGWMTTINGKELKVEGQITYYNRYKRQNVVKDLSVELDRLSEESVNNDISSWTKGRSGEALSLLKKRFSHRPVQEKFVCLNCGFETHADEQAALNIARSWLFLRSQEYKKYQTNKTTGNTDKRAFVETWQSFYRKKLKEVWKPAV

SEQ ID NO: 37698 - protein, 978 aa, synthetic construct
  REGION 1..978: note = engineered CasX variant
QEIKRINKIRRRLVKDSNTKKAGKTGPMKTLLVRVMTPDLRERLENLRKKPENIPQPISNTSRANLNKLLTDYTEMKKAILHVYWEEFQKDPVGLMSRVAQPASKKIDQNKLKPEMDEKGNLTTAGFACSQCGQPLFVYKLEQVSEKGKAYTNYFGRCNVAEHEKLILLAQLKPEKDSDEAVTYSLGKFGQRALDFYSIHVTKESTHPVKPLAQIAGNRYASHPVGKALSDACMGTIASFLSKYQDIIIEHQKVVKGNQKRLESLRELAGKENLEYPSVTLPPQPHTKEGVDAYNEVIARVRMWVNLNLWQKLKLSRDDAKPLLRLKGFPSFPLVERQANEVDWWDMVCNVKKLINEKKEDGKVFWQNLAGYKRQEALRPYLSSEEDRKKGKKFARYQLGDLLLHLEKKHGEDWGKVYDEAWERIDKKVEGLSKHIKLEEERRSEDAQSKAALTDWLRAKASFVIEGLKEADKDEFCRCELKLQKWYGDLRGKPFAIEAENSILDISGFSKQYNCAFIWQKDGVKKLNLYLIINYFKGGKLRFKKIKPEAFEANRFYTVINKKSGEIVPMEVNFNFDDPNLIILPLAFGKRVGREFIWNDLLSLETGSLKLANGRVIEKTLYNRRTRQDEPALFVALTFERREVLDSSNIKPMNLIGVDRGENIPAVIALTDPEGCPLSRFKDSLGNPTHILRIGESYKEKQRTIQAKKEVEQRRAGGYSRKYASKAKNLADDMVRNTARDLLYYAVTQDAMLIFENLSRGFGRQGKRTFMAERQYTRMEDWLTAKLAYEGLPSKTYLSKTLAQYTSKTCSNCGFTITSADYDRMLEKLKKTATGWMTTINGKELKVEGQITYYNRYKRQNVVKDLSVELDRLSEESVNNDISSWTKGRSGEALSLLKKRFSHRPVQEKFVCLNCGFETHADEQAALNIARSWLFLRSQEYKKYQTNKTTGNTDKRAFVETWQSFYRKKLKEVWKPAV

SEQ ID NO: 37699 - protein, 978 aa, synthetic construct
  REGION 1..978: note = engineered CasX variant
QEIKRINKIRRRLVKDSNTKKAGKTGPMKTLLVRVMTPDLRERLENLRKKPENIPQPISNTSRANLNKLLTDYTEMKKAILHVYWEEFQKDPVGLMSRVAQPASKKIDQNKLKPEMDEKGNLTTAGFACSQCGQPLFVYKLEQVSEKGKAYTNYFGRCNVAEHEKLILLAQLKPEKDSDEAVTYSLGKFGQRALDFYSIHVTKESTHPVKPLAQIAGNRYASSPVGKALSDACMGTIASFLSKYQDIIIEHQKVVKGNQKRLESLRELAGKENLEYPSVTLPPQPHTKEGVDAYNEVIARVRMWVNLNLWQKLKLSRDDAKPLLRLKGFPSFPLVERQANEVDWWDMVCNVKKLINEKKEDGKVFWQNLAGYKRQEALRPYLSSEEDRKKGKKFARYQLGDLLLHLEKKHGEDWGKVYDEAWERIDKKVEGLSKHIKLEEERRSEDAQSKAALTDWLRAKASFVIEGLKEADKDEFCRCELKLQKWYGDLRGKPFAIEAENSILDISGFSKQYNCAFIWQKDGVKKLNLYLIINYFKGGKLRFKKIKPEAFEANRFYTVINKKSGEIVPMEVNFNFDDPNLIILPLAFGKRVGREFIWNDLLSLETGSLKLANGRVIEKTLYNRRTRQDEPALFVALTFERREVLDSSNIKPMNLIGVDRGENIPAVIALTDPEGCPLSRFKDSLGNPTHILRIGESYKEKQRTIQAKKEVEQRRAGGYSRKYASKAKNLADDMVRNTARDLLYYAVTQDAMLIFENLSRGFGRQGKRTFMAERQYTRMEDWLTAKLAYEGLPSKTYLSKTLAQYTSKTCSNCGFTITSADYDRMLEKLKKTATGWMTTINGKELKVEGQITYYNRYKRQNVVKDLSVELDRLSEESVNNDISSWTKGRSGEALSLLKKRFSHRPVQEKFVCLNCGFETHADEQAALNIARSWLFLRSQEYKKYQTNKTTGNTDKRAFVETWQSFYRKKLKEVWKPAV

SEQ ID NO: 37700 - protein, 978 aa, synthetic construct
  REGION 1..978: note = engineered CasX variant
QEIKRINKIRRRLVKDSNTKKAGKTGPMKTLLVRVMTPDLRERLENLRKKPENIPQPISNTSRANLNKLLTDYTEMKKAILHVYWEEFQKDPVGLMSRVAQPASKKIDQNKLKPEMDEKGNLTTAGFACSQCGQPLFVYKLEQVSEKGKAYTNYFGRCNVAEHEKLILLAQLKPEKDSDEAVTYSLGKFGQRALDFYSIHVTKESTHPVKPLAQIAGNRYASTPVGKALSDACMGTIASFLSKYQDIIIEHQKVVKGNQKRLESLRELAGKENLEYPSVTLPPQPHTKEGVDAYNEVIARVRMWVNLNLWQKLKLSRDDAKPLLRLKGFPSFPLVERQANEVDWWDMVCNVKKLINEKKEDGKVFWQNLAGYKRQEALRPYLSSEEDRKKGKKFARYQLGDLLLHLEKKHGEDWGKVYDEAWERIDKKVEGLSKHIKLEEERRSEDAQSKAALTDWLRAKASFVIEGLKEADKDEFCRCELKLQKWYGDLRGKPFAIEAENSILDISGFSKQYNCAFIWQKDGVKKLNLYLIINYFKGGKLRFKKIKPEAFEANRFYTVINKKSGEIVPMEVNFNFDDPNLIILPLAFGKRVGREFIWNDLLSLETGSLKLANGRVIEKTLYNRRTRQDEPALFVALTFERREVLDSSNIKPMNLIGVDRGENIPAVIALTDPEGCPLSRFKDSLGNPTHILRIGESYKEKQRTIQAKKEVEQRRAGGYSRKYASKAKNLADDMVRNTARDLLYYAVTQDAMLIFENLSRGFGRQGKRTFMAERQYTRMEDWLTAKLAYEGLPSKTYLSKTLAQYTSKTCSNCGFTITSADYDRMLEKLKKTATGWMTTINGKELKVEGQITYYNRYKRQNVVKDLSVELDRLSEESVNNDISSWTKGRSGEALSLLKKRFSHRPVQEKFVCLNCGFETHADEQAALNIARSWLFLRSQEYKKYQTNKTTGNTDKRAFVETWQSFYRKKLKEVWKPAV

SEQ ID NO: 37701 - protein, 978 aa, synthetic construct
  REGION 1..978: note = engineered CasX variant
QEIKRINKIRRRLVKDSNTKKAGKTGPMKTLLVRVMTPDLRERLENLRKKPENIPQPISNTSRANLNKLLTDYTEMKKAILHVYWEEFQKDPVGLMSRVAQPASKKIDQNKLKPEMDEKGNLTTAGFACSQCGQPLFVYKLEQVSEKGKAYTNYFGRCNVAEHEKLILLAQLKPEKDSDEAVTYSLGKFGQRALDFYSIHVTKESTHPVKPLAQIAGNRYASAPVGKALSDACMGTIASFLSKYQDIIIEHQKVVKGNQKRLESLRELAGKENLEYPSVTLPPQPHTKEGVDAYNEVIARVRMWVNLNLWQKLKLSRDDAKPLLRLKGFPSFPLVERQANEVDWWDMVCNVKKLINEKKEDGKVFWQNLAGYKRQEALRPYLSSEEDRKKGKKFARYQLGDLLLHLEKKHGEDWGKVYDEAWERIDKKVEGLSKHIKLEEERRSEDAQSKAALTDWLRAKASFVIEGLKEADKDEFCRCELKLQKWYGDLRGKPFAIEAENSILDISGFSKQYNCAFIWQKDGVKKLNLYLIINYFKGGKLRFKKIKPEAFEANRFYTVINKKSGEIVPMEVNFNFDDPNLIILPLAFGKRVGREFIWNDLLSLETGSLKLANGRVIEKTLYNRRTRQDEPALFVALTFERREVLDSSNIKPMNLIGVDRGENIPAVIALTDPEGCPLSRFKDSLGNPTHILRIGESYKEKQRTIQAKKEVEQRRAGGYSRKYASKAKNLADDMVRNTARDLLYYAVTQDAMLIFENLSRGFGRQGKRTFMAERQYTRMEDWLTAKLAYEGLPSKTYLSKTLAQYTSKTCSNCGFTITSADYDRMLEKLKKTATGWMTTINGKELKVEGQITYYNRYKRQNVVKDLSVELDRLSEESVNNDISSWTKGRSGEALSLLKKRFSHRPVQEKFVCLNCGFETHADEQAALNIARSWLFLRSQEYKKYQTNKTTGNTDKRAFVETWQSFYRKKLKEVWKPAV

SEQ ID NO: 37702 - protein, 978 aa, synthetic construct
  REGION 1..978: note = engineered CasX variant
QEIKRINKIRRRLVKDSNTKKAGKTGPMKTLLVRVMTPDLRERLENLRKKPENIPQPISNTSRANLNKLLTDYTEMKKAILHVYWEEFQKDPVGLMSRVAQPASKKIDQNKLKPEMDEKGNLTTAGFACSQCGQPLFVYKLEQVSEKGKAYTNYFGRCNVAEHEKLILLAQLKPEKDSDEAVTYSLGKFGQRALDFYSIHVTKESTHPVKPLAQIAGNRYASVPVGKALSDACMGTIASFLSKYQDIIIEHQKVVKGNQKRLESLRELAGKENLEYPSVTLPPQPHTKEGVDAYNEVIARVRMWVNLNLWQKLKLSRDDAKPLLRLKGFPSFPLVERQANEVDWWDMVCNVKKLINEKKEDGKVFWQNLAGYKRQEALRPYLSSEEDRKKGKKFARYQLGDLLLHLEKKHGEDWGKVYDEAWERIDKKVEGLSKHIKLEEERRSEDAQSKAALTDWLRAKASFVIEGLKEADKDEFCRCELKLQKWYGDLRGKPFAIEAENSILDISGFSKQYNCAFIWQKDGVKKLNLYLIINYFKGGKLRFKKIKPEAFEANRFYTVINKKSGEIVPMEVNFNFDDPNLIILPLAFGKRVGREFIWNDLLSLETGSLKLANGRVIEKTLYNRRTRQDEPALFVALTFERREVLDSSNIKPMNLIGVDRGENIPAVIALTDPEGCPLSRFKDSLGNPTHILRIGESYKEKQRTIQAKKEVEQRRAGGYSRKYASKAKNLADDMVRNTARDLLYYAVTQDAMLIFENLSRGFGRQGKRTFMAERQYTRMEDWLTAKLAYEGLPSKTYLSKTLAQYTSKTCSNCGFTITSADYDRMLEKLKKTATGWMTTINGKELKVEGQITYYNRYKRQNVVKDLSVELDRLSEESVNNDISSWTKGRSGEALSLLKKRFSHRPVQEKFVCLNCGFETHADEQAALNIARSWLFLRSQEYKKYQTNKTTGNTDKRAFVETWQSFYRKKLKEVWKPAV

SEQ ID NO: 37703 - protein, 978 aa, synthetic construct
  REGION 1..978: note = engineered CasX variant
QEIKRINKIRRRLVKDSNTKKAGKTGPMKTLLVRVMTPDLRERLENLRKKPENIPQPISNTSRANLNKLLTDYTEMKKAILHVYWEEFQKDPVGLMSRVAQPASKKIDQNKLKPEMDEKGNLTTAGFACSQCGQPLFVYKLEQVSEKGKAYTNYFGRCNVAEHEKLIKLAQLKPEKDSDEAVTYSLGKFGQRALDFYSIHVTKESTHPVKPLAQIAGNRYASGPVGKALSDACMGTIASFLSKYQDIIIEHQKVVKGNQKRLESLRELAGKENLEYPSVTLPPQPHTKEGVDAYNEVIARVRMWVNLNLWQKLKLSRDDAKPLLRLKGFPSFPLVERQANEVDWWDMVCNVKKLINEKKEDGKVFWQNLAGYKRQEALRPYLSSEEDRKKGKKFARYQLGDLLLHLEKKHGEDWGKVYDEAWERIDKKVEGLSKHIKLEEERRSEDAQSKAALTDWLRAKASFVIEGLKEADKDEFCRCELKLQKWYGDLRGKPFAIEAENSILDISGFSKQYNCAFIWQKDGVKKLNLYLIINYFKGGKLRFKKIKPEAFEANRFYTVINKKSGEIVPMEVNFNFDDPNLIILPLAFGKRVGREFIWNDLLSLETGSLKLANGRVIEKTLYNRRTRQDEPALFVALTFERREVLDSSNIKPMNLIGVDRGENIPAVIALTDPEGCPLSRFKDSLGNPTHILRIGESYKEKQRTIQAKKEVEQRRAGGYSRKYASKAKNLADDMVRNTARDLLYYAVTQDAMLIFENLSRGFGRQGKRTFMAERQYTRMEDWLTAKLAYEGLPSKTYLSKTLAQYTSKTCSNCGFTITSADYDRMLEKLKKTATGWMTTINGKELKVEGQITYYNRYKRQNVVKDLSVELDRLSEESVNNDISSWTKGRSGEALSLLKKRFSHRPVQEKFVCLNCGFETHADEQAALNIARSWLFLRSQEYKKYQTNKTTGNTDKRAFVETWQSFYRKKLKEVWKPAV

SEQ ID NO: 37704 - protein, 977 aa, synthetic construct
  REGION 1..977: note = engineered CasX variant
QEIKRINKIRRRLVKDSNTKKAGKTGPMKTLLVRVMTPDLRERLENLRKKPENIPQPISNTSRANLNKLLTDYTEMKKAILHVYWEEFQKDPVGLMSRVAQPASKKIDQNKLKPEMDEKGNLTTAGFACSQCGQPLFVYKLEQVSEKGKAYTNYFGRCNVAEHEKLILLAQLKPEKDSDEAVTYSLGKFGQRALDFYSIHVTKESTHPVKPLAQIAGNRYASPVGKALSDACMGTIASFLSKYQDIIIEHQKVVKGNQKRLESLRELAGKENLEYPSVTLPPQPHTKEGVDAYNEVIARVRMWVNLNLWQKLKLSRDDAKPLLRLKGFPSFPLVERQANEVDWWDMVCNVKKLINEKKEDGKVFWQNLAGYKRQEALRPYLSSEEDRKKGKKFARYQLGDLLLHLEKKHGEDWGKVYDEAWERIDKKVEGLSKHIKLEEERRSEDAQSKAALTDWLRAKASFVIEGLKEADKDEFCRCELKLQKWYGDLRGKPFAIEAENSILDISGFSKQYNCAFIWQKDGVKKLNLYLIINYFKGGKLRFKKIKPEAFEANRFYTVINKKSGEIVPMEVNFNFDDPNLIILPLAFGKRVGREFIWNDLLSLETGSLKLANGRVIEKTLYNRRTRQDEPALFVALTFERREVLDSSNIKPMNLIGVDRGENIPAVIALTDPEGCPLSRFKDSLGNPTHILRIGESYKEKQRTIQAKKEVEQRRAGGYSRKYASKAKNLADDMVRNTARDLLYYAVTQDAMLIFENLSRGFGRQGKRTFMAERQYTRMEDWLTAKLAYEGLPSKTYLSKTLAQYTSKTCSNCGFTITSADYDRMLEKLKKTATGWMTTINGKELKVEGQITYYNRYKRQNVVKDLSVELDRLSEESVNNDISSWTKGRSGEALSLLKKRFSHRPVQEKFVCLNCGFETHADEQAALNIARSWLFLRSQEYKKYQTNKTTGNTDKRAFVETWQSFYRKKLKEVWKPAV

SEQ ID NO: 37705 - protein, 978 aa, synthetic construct
  REGION 1..978: note = engineered CasX variant
QEIKRINKIRRRLVKDSNTKKAGKTGPMKTLLVRVMTPDLRERLENLRKKPENIPQPISNTSRANLNKLLTDYTEMKKAILHVYWEEFQKDPVGLMSRVAQPASKKIDQNKLKPEMDEKGNLTTAGFACSQCGQPLFVYKLEQVSEKGKAYTNYFGRCNVAEHEKLILLAQLKPEKDSDEAVTYSLGKFGQRALDFYSIHVTKESTHPVKPLAQIAGNRYASYPVGKALSDACMGTIASFLSKYQDIIIEHQKVVKGNQKRLESLRELAGKENLEYPSVTLPPQPHTKEGVDAYNEVIARVRMWVNLNLWQKLKLSRDDAKPLLRLKGFPSFPLVERQANEVDWWDMVCNVKKLINEKKEDGKVFWQNLAGYKRQEALRPYLSSEEDRKKGKKFARYQLGDLLLHLEKKHGEDWGKVYDEAWERIDKKVEGLSKHIKLEEERRSEDAQSKAALTDWLRAKASFVIEGLKEADKDEFCRCELKLQKWYGDLRGKPFAIEAENSILDISGFSKQYNCAFIWQKDGVKKLNLYLIINYFKGGKLRFKKIKPEAFEANRFYTVINKKSGEIVPMEVNFNFDDPNLIILPLAFGKRVGREFIWNDLLSLETGSLKLANGRVIEKTLYNRRTRQDEPALFVALTFERREVLDSSNIKPMNLIGVDRGENIPAVIALTDPEGCPLSRFKDSLGNPTHILRIGESYKEKQRTIQAKKEVEQRRAGGYSRKYASKAKNLADDMVRNTARDLLYYAVTQDAMLIFENLSRGFGRQGKRTFMAERQYTRMEDWLTAKLAYEGLPSKTYLSKTLAQYTSKTCSNCGFTITSADYDRVLEKLKKTATGWMTTINGKELKVEGQITYYNRYKRQNVVKDLSVELDRLSEESVNNDISSWTKGRQGEALSLLKKRFSHRPVQEKFVCLNCGFETHADEQAALNIARSWLFLRSQEYKKYQTNKTTGNTDKRAFVETWQSFYRKKLKEVWKPAV

SEQ ID NO: 37706 - protein, 978 aa, synthetic construct
  REGION 1..978: note = engineered CasX variant
QEIKRINKIRRRLVKDSNTKKAGKTGPMKTLLVRVMTPDLRERLENLRKKPENIPQPISNTSRANLNKLLTDYTEMKKAILHVYWEEFQKDPVGLMSRVAQPASKKIDQNKLKPEMDEKGNLTTAGFACSQCGQPLFVYKLEQVSEKGKAYTNYFGRCNVAEHEKLILLAQLKPEKDSDEAVTYSLGKFGQRALDFYSIHVTKESTHPVKPLAQIAGNRYASHPVGKALSDACMGTIASFLSKYQDIIIEHQKVVKGNQKRLESLRELAGKENLEYPSVTLPPQPHTKEGVDAYNEVIARVRMWVNLNLWQKLKLSRDDAKPLLRLKGFPSFPLVERQANEVDWWDMVCNVKKLINEKKEDGKVFWQNLAGYKRQEALRPYLSSEEDRKKGKKFARYQLGDLLLHLEKKHGEDWGKVYDEAWERIDKKVEGLSKHIKLEEERRSEDAQSKAALTDWLRAKASFVIEGLKEADKDEFCRCELKLQKWYGDLRGKPFAIEAENSILDISGFSKQYNCAFIWQKDGVKKLNLYLIINYFKGGKLRFKKIKPEAFEANRFYTVINKKSGEIVPMEVNFNFDDPNLIILPLAFGKRVGREFIWNDLLSLETGSLKLANGRVIEKTLYNRRTRQDEPALFVALTFERREVLDSSNIKPMNLIGVDRGENIPAVIALTDPEGCPLSRFKDSLGNPTHILRIGESYKEKQRTIQAKKEVEQRRAGGYSRKYASKAKNLADDMVRNTARDLLYYAVTQDAMLIFENLSRGFGRQGKRTFMAERQYTRMEDWLTAKLAYEGLPSKTYLSKTLAQYTSKTCSNCGFTITSADYDRVLEKLKKTATGWMTTINGKELKVEGQITYYNRYKRQNVVKDLSVELDRLSEESVNNDISSWTKGRQGEALSLLKKRFSHRPVQEKFVCLNCGFETHADEQAALNIARSWLFLRSQEYKKYQTNKTTGNTDKRAFVETWQSFYRKKLKEVWKPAV

SEQ ID NO: 37707 - protein, 978 aa, synthetic construct
  REGION 1..978: note = engineered CasX variant
QEIKRINKIRRRLVKDSNTKKAGKTGPMKTLLVRVMTPDLRERLENLRKKPENIPQPISNTSRANLNKLLTDYTEMKKAILHVYWEEFQKDPVGLMSRVAQPASKKIDQNKLKPEMDEKGNLTTAGFACSQCGQPLFVYKLEQVSEKGKAYTNYFGRCNVAEHEKLILLAQLKPEKDSDEAVTYSLGKFGQRALDFYSIHVTKESTHPVKPLAQIAGNRYASSPVGKALSDACMGTIASFLSKYQDIIIEHQKVVKGNQKRLESLRELAGKENLEYPSVTLPPQPHTKEGVDAYNEVIARVRMWVNLNLWQKLKLSRDDAKPLLRLKGFPSFPLVERQANEVDWWDMVCNVKKLINEKKEDGKVFWQNLAGYKRQEALRPYLSSEEDRKKGKKFARYQLGDLLLHLEKKHGEDWGKVYDEAWERIDKKVEGLSKHIKLEEERRSEDAQSKAALTDWLRAKASFVIEGLKEADKDEFCRCELKLQKWYGDLRGKPFAIEAENSILDISGFSKQYNCAFIWQKDGVKKLNLYLIINYFKGGKLRFKKIKPEAFEANRFYTVINKKSGEIVPMEVNFNFDDPNLIILPLAFGKRVGREFIWNDLLSLETGSLKLANGRVIEKTLYNRRTRQDEPALFVALTFERREVLDSSNIKPMNLIGVDRGENIPAVIALTDPEGCPLSRFKDSLGNPTHILRIGESYKEKQRTIQAKKEVEQRRAGGYSRKYASKAKNLADDMVRNTARDLLYYAVTQDAMLIFENLSRGFGRQGKRTFMAERQYTRMEDWLTAKLAYEGLPSKTYLSKTLAQYTSKTCSNCGFTITSADYDRVLEKLKKTATGWMTTINGKELKVEGQITYYNRYKRQNVVKDLSVELDRLSEESVNNDISSWTKGRQGEALSLLKKRFSHRPVQEKFVCLNCGFETHADEQAALNIARSWLFLRSQEYKKYQTNKTTGNTDKRAFVETWQSFYRKKLKEVWKPAV

SEQ ID NO: 37708 - protein, 978 aa, synthetic construct
  REGION 1..978: note = engineered CasX variant
QEIKRINKIRRRLVKDSNTKKAGKTGPMKTLLVRVMTPDLRERLENLRKKPENIPQPISNTSRANLNKLLTDYTEMKKAILHVYWEEFQKDPVGLMSRVAQPASKKIDQNKLKPEMDEKGNLTTAGFACSQCGQPLFVYKLEQVSEKGKAYTNYFGRCNVAEHEKLILLAQLKPEKDSDEAVTYSLGKFGQRALDFYSIHVTKESTHPVKPLAQIAGNRYASTPVGKALSDACMGTIASFLSKYQDIIIEHQKVVKGNQKRLESLRELAGKENLEYPSVTLPPQPHTKEGVDAYNEVIARVRMWVNLNLWQKLKLSRDDAKPLLRLKGFPSFPLVERQANEVDWWDMVCNVKKLINEKKEDGKVFWQNLAGYKRQEALRPYLSSEEDRKKGKKFARYQLGDLLLHLEKKHGEDWGKVYDEAWERIDKKVEGLSKHIKLEEERRSEDAQSKAALTDWLRAKASFVIEGLKEADKDEFCRCELKLQKWYGDLRGKPFAIEAENSILDISGFSKQYNCAFIWQKDGVKKLNLYLIINYFKGGKLRFKKIKPEAFEANRFYTVINKKSGEIVPMEVNFNFDDPNLIILPLAFGKRVGREFIWNDLLSLETGSLKLANGRVIEKTLYNRRTRQDEPALFVALTFERREVLDSSNIKPMNLIGVDRGENIPAVIALTDPEGCPLSRFKDSLGNPTHILRIGESYKEKQRTIQAKKEVEQRRAGGYSRKYASKAKNLADDMVRNTARDLLYYAVTQDAMLIFENLSRGFGRQGKRTFMAERQYTRMEDWLTAKLAYEGLPSKTYLSKTLAQYTSKTCSNCGFTITSADYDRVLEKLKKTATGWMTTINGKELKVEGQITYYNRYKRQNVVKDLSVELDRLSEESVNNDISSWTKGRQGEALSLLKKRFSHRPVQEKFVCLNCGFETHADEQAALNIARSWLFLRSQEYKKYQTNKTTGNTDKRAFVETWQSFYRKKLKEVWKPAV

SEQ ID NO: 37709 - protein, 978 aa, synthetic construct
  REGION 1..978: note = engineered CasX variant
QEIKRINKIRRRLVKDSNTKKAGKTGPMKTLLVRVMTPDLRERLENLRKKPENIPQPISNTSRANLNKLLTDYTEMKKAILHVYWEEFQKDPVGLMSRVAQPASKKIDQNKLKPEMDEKGNLTTAGFACSQCGQPLFVYKLEQVSEKGKAYTNYFGRCNVAEHEKLILLAQLKPEKDSDEAVTYSLGKFGQRALDFYSIHVTKESTHPVKPLAQIAGNRYASAPVGKALSDACMGTIASFLSKYQDIIIEHQKVVKGNQKRLESLRELAGKENLEYPSVTLPPQPHTKEGVDAYNEVIARVRMWVNLNLWQKLKLSRDDAKPLLRLKGFPSFPLVERQANEVDWWDMVCNVKKLINEKKEDGKVFWQNLAGYKRQEALRPYLSSEEDRKKGKKFARYQLGDLLLHLEKKHGEDWGKVYDEAWERIDKKVEGLSKHIKLEEERRSEDAQSKAALTDWLRAKASFVIEGLKEADKDEFCRCELKLQKWYGDLRGKPFAIEAENSILDISGFSKQYNCAFIWQKDGVKKLNLYLIINYFKGGKLRFKKIKPEAFEANRFYTVINKKSGEIVPMEVNFNFDDPNLIILPLAFGKRVGREFIWNDLLSLETGSLKLANGRVIEKTLYNRRTRQDEPALFVALTFERREVLDSSNIKPMNLIGVDRGENIPAVIALTDPEGCPLSRFKDSLGNPTHILRIGESYKEKQRTIQAKKEVEQRRAGGYSRKYASKAKNLADDMVRNTARDLLYYAVTQDAMLIFENLSRGFGRQGKRTFMAERQYTRMEDWLTAKLAYEGLPSKTYLSKTLAQYTSKTCSNCGFTITSADYDRVLEKLKKTATGWMTTINGKELKVEGQITYYNRYKRQNVVKDLSVELDRLSEESVNNDISSWTKGRQGEALSLLKKRFSHRPVQEKFVCLNCGFETHADEQAALNIARSWLFLRSQEYKKYQTNKTTGNTDKRAFVETWQSFYRKKLKEVWKPAV

SEQ ID NO: 37710 - protein, 978 aa, synthetic construct
  REGION 1..978: note = engineered CasX variant
QEIKRINKIRRRLVKDSNTKKAGKTGPMKTLLVRVMTPDLRERLENLRKKPENIPQPISNTSRANLNKLLTDYTEMKKAILHVYWEEFQKDPVGLMSRVAQPASKKIDQNKLKPEMDEKGNLTTAGFACSQCGQPLFVYKLEQVSEKGKAYTNYFGRCNVAEHEKLILLAQLKPEKDSDEAVTYSLGKFGQRALDFYSIHVTKESTHPVKPLAQIAGNRYASVPVGKALSDACMGTIASFLSKYQDIIIEHQKVVKGNQKRLESLRELAGKENLEYPSVTLPPQPHTKEGVDAYNEVIARVRMWVNLNLWQKLKLSRDDAKPLLRLKGFPSFPLVERQANEVDWWDMVCNVKKLINEKKEDGKVFWQNLAGYKRQEALRPYLSSEEDRKKGKKFARYQLGDLLLHLEKKHGEDWGKVYDEAWERIDKKVEGLSKHIKLEEERRSEDAQSKAALTDWLRAKASFVIEGLKEADKDEFCRCELKLQKWYGDLRGKPFAIEAENSILDISGFSKQYNCAFIWQKDGVKKLNLYLIINYFKGGKLRFKKIKPEAFEANRFYTVINKKSGEIVPMEVNFNFDDPNLIILPLAFGKRVGREFIWNDLLSLETGSLKLANGRVIEKTLYNRRTRQDEPALFVALTFERREVLDSSNIKPMNLIGVDRGENIPAVIALTDPEGCPLSRFKDSLGNPTHILRIGESYKEKQRTIQAKKEVEQRRAGGYSRKYASKAKNLADDMVRNTARDLLYYAVTQDAMLIFENLSRGFGRQGKRTFMAERQYTRMEDWLTAKLAYEGLPSKTYLSKTLAQYTSKTCSNCGFTITSADYDRVLEKLKKTATGWMTTINGKELKVEGQITYYNRYKRQNVVKDLSVELDRLSEESVNNDISSWTKGRQGEALSLLKKRFSHRPVQEKFVCLNCGFETHADEQAALNIARSWLFLRSQEYKKYQTNKTTGNTDKRAFVETWQSFYRKKLKEVWKPAV

SEQ ID NO: 37711 - protein, 978 aa, synthetic construct
  REGION 1..978: note = engineered CasX variant
QEIKRINKIRRRLVKDSNTKKAGKTGPMKTLLVRVMTPDLRERLENLRKKPENIPQPISNTSRANLNKLLTDYTEMKKAILHVYWEEFQKDPVGLMSRVAQPASKKIDQNKLKPEMDEKGNLTTAGFACSQCGQPLFVYKLEQVSEKGKAYTNYFGRCNVAEHEKLIKLAQLKPEKDSDEAVTYSLGKFGQRALDFYSIHVTKESTHPVKPLAQIAGNRYASGPVGKALSDACMGTIASFLSKYQDIIIEHQKVVKGNQKRLESLRELAGKENLEYPSVTLPPQPHTKEGVDAYNEVIARVRMWVNLNLWQKLKLSRDDAKPLLRLKGFPSFPLVERQANEVDWWDMVCNVKKLINEKKEDGKVFWQNLAGYKRQEALRPYLSSEEDRKKGKKFARYQLGDLLLHLEKKHGEDWGKVYDEAWERIDKKVEGLSKHIKLEEERRSEDAQSKAALTDWLRAKASFVIEGLKEADKDEFCRCELKLQKWYGDLRGKPFAIEAENSILDISGFSKQYNCAFIWQKDGVKKLNLYLIINYFKGGKLRFKKIKPEAFEANRFYTVINKKSGEIVPMEVNFNFDDPNLIILPLAFGKRVGREFIWNDLLSLETGSLKLANGRVIEKTLYNRRTRQDEPALFVALTFERREVLDSSNIKPMNLIGVDRGENIPAVIALTDPEGCPLSRFKDSLGNPTHILRIGESYKEKQRTIQAKKEVEQRRAGGYSRKYASKAKNLADDMVRNTARDLLYYAVTQDAMLIFENLSRGFGRQGKRTFMAERQYTRMEDWLTAKLAYEGLPSKTYLSKTLAQYTSKTCSNCGFTITSADYDRVLEKLKKTATGWMTTINGKELKVEGQITYYNRYKRQNVVKDLSVELDRLSEESVNNDISSWTKGRQGEALSLLKKRFSHRPVQEKFVCLNCGFETHADEQAALNIARSWLFLRSQEYKKYQTNKTTGNTDKRAFVETWQSFYRKKLKEVWKPAV

SEQ ID NO: 37712 - protein, 977 aa, synthetic construct
  REGION 1..977: note = engineered CasX variant
QEIKRINKIRRRLVKDSNTKKAGKTGPMKTLLVRVMTPDLRERLENLRKKPENIPQPISNTSRANLNKLLTDYTEMKKAILHVYWEEFQKDPVGLMSRVAQPASKKIDQNKLKPEMDEKGNLTTAGFACSQCGQPLFVYKLEQVSEKGKAYTNYFGRCNVAEHEKLILLAQLKPEKDSDEAVTYSLGKFGQRALDFYSIHVTKESTHPVKPLAQIAGNRYASPVGKALSDACMGTIASFLSKYQDIIIEHQKVVKGNQKRLESLRELAGKENLEYPSVTLPPQPHTKEGVDAYNEVIARVRMWVNLNLWQKLKLSRDDAKPLLRLKGFPSFPLVERQANEVDWWDMVCNVKKLINEKKEDGKVFWQNLAGYKRQEALRPYLSSEEDRKKGKKFARYQLGDLLLHLEKKHGEDWGKVYDEAWERIDKKVEGLSKHIKLEEERRSEDAQSKAALTDWLRAKASFVIEGLKEADKDEFCRCELKLQKWYGDLRGKPFAIEAENSILDISGFSKQYNCAFIWQKDGVKKLNLYLIINYFKGGKLRFKKIKPEAFEANRFYTVINKKSGEIVPMEVNFNFDDPNLIILPLAFGKRVGREFIWNDLLSLETGSLKLANGRVIEKTLYNRRTRQDEPALFVALTFERREVLDSSNIKPMNLIGVDRGENIPAVIALTDPEGCPLSRFKDSLGNPTHILRIGESYKEKQRTIQAKKEVEQRRAGGYSRKYASKAKNLADDMVRNTARDLLYYAVTQDAMLIFENLSRGFGRQGKRTFMAERQYTRMEDWLTAKLAYEGLPSKTYLSKTLAQYTSKTCSNCGFTITSADYDRVLEKLKKTATGWMTTINGKELKVEGQITYYNRYKRQNVVKDLSVELDRLSEESVNNDISSWTKGRQGEALSLLKKRFSHRPVQEKFVCLNCGFETHADEQAALNIARSWLFLRSQEYKKYQTNKTTGNTDKRAFVETWQSFYRKKLKEVWKPAV

SEQ ID NO: 37713 - protein, 978 aa, synthetic construct
  REGION 1..978: note = engineered CasX variant
QEIKRINKIRRRLVKDSNTKKAGKTGPMKTLLVRVMTPDLRERLENLRKKPENIPQPISNTSRANLNKLLTDYTEMKKAILHVYWEEFQKDPVGLMSRVAQPASKKIDQNKLKPEMDEKGNLTTAGFACSQCGQPLFVYKLEQVSEKGKAYTNYFGRCNVAEHEKLILLAQLKPEKDSDEAVTYSLGKFGQRALDFYSIHVTKESTHPVKPLAQIAGNRYASYPVGKALSDACMGTIASFLSKYQDIIIEHQKVVKGNQKRLESLRELAGKENLEYPSVTLPPQPHTKEGVDAYNEVIARVRMWVNLNLWQKLKLSRDDAKPLLRLKGFPSFPLVERQANEVDWWDMVCNVKKLINEKKEDGKVFWQNLAGYKRQEALRPYLSSEEDRKKGKKFARYQLGDLLLHLEKKHGEDWGKVYDEAWERIDKKVEGLSKHIKLEEERRSEDAQSKAALTDWLRAKASFVIEGLKEADKDEFCRCELKLQKWYGDLRGKPFAIEAENSILDISGFSKQYNCAFIWQKDGVKKLNLYLIINYFKGGKLRFKKIKPEAFEANRFYTVINKKSGEIVPMEVNFNFDDPNLIILPLAFGKRVGREFIWNDLLSLETGSLKLANGRVIEKTLYNRRTRQDEPALFVALTFERREVLDSSNIKPMNLIGVDRGENIPAVIALTDPEGCPLSRFKDSLGNPTHILRIGESYKEKQRTIQAKKEVEQRRAGGYSRKYASKAKNLADDMVRNTARDLLYYAVTQDAMLIFENLSRGFGRQGKRTFMAERQYTRMEDWLTAKLAYEGLPSKTYLSKTLAQYTSKTCSNCGFTITSADYDRVLEKLKKTATGWMTTINGKELKVEGQITYYNRYKRQNVVKDLSVELDRLSEESVNNDISSWTKGRSGEALSLLKKRFSHRPVQEKFVCLNCEFETHADEQAALNIARSWLFLRSQEYKKYQTNKTTGNTDKRAFVETWQSFYRKKLKEVWKPAV

SEQ ID NO: 37714 - protein, 978 aa, synthetic construct
  REGION 1..978: note = engineered CasX variant
QEIKRINKIRRRLVKDSNTKKAGKTGPMKTLLVRVMTPDLRERLENLRKKPENIPQPISNTSRANLNKLLTDYTEMKKAILHVYWEEFQKDPVGLMSRVAQPASKKIDQNKLKPEMDEKGNLTTAGFACSQCGQPLFVYKLEQVSEKGKAYTNYFGRCNVAEHEKLILLAQLKPEKDSDEAVTYSLGKFGQRALDFYSIHVTKESTHPVKPLAQIAGNRYASHPVGKALSDACMGTIASFLSKYQDIIIEHQKVVKGNQKRLESLRELAGKENLEYPSVTLPPQPHTKEGVDAYNEVIARVRMWVNLNLWQKLKLSRDDAKPLLRLKGFPSFPLVERQANEVDWWDMVCNVKKLINEKKEDGKVFWQNLAGYKRQEALRPYLSSEEDRKKGKKFARYQLGDLLLHLEKKHGEDWGKVYDEAWERIDKKVEGLSKHIKLEEERRSEDAQSKAALTDWLRAKASFVIEGLKEADKDEFCRCELKLQKWYGDLRGKPFAIEAENSILDISGFSKQYNCAFIWQKDGVKKLNLYLIINYFKGGKLRFKKIKPEAFEANRFYTVINKKSGEIVPMEVNFNFDDPNLIILPLAFGKRVGREFIWNDLLSLETGSLKLANGRVIEKTLYNRRTRQDEPALFVALTFERREVLDSSNIKPMNLIGVDRGENIPAVIALTDPEGCPLSRFKDSLGNPTHILRIGESYKEKQRTIQAKKEVEQRRAGGYSRKYASKAKNLADDMVRNTARDLLYYAVTQDAMLIFENLSRGFGRQGKRTFMAERQYTRMEDWLTAKLAYEGLPSKTYLSKTLAQYTSKTCSNCGFTITSADYDRVLEKLKKTATGWMTTINGKELKVEGQITYYNRYKRQNVVKDLSVELDRLSEESVNNDISSWTKGRSGEALSLLKKRFSHRPVQEKFVCLNCEFETHADEQAALNIARSWLFLRSQEYKKYQTNKTTGNTDKRAFVETWQSFYRKKLKEVWKPAV

SEQ ID NO: 37715 - protein, 978 aa, synthetic construct
  REGION 1..978: note = engineered CasX variant
QEIKRINKIRRRLVKDSNTKKAGKTGPMKTLLVRVMTPDLRERLENLRKKPENIPQPISNTSRANLNKLLTDYTEMKKAILHVYWEEFQKDPVGLMSRVAQPASKKIDQNKLKPEMDEKGNLTTAGFACSQCGQPLFVYKLEQVSEKGKAYTNYFGRCNVAEHEKLILLAQLKPEKDSDEAVTYSLGKFGQRALDFYSIHVTKESTHPVKPLAQIAGNRYASSPVGKALSDACMGTIASFLSKYQDIIIEHQKVVKGNQKRLESLRELAGKENLEYPSVTLPPQPHTKEGVDAYNEVIARVRMWVNLNLWQKLKLSRDDAKPLLRLKGFPSFPLVERQANEVDWWDMVCNVKKLINEKKEDGKVFWQNLAGYKRQEALRPYLSSEEDRKKGKKFARYQLGDLLLHLEKKHGEDWGKVYDEAWERIDKKVEGLSKHIKLEEERRSEDAQSKAALTDWLRAKASFVIEGLKEADKDEFCRCELKLQKWYGDLRGKPFAIEAENSILDISGFSKQYNCAFIWQKDGVKKLNLYLIINYFKGGKLRFKKIKPEAFEANRFYTVINKKSGEIVPMEVNFNFDDPNLIILPLAFGKRVGREFIWNDLLSLETGSLKLANGRVIEKTLYNRRTRQDEPALFVALTFERREVLDSSNIKPMNLIGVDRGENIPAVIALTDPEGCPLSRFKDSLGNPTHILRIGESYKEKQRTIQAKKEVEQRRAGGYSRKYASKAKNLADDMVRNTARDLLYYAVTQDAMLIFENLSRGFGRQGKRTFMAERQYTRMEDWLTAKLAYEGLPSKTYLSKTLAQYTSKTCSNCGFTITSADYDRVLEKLKKTATGWMTTINGKELKVEGQITYYNRYKRQNVVKDLSVELDRLSEESVNNDISSWTKGRSGEALSLLKKRFSHRPVQEKFVCLNCEFETHADEQAALNIARSWLFLRSQEYKKYQTNKTTGNTDKRAFVETWQSFYRKKLKEVWKPAV

SEQ ID NO: 37716 - protein, 978 aa, synthetic construct
  REGION 1..978: note = engineered CasX variant
QEIKRINKIRRRLVKDSNTKKAGKTGPMKTLLVRVMTPDLRERLENLRKKPENIPQPISNTSRANLNKLLTDYTEMKKAILHVYWEEFQKDPVGLMSRVAQPASKKIDQNKLKPEMDEKGNLTTAGFACSQCGQPLFVYKLEQVSEKGKAYTNYFGRCNVAEHEKLILLAQLKPEKDSDEAVTYSLGKFGQRALDFYSIHVTKESTHPVKPLAQIAGNRYASTPVGKALSDACMGTIASFLSKYQDIIIEHQKVVKGNQKRLESLRELAGKENLEYPSVTLPPQPHTKEGVDAYNEVIARVRMWVNLNLWQKLKLSRDDAKPLLRLKGFPSFPLVERQANEVDWWDMVCNVKKLINEKKEDGKVFWQNLAGYKRQEALRPYLSSEEDRKKGKKFARYQLGDLLLHLEKKHGEDWGKVYDEAWERIDKKVEGLSKHIKLEEERRSEDAQSKAALTDWLRAKASFVIEGLKEADKDEFCRCELKLQKWYGDLRGKPFAIEAENSILDISGFSKQYNCAFIWQKDGVKKLNLYLIINYFKGGKLRFKKIKPEAFEANRFYTVINKKSGEIVPMEVNFNFDDPNLIILPLAFGKRVGREFIWNDLLSLETGSLKLANGRVIEKTLYNRRTRQDEPALFVALTFERREVLDSSNIKPMNLIGVDRGENIPAVIALTDPEGCPLSRFKDSLGNPTHILRIGESYKEKQRTIQAKKEVEQRRAGGYSRKYASKAKNLADDMVRNTARDLLYYAVTQDAMLIFENLSRGFGRQGKRTFMAERQYTRMEDWLTAKLAYEGLPSKTYLSKTLAQYTSKTCSNCGFTITSADYDRVLEKLKKTATGWMTTINGKELKVEGQITYYNRYKRQNVVKDLSVELDRLSEESVNNDISSWTKGRSGEALSLLKKRFSHRPVQEKFVCLNCEFETHADEQAALNIARSWLFLRSQEYKKYQTNKTTGNTDKRAFVETWQSFYRKKLKEVWKPAV

SEQ ID NO: 37717 - protein, 978 aa, synthetic construct
  REGION 1..978: note = engineered CasX variant
QEIKRINKIRRRLVKDSNTKKAGKTGPMKTLLVRVMTPDLRERLENLRKKPENIPQPISNTSRANLNKLLTDYTEMKKAILHVYWEEFQKDPVGLMSRVAQPASKKIDQNKLKPEMDEKGNLTTAGFACSQCGQPLFVYKLEQVSEKGKAYTNYFGRCNVAEHEKLILLAQLKPEKDSDEAVTYSLGKFGQRALDFYSIHVTKESTHPVKPLAQIAGNRYASAPVGKALSDACMGTIASFLSKYQDIIIEHQKVVKGNQKRLESLRELAGKENLEYPSVTLPPQPHTKEGVDAYNEVIARVRMWVNLNLWQKLKLSRDDAKPLLRLKGFPSFPLVERQANEVDWWDMVCNVKKLINEKKEDGKVFWQNLAGYKRQEALRPYLSSEEDRKKGKKFARYQLGDLLLHLEKKHGEDWGKVYDEAWERIDKKVEGLSKHIKLEEERRSEDAQSKAALTDWLRAKASFVIEGLKEADKDEFCRCELKLQKWYGDLRGKPFAIEAENSILDISGFSKQYNCAFIWQKDGVKKLNLYLIINYFKGGKLRFKKIKPEAFEANRFYTVINKKSGEIVPMEVNFNFDDPNLIILPLAFGKRVGREFIWNDLLSLETGSLKLANGRVIEKTLYNRRTRQDEPALFVALTFERREVLDSSNIKPMNLIGVDRGENIPAVIALTDPEGCPLSRFKDSLGNPTHILRIGESYKEKQRTIQAKKEVEQRRAGGYSRKYASKAKNLADDMVRNTARDLLYYAVTQDAMLIFENLSRGFGRQGKRTFMAERQYTRMEDWLTAKLAYEGLPSKTYLSKTLAQYTSKTCSNCGFTITSADYDRVLEKLKKTATGWMTTINGKELKVEGQITYYNRYKRQNVVKDLSVELDRLSEESVNNDISSWTKGRSGEALSLLKKRFSHRPVQEKFVCLNCEFETHADEQAALNIARSWLFLRSQEYKKYQTNKTTGNTDKRAFVETWQSFYRKKLKEVWKPAV

SEQ ID NO: 37718 - protein, 978 aa, synthetic construct
  REGION 1..978: note = engineered CasX variant
QEIKRINKIRRRLVKDSNTKKAGKTGPMKTLLVRVMTPDLRERLENLRKKPENIPQPISNTSRANLNKLLTDYTEMKKAILHVYWEEFQKDPVGLMSRVAQPASKKIDQNKLKPEMDEKGNLTTAGFACSQCGQPLFVYKLEQVSEKGKAYTNYFGRCNVAEHEKLILLAQLKPEKDSDEAVTYSLGKFGQRALDFYSIHVTKESTHPVKPLAQIAGNRYASVPVGKALSDACMGTIASFLSKYQDIIIEHQKVVKGNQKRLESLRELAGKENLEYPSVTLPPQPHTKEGVDAYNEVIARVRMWVNLNLWQKLKLSRDDAKPLLRLKGFPSFPLVERQANEVDWWDMVCNVKKLINEKKEDGKVFWQNLAGYKRQEALRPYLSSEEDRKKGKKFARYQLGDLLLHLEKKHGEDWGKVYDEAWERIDKKVEGLSKHIKLEEERRSEDAQSKAALTDWLRAKASFVIEGLKEADKDEFCRCELKLQKWYGDLRGKPFAIEAENSILDISGFSKQYNCAFIWQKDGVKKLNLYLIINYFKGGKLRFKKIKPEAFEANRFYTVINKKSGEIVPMEVNFNFDDPNLIILPLAFGKRVGREFIWNDLLSLETGSLKLANGRVIEKTLYNRRTRQDEPALFVALTFERREVLDSSNIKPMNLIGVDRGENIPAVIALTDPEGCPLSRFKDSLGNPTHILRIGESYKEKQRTIQAKKEVEQRRAGGYSRKYASKAKNLADDMVRNTARDLLYYAVTQDAMLIFENLSRGFGRQGKRTFMAERQYTRMEDWLTAKLAYEGLPSKTYLSKTLAQYTSKTCSNCGFTITSADYDRVLEKLKKTATGWMTTINGKELKVEGQITYYNRYKRQNVVKDLSVELDRLSEESVNNDISSWTKGRSGEALSLLKKRFSHRPVQEKFVCLNCEFETHADEQAALNIARSWLFLRSQEYKKYQTNKTTGNTDKRAFVETWQSFYRKKLKEVWKPAV

SEQ ID NO: 37719 - protein, 978 aa, synthetic construct
  REGION 1..978: note = engineered CasX variant
QEIKRINKIRRRLVKDSNTKKAGKTGPMKTLLVRVMTPDLRERLENLRKKPENIPQPISNTSRANLNKLLTDYTEMKKAILHVYWEEFQKDPVGLMSRVAQPASKKIDQNKLKPEMDEKGNLTTAGFACSQCGQPLFVYKLEQVSEKGKAYTNYFGRCNVAEHEKLIKLAQLKPEKDSDEAVTYSLGKFGQRALDFYSIHVTKESTHPVKPLAQIAGNRYASGPVGKALSDACMGTIASFLSKYQDIIIEHQKVVKGNQKRLESLRELAGKENLEYPSVTLPPQPHTKEGVDAYNEVIARVRMWVNLNLWQKLKLSRDDAKPLLRLKGFPSFPLVERQANEVDWWDMVCNVKKLINEKKEDGKVFWQNLAGYKRQEALRPYLSSEEDRKKGKKFARYQLGDLLLHLEKKHGEDWGKVYDEAWERIDKKVEGLSKHIKLEEERRSEDAQSKAALTDWLRAKASFVIEGLKEADKDEFCRCELKLQKWYGDLRGKPFAIEAENSILDISGFSKQYNCAFIWQKDGVKKLNLYLIINYFKGGKLRFKKIKPEAFEANRFYTVINKKSGEIVPMEVNFNFDDPNLIILPLAFGKRVGREFIWNDLLSLETGSLKLANGRVIEKTLYNRRTRQDEPALFVALTFERREVLDSSNIKPMNLIGVDRGENIPAVIALTDPEGCPLSRFKDSLGNPTHILRIGESYKEKQRTIQAKKEVEQRRAGGYSRKYASKAKNLADDMVRNTARDLLYYAVTQDAMLIFENLSRGFGRQGKRTFMAERQYTRMEDWLTAKLAYEGLPSKTYLSKTLAQYTSKTCSNCGFTITSADYDRVLEKLKKTATGWMTTINGKELKVEGQITYYNRYKRQNVVKDLSVELDRLSEESVNNDISSWTKGRSGEALSLLKKRFSHRPVQEKFVCLNCEFETHADEQAALNIARSWLFLRSQEYKKYQTNKTTGNTDKRAFVETWQSFYRKKLKEVWKPAV

SEQ ID NO: 37720 - protein, 977 aa, synthetic construct
  REGION 1..977: note = engineered CasX variant
QEIKRINKIRRRLVKDSNTKKAGKTGPMKTLLVRVMTPDLRERLENLRKKPENIPQPISNTSRANLNKLLTDYTEMKKAILHVYWEEFQKDPVGLMSRVAQPASKKIDQNKLKPEMDEKGNLTTAGFACSQCGQPLFVYKLEQVSEKGKAYTNYFGRCNVAEHEKLILLAQLKPEKDSDEAVTYSLGKFGQRALDFYSIHVTKESTHPVKPLAQIAGNRYASPVGKALSDACMGTIASFLSKYQDIIIEHQKVVKGNQKRLESLRELAGKENLEYPSVTLPPQPHTKEGVDAYNEVIARVRMWVNLNLWQKLKLSRDDAKPLLRLKGFPSFPLVERQANEVDWWDMVCNVKKLINEKKEDGKVFWQNLAGYKRQEALRPYLSSEEDRKKGKKFARYQLGDLLLHLEKKHGEDWGKVYDEAWERIDKKVEGLSKHIKLEEERRSEDAQSKAALTDWLRAKASFVIEGLKEADKDEFCRCELKLQKWYGDLRGKPFAIEAENSILDISGFSKQYNCAFIWQKDGVKKLNLYLIINYFKGGKLRFKKIKPEAFEANRFYTVINKKSGEIVPMEVNFNFDDPNLIILPLAFGKRVGREFIWNDLLSLETGSLKLANGRVIEKTLYNRRTRQDEPALFVALTFERREVLDSSNIKPMNLIGVDRGENIPAVIALTDPEGCPLSRFKDSLGNPTHILRIGESYKEKQRTIQAKKEVEQRRAGGYSRKYASKAKNLADDMVRNTARDLLYYAVTQDAMLIFENLSRGFGRQGKRTFMAERQYTRMEDWLTAKLAYEGLPSKTYLSKTLAQYTSKTCSNCGFTITSADYDRVLEKLKKTATGWMTTINGKELKVEGQITYYNRYKRQNVVKDLSVELDRLSEESVNNDISSWTKGRSGEALSLLKKRFSHRPVQEKFVCLNCEFETHADEQAALNIARSWLFLRSQEYKKYQTNKTTGNTDKRAFVETWQSFYRKKLKEVWKPAV

SEQ ID NO: 37721 - protein, 979 aa, synthetic construct
  REGION 1..979: note = engineered CasX variant
QEIKRINKIRRRLVKDSNTKKAGKTGPMKTLLVRVMTPDLRERLENLRKKPENIPQPISNTSRANLNKLLTDYTEMKKAILHVYWEEFQKDPVGLMSRVAQPASKKIDQNKLKPEMDEKGNLTTAGFACSQCGQPLFVYKLEQVSEKGKAYTNYFGRCNVAEHEKLILLAQLKPEKDSDEAVTYSLGKFGQRALDFYSIHVTKESTHPVKPLAQIAGNRYASYPVGKALSDACMGTIASFLSKYQDIIIEHQKVVKGNQKRLESLRELAGKENLEYPSVTLPPQPHTKEGVDAYNEVIARVRMWVNLNLWQKLKLSRDDAKPLLRLKGFPSFPLVERQANEVDWWDMVCNVKKLINEKKEDGKVFWQNLAGYKRQEALRPYLSSEEDRKKGKKFARYQLGDLLLHLEKKHGEDWGKVYDEAWERIDKKVEGLSKHIKLEEERRSEDAQSKAALTDWLRAKASFVIEGLKEADKDEFCRCELKLQKWYGDLRGKPFAIEAENSILDISGFSKQYNCAFIWQKDGVKKLNLYLIINYFKGGKLRFKKIKPEAFEANRFYTVINKKSGEIVPMEVNFNFDDPNLIILPLAFGKRVGREFIWNDLLSLETGSLKLANGRVIEKTLYNRRTRQDEPALFVALTFERREVLDSSNIKPMNLIGVDRGENIPAVIALTDPEGCPLSRFKDSLGNPTHILRIGESYKEKQRTIQAKKEVEQRRAGGYSRKYASKAKNLADDMVRNTARDLLYYAVTQDAMLIFENLSRGFGRQGKRTFMAERQYTRMEDWLTAKLAYEGLPSKTYLSKTLAQYTSKTCSNCGFTITSADYDRVLEKLKKTATGWMTTINGKELKVEGQITYYNRYKRQNVVKDLSVELDRLSEESVNNDISSWTKGRSGEALSLLKKRFSHRPVQEKFVCLNCGFETHADEQAALNIARSWLFLRSQEYKKYQTNKTSTGNTDKRAFVETWQSFYRKKLKEVWKPAV

SEQ ID NO: 37722 - protein, 979 aa, synthetic construct
  REGION 1..979: note = engineered CasX variant
QEIKRINKIRRRLVKDSNTKKAGKTGPMKTLLVRVMTPDLRERLENLRKKPENIPQPISNTSRANLNKLLTDYTEMKKAILHVYWEEFQKDPVGLMSRVAQPASKKIDQNKLKPEMDEKGNLTTAGFACSQCGQPLFVYKLEQVSEKGKAYTNYFGRCNVAEHEKLILLAQLKPEKDSDEAVTYSLGKFGQRALDFYSIHVTKESTHPVKPLAQIAGNRYASHPVGKALSDACMGTIASFLSKYQDIIIEHQKVVKGNQKRLESLRELAGKENLEYPSVTLPPQPHTKEGVDAYNEVIARVRMWVNLNLWQKLKLSRDDAKPLLRLKGFPSFPLVERQANEVDWWDMVCNVKKLINEKKEDGKVFWQNLAGYKRQEALRPYLSSEEDRKKGKKFARYQLGDLLLHLEKKHGEDWGKVYDEAWERIDKKVEGLSKHIKLEEERRSEDAQSKAALTDWLRAKASFVIEGLKEADKDEFCRCELKLQKWYGDLRGKPFAIEAENSILDISGFSKQYNCAFIWQKDGVKKLNLYLIINYFKGGKLRFKKIKPEAFEANRFYTVINKKSGEIVPMEVNFNFDDPNLIILPLAFGKRVGREFIWNDLLSLETGSLKLANGRVIEKTLYNRRTRQDEPALFVALTFERREVLDSSNIKPMNLIGVDRGENIPAVIALTDPEGCPLSRFKDSLGNPTHILRIGESYKEKQRTIQAKKEVEQRRAGGYSRKYASKAKNLADDMVRNTARDLLYYAVTQDAMLIFENLSRGFGRQGKRTFMAERQYTRMEDWLTAKLAYEGLPSKTYLSKTLAQYTSKTCSNCGFTITSADYDRVLEKLKKTATGWMTTINGKELKVEGQITYYNRYKRQNVVKDLSVELDRLSEESVNNDISSWTKGRSGEALSLLKKRFSHRPVQEKFVCLNCGFETHADEQAALNIARSWLFLRSQEYKKYQTNKTSTGNTDKRAFVETWQSFYRKKLKEVWKPAV

SEQ ID NO: 37723 - protein, 979 aa, synthetic construct
  REGION 1..979: note = engineered CasX variant
QEIKRINKIRRRLVKDSNTKKAGKTGPMKTLLVRVMTPDLRERLENLRKKPENIPQPISNTSRANLNKLLTDYTEMKKAILHVYWEEFQKDPVGLMSRVAQPASKKIDQNKLKPEMDEKGNLTTAGFACSQCGQPLFVYKLEQVSEKGKAYTNYFGRCNVAEHEKLILLAQLKPEKDSDEAVTYSLGKFGQRALDFYSIHVTKESTHPVKPLAQIAGNRYASSPVGKALSDACMGTIASFLSKYQDIIIEHQKVVKGNQKRLESLRELAGKENLEYPSVTLPPQPHTKEGVDAYNEVIARVRMWVNLNLWQKLKLSRDDAKPLLRLKGFPSFPLVERQANEVDWWDMVCNVKKLINEKKEDGKVFWQNLAGYKRQEALRPYLSSEEDRKKGKKFARYQLGDLLLHLEKKHGEDWGKVYDEAWERIDKKVEGLSKHIKLEEERRSEDAQSKAALTDWLRAKASFVIEGLKEADKDEFCRCELKLQKWYGDLRGKPFAIEAENSILDISGFSKQYNCAFIWQKDGVKKLNLYLIINYFKGGKLRFKKIKPEAFEANRFYTVINKKSGEIVPMEVNFNFDDPNLIILPLAFGKRVGREFIWNDLLSLETGSLKLANGRVIEKTLYNRRTRQDEPALFVALTFERREVLDSSNIKPMNLIGVDRGENIPAVIALTDPEGCPLSRFKDSLGNPTHILRIGESYKEKQRTIQAKKEVEQRRAGGYSRKYASKAKNLADDMVRNTARDLLYYAVTQDAMLIFENLSRGFGRQGKRTFMAERQYTRMEDWLTAKLAYEGLPSKTYLSKTLAQYTSKTCSNCGFTITSADYDRVLEKLKKTATGWMTTINGKELKVEGQITYYNRYKRQNVVKDLSVELDRLSEESVNNDISSWTKGRSGEALSLLKKRFSHRPVQEKFVCLNCGFETHADEQAALNIARSWLFLRSQEYKKYQTNKTSTGNTDKRAFVETWQSFYRKKLKEVWKPAV

SEQ ID NO: 37724 - protein, 979 aa, synthetic construct
  REGION 1..979: note = engineered CasX variant
QEIKRINKIRRRLVKDSNTKKAGKTGPMKTLLVRVMTPDLRERLENLRKKPENIPQPISNTSRANLNKLLTDYTEMKKAILHVYWEEFQKDPVGLMSRVAQPASKKIDQNKLKPEMDEKGNLTTAGFACSQCGQPLFVYKLEQVSEKGKAYTNYFGRCNVAEHEKLILLAQLKPEKDSDEAVTYSLGKFGQRALDFYSIHVTKESTHPVKPLAQIAGNRYASTPVGKALSDACMGTIASFLSKYQDIIIEHQKVVKGNQKRLESLRELAGKENLEYPSVTLPPQPHTKEGVDAYNEVIARVRMWVNLNLWQKLKLSRDDAKPLLRLKGFPSFPLVERQANEVDWWDMVCNVKKLINEKKEDGKVFWQNLAGYKRQEALRPYLSSEEDRKKGKKFARYQLGDLLLHLEKKHGEDWGKVYDEAWERIDKKVEGLSKHIKLEEERRSEDAQSKAALTDWLRAKASFVIEGLKEADKDEFCRCELKLQKWYGDLRGKPFAIEAENSILDISGFSKQYNCAFIWQKDGVKKLNLYLIINYFKGGKLRFKKIKPEAFEANRFYTVINKKSGEIVPMEVNFNFDDPNLIILPLAFGKRVGREFIWNDLLSLETGSLKLANGRVIEKTLYNRRTRQDEPALFVALTFERREVLDSSNIKPMNLIGVDRGENIPAVIALTDPEGCPLSRFKDSLGNPTHILRIGESYKEKQRTIQAKKEVEQRRAGGYSRKYASKAKNLADDMVRNTARDLLYYAVTQDAMLIFENLSRGFGRQGKRTFMAERQYTRMEDWLTAKLAYEGLPSKTYLSKTLAQYTSKTCSNCGFTITSADYDRVLEKLKKTATGWMTTINGKELKVEGQITYYNRYKRQNVVKDLSVELDRLSEESVNNDISSWTKGRSGEALSLLKKRFSHRPVQEKFVCLNCGFETHADEQAALNIARSWLFLRSQEYKKYQTNKTSTGNTDKRAFVETWQSFYRKKLKEVWKPAV

SEQ ID NO: 37725 - protein, 979 aa, synthetic construct
  REGION 1..979: note = engineered CasX variant
QEIKRINKIRRRLVKDSNTKKAGKTGPMKTLLVRVMTPDLRERLENLRKKPENIPQPISNTSRANLNKLLTDYTEMKKAILHVYWEEFQKDPVGLMSRVAQPASKKIDQNKLKPEMDEKGNLTTAGFACSQCGQPLFVYKLEQVSEKGKAYTNYFGRCNVAEHEKLILLAQLKPEKDSDEAVTYSLGKFGQRALDFYSIHVTKESTHPVKPLAQIAGNRYASAPVGKALSDACMGTIASFLSKYQDIIIEHQKVVKGNQKRLESLRELAGKENLEYPSVTLPPQPHTKEGVDAYNEVIARVRMWVNLNLWQKLKLSRDDAKPLLRLKGFPSFPLVERQANEVDWWDMVCNVKKLINEKKEDGKVFWQNLAGYKRQEALRPYLSSEEDRKKGKKFARYQLGDLLLHLEKKHGEDWGKVYDEAWERIDKKVEGLSKHIKLEEERRSEDAQSKAALTDWLRAKASFVIEGLKEADKDEFCRCELKLQKWYGDLRGKPFAIEAENSILDISGFSKQYNCAFIWQKDGVKKLNLYLIINYFKGGKLRFKKIKPEAFEANRFYTVINKKSGEIVPMEVNFNFDDPNLIILPLAFGKRVGREFIWNDLLSLETGSLKLANGRVIEKTLYNRRTRQDEPALFVALTFERREVLDSSNIKPMNLIGVDRGENIPAVIALTDPEGCPLSRFKDSLGNPTHILRIGESYKEKQRTIQAKKEVEQRRAGGYSRKYASKAKNLADDMVRNTARDLLYYAVTQDAMLIFENLSRGFGRQGKRTFMAERQYTRMEDWLTAKLAYEGLPSKTYLSKTLAQYTSKTCSNCGFTITSADYDRVLEKLKKTATGWMTTINGKELKVEGQITYYNRYKRQNVVKDLSVELDRLSEESVNNDISSWTKGRSGEALSLLKKRFSHRPVQEKFVCLNCGFETHADEQAALNIARSWLFLRSQEYKKYQTNKTSTGNTDKRAFVETWQSFYRKKLKEVWKPAV

SEQ ID NO: 37726 - protein, 979 aa, synthetic construct
  REGION 1..979: note = engineered CasX variant
QEIKRINKIRRRLVKDSNTKKAGKTGPMKTLLVRVMTPDLRERLENLRKKPENIPQPISNTSRANLNKLLTDYTEMKKAILHVYWEEFQKDPVGLMSRVAQPASKKIDQNKLKPEMDEKGNLTTAGFACSQCGQPLFVYKLEQVSEKGKAYTNYFGRCNVAEHEKLILLAQLKPEKDSDEAVTYSLGKFGQRALDFYSIHVTKESTHPVKPLAQIAGNRYASVPVGKALSDACMGTIASFLSKYQDIIIEHQKVVKGNQKRLESLRELAGKENLEYPSVTLPPQPHTKEGVDAYNEVIARVRMWVNLNLWQKLKLSRDDAKPLLRLKGFPSFPLVERQANEVDWWDMVCNVKKLINEKKEDGKVFWQNLAGYKRQEALRPYLSSEEDRKKGKKFARYQLGDLLLHLEKKHGEDWGKVYDEAWERIDKKVEGLSKHIKLEEERRSEDAQSKAALTDWLRAKASFVIEGLKEADKDEFCRCELKLQKWYGDLRGKPFAIEAENSILDISGFSKQYNCAFIWQKDGVKKLNLYLIINYFKGGKLRFKKIKPEAFEANRFYTVINKKSGEIVPMEVNFNFDDPNLIILPLAFGKRVGREFIWNDLLSLETGSLKLANGRVIEKTLYNRRTRQDEPALFVALTFERREVLDSSNIKPMNLIGVDRGENIPAVIALTDPEGCPLSRFKDSLGNPTHILRIGESYKEKQRTIQAKKEVEQRRAGGYSRKYASKAKNLADDMVRNTARDLLYYAVTQDAMLIFENLSRGFGRQGKRTFMAERQYTRMEDWLTAKLAYEGLPSKTYLSKTLAQYTSKTCSNCGFTITSADYDRVLEKLKKTATGWMTTINGKELKVEGQITYYNRYKRQNVVKDLSVELDRLSEESVNNDISSWTKGRSGEALSLLKKRFSHRPVQEKFVCLNCGFETHADEQAALNIARSWLFLRSQEYKKYQTNKTSTGNTDKRAFVETWQSFYRKKLKEVWKPAV

SEQ ID NO: 37727 - protein, 979 aa, synthetic construct
  REGION 1..979: note = engineered CasX variant
QEIKRINKIRRRLVKDSNTKKAGKTGPMKTLLVRVMTPDLRERLENLRKKPENIPQPISNTSRANLNKLLTDYTEMKKAILHVYWEEFQKDPVGLMSRVAQPASKKIDQNKLKPEMDEKGNLTTAGFACSQCGQPLFVYKLEQVSEKGKAYTNYFGRCNVAEHEKLIKLAQLKPEKDSDEAVTYSLGKFGQRALDFYSIHVTKESTHPVKPLAQIAGNRYASGPVGKALSDACMGTIASFLSKYQDIIIEHQKVVKGNQKRLESLRELAGKENLEYPSVTLPPQPHTKEGVDAYNEVIARVRMWVNLNLWQKLKLSRDDAKPLLRLKGFPSFPLVERQANEVDWWDMVCNVKKLINEKKEDGKVFWQNLAGYKRQEALRPYLSSEEDRKKGKKFARYQLGDLLLHLEKKHGEDWGKVYDEAWERIDKKVEGLSKHIKLEEERRSEDAQSKAALTDWLRAKASFVIEGLKEADKDEFCRCELKLQKWYGDLRGKPFAIEAENSILDISGFSKQYNCAFIWQKDGVKKLNLYLIINYFKGGKLRFKKIKPEAFEANRFYTVINKKSGEIVPMEVNFNFDDPNLIILPLAFGKRVGREFIWNDLLSLETGSLKLANGRVIEKTLYNRRTRQDEPALFVALTFERREVLDSSNIKPMNLIGVDRGENIPAVIALTDPEGCPLSRFKDSLGNPTHILRIGESYKEKQRTIQAKKEVEQRRAGGYSRKYASKAKNLADDMVRNTARDLLYYAVTQDAMLIFENLSRGFGRQGKRTFMAERQYTRMEDWLTAKLAYEGLPSKTYLSKTLAQYTSKTCSNCGFTITSADYDRVLEKLKKTATGWMTTINGKELKVEGQITYYNRYKRQNVVKDLSVELDRLSEESVNNDISSWTKGRSGEALSLLKKRFSHRPVQEKFVCLNCGFETHADEQAALNIARSWLFLRSQEYKKYQTNKTSTGNTDKRAFVETWQSFYRKKLKEVWKPAV

SEQ ID NO: 37728 - protein, 978 aa, synthetic construct
  REGION 1..978: note = engineered CasX variant
QEIKRINKIRRRLVKDSNTKKAGKTGPMKTLLVRVMTPDLRERLENLRKKPENIPQPISNTSRANLNKLLTDYTEMKKAILHVYWEEFQKDPVGLMSRVAQPASKKIDQNKLKPEMDEKGNLTTAGFACSQCGQPLFVYKLEQVSEKGKAYTNYFGRCNVAEHEKLILLAQLKPEKDSDEAVTYSLGKFGQRALDFYSIHVTKESTHPVKPLAQIAGNRYASPVGKALSDACMGTIASFLSKYQDIIIEHQKVVKGNQKRLESLRELAGKENLEYPSVTLPPQPHTKEGVDAYNEVIARVRMWVNLNLWQKLKLSRDDAKPLLRLKGFPSFPLVERQANEVDWWDMVCNVKKLINEKKEDGKVFWQNLAGYKRQEALRPYLSSEEDRKKGKKFARYQLGDLLLHLEKKHGEDWGKVYDEAWERIDKKVEGLSKHIKLEEERRSEDAQSKAALTDWLRAKASFVIEGLKEADKDEFCRCELKLQKWYGDLRGKPFAIEAENSILDISGFSKQYNCAFIWQKDGVKKLNLYLIINYFKGGKLRFKKIKPEAFEANRFYTVINKKSGEIVPMEVNFNFDDPNLIILPLAFGKRVGREFIWNDLLSLETGSLKLANGRVIEKTLYNRRTRQDEPALFVALTFERREVLDSSNIKPMNLIGVDRGENIPAVIALTDPEGCPLSRFKDSLGNPTHILRIGESYKEKQRTIQAKKEVEQRRAGGYSRKYASKAKNLADDMVRNTARDLLYYAVTQDAMLIFENLSRGFGRQGKRTFMAERQYTRMEDWLTAKLAYEGLPSKTYLSKTLAQYTSKTCSNCGFTITSADYDRVLEKLKKTATGWMTTINGKELKVEGQITYYNRYKRQNVVKDLSVELDRLSEESVNNDISSWTKGRSGEALSLLKKRFSHRPVQEKFVCLNCGFETHADEQAALNIARSWLFLRSQEYKKYQTNKTSTGNTDKRAFVETWQSFYRKKLKEVWKPAV

SEQ ID NO: 37729 - protein, 979 aa, synthetic construct
  REGION 1..979: note = engineered CasX variant
QEIKRINKIRRRLVKDSNTKKAGKTGPMKTLLVRVMTPDLRERLENLRKKPENIPQPISNTSRANLNKLLTDYTEMKKAILHVYWEEFQKDPVGLMSRVAQPASKKIDQNKLKPEMDEKGNLTTAGFACSQCGQPLFVYKLEQVSEKGKAYTNYFGRCNVAEHEKLILLAQLKPEKDSDEAVTYSLGKFGQRALDFYSIHVTKESTHPVKPLAQIAGNRYASYPVGKALSDACMGTIASFLSKYQDIIIEHQKVVKGNQKRLESLRELAGKENLEYPSVTLPPQPHTKEGVDAYNEVIARVRMWVNLNLWQKLKLSRDDAKPLLRLKGFPSFPLVERQANEVDWWDMVCNVKKLINEKKEDGKVFWQNLAGYKRQEALRPYLSSEEDRKKGKKFARYQLGDLLLHLEKKHGEDWGKVYDEAWERIDKKVEGLSKHIKLEEERRSEDAQSKAALTDWLRAKASFVIEGLKEADKDEFCRCELKLQKWYGDLRGKPFAIEAENSILDISGFSKQYNCAFIWQKDGVKKLNLYLIINYFKGGKLRFKKIKPEAFEANRFYTVINKKSGEIVPMEVNFNFDDPNLIILPLAFGKRVGREFIWNDLLSLETGSLKLANGRVIEKTLYNRRTRQDEPALFVALTFERREVLDSSNIKPMNLIGVDRGENIPAVIALTDPEGCPLSRFKDSLGNPTHILRIGESYKEKQRTIQAKKEVEQRRAGGYSRKYASKAKNLADDMVRNTARDLLYYAVTQDAMLIFENLSRGFGRQGKRTFMAERQYTRMEDWLTAKLAYEGLPSKTYLSKTLAQYTSKTCSNCGFTITSADYDRVLEKLKKTATGWMTTINGKELKVEGQITYYNRYKRQNVVKDLSVELDRLSEESVNNDISSWTKGRSGEALSLLKKRFSHRPVQEKFVCLNCGFETHADEQAALNIARSWLFLRSQEYKKYQTNKTTGKNTDKRAFVETWQSFYRKKLKEVWKPAV

SEQ ID NO: 37730 - protein, 979 aa, synthetic construct
  REGION 1..979: note = engineered CasX variant
QEIKRINKIRRRLVKDSNTKKAGKTGPMKTLLVRVMTPDLRERLENLRKKPENIPQPISNTSRANLNKLLTDYTEMKKAILHVYWEEFQKDPVGLMSRVAQPASKKIDQNKLKPEMDEKGNLTTAGFACSQCGQPLFVYKLEQVSEKGKAYTNYFGRCNVAEHEKLILLAQLKPEKDSDEAVTYSLGKFGQRALDFYSIHVTKESTHPVKPLAQIAGNRYASHPVGKALSDACMGTIASFLSKYQDIIIEHQKVVKGNQKRLESLRELAGKENLEYPSVTLPPQPHTKEGVDAYNEVIARVRMWVNLNLWQKLKLSRDDAKPLLRLKGFPSFPLVERQANEVDWWDMVCNVKKLINEKKEDGKVFWQNLAGYKRQEALRPYLSSEEDRKKGKKFARYQLGDLLLHLEKKHGEDWGKVYDEAWERIDKKVEGLSKHIKLEEERRSEDAQSKAALTDWLRAKASFVIEGLKEADKDEFCRCELKLQKWYGDLRGKPFAIEAENSILDISGFSKQYNCAFIWQKDGVKKLNLYLIINYFKGGKLRFKKIKPEAFEANRFYTVINKKSGEIVPMEVNFNFDDPNLIILPLAFGKRVGREFIWNDLLSLETGSLKLANGRVIEKTLYNRRTRQDEPALFVALTFERREVLDSSNIKPMNLIGVDRGENIPAVIALTDPEGCPLSRFKDSLGNPTHILRIGESYKEKQRTIQAKKEVEQRRAGGYSRKYASKAKNLADDMVRNTARDLLYYAVTQDAMLIFENLSRGFGRQGKRTFMAERQYTRMEDWLTAKLAYEGLPSKTYLSKTLAQYTSKTCSNCGFTITSADYDRVLEKLKKTATGWMTTINGKELKVEGQITYYNRYKRQNVVKDLSVELDRLSEESVNNDISSWTKGRSGEALSLLKKRFSHRPVQEKFVCLNCGFETHADEQAALNIARSWLFLRSQEYKKYQTNKTTGKNTDKRAFVETWQSFYRKKLKEVWKPAV

SEQ ID NO: 37731 - protein, 979 aa, synthetic construct
  REGION 1..979: note = engineered CasX variant
QEIKRINKIRRRLVKDSNTKKAGKTGPMKTLLVRVMTPDLRERLENLRKKPENIPQPISNTSRANLNKLLTDYTEMKKAILHVYWEEFQKDPVGLMSRVAQPASKKIDQNKLKPEMDEKGNLTTAGFACSQCGQPLFVYKLEQVSEKGKAYTNYFGRCNVAEHEKLILLAQLKPEKDSDEAVTYSLGKFGQRALDFYSIHVTKESTHPVKPLAQIAGNRYASSPVGKALSDACMGTIASFLSKYQDIIIEHQKVVKGNQKRLESLRELAGKENLEYPSVTLPPQPHTKEGVDAYNEVIARVRMWVNLNLWQKLKLSRDDAKPLLRLKGFPSFPLVERQANEVDWWDMVCNVKKLINEKKEDGKVFWQNLAGYKRQEALRPYLSSEEDRKKGKKFARYQLGDLLLHLEKKHGEDWGKVYDEAWERIDKKVEGLSKHIKLEEERRSEDAQSKAALTDWLRAKASFVIEGLKEADKDEFCRCELKLQKWYGDLRGKPFAIEAENSILDISGFSKQYNCAFIWQKDGVKKLNLYLIINYFKGGKLRFKKIKPEAFEANRFYTVINKKSGEIVPMEVNFNFDDPNLIILPLAFGKRVGREFIWNDLLSLETGSLKLANGRVIEKTLYNRRTRQDEPALFVALTFERREVLDSSNIKPMNLIGVDRGENIPAVIALTDPEGCPLSRFKDSLGNPTHILRIGESYKEKQRTIQAKKEVEQRRAGGYSRKYASKAKNLADDMVRNTARDLLYYAVTQDAMLIFENLSRGFGRQGKRTFMAERQYTRMEDWLTAKLAYEGLPSKTYLSKTLAQYTSKTCSNCGFTITSADYDRVLEKLKKTATGWMTTINGKELKVEGQITYYNRYKRQNVVKDLSVELDRLSEESVNNDISSWTKGRSGEALSLLKKRFSHRPVQEKFVCLNCGFETHADEQAALNIARSWLFLRSQEYKKYQTNKTTGKNTDKRAFVETWQSFYRKKLKEVWKPAV

SEQ ID NO: 37732 - protein, 979 aa, synthetic construct
  REGION 1..979: note = engineered CasX variant
QEIKRINKIRRRLVKDSNTKKAGKTGPMKTLLVRVMTPDLRERLENLRKKPENIPQPISNTSRANLNKLLTDYTEMKKAILHVYWEEFQKDPVGLMSRVAQPASKKIDQNKLKPEMDEKGNLTTAGFACSQCGQPLFVYKLEQVSEKGKAYTNYFGRCNVAEHEKLILLAQLKPEKDSDEAVTYSLGKFGQRALDFYSIHVTKESTHPVKPLAQIAGNRYASTPVGKALSDACMGTIASFLSKYQDIIIEHQKVVKGNQKRLESLRELAGKENLEYPSVTLPPQPHTKEGVDAYNEVIARVRMWVNLNLWQKLKLSRDDAKPLLRLKGFPSFPLVERQANEVDWWDMVCNVKKLINEKKEDGKVFWQNLAGYKRQEALRPYLSSEEDRKKGKKFARYQLGDLLLHLEKKHGEDWGKVYDEAWERIDKKVEGLSKHIKLEEERRSEDAQSKAALTDWLRAKASFVIEGLKEADKDEFCRCELKLQKWYGDLRGKPFAIEAENSILDISGFSKQYNCAFIWQKDGVKKLNLYLIINYFKGGKLRFKKIKPEAFEANRFYTVINKKSGEIVPMEVNFNFDDPNLIILPLAFGKRVGREFIWNDLLSLETGSLKLANGRVIEKTLYNRRTRQDEPALFVALTFERREVLDSSNIKPMNLIGVDRGENIPAVIALTDPEGCPLSRFKDSLGNPTHILRIGESYKEKQRTIQAKKEVEQRRAGGYSRKYASKAKNLADDMVRNTARDLLYYAVTQDAMLIFENLSRGFGRQGKRTFMAERQYTRMEDWLTAKLAYEGLPSKTYLSKTLAQYTSKTCSNCGFTITSADYDRVLEKLKKTATGWMTTINGKELKVEGQITYYNRYKRQNVVKDLSVELDRLSEESVNNDISSWTKGRSGEALSLLKKRFSHRPVQEKFVCLNCGFETHADEQAALNIARSWLFLRSQEYKKYQTNKTTGKNTDKRAFVETWQSFYRKKLKEVWKPAV

SEQ ID NO: 37733 - protein, 979 aa, synthetic construct
  REGION 1..979: note = engineered CasX variant
QEIKRINKIRRRLVKDSNTKKAGKTGPMKTLLVRVMTPDLRERLENLRKKPENIPQPISNTSRANLNKLLTDYTEMKKAILHVYWEEFQKDPVGLMSRVAQPASKKIDQNKLKPEMDEKGNLTTAGFACSQCGQPLFVYKLEQVSEKGKAYTNYFGRCNVAEHEKLILLAQLKPEKDSDEAVTYSLGKFGQRALDFYSIHVTKESTHPVKPLAQIAGNRYASAPVGKALSDACMGTIASFLSKYQDIIIEHQKVVKGNQKRLESLRELAGKENLEYPSVTLPPQPHTKEGVDAYNEVIARVRMWVNLNLWQKLKLSRDDAKPLLRLKGFPSFPLVERQANEVDWWDMVCNVKKLINEKKEDGKVFWQNLAGYKRQEALRPYLSSEEDRKKGKKFARYQLGDLLLHLEKKHGEDWGKVYDEAWERIDKKVEGLSKHIKLEEERRSEDAQSKAALTDWLRAKASFVIEGLKEADKDEFCRCELKLQKWYGDLRGKPFAIEAENSILDISGFSKQYNCAFIWQKDGVKKLNLYLIINYFKGGKLRFKKIKPEAFEANRFYTVINKKSGEIVPMEVNFNFDDPNLIILPLAFGKRVGREFIWNDLLSLETGSLKLANGRVIEKTLYNRRTRQDEPALFVALTFERREVLDSSNIKPMNLIGVDRGENIPAVIALTDPEGCPLSRFKDSLGNPTHILRIGESYKEKQRTIQAKKEVEQRRAGGYSRKYASKAKNLADDMVRNTARDLLYYAVTQDAMLIFENLSRGFGRQGKRTFMAERQYTRMEDWLTAKLAYEGLPSKTYLSKTLAQYTSKTCSNCGFTITSADYDRVLEKLKKTATGWMTTINGKELKVEGQITYYNRYKRQNVVKDLSVELDRLSEESVNNDISSWTKGRSGEALSLLKKRFSHRPVQEKFVCLNCGFETHADEQAALNIARSWLFLRSQEYKKYQTNKTTGKNTDKRAFVETWQSFYRKKLKEVWKPAV

SEQ ID NO: 37734 - protein, 979 aa, synthetic construct
  REGION 1..979: note = engineered CasX variant
QEIKRINKIRRRLVKDSNTKKAGKTGPMKTLLVRVMTPDLRERLENLRKKPENIPQPISNTSRANLNKLLTDYTEMKKAILHVYWEEFQKDPVGLMSRVAQPASKKIDQNKLKPEMDEKGNLTTAGFACSQCGQPLFVYKLEQVSEKGKAYTNYFGRCNVAEHEKLILLAQLKPEKDSDEAVTYSLGKFGQRALDFYSIHVTKESTHPVKPLAQIAGNRYASVPVGKALSDACMGTIASFLSKYQDIIIEHQKVVKGNQKRLESLRELAGKENLEYPSVTLPPQPHTKEGVDAYNEVIARVRMWVNLNLWQKLKLSRDDAKPLLRLKGFPSFPLVERQANEVDWWDMVCNVKKLINEKKEDGKVFWQNLAGYKRQEALRPYLSSEEDRKKGKKFARYQLGDLLLHLEKKHGEDWGKVYDEAWERIDKKVEGLSKHIKLEEERRSEDAQSKAALTDWLRAKASFVIEGLKEADKDEFCRCELKLQKWYGDLRGKPFAIEAENSILDISGFSKQYNCAFIWQKDGVKKLNLYLIINYFKGGKLRFKKIKPEAFEANRFYTVINKKSGEIVPMEVNFNFDDPNLIILPLAFGKRVGREFIWNDLLSLETGSLKLANGRVIEKTLYNRRTRQDEPALFVALTFERREVLDSSNIKPMNLIGVDRGENIPAVIALTDPEGCPLSRFKDSLGNPTHILRIGESYKEKQRTIQAKKEVEQRRAGGYSRKYASKAKNLADDMVRNTARDLLYYAVTQDAMLIFENLSRGFGRQGKRTFMAERQYTRMEDWLTAKLAYEGLPSKTYLSKTLAQYTSKTCSNCGFTITSADYDRVLEKLKKTATGWMTTINGKELKVEGQITYYNRYKRQNVVKDLSVELDRLSEESVNNDISSWTKGRSGEALSLLKKRFSHRPVQEKFVCLNCGFETHADEQAALNIARSWLFLRSQEYKKYQTNKTTGKNTDKRAFVETWQSFYRKKLKEVWKPAV

SEQ ID NO: 37735 - protein, 979 aa, synthetic construct
  REGION 1..979: note = engineered CasX variant
QEIKRINKIRRRLVKDSNTKKAGKTGPMKTLLVRVMTPDLRERLENLRKKPENIPQPISNTSRANLNKLLTDYTEMKKAILHVYWEEFQKDPVGLMSRVAQPASKKIDQNKLKPEMDEKGNLTTAGFACSQCGQPLFVYKLEQVSEKGKAYTNYFGRCNVAEHEKLIKLAQLKPEKDSDEAVTYSLGKFGQRALDFYSIHVTKESTHPVKPLAQIAGNRYASGPVGKALSDACMGTIASFLSKYQDIIIEHQKVVKGNQKRLESLRELAGKENLEYPSVTLPPQPHTKEGVDAYNEVIARVRMWVNLNLWQKLKLSRDDAKPLLRLKGFPSFPLVERQANEVDWWDMVCNVKKLINEKKEDGKVFWQNLAGYKRQEALRPYLSSEEDRKKGKKFARYQLGDLLLHLEKKHGEDWGKVYDEAWERIDKKVEGLSKHIKLEEERRSEDAQSKAALTDWLRAKASFVIEGLKEADKDEFCRCELKLQKWYGDLRGKPFAIEAENSILDISGFSKQYNCAFIWQKDGVKKLNLYLIINYFKGGKLRFKKIKPEAFEANRFYTVINKKSGEIVPMEVNFNFDDPNLIILPLAFGKRVGREFIWNDLLSLETGSLKLANGRVIEKTLYNRRTRQDEPALFVALTFERREVLDSSNIKPMNLIGVDRGENIPAVIALTDPEGCPLSRFKDSLGNPTHILRIGESYKEKQRTIQAKKEVEQRRAGGYSRKYASKAKNLADDMVRNTARDLLYYAVTQDAMLIFENLSRGFGRQGKRTFMAERQYTRMEDWLTAKLAYEGLPSKTYLSKTLAQYTSKTCSNCGFTITSADYDRVLEKLKKTATGWMTTINGKELKVEGQITYYNRYKRQNVVKDLSVELDRLSEESVNNDISSWTKGRSGEALSLLKKRFSHRPVQEKFVCLNCGFETHADEQAALNIARSWLFLRSQEYKKYQTNKTTGKNTDKRAFVETWQSFYRKKLKEVWKPAV

SEQ ID NO: 37736 - protein, 978 aa, synthetic construct
  REGION 1..978: note = engineered CasX variant
QEIKRINKIRRRLVKDSNTKKAGKTGPMKTLLVRVMTPDLRERLENLRKKPENIPQPISNTSRANLNKLLTDYTEMKKAILHVYWEEFQKDPVGLMSRVAQPASKKIDQNKLKPEMDEKGNLTTAGFACSQCGQPLFVYKLEQVSEKGKAYTNYFGRCNVAEHEKLILLAQLKPEKDSDEAVTYSLGKFGQRALDFYSIHVTKESTHPVKPLAQIAGNRYASPVGKALSDACMGTIASFLSKYQDIIIEHQKVVKGNQKRLESLRELAGKENLEYPSVTLPPQPHTKEGVDAYNEVIARVRMWVNLNLWQKLKLSRDDAKPLLRLKGFPSFPLVERQANEVDWWDMVCNVKKLINEKKEDGKVFWQNLAGYKRQEALRPYLSSEEDRKKGKKFARYQLGDLLLHLEKKHGEDWGKVYDEAWERIDKKVEGLSKHIKLEEERRSEDAQSKAALTDWLRAKASFVIEGLKEADKDEFCRCELKLQKWYGDLRGKPFAIEAENSILDISGFSKQYNCAFIWQKDGVKKLNLYLIINYFKGGKLRFKKIKPEAFEANRFYTVINKKSGEIVPMEVNFNFDDPNLIILPLAFGKRVGREFIWNDLLSLETGSLKLANGRVIEKTLYNRRTRQDEPALFVALTFERREVLDSSNIKPMNLIGVDRGENIPAVIALTDPEGCPLSRFKDSLGNPTHILRIGESYKEKQRTIQAKKEVEQRRAGGYSRKYASKAKNLADDMVRNTARDLLYYAVTQDAMLIFENLSRGFGRQGKRTFMAERQYTRMEDWLTAKLAYEGLPSKTYLSKTLAQYTSKTCSNCGFTITSADYDRVLEKLKKTATGWMTTINGKELKVEGQITYYNRYKRQNVVKDLSVELDRLSEESVNNDISSWTKGRSGEALSLLKKRFSHRPVQEKFVCLNCGFETHADEQAALNIARSWLFLRSQEYKKYQTNKTTGKNTDKRAFVETWQSFYRKKLKEVWKPAV

SEQ ID NO: 37737 - protein, 978 aa, synthetic construct
  REGION 1..978: note = engineered CasX variant
QEIKRINKIRRRLVKDSNTKKAGKTGPMKTLLVRVMTPDLRERLENLRKKPENIPQPISNTSRANLNKLLTDYTEMKKAILHVYWEEFQKDPVGLMSRVAQPASKKIDQNKLKPEMDEKGNLTTAGFACSQCGQPLFVYKLEQVSEKGKAYTNYFGRCNVAEHEKLILLAQLKPEKDSDEAVTYSLGKFGQRALDFYSIHVTKESTHPVKPLAQIAGNRYASYPVGKALSDACMGTIASFLSKYQDIIIEHQKVVKGNQKRLESLRELAGKENLEYPSVTLPPQPHTKEGVDAYNEVIARVRMWVNLNLWQKLKLSRDDAKPLLRLKKFPSFPLVERQANEVDWWDMVCNVKKLINEKKEDGKVFWQNLAGYKRQEALRPYLSSEEDRKKGKKFARYQLGDLLLHLEKKHGEDWGKVYDEAWERIDKKVEGLSKHIKLEEERRSEDAQSKAALTDWLRAKASFVIEGLKEADKDEFCRCELKLQKWYGDLRGKPFAIEAENSILDISGFSKQYNCAFIWQKDGVKKLNLYLIINYFKGGKLRFKKIKPEAFEANRFYTVINKKSGEIVPMEVNFNFDDPNLIILPLAFGKRVGREFIWNDLLSLETGSLKLANGRVIEKTLYNRRTRQDEPALFVALTFERREVLDSSNIKPMNLIGVDRGENIPAVIALTDPEGCPLSRFKDSLGNPTHILRIGESYKEKQRTIQAKKEVEQRRAGGYSRKYASKAKNLADDMVRNTARDLLYYAVTQDAMLIFENLSRGFGRQGKRTFMAERQYTRMEDWLTAKLAYEGLPSKTYLSKTLAQYTSKTCSNCGFTITSADYDRVLEKLKKTATGWMTTINGKELKVEGQITYYNRYKRQNVVKDLSVELDRLSEESVNNDISSWTKGRSGEALSLLKKRFSHRPVQEKFVCLNCGFETHADEQAALNIARSWLFLRSQEYKKYQTNKTTGNTDKRAFVETWQSFYRKKLKEVWKPAV

SEQ ID NO: 37738 - protein, 978 aa, synthetic construct
  REGION 1..978: note = engineered CasX variant
QEIKRINKIRRRLVKDSNTKKAGKTGPMKTLLVRVMTPDLRERLENLRKKPENIPQPISNTSRANLNKLLTDYTEMKKAILHVYWEEFQKDPVGLMSRVAQPASKKIDQNKLKPEMDEKGNLTTAGFACSQCGQPLFVYKLEQVSEKGKAYTNYFGRCNVAEHEKLILLAQLKPEKDSDEAVTYSLGKFGQRALDFYSIHVTKESTHPVKPLAQIAGNRYASHPVGKALSDACMGTIASFLSKYQDIIIEHQKVVKGNQKRLESLRELAGKENLEYPSVTLPPQPHTKEGVDAYNEVIARVRMWVNLNLWQKLKLSRDDAKPLLRLKKFPSFPLVERQANEVDWWDMVCNVKKLINEKKEDGKVFWQNLAGYKRQEALRPYLSSEEDRKKGKKFARYQLGDLLLHLEKKHGEDWGKVYDEAWERIDKKVEGLSKHIKLEEERRSEDAQSKAALTDWLRAKASFVIEGLKEADKDEFCRCELKLQKWYGDLRGKPFAIEAENSILDISGFSKQYNCAFIWQKDGVKKLNLYLIINYFKGGKLRFKKIKPEAFEANRFYTVINKKSGEIVPMEVNFNFDDPNLIILPLAFGKRVGREFIWNDLLSLETGSLKLANGRVIEKTLYNRRTRQDEPALFVALTFERREVLDSSNIKPMNLIGVDRGENIPAVIALTDPEGCPLSRFKDSLGNPTHILRIGESYKEKQRTIQAKKEVEQRRAGGYSRKYASKAKNLADDMVRNTARDLLYYAVTQDAMLIFENLSRGFGRQGKRTFMAERQYTRMEDWLTAKLAYEGLPSKTYLSKTLAQYTSKTCSNCGFTITSADYDRVLEKLKKTATGWMTTINGKELKVEGQITYYNRYKRQNVVKDLSVELDRLSEESVNNDISSWTKGRSGEALSLLKKRFSHRPVQEKFVCLNCGFETHADEQAALNIARSWLFLRSQEYKKYQTNKTTGNTDKRAFVETWQSFYRKKLKEVWKPAV

SEQ ID NO: 37739 - protein, 978 aa, synthetic construct
  REGION 1..978: note = engineered CasX variant
QEIKRINKIRRRLVKDSNTKKAGKTGPMKTLLVRVMTPDLRERLENLRKKPENIPQPISNTSRANLNKLLTDYTEMKKAILHVYWEEFQKDPVGLMSRVAQPASKKIDQNKLKPEMDEKGNLTTAGFACSQCGQPLFVYKLEQVSEKGKAYTNYFGRCNVAEHEKLILLAQLKPEKDSDEAVTYSLGKFGQRALDFYSIHVTKESTHPVKPLAQIAGNRYASSPVGKALSDACMGTIASFLSKYQDIIIEHQKVVKGNQKRLESLRELAGKENLEYPSVTLPPQPHTKEGVDAYNEVIARVRMWVNLNLWQKLKLSRDDAKPLLRLKKFPSFPLVERQANEVDWWDMVCNVKKLINEKKEDGKVFWQNLAGYKRQEALRPYLSSEEDRKKGKKFARYQLGDLLLHLEKKHGEDWGKVYDEAWERIDKKVEGLSKHIKLEEERRSEDAQSKAALTDWLRAKASFVIEGLKEADKDEFCRCELKLQKWYGDLRGKPFAIEAENSILDISGFSKQYNCAFIWQKDGVKKLNLYLIINYFKGGKLRFKKIKPEAFEANRFYTVINKKSGEIVPMEVNFNFDDPNLIILPLAFGKRVGREFIWNDLLSLETGSLKLANGRVIEKTLYNRRTRQDEPALFVALTFERREVLDSSNIKPMNLIGVDRGENIPAVIALTDPEGCPLSRFKDSLGNPTHILRIGESYKEKQRTIQAKKEVEQRRAGGYSRKYASKAKNLADDMVRNTARDLLYYAVTQDAMLIFENLSRGFGRQGKRTFMAERQYTRMEDWLTAKLAYEGLPSKTYLSKTLAQYTSKTCSNCGFTITSADYDRVLEKLKKTATGWMTTINGKELKVEGQITYYNRYKRQNVVKDLSVELDRLSEESVNNDISSWTKGRSGEALSLLKKRFSHRPVQEKFVCLNCGFETHADEQAALNIARSWLFLRSQEYKKYQTNKTTGNTDKRAFVETWQSFYRKKLKEVWKPAV

SEQ ID NO: 37740 - protein, 978 aa, synthetic construct
  REGION 1..978: note = engineered CasX variant
QEIKRINKIRRRLVKDSNTKKAGKTGPMKTLLVRVMTPDLRERLENLRKKPENIPQPISNTSRANLNKLLTDYTEMKKAILHVYWEEFQKDPVGLMSRVAQPASKKIDQNKLKPEMDEKGNLTTAGFACSQCGQPLFVYKLEQVSEKGKAYTNYFGRCNVAEHEKLILLAQLKPEKDSDEAVTYSLGKFGQRALDFYSIHVTKESTHPVKPLAQIAGNRYASTPVGKALSDACMGTIASFLSKYQDIIIEHQKVVKGNQKRLESLRELAGKENLEYPSVTLPPQPHTKEGVDAYNEVIARVRMWVNLNLWQKLKLSRDDAKPLLRLKKFPSFPLVERQANEVDWWDMVCNVKKLINEKKEDGKVFWQNLAGYKRQEALRPYLSSEEDRKKGKKFARYQLGDLLLHLEKKHGEDWGKVYDEAWERIDKKVEGLSKHIKLEEERRSEDAQSKAALTDWLRAKASFVIEGLKEADKDEFCRCELKLQKWYGDLRGKPFAIEAENSILDISGFSKQYNCAFIWQKDGVKKLNLYLIINYFKGGKLRFKKIKPEAFEANRFYTVINKKSGEIVPMEVNFNFDDPNLIILPLAFGKRVGREFIWNDLLSLETGSLKLANGRVIEKTLYNRRTRQDEPALFVALTFERREVLDSSNIKPMNLIGVDRGENIPAVIALTDPEGCPLSRFKDSLGNPTHILRIGESYKEKQRTIQAKKEVEQRRAGGYSRKYASKAKNLADDMVRNTARDLLYYAVTQDAMLIFENLSRGFGRQGKRTFMAERQYTRMEDWLTAKLAYEGLPSKTYLSKTLAQYTSKTCSNCGFTITSADYDRVLEKLKKTATGWMTTINGKELKVEGQITYYNRYKRQNVVKDLSVELDRLSEESVNNDISSWTKGRSGEALSLLKKRFSHRPVQEKFVCLNCGFETHADEQAALNIARSWLFLRSQEYKKYQTNKTTGNTDKRAFVETWQSFYRKKLKEVWKPAV

SEQ ID NO: 37741 - protein, 978 aa, synthetic construct
  REGION 1..978: note = engineered CasX variant
QEIKRINKIRRRLVKDSNTKKAGKTGPMKTLLVRVMTPDLRERLENLRKKPENIPQPISNTSRANLNKLLTDYTEMKKAILHVYWEEFQKDPVGLMSRVAQPASKKIDQNKLKPEMDEKGNLTTAGFACSQCGQPLFVYKLEQVSEKGKAYTNYFGRCNVAEHEKLILLAQLKPEKDSDEAVTYSLGKFGQRALDFYSIHVTKESTHPVKPLAQIAGNRYASAPVGKALSDACMGTIASFLSKYQDIIIEHQKVVKGNQKRLESLRELAGKENLEYPSVTLPPQPHTKEGVDAYNEVIARVRMWVNLNLWQKLKLSRDDAKPLLRLKKFPSFPLVERQANEVDWWDMVCNVKKLINEKKEDGKVFWQNLAGYKRQEALRPYLSSEEDRKKGKKFARYQLGDLLLHLEKKHGEDWGKVYDEAWERIDKKVEGLSKHIKLEEERRSEDAQSKAALTDWLRAKASFVIEGLKEADKDEFCRCELKLQKWYGDLRGKPFAIEAENSILDISGFSKQYNCAFIWQKDGVKKLNLYLIINYFKGGKLRFKKIKPEAFEANRFYTVINKKSGEIVPMEVNFNFDDPNLIILPLAFGKRVGREFIWNDLLSLETGSLKLANGRVIEKTLYNRRTRQDEPALFVALTFERREVLDSSNIKPMNLIGVDRGENIPAVIALTDPEGCPLSRFKDSLGNPTHILRIGESYKEKQRTIQAKKEVEQRRAGGYSRKYASKAKNLADDMVRNTARDLLYYAVTQDAMLIFENLSRGFGRQGKRTFMAERQYTRMEDWLTAKLAYEGLPSKTYLSKTLAQYTSKTCSNCGFTITSADYDRVLEKLKKTATGWMTTINGKELKVEGQITYYNRYKRQNVVKDLSVELDRLSEESVNNDISSWTKGRSGEALSLLKKRFSHRPVQEKFVCLNCGFETHADEQAALNIARSWLFLRSQEYKKYQTNKTTGNTDKRAFVETWQSFYRKKLKEVWKPAV

SEQ ID NO: 37742 - protein, 978 aa, synthetic construct
  REGION 1..978: note = engineered CasX variant
QEIKRINKIRRRLVKDSNTKKAGKTGPMKTLLVRVMTPDLRERLENLRKKPENIPQPISNTSRANLNKLLTDYTEMKKAILHVYWEEFQKDPVGLMSRVAQPASKKIDQNKLKPEMDEKGNLTTAGFACSQCGQPLFVYKLEQVSEKGKAYTNYFGRCNVAEHEKLILLAQLKPEKDSDEAVTYSLGKFGQRALDFYSIHVTKESTHPVKPLAQIAGNRYASVPVGKALSDACMGTIASFLSKYQDIIIEHQKVVKGNQKRLESLRELAGKENLEYPSVTLPPQPHTKEGVDAYNEVIARVRMWVNLNLWQKLKLSRDDAKPLLRLKKFPSFPLVERQANEVDWWDMVCNVKKLINEKKEDGKVFWQNLAGYKRQEALRPYLSSEEDRKKGKKFARYQLGDLLLHLEKKHGEDWGKVYDEAWERIDKKVEGLSKHIKLEEERRSEDAQSKAALTDWLRAKASFVIEGLKEADKDEFCRCELKLQKWYGDLRGKPFAIEAENSILDISGFSKQYNCAFIWQKDGVKKLNLYLIINYFKGGKLRFKKIKPEAFEANRFYTVINKKSGEIVPMEVNFNFDDPNLIILPLAFGKRVGREFIWNDLLSLETGSLKLANGRVIEKTLYNRRTRQDEPALFVALTFERREVLDSSNIKPMNLIGVDRGENIPAVIALTDPEGCPLSRFKDSLGNPTHILRIGESYKEKQRTIQAKKEVEQRRAGGYSRKYASKAKNLADDMVRNTARDLLYYAVTQDAMLIFENLSRGFGRQGKRTFMAERQYTRMEDWLTAKLAYEGLPSKTYLSKTLAQYTSKTCSNCGFTITSADYDRVLEKLKKTATGWMTTINGKELKVEGQITYYNRYKRQNVVKDLSVELDRLSEESVNNDISSWTKGRSGEALSLLKKRFSHRPVQEKFVCLNCGFETHADEQAALNIARSWLFLRSQEYKKYQTNKTTGNTDKRAFVETWQSFYRKKLKEVWKPAV

SEQ ID NO: 37743 - protein, 978 aa, synthetic construct
  REGION 1..978: note = engineered CasX variant
QEIKRINKIRRRLVKDSNTKKAGKTGPMKTLLVRVMTPDLRERLENLRKKPENIPQPISNTSRANLNKLLTDYTEMKKAILHVYWEEFQKDPVGLMSRVAQPASKKIDQNKLKPEMDEKGNLTTAGFACSQCGQPLFVYKLEQVSEKGKAYTNYFGRCNVAEHEKLIKLAQLKPEKDSDEAVTYSLGKFGQRALDFYSIHVTKESTHPVKPLAQIAGNRYASGPVGKALSDACMGTIASFLSKYQDIIIEHQKVVKGNQKRLESLRELAGKENLEYPSVTLPPQPHTKEGVDAYNEVIARVRMWVNLNLWQKLKLSRDDAKPLLRLKKFPSFPLVERQANEVDWWDMVCNVKKLINEKKEDGKVFWQNLAGYKRQEALRPYLSSEEDRKKGKKFARYQLGDLLLHLEKKHGEDWGKVYDEAWERIDKKVEGLSKHIKLEEERRSEDAQSKAALTDWLRAKASFVIEGLKEADKDEFCRCELKLQKWYGDLRGKPFAIEAENSILDISGFSKQYNCAFIWQKDGVKKLNLYLIINYFKGGKLRFKKIKPEAFEANRFYTVINKKSGEIVPMEVNFNFDDPNLIILPLAFGKRVGREFIWNDLLSLETGSLKLANGRVIEKTLYNRRTRQDEPALFVALTFERREVLDSSNIKPMNLIGVDRGENIPAVIALTDPEGCPLSRFKDSLGNPTHILRIGESYKEKQRTIQAKKEVEQRRAGGYSRKYASKAKNLADDMVRNTARDLLYYAVTQDAMLIFENLSRGFGRQGKRTFMAERQYTRMEDWLTAKLAYEGLPSKTYLSKTLAQYTSKTCSNCGFTITSADYDRVLEKLKKTATGWMTTINGKELKVEGQITYYNRYKRQNVVKDLSVELDRLSEESVNNDISSWTKGRSGEALSLLKKRFSHRPVQEKFVCLNCGFETHADEQAALNIARSWLFLRSQEYKKYQTNKTTGNTDKRAFVETWQSFYRKKLKEVWKPAV

SEQ ID NO: 37744 - protein, 977 aa, synthetic construct
  REGION 1..977: note = engineered CasX variant
QEIKRINKIRRRLVKDSNTKKAGKTGPMKTLLVRVMTPDLRERLENLRKKPENIPQPISNTSRANLNKLLTDYTEMKKAILHVYWEEFQKDPVGLMSRVAQPASKKIDQNKLKPEMDEKGNLTTAGFACSQCGQPLFVYKLEQVSEKGKAYTNYFGRCNVAEHEKLILLAQLKPEKDSDEAVTYSLGKFGQRALDFYSIHVTKESTHPVKPLAQIAGNRYASPVGKALSDACMGTIASFLSKYQDIIIEHQKVVKGNQKRLESLRELAGKENLEYPSVTLPPQPHTKEGVDAYNEVIARVRMWVNLNLWQKLKLSRDDAKPLLRLKKFPSFPLVERQANEVDWWDMVCNVKKLINEKKEDGKVFWQNLAGYKRQEALRPYLSSEEDRKKGKKFARYQLGDLLLHLEKKHGEDWGKVYDEAWERIDKKVEGLSKHIKLEEERRSEDAQSKAALTDWLRAKASFVIEGLKEADKDEFCRCELKLQKWYGDLRGKPFAIEAENSILDISGFSKQYNCAFIWQKDGVKKLNLYLIINYFKGGKLRFKKIKPEAFEANRFYTVINKKSGEIVPMEVNFNFDDPNLIILPLAFGKRVGREFIWNDLLSLETGSLKLANGRVIEKTLYNRRTRQDEPALFVALTFERREVLDSSNIKPMNLIGVDRGENIPAVIALTDPEGCPLSRFKDSLGNPTHILRIGESYKEKQRTIQAKKEVEQRRAGGYSRKYASKAKNLADDMVRNTARDLLYYAVTQDAMLIFENLSRGFGRQGKRTFMAERQYTRMEDWLTAKLAYEGLPSKTYLSKTLAQYTSKTCSNCGFTITSADYDRVLEKLKKTATGWMTTINGKELKVEGQITYYNRYKRQNVVKDLSVELDRLSEESVNNDISSWTKGRSGEALSLLKKRFSHRPVQEKFVCLNCGFETHADEQAALNIARSWLFLRSQEYKKYQTNKTTGNTDKRAFVETWQSFYRKKLKEVWKPAV

SEQ ID NO: 37745 - protein, 978 aa, synthetic construct
  REGION 1..978: note = engineered CasX variant
QEIKRINKIRRRLVKDSNTKKAGKTGPMKTLLVRVMTPDLRERLENLRKKPENIPQPISNTSRANLNKLLTDYTEMKKAILHVYWEEFQKDPVGLMSRVAQPASKKIDQNKLKPEMDEKGNLTTAGFACSQCGQPLFVYKLEQVSEKGKAYTNYFGRCNVAEHEKLILLAQLKPEKDSDEAVTYSLGKFGQRALDFYSIHVTKESTHPVKPLAQIAGNRYASYPVGKALSDACMGTIASFLSKYQDIIIEHQKVVKGNQKRLESLRELAGKENLEYPSVTLPPQPHTKEGVDAYNEVIARVRMWVNLNLWQKLKLSRDDAKPLLRLKGFPSFPLVERQANEVDWWDMVCNVKKLINEKKEDGKVFWQNLAGYKRQEALRPYLSSEEDRKKGKKFARYQLGDLLLHLEKKHGEDWGKVYDEAWERIDKKVEGLSKHIKLEEERRSEDAQSKAALTDWLRAKASFVIEGLKEADKDEFCRCELKLQKWYGDLRGKPFAIEAENSILDISGFSKQYNCAFIWQKDGVKKLNLYLIINYFKGGKLRFKKIKPEAFEANRFYTVINKKSGEIVPMEVNFNFDDPNLIILPLAFGKRVGREFIWNDLLSLETGSLKLANGRVIEKTLYNRRTRQDEPALFVALTFERREVLDSSNIKPMNLIGVDRGENIPAVIALTDPEGCPLSRFKDSLGNPTHILRIGERYKEKQRTIQAKKEVEQRRAGGYSRKYASKAKNLADDMVRNTARDLLYYAVTQDAMLIFENLSRGFGRQGKRTFMAERQYTRMEDWLTAKLAYEGLPSKTYLSKTLAQYTSKTCSNCGFTITSADYDRVLEKLKKTATGWMTTINGKELKVEGQITYYNRYKRQNVVKDLSVELDRLSEESVNNDISSWTKGRSGEALSLLKKRFSHRPVQEKFVCLNCGFETHADEQAALNIARSWLFLRSQEYKKYQTNKTTGNTDKRAFVETWQSFYRKKLKEVWKPAV

SEQ ID NO: 37746 - protein, 978 aa, synthetic construct
  REGION 1..978: note = engineered CasX variant
QEIKRINKIRRRLVKDSNTKKAGKTGPMKTLLVRVMTPDLRERLENLRKKPENIPQPISNTSRANLNKLLTDYTEMKKAILHVYWEEFQKDPVGLMSRVAQPASKKIDQNKLKPEMDEKGNLTTAGFACSQCGQPLFVYKLEQVSEKGKAYTNYFGRCNVAEHEKLILLAQLKPEKDSDEAVTYSLGKFGQRALDFYSIHVTKESTHPVKPLAQIAGNRYASHPVGKALSDACMGTIASFLSKYQDIIIEHQKVVKGNQKRLESLRELAGKENLEYPSVTLPPQPHTKEGVDAYNEVIARVRMWVNLNLWQKLKLSRDDAKPLLRLKGFPSFPLVERQANEVDWWDMVCNVKKLINEKKEDGKVFWQNLAGYKRQEALRPYLSSEEDRKKGKKFARYQLGDLLLHLEKKHGEDWGKVYDEAWERIDKKVEGLSKHIKLEEERRSEDAQSKAALTDWLRAKASFVIEGLKEADKDEFCRCELKLQKWYGDLRGKPFAIEAENSILDISGFSKQYNCAFIWQKDGVKKLNLYLIINYFKGGKLRFKKIKPEAFEANRFYTVINKKSGEIVPMEVNFNFDDPNLIILPLAFGKRVGREFIWNDLLSLETGSLKLANGRVIEKTLYNRRTRQDEPALFVALTFERREVLDSSNIKPMNLIGVDRGENIPAVIALTDPEGCPLSRFKDSLGNPTHILRIGERYKEKQRTIQAKKEVEQRRAGGYSRKYASKAKNLADDMVRNTARDLLYYAVTQDAMLIFENLSRGFGRQGKRTFMAERQYTRMEDWLTAKLAYEGLPSKTYLSKTLAQYTSKTCSNCGFTITSADYDRVLEKLKKTATGWMTTINGKELKVEGQITYYNRYKRQNVVKDLSVELDRLSEESVNNDISSWTKGRSGEALSLLKKRFSHRPVQEKFVCLNCGFETHADEQAALNIARSWLFLRSQEYKKYQTNKTTGNTDKRAFVETWQSFYRKKLKEVWKPAV

SEQ ID NO: 37747 - protein, 978 aa, synthetic construct
  REGION 1..978: note = engineered CasX variant
QEIKRINKIRRRLVKDSNTKKAGKTGPMKTLLVRVMTPDLRERLENLRKKPENIPQPISNTSRANLNKLLTDYTEMKKAILHVYWEEFQKDPVGLMSRVAQPASKKIDQNKLKPEMDEKGNLTTAGFACSQCGQPLFVYKLEQVSEKGKAYTNYFGRCNVAEHEKLILLAQLKPEKDSDEAVTYSLGKFGQRALDFYSIHVTKESTHPVKPLAQIAGNRYASSPVGKALSDACMGTIASFLSKYQDIIIEHQKVVKGNQKRLESLRELAGKENLEYPSVTLPPQPHTKEGVDAYNEVIARVRMWVNLNLWQKLKLSRDDAKPLLRLKGFPSFPLVERQANEVDWWDMVCNVKKLINEKKEDGKVFWQNLAGYKRQEALRPYLSSEEDRKKGKKFARYQLGDLLLHLEKKHGEDWGKVYDEAWERIDKKVEGLSKHIKLEEERRSEDAQSKAALTDWLRAKASFVIEGLKEADKDEFCRCELKLQKWYGDLRGKPFAIEAENSILDISGFSKQYNCAFIWQKDGVKKLNLYLIINYFKGGKLRFKKIKPEAFEANRFYTVINKKSGEIVPMEVNFNFDDPNLIILPLAFGKRVGREFIWNDLLSLETGSLKLANGRVIEKTLYNRRTRQDEPALFVALTFERREVLDSSNIKPMNLIGVDRGENIPAVIALTDPEGCPLSRFKDSLGNPTHILRIGERYKEKQRTIQAKKEVEQRRAGGYSRKYASKAKNLADDMVRNTARDLLYYAVTQDAMLIFENLSRGFGRQGKRTFMAERQYTRMEDWLTAKLAYEGLPSKTYLSKTLAQYTSKTCSNCGFTITSADYDRVLEKLKKTATGWMTTINGKELKVEGQITYYNRYKRQNVVKDLSVELDRLSEESVNNDISSWTKGRSGEALSLLKKRFSHRPVQEKFVCLNCGFETHADEQAALNIARSWLFLRSQEYKKYQTNKTTGNTDKRAFVETWQSFYRKKLKEVWKPAV

SEQ ID NO: 37748 - protein, 978 aa, synthetic construct
  REGION 1..978: note = engineered CasX variant
QEIKRINKIRRRLVKDSNTKKAGKTGPMKTLLVRVMTPDLRERLENLRKKPENIPQPISNTSRANLNKLLTDYTEMKKAILHVYWEEFQKDPVGLMSRVAQPASKKIDQNKLKPEMDEKGNLTTAGFACSQCGQPLFVYKLEQVSEKGKAYTNYFGRCNVAEHEKLILLAQLKPEKDSDEAVTYSLGKFGQRALDFYSIHVTKESTHPVKPLAQIAGNRYASTPVGKALSDACMGTIASFLSKYQDIIIEHQKVVKGNQKRLESLRELAGKENLEYPSVTLPPQPHTKEGVDAYNEVIARVRMWVNLNLWQKLKLSRDDAKPLLRLKGFPSFPLVERQANEVDWWDMVCNVKKLINEKKEDGKVFWQNLAGYKRQEALRPYLSSEEDRKKGKKFARYQLGDLLLHLEKKHGEDWGKVYDEAWERIDKKVEGLSKHIKLEEERRSEDAQSKAALTDWLRAKASFVIEGLKEADKDEFCRCELKLQKWYGDLRGKPFAIEAENSILDISGFSKQYNCAFIWQKDGVKKLNLYLIINYFKGGKLRFKKIKPEAFEANRFYTVINKKSGEIVPMEVNFNFDDPNLIILPLAFGKRVGREFIWNDLLSLETGSLKLANGRVIEKTLYNRRTRQDEPALFVALTFERREVLDSSNIKPMNLIGVDRGENIPAVIALTDPEGCPLSRFKDSLGNPTHILRIGERYKEKQRTIQAKKEVEQRRAGGYSRKYASKAKNLADDMVRNTARDLLYYAVTQDAMLIFENLSRGFGRQGKRTFMAERQYTRMEDWLTAKLAYEGLPSKTYLSKTLAQYTSKTCSNCGFTITSADYDRVLEKLKKTATGWMTTINGKELKVEGQITYYNRYKRQNVVKDLSVELDRLSEESVNNDISSWTKGRSGEALSLLKKRFSHRPVQEKFVCLNCGFETHADEQAALNIARSWLFLRSQEYKKYQTNKTTGNTDKRAFVETWQSFYRKKLKEVWKPAV

SEQ ID NO: 37749 - protein, 978 aa, synthetic construct
  REGION 1..978: note = engineered CasX variant
QEIKRINKIRRRLVKDSNTKKAGKTGPMKTLLVRVMTPDLRERLENLRKKPENIPQPISNTSRANLNKLLTDYTEMKKAILHVYWEEFQKDPVGLMSRVAQPASKKIDQNKLKPEMDEKGNLTTAGFACSQCGQPLFVYKLEQVSEKGKAYTNYFGRCNVAEHEKLILLAQLKPEKDSDEAVTYSLGKFGQRALDFYSIHVTKESTHPVKPLAQIAGNRYASAPVGKALSDACMGTIASFLSKYQDIIIEHQKVVKGNQKRLESLRELAGKENLEYPSVTLPPQPHTKEGVDAYNEVIARVRMWVNLNLWQKLKLSRDDAKPLLRLKGFPSFPLVERQANEVDWWDMVCNVKKLINEKKEDGKVFWQNLAGYKRQEALRPYLSSEEDRKKGKKFARYQLGDLLLHLEKKHGEDWGKVYDEAWERIDKKVEGLSKHIKLEEERRSEDAQSKAALTDWLRAKASFVIEGLKEADKDEFCRCELKLQKWYGDLRGKPFAIEAENSILDISGFSKQYNCAFIWQKDGVKKLNLYLIINYFKGGKLRFKKIKPEAFEANRFYTVINKKSGEIVPMEVNFNFDDPNLIILPLAFGKRVGREFIWNDLLSLETGSLKLANGRVIEKTLYNRRTRQDEPALFVALTFERREVLDSSNIKPMNLIGVDRGENIPAVIALTDPEGCPLSRFKDSLGNPTHILRIGERYKEKQRTIQAKKEVEQRRAGGYSRKYASKAKNLADDMVRNTARDLLYYAVTQDAMLIFENLSRGFGRQGKRTFMAERQYTRMEDWLTAKLAYEGLPSKTYLSKTLAQYTSKTCSNCGFTITSADYDRVLEKLKKTATGWMTTINGKELKVEGQITYYNRYKRQNVVKDLSVELDRLSEESVNNDISSWTKGRSGEALSLLKKRFSHRPVQEKFVCLNCGFETHADEQAALNIARSWLFLRSQEYKKYQTNKTTGNTDKRAFVETWQSFYRKKLKEVWKPAV

SEQ ID NO: 37750 - protein, 978 aa, synthetic construct
  REGION 1..978: note = engineered CasX variant
QEIKRINKIRRRLVKDSNTKKAGKTGPMKTLLVRVMTPDLRERLENLRKKPENIPQPISNTSRANLNKLLTDYTEMKKAILHVYWEEFQKDPVGLMSRVAQPASKKIDQNKLKPEMDEKGNLTTAGFACSQCGQPLFVYKLEQVSEKGKAYTNYFGRCNVAEHEKLILLAQLKPEKDSDEAVTYSLGKFGQRALDFYSIHVTKESTHPVKPLAQIAGNRYASVPVGKALSDACMGTIASFLSKYQDIIIEHQKVVKGNQKRLESLRELAGKENLEYPSVTLPPQPHTKEGVDAYNEVIARVRMWVNLNLWQKLKLSRDDAKPLLRLKGFPSFPLVERQANEVDWWDMVCNVKKLINEKKEDGKVFWQNLAGYKRQEALRPYLSSEEDRKKGKKFARYQLGDLLLHLEKKHGEDWGKVYDEAWERIDKKVEGLSKHIKLEEERRSEDAQSKAALTDWLRAKASFVIEGLKEADKDEFCRCELKLQKWYGDLRGKPFAIEAENSILDISGFSKQYNCAFIWQKDGVKKLNLYLIINYFKGGKLRFKKIKPEAFEANRFYTVINKKSGEIVPMEVNFNFDDPNLIILPLAFGKRVGREFIWNDLLSLETGSLKLANGRVIEKTLYNRRTRQDEPALFVALTFERREVLDSSNIKPMNLIGVDRGENIPAVIALTDPEGCPLSRFKDSLGNPTHILRIGERYKEKQRTIQAKKEVEQRRAGGYSRKYASKAKNLADDMVRNTARDLLYYAVTQDAMLIFENLSRGFGRQGKRTFMAERQYTRMEDWLTAKLAYEGLPSKTYLSKTLAQYTSKTCSNCGFTITSADYDRVLEKLKKTATGWMTTINGKELKVEGQITYYNRYKRQNVVKDLSVELDRLSEESVNNDISSWTKGRSGEALSLLKKRFSHRPVQEKFVCLNCGFETHADEQAALNIARSWLFLRSQEYKKYQTNKTTGNTDKRAFVETWQSFYRKKLKEVWKPAV

SEQ ID NO: 37751 - protein, 978 aa, synthetic construct
  REGION 1..978: note = engineered CasX variant
QEIKRINKIRRRLVKDSNTKKAGKTGPMKTLLVRVMTPDLRERLENLRKKPENIPQPISNTSRANLNKLLTDYTEMKKAILHVYWEEFQKDPVGLMSRVAQPASKKIDQNKLKPEMDEKGNLTTAGFACSQCGQPLFVYKLEQVSEKGKAYTNYFGRCNVAEHEKLIKLAQLKPEKDSDEAVTYSLGKFGQRALDFYSIHVTKESTHPVKPLAQIAGNRYASGPVGKALSDACMGTIASFLSKYQDIIIEHQKVVKGNQKRLESLRELAGKENLEYPSVTLPPQPHTKEGVDAYNEVIARVRMWVNLNLWQKLKLSRDDAKPLLRLKGFPSFPLVERQANEVDWWDMVCNVKKLINEKKEDGKVFWQNLAGYKRQEALRPYLSSEEDRKKGKKFARYQLGDLLLHLEKKHGEDWGKVYDEAWERIDKKVEGLSKHIKLEEERRSEDAQSKAALTDWLRAKASFVIEGLKEADKDEFCRCELKLQKWYGDLRGKPFAIEAENSILDISGFSKQYNCAFIWQKDGVKKLNLYLIINYFKGGKLRFKKIKPEAFEANRFYTVINKKSGEIVPMEVNFNFDDPNLIILPLAFGKRVGREFIWNDLLSLETGSLKLANGRVIEKTLYNRRTRQDEPALFVALTFERREVLDSSNIKPMNLIGVDRGENIPAVIALTDPEGCPLSRFKDSLGNPTHILRIGERYKEKQRTIQAKKEVEQRRAGGYSRKYASKAKNLADDMVRNTARDLLYYAVTQDAMLIFENLSRGFGRQGKRTFMAERQYTRMEDWLTAKLAYEGLPSKTYLSKTLAQYTSKTCSNCGFTITSADYDRVLEKLKKTATGWMTTINGKELKVEGQITYYNRYKRQNVVKDLSVELDRLSEESVNNDISSWTKGRSGEALSLLKKRFSHRPVQEKFVCLNCGFETHADEQAALNIARSWLFLRSQEYKKYQTNKTTGNTDKRAFVETWQSFYRKKLKEVWKPAV

SEQ ID NO: 37752 - protein, 977 aa, synthetic construct
  REGION 1..977: note = engineered CasX variant
QEIKRINKIRRRLVKDSNTKKAGKTGPMKTLLVRVMTPDLRERLENLRKKPENIPQPISNTSRANLNKLLTDYTEMKKAILHVYWEEFQKDPVGLMSRVAQPASKKIDQNKLKPEMDEKGNLTTAGFACSQCGQPLFVYKLEQVSEKGKAYTNYFGRCNVAEHEKLILLAQLKPEKDSDEAVTYSLGKFGQRALDFYSIHVTKESTHPVKPLAQIAGNRYASPVGKALSDACMGTIASFLSKYQDIIIEHQKVVKGNQKRLESLRELAGKENLEYPSVTLPPQPHTKEGVDAYNEVIARVRMWVNLNLWQKLKLSRDDAKPLLRLKGFPSFPLVERQANEVDWWDMVCNVKKLINEKKEDGKVFWQNLAGYKRQEALRPYLSSEEDRKKGKKFARYQLGDLLLHLEKKHGEDWGKVYDEAWERIDKKVEGLSKHIKLEEERRSEDAQSKAALTDWLRAKASFVIEGLKEADKDEFCRCELKLQKWYGDLRGKPFAIEAENSILDISGFSKQYNCAFIWQKDGVKKLNLYLIINYFKGGKLRFKKIKPEAFEANRFYTVINKKSGEIVPMEVNFNFDDPNLIILPLAFGKRVGREFIWNDLLSLETGSLKLANGRVIEKTLYNRRTRQDEPALFVALTFERREVLDSSNIKPMNLIGVDRGENIPAVIALTDPEGCPLSRFKDSLGNPTHILRIGERYKEKQRTIQAKKEVEQRRAGGYSRKYASKAKNLADDMVRNTARDLLYYAVTQDAMLIFENLSRGFGRQGKRTFMAERQYTRMEDWLTAKLAYEGLPSKTYLSKTLAQYTSKTCSNCGFTITSADYDRVLEKLKKTATGWMTTINGKELKVEGQITYYNRYKRQNVVKDLSVELDRLSEESVNNDISSWTKGRSGEALSLLKKRFSHRPVQEKFVCLNCGFETHADEQAALNIARSWLFLRSQEYKKYQTNKTTGNTDKRAFVETWQSFYRKKLKEVWKPAV

SEQ ID NO: 37753 - protein, 978 aa, synthetic construct
  REGION 1..978: note = engineered CasX variant
QEIKRINKIRRRLVKDSNTKKAGKTGPMKTLLVRVMTPDLRERLENLRKKPENIPQPISNTSRANLNKLLTDYTEMKKAILHVYWEEFQKDPVGLMSRVAQPASKKIDQNKLKPEMDEKGNLTTAGFACSQCGQPLFVYKLEQVSEKGKAYTNYFGRCNVAEHEKLILLAQLKPEKDSDEAVTYSLGKFGQRALDFYSIHVTKESTHPVKPLAQIAGNRYASYPVGKALSDACMGTIASFLSKYQDIIIEHQKVVKGNQKRLESLRELAGKENLEYPSVTLPPQPHTKEGVDAYNEVIARVRMWVNLNLWQKLKLSRDDAKPLLRLKGFPSFPLVERQANEVDWWDMVCNVKKLINEKKEDGKVFWQNLAGYKRQEALRPYLSSEEDRKKGKKFARYQLGDLLLHLEKKHGEDWGKVYDEAWERIDKKVEGLSKHIKLEEERRSEDAQSKAALTDWLRAKASFVIEGLKEADKDEFCRCELKLQKWYGDLRGKPFAIEAENSILDISGFSKQYNCAFIWQKDGVKKLNLYLIINYFKGGKLRFKKIKPEAFEANRFYTVINKKSGEIVPMEVNFNFDDPNLIILPLAFGKRVGREFIWNDLLSLETGSLQLANGRVIEKTLYNRRTRQDEPALFVALTFERREVLDSSNIKPMNLIGVDRGENIPAVIALTDPEGCPLSRFKDSLGNPTHILRIGESYKEKQRTIQAKKEVEQRRAGGYSRKYASKAKNLADDMVRNTARDLLYYAVTQDAMLIFENLSRGFGRQGKRTFMAERQYTRMEDWLTAKLAYEGLPSKTYLSKTLAQYTSKTCSNCGFTITSADYDRVLEKLKKTATGWMTTINGKELKVEGQITYYNRYKRQNVVKDLSVELDRLSEESVNNDISSWTKGRSGEALSLLKKRFSHRPVQEKFVCLNCGFETHADEQAALNIARSWLFLRSQEYKKYQTNKTTGNTDKRAFVETWQSFYRKKLKEVWKPAV

SEQ ID NO: 37754 - protein, 978 aa, synthetic construct
  REGION 1..978: note = engineered CasX variant
QEIKRINKIRRRLVKDSNTKKAGKTGPMKTLLVRVMTPDLRERLENLRKKPENIPQPISNTSRANLNKLLTDYTEMKKAILHVYWEEFQKDPVGLMSRVAQPASKKIDQNKLKPEMDEKGNLTTAGFACSQCGQPLFVYKLEQVSEKGKAYTNYFGRCNVAEHEKLILLAQLKPEKDSDEAVTYSLGKFGQRALDFYSIHVTKESTHPVKPLAQIAGNRYASHPVGKALSDACMGTIASFLSKYQDIIIEHQKVVKGNQKRLESLRELAGKENLEYPSVTLPPQPHTKEGVDAYNEVIARVRMWVNLNLWQKLKLSRDDAKPLLRLKGFPSFPLVERQANEVDWWDMVCNVKKLINEKKEDGKVFWQNLAGYKRQEALRPYLSSEEDRKKGKKFARYQLGDLLLHLEKKHGEDWGKVYDEAWERIDKKVEGLSKHIKLEEERRSEDAQSKAALTDWLRAKASFVIEGLKEADKDEFCRCELKLQKWYGDLRGKPFAIEAENSILDISGFSKQYNCAFIWQKDGVKKLNLYLIINYFKGGKLRFKKIKPEAFEANRFYTVINKKSGEIVPMEVNFNFDDPNLIILPLAFGKRVGREFIWNDLLSLETGSLQLANGRVIEKTLYNRRTRQDEPALFVALTFERREVLDSSNIKPMNLIGVDRGENIPAVIALTDPEGCPLSRFKDSLGNPTHILRIGESYKEKQRTIQAKKEVEQRRAGGYSRKYASKAKNLADDMVRNTARDLLYYAVTQDAMLIFENLSRGFGRQGKRTFMAERQYTRMEDWLTAKLAYEGLPSKTYLSKTLAQYTSKTCSNCGFTITSADYDRVLEKLKKTATGWMTTINGKELKVEGQITYYNRYKRQNVVKDLSVELDRLSEESVNNDISSWTKGRSGEALSLLKKRFSHRPVQEKFVCLNCGFETHADEQAALNIARSWLFLRSQEYKKYQTNKTTGNTDKRAFVETWQSFYRKKLKEVWKPAV

SEQ ID NO: 37755 - protein, 978 aa, synthetic construct
  REGION 1..978: note = engineered CasX variant
QEIKRINKIRRRLVKDSNTKKAGKTGPMKTLLVRVMTPDLRERLENLRKKPENIPQPISNTSRANLNKLLTDYTEMKKAILHVYWEEFQKDPVGLMSRVAQPASKKIDQNKLKPEMDEKGNLTTAGFACSQCGQPLFVYKLEQVSEKGKAYTNYFGRCNVAEHEKLILLAQLKPEKDSDEAVTYSLGKFGQRALDFYSIHVTKESTHPVKPLAQIAGNRYASSPVGKALSDACMGTIASFLSKYQDIIIEHQKVVKGNQKRLESLRELAGKENLEYPSVTLPPQPHTKEGVDAYNEVIARVRMWVNLNLWQKLKLSRDDAKPLLRLKGFPSFPLVERQANEVDWWDMVCNVKKLINEKKEDGKVFWQNLAGYKRQEALRPYLSSEEDRKKGKKFARYQLGDLLLHLEKKHGEDWGKVYDEAWERIDKKVEGLSKHIKLEEERRSEDAQSKAALTDWLRAKASFVIEGLKEADKDEFCRCELKLQKWYGDLRGKPFAIEAENSILDISGFSKQYNCAFIWQKDGVKKLNLYLIINYFKGGKLRFKKIKPEAFEANRFYTVINKKSGEIVPMEVNFNFDDPNLIILPLAFGKRVGREFIWNDLLSLETGSLQLANGRVIEKTLYNRRTRQDEPALFVALTFERREVLDSSNIKPMNLIGVDRGENIPAVIALTDPEGCPLSRFKDSLGNPTHILRIGESYKEKQRTIQAKKEVEQRRAGGYSRKYASKAKNLADDMVRNTARDLLYYAVTQDAMLIFENLSRGFGRQGKRTFMAERQYTRMEDWLTAKLAYEGLPSKTYLSKTLAQYTSKTCSNCGFTITSADYDRVLEKLKKTATGWMTTINGKELKVEGQITYYNRYKRQNVVKDLSVELDRLSEESVNNDISSWTKGRSGEALSLLKKRFSHRPVQEKFVCLNCGFETHADEQAALNIARSWLFLRSQEYKKYQTNKTTGNTDKRAFVETWQSFYRKKLKEVWKPAV

SEQ ID NO: 37756 - protein, 978 aa, synthetic construct
  REGION 1..978: note = engineered CasX variant
QEIKRINKIRRRLVKDSNTKKAGKTGPMKTLLVRVMTPDLRERLENLRKKPENIPQPISNTSRANLNKLLTDYTEMKKAILHVYWEEFQKDPVGLMSRVAQPASKKIDQNKLKPEMDEKGNLTTAGFACSQCGQPLFVYKLEQVSEKGKAYTNYFGRCNVAEHEKLILLAQLKPEKDSDEAVTYSLGKFGQRALDFYSIHVTKESTHPVKPLAQIAGNRYASTPVGKALSDACMGTIASFLSKYQDIIIEHQKVVKGNQKRLESLRELAGKENLEYPSVTLPPQPHTKEGVDAYNEVIARVRMWVNLNLWQKLKLSRDDAKPLLRLKGFPSFPLVERQANEVDWWDMVCNVKKLINEKKEDGKVFWQNLAGYKRQEALRPYLSSEEDRKKGKKFARYQLGDLLLHLEKKHGEDWGKVYDEAWERIDKKVEGLSKHIKLEEERRSEDAQSKAALTDWLRAKASFVIEGLKEADKDEFCRCELKLQKWYGDLRGKPFAIEAENSILDISGFSKQYNCAFIWQKDGVKKLNLYLIINYFKGGKLRFKKIKPEAFEANRFYTVINKKSGEIVPMEVNFNFDDPNLIILPLAFGKRVGREFIWNDLLSLETGSLQLANGRVIEKTLYNRRTRQDEPALFVALTFERREVLDSSNIKPMNLIGVDRGENIPAVIALTDPEGCPLSRFKDSLGNPTHILRIGESYKEKQRTIQAKKEVEQRRAGGYSRKYASKAKNLADDMVRNTARDLLYYAVTQDAMLIFENLSRGFGRQGKRTFMAERQYTRMEDWLTAKLAYEGLPSKTYLSKTLAQYTSKTCSNCGFTITSADYDRVLEKLKKTATGWMTTINGKELKVEGQITYYNRYKRQNVVKDLSVELDRLSEESVNNDISSWTKGRSGEALSLLKKRFSHRPVQEKFVCLNCGFETHADEQAALNIARSWLFLRSQEYKKYQTNKTTGNTDKRAFVETWQSFYRKKLKEVWKPAV

SEQ ID NO: 37757 - protein, 978 aa, synthetic construct
  REGION 1..978: note = engineered CasX variant
QEIKRINKIRRRLVKDSNTKKAGKTGPMKTLLVRVMTPDLRERLENLRKKPENIPQPISNTSRANLNKLLTDYTEMKKAILHVYWEEFQKDPVGLMSRVAQPASKKIDQNKLKPEMDEKGNLTTAGFACSQCGQPLFVYKLEQVSEKGKAYTNYFGRCNVAEHEKLILLAQLKPEKDSDEAVTYSLGKFGQRALDFYSIHVTKESTHPVKPLAQIAGNRYASAPVGKALSDACMGTIASFLSKYQDIIIEHQKVVKGNQKRLESLRELAGKENLEYPSVTLPPQPHTKEGVDAYNEVIARVRMWVNLNLWQKLKLSRDDAKPLLRLKGFPSFPLVERQANEVDWWDMVCNVKKLINEKKEDGKVFWQNLAGYKRQEALRPYLSSEEDRKKGKKFARYQLGDLLLHLEKKHGEDWGKVYDEAWERIDKKVEGLSKHIKLEEERRSEDAQSKAALTDWLRAKASFVIEGLKEADKDEFCRCELKLQKWYGDLRGKPFAIEAENSILDISGFSKQYNCAFIWQKDGVKKLNLYLIINYFKGGKLRFKKIKPEAFEANRFYTVINKKSGEIVPMEVNFNFDDPNLIILPLAFGKRVGREFIWNDLLSLETGSLQLANGRVIEKTLYNRRTRQDEPALFVALTFERREVLDSSNIKPMNLIGVDRGENIPAVIALTDPEGCPLSRFKDSLGNPTHILRIGESYKEKQRTIQAKKEVEQRRAGGYSRKYASKAKNLADDMVRNTARDLLYYAVTQDAMLIFENLSRGFGRQGKRTFMAERQYTRMEDWLTAKLAYEGLPSKTYLSKTLAQYTSKTCSNCGFTITSADYDRVLEKLKKTATGWMTTINGKELKVEGQITYYNRYKRQNVVKDLSVELDRLSEESVNNDISSWTKGRSGEALSLLKKRFSHRPVQEKFVCLNCGFETHADEQAALNIARSWLFLRSQEYKKYQTNKTTGNTDKRAFVETWQSFYRKKLKEVWKPAV

SEQ ID NO: 37758 - protein, 978 aa, synthetic construct
  REGION 1..978: note = engineered CasX variant
QEIKRINKIRRRLVKDSNTKKAGKTGPMKTLLVRVMTPDLRERLENLRKKPENIPQPISNTSRANLNKLLTDYTEMKKAILHVYWEEFQKDPVGLMSRVAQPASKKIDQNKLKPEMDEKGNLTTAGFACSQCGQPLFVYKLEQVSEKGKAYTNYFGRCNVAEHEKLILLAQLKPEKDSDEAVTYSLGKFGQRALDFYSIHVTKESTHPVKPLAQIAGNRYASVPVGKALSDACMGTIASFLSKYQDIIIEHQKVVKGNQKRLESLRELAGKENLEYPSVTLPPQPHTKEGVDAYNEVIARVRMWVNLNLWQKLKLSRDDAKPLLRLKGFPSFPLVERQANEVDWWDMVCNVKKLINEKKEDGKVFWQNLAGYKRQEALRPYLSSEEDRKKGKKFARYQLGDLLLHLEKKHGEDWGKVYDEAWERIDKKVEGLSKHIKLEEERRSEDAQSKAALTDWLRAKASFVIEGLKEADKDEFCRCELKLQKWYGDLRGKPFAIEAENSILDISGFSKQYNCAFIWQKDGVKKLNLYLIINYFKGGKLRFKKIKPEAFEANRFYTVINKKSGEIVPMEVNFNFDDPNLIILPLAFGKRVGREFIWNDLLSLETGSLQLANGRVIEKTLYNRRTRQDEPALFVALTFERREVLDSSNIKPMNLIGVDRGENIPAVIALTDPEGCPLSRFKDSLGNPTHILRIGESYKEKQRTIQAKKEVEQRRAGGYSRKYASKAKNLADDMVRNTARDLLYYAVTQDAMLIFENLSRGFGRQGKRTFMAERQYTRMEDWLTAKLAYEGLPSKTYLSKTLAQYTSKTCSNCGFTITSADYDRVLEKLKKTATGWMTTINGKELKVEGQITYYNRYKRQNVVKDLSVELDRLSEESVNNDISSWTKGRSGEALSLLKKRFSHRPVQEKFVCLNCGFETHADEQAALNIARSWLFLRSQEYKKYQTNKTTGNTDKRAFVETWQSFYRKKLKEVWKPAV

SEQ ID NO: 37759 - protein, 978 aa, synthetic construct
  REGION 1..978: note = engineered CasX variant
QEIKRINKIRRRLVKDSNTKKAGKTGPMKTLLVRVMTPDLRERLENLRKKPENIPQPISNTSRANLNKLLTDYTEMKKAILHVYWEEFQKDPVGLMSRVAQPASKKIDQNKLKPEMDEKGNLTTAGFACSQCGQPLFVYKLEQVSEKGKAYTNYFGRCNVAEHEKLIKLAQLKPEKDSDEAVTYSLGKFGQRALDFYSIHVTKESTHPVKPLAQIAGNRYASGPVGKALSDACMGTIASFLSKYQDIIIEHQKVVKGNQKRLESLRELAGKENLEYPSVTLPPQPHTKEGVDAYNEVIARVRMWVNLNLWQKLKLSRDDAKPLLRLKGFPSFPLVERQANEVDWWDMVCNVKKLINEKKEDGKVFWQNLAGYKRQEALRPYLSSEEDRKKGKKFARYQLGDLLLHLEKKHGEDWGKVYDEAWERIDKKVEGLSKHIKLEEERRSEDAQSKAALTDWLRAKASFVIEGLKEADKDEFCRCELKLQKWYGDLRGKPFAIEAENSILDISGFSKQYNCAFIWQKDGVKKLNLYLIINYFKGGKLRFKKIKPEAFEANRFYTVINKKSGEIVPMEVNFNFDDPNLIILPLAFGKRVGREFIWNDLLSLETGSLQLANGRVIEKTLYNRRTRQDEPALFVALTFERREVLDSSNIKPMNLIGVDRGENIPAVIALTDPEGCPLSRFKDSLGNPTHILRIGESYKEKQRTIQAKKEVEQRRAGGYSRKYASKAKNLADDMVRNTARDLLYYAVTQDAMLIFENLSRGFGRQGKRTFMAERQYTRMEDWLTAKLAYEGLPSKTYLSKTLAQYTSKTCSNCGFTITSADYDRVLEKLKKTATGWMTTINGKELKVEGQITYYNRYKRQNVVKDLSVELDRLSEESVNNDISSWTKGRSGEALSLLKKRFSHRPVQEKFVCLNCGFETHADEQAALNIARSWLFLRSQEYKKYQTNKTTGNTDKRAFVETWQSFYRKKLKEVWKPAV

SEQ ID NO: 37760 - protein, 977 aa, synthetic construct
  REGION 1..977: note = engineered CasX variant
QEIKRINKIRRRLVKDSNTKKAGKTGPMKTLLVRVMTPDLRERLENLRKKPENIPQPISNTSRANLNKLLTDYTEMKKAILHVYWEEFQKDPVGLMSRVAQPASKKIDQNKLKPEMDEKGNLTTAGFACSQCGQPLFVYKLEQVSEKGKAYTNYFGRCNVAEHEKLILLAQLKPEKDSDEAVTYSLGKFGQRALDFYSIHVTKESTHPVKPLAQIAGNRYASPVGKALSDACMGTIASFLSKYQDIIIEHQKVVKGNQKRLESLRELAGKENLEYPSVTLPPQPHTKEGVDAYNEVIARVRMWVNLNLWQKLKLSRDDAKPLLRLKGFPSFPLVERQANEVDWWDMVCNVKKLINEKKEDGKVFWQNLAGYKRQEALRPYLSSEEDRKKGKKFARYQLGDLLLHLEKKHGEDWGKVYDEAWERIDKKVEGLSKHIKLEEERRSEDAQSKAALTDWLRAKASFVIEGLKEADKDEFCRCELKLQKWYGDLRGKPFAIEAENSILDISGFSKQYNCAFIWQKDGVKKLNLYLIINYFKGGKLRFKKIKPEAFEANRFYTVINKKSGEIVPMEVNFNFDDPNLIILPLAFGKRVGREFIWNDLLSLETGSLQLANGRVIEKTLYNRRTRQDEPALFVALTFERREVLDSSNIKPMNLIGVDRGENIPAVIALTDPEGCPLSRFKDSLGNPTHILRIGESYKEKQRTIQAKKEVEQRRAGGYSRKYASKAKNLADDMVRNTARDLLYYAVTQDAMLIFENLSRGFGRQGKRTFMAERQYTRMEDWLTAKLAYEGLPSKTYLSKTLAQYTSKTCSNCGFTITSADYDRVLEKLKKTATGWMTTINGKELKVEGQITYYNRYKRQNVVKDLSVELDRLSEESVNNDISSWTKGRSGEALSLLKKRFSHRPVQEKFVCLNCGFETHADEQAALNIARSWLFLRSQEYKKYQTNKTTGNTDKRAFVETWQSFYRKKLKEVWKPAV

SEQ ID NO: 37761 - protein, 980 aa, synthetic construct
  REGION 1..980: note = engineered CasX variant
QEIKRINKIRRRLVKDSNTKKAGKTGPMKTLLVRVMTPDLRERLENLRKKPENIPQPISNTSRANLNKLLTDYTEMKKAILHVYWEEFQKDPVGLMSRVAQPASKKIDQNKLKPEMDEKGNLTTAGFACSQCGQPLFVYKLEQVSEKGKAYTNYFGRCNVAEHEKLILLAQLKPEKDSDEAVTYSLGKFGQRALDFYSIHVTKESTHPVKPLAQIAGNRYASYPVGKALSDACMGTIASFLSKYQDIIIEHQKVVKGNQKRLESLRELAGKENLEYPSVTLPPQPHTKEGVDAYNEVIARVRMWVNLNLWQKLKLSRDDAKPLLRLKGFPSFPLVERQANEVDWWDMVCNVKKLINEKKEDGKVFWQNLAGYKRQEALRPYLSSEEDRKKGKKFARYQLGDLLLHLEKKHGEDWGKVYDEAWERIDKKVEGLSKHIKLEEERRSEDAQSKAALTDWLRAKASFVIEGLKEADKDEFCRCELKLQKWYGDLRGKPFAIEAENSILDISGFSKQYNCAFIWQKDGVKKLNLYLIINYFKGGKLRFKKIKPEAFEANRFYTVINKKSGEIVPMEVNFNFDDPNLIILPLAFGKRQGREFIWNDLLSLETGSLKLANGRVIEKTLYNRRTRQDEPALFVALTFERREVLDSSNIKTPMSNLIGVDRGENIPAVIALTDPEGCPLSRFKDSLGNPTHILRIGESYKEKQRTIQAKKEVEQRRAGGYSRKYASKAKNLADDMVRNTARDLLYYAVTQDAMLIFENLSRGFGRQGKRTFMAERQYTRMEDWLTAKLAYEGLPSKTYLSKTLAQYTSKTCSNCGFTITSADYDRVLEKLKKTATGWMTTINGKELKVEGQITYYNRYKRQNVVKDLSVELDRLSEESVNNDISSWTKGRSGEALSLLKKRFSHRPVQEKFVCLNCGFETHADEQAALNIARSWLFLRSQEYKKYQTNKTTGNTDKRAFVETWQSFYRKKLKEVWKPAV

SEQ ID NO: 37762 - protein, 980 aa, synthetic construct
  REGION 1..980: note = engineered CasX variant
QEIKRINKIRRRLVKDSNTKKAGKTGPMKTLLVRVMTPDLRERLENLRKKPENIPQPISNTSRANLNKLLTDYTEMKKAILHVYWEEFQKDPVGLMSRVAQPASKKIDQNKLKPEMDEKGNLTTAGFACSQCGQPLFVYKLEQVSEKGKAYTNYFGRCNVAEHEKLILLAQLKPEKDSDEAVTYSLGKFGQRALDFYSIHVTKESTHPVKPLAQIAGNRYASHPVGKALSDACMGTIASFLSKYQDIIIEHQKVVKGNQKRLESLRELAGKENLEYPSVTLPPQPHTKEGVDAYNEVIARVRMWVNLNLWQKLKLSRDDAKPLLRLKGFPSFPLVERQANEVDWWDMVCNVKKLINEKKEDGKVFWQNLAGYKRQEALRPYLSSEEDRKKGKKFARYQLGDLLLHLEKKHGEDWGKVYDEAWERIDKKVEGLSKHIKLEEERRSEDAQSKAALTDWLRAKASFVIEGLKEADKDEFCRCELKLQKWYGDLRGKPFAIEAENSILDISGFSKQYNCAFIWQKDGVKKLNLYLIINYFKGGKLRFKKIKPEAFEANRFYTVINKKSGEIVPMEVNFNFDDPNLIILPLAFGKRQGREFIWNDLLSLETGSLKLANGRVIEKTLYNRRTRQDEPALFVALTFERREVLDSSNIKTPMSNLIGVDRGENIPAVIALTDPEGCPLSRFKDSLGNPTHILRIGESYKEKQRTIQAKKEVEQRRAGGYSRKYASKAKNLADDMVRNTARDLLYYAVTQDAMLIFENLSRGFGRQGKRTFMAERQYTRMEDWLTAKLAYEGLPSKTYLSKTLAQYTSKTCSNCGFTITSADYDRVLEKLKKTATGWMTTINGKELKVEGQITYYNRYKRQNVVKDLSVELDRLSEESVNNDISSWTKGRSGEALSLLKKRFSHRPVQEKFVCLNCGFETHADEQAALNIARSWLFLRSQEYKKYQTNKTTGNTDKRAFVETWQSFYRKKLKEVWKPAV

SEQ ID NO: 37763 - protein, 980 aa, synthetic construct
  REGION 1..980: note = engineered CasX variant
QEIKRINKIRRRLVKDSNTKKAGKTGPMKTLLVRVMTPDLRERLENLRKKPENIPQPISNTSRANLNKLLTDYTEMKKAILHVYWEEFQKDPVGLMSRVAQPASKKIDQNKLKPEMDEKGNLTTAGFACSQCGQPLFVYKLEQVSEKGKAYTNYFGRCNVAEHEKLILLAQLKPEKDSDEAVTYSLGKFGQRALDFYSIHVTKESTHPVKPLAQIAGNRYASSPVGKALSDACMGTIASFLSKYQDIIIEHQKVVKGNQKRLESLRELAGKENLEYPSVTLPPQPHTKEGVDAYNEVIARVRMWVNLNLWQKLKLSRDDAKPLLRLKGFPSFPLVERQANEVDWWDMVCNVKKLINEKKEDGKVFWQNLAGYKRQEALRPYLSSEEDRKKGKKFARYQLGDLLLHLEKKHGEDWGKVYDEAWERIDKKVEGLSKHIKLEEERRSEDAQSKAALTDWLRAKASFVIEGLKEADKDEFCRCELKLQKWYGDLRGKPFAIEAENSILDISGFSKQYNCAFIWQKDGVKKLNLYLIINYFKGGKLRFKKIKPEAFEANRFYTVINKKSGEIVPMEVNFNFDDPNLIILPLAFGKRQGREFIWNDLLSLETGSLKLANGRVIEKTLYNRRTRQDEPALFVALTFERREVLDSSNIKTPMSNLIGVDRGENIPAVIALTDPEGCPLSRFKDSLGNPTHILRIGESYKEKQRTIQAKKEVEQRRAGGYSRKYASKAKNLADDMVRNTARDLLYYAVTQDAMLIFENLSRGFGRQGKRTFMAERQYTRMEDWLTAKLAYEGLPSKTYLSKTLAQYTSKTCSNCGFTITSADYDRVLEKLKKTATGWMTTINGKELKVEGQITYYNRYKRQNVVKDLSVELDRLSEESVNNDISSWTKGRSGEALSLLKKRFSHRPVQEKFVCLNCGFETHADEQAALNIARSWLFLRSQEYKKYQTNKTTGNTDKRAFVETWQSFYRKKLKEVWKPAV

SEQ ID NO: 37764 - protein, 980 aa, synthetic construct
  REGION 1..980: note = engineered CasX variant
QEIKRINKIRRRLVKDSNTKKAGKTGPMKTLLVRVMTPDLRERLENLRKKPENIPQPISNTSRANLNKLLTDYTEMKKAILHVYWEEFQKDPVGLMSRVAQPASKKIDQNKLKPEMDEKGNLTTAGFACSQCGQPLFVYKLEQVSEKGKAYTNYFGRCNVAEHEKLILLAQLKPEKDSDEAVTYSLGKFGQRALDFYSIHVTKESTHPVKPLAQIAGNRYASTPVGKALSDACMGTIASFLSKYQDIIIEHQKVVKGNQKRLESLRELAGKENLEYPSVTLPPQPHTKEGVDAYNEVIARVRMWVNLNLWQKLKLSRDDAKPLLRLKGFPSFPLVERQANEVDWWDMVCNVKKLINEKKEDGKVFWQNLAGYKRQEALRPYLSSEEDRKKGKKFARYQLGDLLLHLEKKHGEDWGKVYDEAWERIDKKVEGLSKHIKLEEERRSEDAQSKAALTDWLRAKASFVIEGLKEADKDEFCRCELKLQKWYGDLRGKPFAIEAENSILDISGFSKQYNCAFIWQKDGVKKLNLYLIINYFKGGKLRFKKIKPEAFEANRFYTVINKKSGEIVPMEVNFNFDDPNLIILPLAFGKRQGREFIWNDLLSLETGSLKLANGRVIEKTLYNRRTRQDEPALFVALTFERREVLDSSNIKTPMSNLIGVDRGENIPAVIALTDPEGCPLSRFKDSLGNPTHILRIGESYKEKQRTIQAKKEVEQRRAGGYSRKYASKAKNLADDMVRNTARDLLYYAVTQDAMLIFENLSRGFGRQGKRTFMAERQYTRMEDWLTAKLAYEGLPSKTYLSKTLAQYTSKTCSNCGFTITSADYDRVLEKLKKTATGWMTTINGKELKVEGQITYYNRYKRQNVVKDLSVELDRLSEESVNNDISSWTKGRSGEALSLLKKRFSHRPVQEKFVCLNCGFETHADEQAALNIARSWLFLRSQEYKKYQTNKTTGNTDKRAFVETWQSFYRKKLKEVWKPAV

SEQ ID NO: 37765 - protein, 980 aa, synthetic construct
  REGION 1..980: note = engineered CasX variant
QEIKRINKIRRRLVKDSNTKKAGKTGPMKTLLVRVMTPDLRERLENLRKKPENIPQPISNTSRANLNKLLTDYTEMKKAILHVYWEEFQKDPVGLMSRVAQPASKKIDQNKLKPEMDEKGNLTTAGFACSQCGQPLFVYKLEQVSEKGKAYTNYFGRCNVAEHEKLILLAQLKPEKDSDEAVTYSLGKFGQRALDFYSIHVTKESTHPVKPLAQIAGNRYASAPVGKALSDACMGTIASFLSKYQDIIIEHQKVVKGNQKRLESLRELAGKENLEYPSVTLPPQPHTKEGVDAYNEVIARVRMWVNLNLWQKLKLSRDDAKPLLRLKGFPSFPLVERQANEVDWWDMVCNVKKLINEKKEDGKVFWQNLAGYKRQEALRPYLSSEEDRKKGKKFARYQLGDLLLHLEKKHGEDWGKVYDEAWERIDKKVEGLSKHIKLEEERRSEDAQSKAALTDWLRAKASFVIEGLKEADKDEFCRCELKLQKWYGDLRGKPFAIEAENSILDISGFSKQYNCAFIWQKDGVKKLNLYLIINYFKGGKLRFKKIKPEAFEANRFYTVINKKSGEIVPMEVNFNFDDPNLIILPLAFGKRQGREFIWNDLLSLETGSLKLANGRVIEKTLYNRRTRQDEPALFVALTFERREVLDSSNIKTPMSNLIGVDRGENIPAVIALTDPEGCPLSRFKDSLGNPTHILRIGESYKEKQRTIQAKKEVEQRRAGGYSRKYASKAKNLADDMVRNTARDLLYYAVTQDAMLIFENLSRGFGRQGKRTFMAERQYTRMEDWLTAKLAYEGLPSKTYLSKTLAQYTSKTCSNCGFTITSADYDRVLEKLKKTATGWMTTINGKELKVEGQITYYNRYKRQNVVKDLSVELDRLSEESVNNDISSWTKGRSGEALSLLKKRFSHRPVQEKFVCLNCGFETHADEQAALNIARSWLFLRSQEYKKYQTNKTTGNTDKRAFVETWQSFYRKKLKEVWKPAV

SEQ ID NO: 37766 - protein, 980 aa, synthetic construct
  REGION 1..980: note = engineered CasX variant
QEIKRINKIRRRLVKDSNTKKAGKTGPMKTLLVRVMTPDLRERLENLRKKPENIPQPISNTSRANLNKLLTDYTEMKKAILHVYWEEFQKDPVGLMSRVAQPASKKIDQNKLKPEMDEKGNLTTAGFACSQCGQPLFVYKLEQVSEKGKAYTNYFGRCNVAEHEKLILLAQLKPEKDSDEAVTYSLGKFGQRALDFYSIHVTKESTHPVKPLAQIAGNRYASVPVGKALSDACMGTIASFLSKYQDIIIEHQKVVKGNQKRLESLRELAGKENLEYPSVTLPPQPHTKEGVDAYNEVIARVRMWVNLNLWQKLKLSRDDAKPLLRLKGFPSFPLVERQANEVDWWDMVCNVKKLINEKKEDGKVFWQNLAGYKRQEALRPYLSSEEDRKKGKKFARYQLGDLLLHLEKKHGEDWGKVYDEAWERIDKKVEGLSKHIKLEEERRSEDAQSKAALTDWLRAKASFVIEGLKEADKDEFCRCELKLQKWYGDLRGKPFAIEAENSILDISGFSKQYNCAFIWQKDGVKKLNLYLIINYFKGGKLRFKKIKPEAFEANRFYTVINKKSGEIVPMEVNFNFDDPNLIILPLAFGKRQGREFIWNDLLSLETGSLKLANGRVIEKTLYNRRTRQDEPALFVALTFERREVLDSSNIKTPMSNLIGVDRGENIPAVIALTDPEGCPLSRFKDSLGNPTHILRIGESYKEKQRTIQAKKEVEQRRAGGYSRKYASKAKNLADDMVRNTARDLLYYAVTQDAMLIFENLSRGFGRQGKRTFMAERQYTRMEDWLTAKLAYEGLPSKTYLSKTLAQYTSKTCSNCGFTITSADYDRVLEKLKKTATGWMTTINGKELKVEGQITYYNRYKRQNVVKDLSVELDRLSEESVNNDISSWTKGRSGEALSLLKKRFSHRPVQEKFVCLNCGFETHADEQAALNIARSWLFLRSQEYKKYQTNKTTGNTDKRAFVETWQSFYRKKLKEVWKPAV

SEQ ID NO: 37767 - protein, 980 aa, synthetic construct
  REGION 1..980: note = engineered CasX variant
QEIKRINKIRRRLVKDSNTKKAGKTGPMKTLLVRVMTPDLRERLENLRKKPENIPQPISNTSRANLNKLLTDYTEMKKAILHVYWEEFQKDPVGLMSRVAQPASKKIDQNKLKPEMDEKGNLTTAGFACSQCGQPLFVYKLEQVSEKGKAYTNYFGRCNVAEHEKLIKLAQLKPEKDSDEAVTYSLGKFGQRALDFYSIHVTKESTHPVKPLAQIAGNRYASGPVGKALSDACMGTIASFLSKYQDIIIEHQKVVKGNQKRLESLRELAGKENLEYPSVTLPPQPHTKEGVDAYNEVIARVRMWVNLNLWQKLKLSRDDAKPLLRLKGFPSFPLVERQANEVDWWDMVCNVKKLINEKKEDGKVFWQNLAGYKRQEALRPYLSSEEDRKKGKKFARYQLGDLLLHLEKKHGEDWGKVYDEAWERIDKKVEGLSKHIKLEEERRSEDAQSKAALTDWLRAKASFVIEGLKEADKDEFCRCELKLQKWYGDLRGKPFAIEAENSILDISGFSKQYNCAFIWQKDGVKKLNLYLIINYFKGGKLRFKKIKPEAFEANRFYTVINKKSGEIVPMEVNFNFDDPNLIILPLAFGKRQGREFIWNDLLSLETGSLKLANGRVIEKTLYNRRTRQDEPALFVALTFERREVLDSSNIKTPMSNLIGVDRGENIPAVIALTDPEGCPLSRFKDSLGNPTHILRIGESYKEKQRTIQAKKEVEQRRAGGYSRKYASKAKNLADDMVRNTARDLLYYAVTQDAMLIFENLSRGFGRQGKRTFMAERQYTRMEDWLTAKLAYEGLPSKTYLSKTLAQYTSKTCSNCGFTITSADYDRVLEKLKKTATGWMTTINGKELKVEGQITYYNRYKRQNVVKDLSVELDRLSEESVNNDISSWTKGRSGEALSLLKKRFSHRPVQEKFVCLNCGFETHADEQAALNIARSWLFLRSQEYKKYQTNKTTGNTDKRAFVETWQSFYRKKLKEVWKPAV

SEQ ID NO: 37768 - protein, 979 aa, synthetic construct
  REGION 1..979: note = engineered CasX variant
QEIKRINKIRRRLVKDSNTKKAGKTGPMKTLLVRVMTPDLRERLENLRKKPENIPQPISNTSRANLNKLLTDYTEMKKAILHVYWEEFQKDPVGLMSRVAQPASKKIDQNKLKPEMDEKGNLTTAGFACSQCGQPLFVYKLEQVSEKGKAYTNYFGRCNVAEHEKLILLAQLKPEKDSDEAVTYSLGKFGQRALDFYSIHVTKESTHPVKPLAQIAGNRYASPVGKALSDACMGTIASFLSKYQDIIIEHQKVVKGNQKRLESLRELAGKENLEYPSVTLPPQPHTKEGVDAYNEVIARVRMWVNLNLWQKLKLSRDDAKPLLRLKGFPSFPLVERQANEVDWWDMVCNVKKLINEKKEDGKVFWQNLAGYKRQEALRPYLSSEEDRKKGKKFARYQLGDLLLHLEKKHGEDWGKVYDEAWERIDKKVEGLSKHIKLEEERRSEDAQSKAALTDWLRAKASFVIEGLKEADKDEFCRCELKLQKWYGDLRGKPFAIEAENSILDISGFSKQYNCAFIWQKDGVKKLNLYLIINYFKGGKLRFKKIKPEAFEANRFYTVINKKSGEIVPMEVNFNFDDPNLIILPLAFGKRQGREFIWNDLLSLETGSLKLANGRVIEKTLYNRRTRQDEPALFVALTFERREVLDSSNIKTPMSNLIGVDRGENIPAVIALTDPEGCPLSRFKDSLGNPTHILRIGESYKEKQRTIQAKKEVEQRRAGGYSRKYASKAKNLADDMVRNTARDLLYYAVTQDAMLIFENLSRGFGRQGKRTFMAERQYTRMEDWLTAKLAYEGLPSKTYLSKTLAQYTSKTCSNCGFTITSADYDRVLEKLKKTATGWMTTINGKELKVEGQITYYNRYKRQNVVKDLSVELDRLSEESVNNDISSWTKGRSGEALSLLKKRFSHRPVQEKFVCLNCGFETHADEQAALNIARSWLFLRSQEYKKYQTNKTTGNTDKRAFVETWQSFYRKKLKEVWKPAV

SEQ ID NO: 37769 - protein, 979 aa, synthetic construct
  REGION 1..979: note = engineered CasX variant
QEIKRINKIRRRLVKDSNTKKAGKTGPMKTLLVRVMTPDLRERLENLRKKPENIPQPISNTSRANLNKLLTDYTEMKKAILHVYWEEFQKDPVGLMSRVAQPASKKIDQNKLKPEMDEKGNLTTAGFACSQCGQPLFVYKLEQVSEKGKAYTNYFGRCNVAEHEKLILLAQLKPEKDSDEAVTYSLGKFGQRALDFYSIHVTKESTHPVKPLAQIAGNRYASYPVGKALSDACMGTIASFLSKYQDIIIEHQKVVKGNQKRLESLRELAGKENLEYPSVTLPPQPHTKEGVDAYNEVIARVRMWVNLNLWQKLKLSRDDAKPLLRLKGFPSFPLVERQANEVDWWDMVCNVKKLINEKKEDGKVFWQNLAGYKRQEALRPYLSSEEDRKKGKKFARYQLGDLLLHLEKKHGEDWGKVYDEAWERIDKKVEGLSKHIKLEEERRSEDAQSKAALTDWLRAKASFVIEGLKEADKDEFCRCELKLQKWYGDLRGKPFAIEAENSILDISGFSKQYNCAFIWQKDGVKKLNLYLIINYFKGGKLRFKKIKPEAFEANRFYTVINKKSGEIVPMEVNFNFDDPNLIILPLAFGKRQGREFIWNDLLSLETGSLKLANGRVIEKTLYNRRTRQDEPALFVALTFERREVLDSSNIKTPMNLIGVDRGENIPAVIALTDPEGCPLSRFKDSLGNPTHILRIRESYKEKQRTIQAKKEVEQRRAGGYSRKYASKAKNLADDMVRNTARDLLYYAVTQDAMLIFENLSRGFGRQGKRTFMAERQYTRMEDWLTAKLAYEGLPSKTYLSKTLAQYTSKTCSNCGFTITSADYDRVLEKLKKTATGWMTTINGKELKVEGQITYYNRYKRQNVVKDLSVELDRLSEESVNNDISSWTKGRSGEALSLLKKRFSHRPVQEKFVCLNCGFETHADEQAALNIARSWLFLRSQEYKKYQTNKTTGNTDKRAFVETWQSFYRKKLKEVWKPAV

SEQ ID NO: 37770 - protein, 979 aa, synthetic construct
  REGION 1..979: note = engineered CasX variant
QEIKRINKIRRRLVKDSNTKKAGKTGPMKTLLVRVMTPDLRERLENLRKKPENIPQPISNTSRANLNKLLTDYTEMKKAILHVYWEEFQKDPVGLMSRVAQPASKKIDQNKLKPEMDEKGNLTTAGFACSQCGQPLFVYKLEQVSEKGKAYTNYFGRCNVAEHEKLILLAQLKPEKDSDEAVTYSLGKFGQRALDFYSIHVTKESTHPVKPLAQIAGNRYASHPVGKALSDACMGTIASFLSKYQDIIIEHQKVVKGNQKRLESLRELAGKENLEYPSVTLPPQPHTKEGVDAYNEVIARVRMWVNLNLWQKLKLSRDDAKPLLRLKGFPSFPLVERQANEVDWWDMVCNVKKLINEKKEDGKVFWQNLAGYKRQEALRPYLSSEEDRKKGKKFARYQLGDLLLHLEKKHGEDWGKVYDEAWERIDKKVEGLSKHIKLEEERRSEDAQSKAALTDWLRAKASFVIEGLKEADKDEFCRCELKLQKWYGDLRGKPFAIEAENSILDISGFSKQYNCAFIWQKDGVKKLNLYLIINYFKGGKLRFKKIKPEAFEANRFYTVINKKSGEIVPMEVNFNFDDPNLIILPLAFGKRQGREFIWNDLLSLETGSLKLANGRVIEKTLYNRRTRQDEPALFVALTFERREVLDSSNIKTPMNLIGVDRGENIPAVIALTDPEGCPLSRFKDSLGNPTHILRIRESYKEKQRTIQAKKEVEQRRAGGYSRKYASKAKNLADDMVRNTARDLLYYAVTQDAMLIFENLSRGFGRQGKRTFMAERQYTRMEDWLTAKLAYEGLPSKTYLSKTLAQYTSKTCSNCGFTITSADYDRVLEKLKKTATGWMTTINGKELKVEGQITYYNRYKRQNVVKDLSVELDRLSEESVNNDISSWTKGRSGEALSLLKKRFSHRPVQEKFVCLNCGFETHADEQAALNIARSWLFLRSQEYKKYQTNKTTGNTDKRAFVETWQSFYRKKLKEVWKPAV

SEQ ID NO: 37771 - protein, 979 aa, synthetic construct
  REGION 1..979: note = engineered CasX variant
QEIKRINKIRRRLVKDSNTKKAGKTGPMKTLLVRVMTPDLRERLENLRKKPENIPQPISNTSRANLNKLLTDYTEMKKAILHVYWEEFQKDPVGLMSRVAQPASKKIDQNKLKPEMDEKGNLTTAGFACSQCGQPLFVYKLEQVSEKGKAYTNYFGRCNVAEHEKLILLAQLKPEKDSDEAVTYSLGKFGQRALDFYSIHVTKESTHPVKPLAQIAGNRYASSPVGKALSDACMGTIASFLSKYQDIIIEHQKVVKGNQKRLESLRELAGKENLEYPSVTLPPQPHTKEGVDAYNEVIARVRMWVNLNLWQKLKLSRDDAKPLLRLKGFPSFPLVERQANEVDWWDMVCNVKKLINEKKEDGKVFWQNLAGYKRQEALRPYLSSEEDRKKGKKFARYQLGDLLLHLEKKHGEDWGKVYDEAWERIDKKVEGLSKHIKLEEERRSEDAQSKAALTDWLRAKASFVIEGLKEADKDEFCRCELKLQKWYGDLRGKPFAIEAENSILDISGFSKQYNCAFIWQKDGVKKLNLYLIINYFKGGKLRFKKIKPEAFEANRFYTVINKKSGEIVPMEVNFNFDDPNLIILPLAFGKRQGREFIWNDLLSLETGSLKLANGRVIEKTLYNRRTRQDEPALFVALTFERREVLDSSNIKTPMNLIGVDRGENIPAVIALTDPEGCPLSRFKDSLGNPTHILRIRESYKEKQRTIQAKKEVEQRRAGGYSRKYASKAKNLADDMVRNTARDLLYYAVTQDAMLIFENLSRGFGRQGKRTFMAERQYTRMEDWLTAKLAYEGLPSKTYLSKTLAQYTSKTCSNCGFTITSADYDRVLEKLKKTATGWMTTINGKELKVEGQITYYNRYKRQNVVKDLSVELDRLSEESVNNDISSWTKGRSGEALSLLKKRFSHRPVQEKFVCLNCGFETHADEQAALNIARSWLFLRSQEYKKYQTNKTTGNTDKRAFVETWQSFYRKKLKEVWKPAV

SEQ ID NO: 37772 - protein, 979 aa, synthetic construct
  REGION 1..979: note = engineered CasX variant
QEIKRINKIRRRLVKDSNTKKAGKTGPMKTLLVRVMTPDLRERLENLRKKPENIPQPISNTSRANLNKLLTDYTEMKKAILHVYWEEFQKDPVGLMSRVAQPASKKIDQNKLKPEMDEKGNLTTAGFACSQCGQPLFVYKLEQVSEKGKAYTNYFGRCNVAEHEKLILLAQLKPEKDSDEAVTYSLGKFGQRALDFYSIHVTKESTHPVKPLAQIAGNRYASTPVGKALSDACMGTIASFLSKYQDIIIEHQKVVKGNQKRLESLRELAGKENLEYPSVTLPPQPHTKEGVDAYNEVIARVRMWVNLNLWQKLKLSRDDAKPLLRLKGFPSFPLVERQANEVDWWDMVCNVKKLINEKKEDGKVFWQNLAGYKRQEALRPYLSSEEDRKKGKKFARYQLGDLLLHLEKKHGEDWGKVYDEAWERIDKKVEGLSKHIKLEEERRSEDAQSKAALTDWLRAKASFVIEGLKEADKDEFCRCELKLQKWYGDLRGKPFAIEAENSILDISGFSKQYNCAFIWQKDGVKKLNLYLIINYFKGGKLRFKKIKPEAFEANRFYTVINKKSGEIVPMEVNFNFDDPNLIILPLAFGKRQGREFIWNDLLSLETGSLKLANGRVIEKTLYNRRTRQDEPALFVALTFERREVLDSSNIKTPMNLIGVDRGENIPAVIALTDPEGCPLSRFKDSLGNPTHILRIRESYKEKQRTIQAKKEVEQRRAGGYSRKYASKAKNLADDMVRNTARDLLYYAVTQDAMLIFENLSRGFGRQGKRTFMAERQYTRMEDWLTAKLAYEGLPSKTYLSKTLAQYTSKTCSNCGFTITSADYDRVLEKLKKTATGWMTTINGKELKVEGQITYYNRYKRQNVVKDLSVELDRLSEESVNNDISSWTKGRSGEALSLLKKRFSHRPVQEKFVCLNCGFETHADEQAALNIARSWLFLRSQEYKKYQTNKTTGNTDKRAFVETWQSFYRKKLKEVWKPAV

SEQ ID NO: 37773 - protein, 979 aa, synthetic construct
  REGION 1..979: note = engineered CasX variant
QEIKRINKIRRRLVKDSNTKKAGKTGPMKTLLVRVMTPDLRERLENLRKKPENIPQPISNTSRANLNKLLTDYTEMKKAILHVYWEEFQKDPVGLMSRVAQPASKKIDQNKLKPEMDEKGNLTTAGFACSQCGQPLFVYKLEQVSEKGKAYTNYFGRCNVAEHEKLILLAQLKPEKDSDEAVTYSLGKFGQRALDFYSIHVTKESTHPVKPLAQIAGNRYASAPVGKALSDACMGTIASFLSKYQDIIIEHQKVVKGNQKRLESLRELAGKENLEYPSVTLPPQPHTKEGVDAYNEVIARVRMWVNLNLWQKLKLSRDDAKPLLRLKGFPSFPLVERQANEVDWWDMVCNVKKLINEKKEDGKVFWQNLAGYKRQEALRPYLSSEEDRKKGKKFARYQLGDLLLHLEKKHGEDWGKVYDEAWERIDKKVEGLSKHIKLEEERRSEDAQSKAALTDWLRAKASFVIEGLKEADKDEFCRCELKLQKWYGDLRGKPFAIEAENSILDISGFSKQYNCAFIWQKDGVKKLNLYLIINYFKGGKLRFKKIKPEAFEANRFYTVINKKSGEIVPMEVNFNFDDPNLIILPLAFGKRQGREFIWNDLLSLETGSLKLANGRVIEKTLYNRRTRQDEPALFVALTFERREVLDSSNIKTPMNLIGVDRGENIPAVIALTDPEGCPLSRFKDSLGNPTHILRIRESYKEKQRTIQAKKEVEQRRAGGYSRKYASKAKNLADDMVRNTARDLLYYAVTQDAMLIFENLSRGFGRQGKRTFMAERQYTRMEDWLTAKLAYEGLPSKTYLSKTLAQYTSKTCSNCGFTITSADYDRVLEKLKKTATGWMTTINGKELKVEGQITYYNRYKRQNVVKDLSVELDRLSEESVNNDISSWTKGRSGEALSLLKKRFSHRPVQEKFVCLNCGFETHADEQAALNIARSWLFLRSQEYKKYQTNKTTGNTDKRAFVETWQSFYRKKLKEVWKPAV

SEQ ID NO: 37774 - protein, 979 aa, synthetic construct
  REGION 1..979: note = engineered CasX variant
QEIKRINKIRRRLVKDSNTKKAGKTGPMKTLLVRVMTPDLRERLENLRKKPENIPQPISNTSRANLNKLLTDYTEMKKAILHVYWEEFQKDPVGLMSRVAQPASKKIDQNKLKPEMDEKGNLTTAGFACSQCGQPLFVYKLEQVSEKGKAYTNYFGRCNVAEHEKLILLAQLKPEKDSDEAVTYSLGKFGQRALDFYSIHVTKESTHPVKPLAQIAGNRYASVPVGKALSDACMGTIASFLSKYQDIIIEHQKVVKGNQKRLESLRELAGKENLEYPSVTLPPQPHTKEGVDAYNEVIARVRMWVNLNLWQKLKLSRDDAKPLLRLKGFPSFPLVERQANEVDWWDMVCNVKKLINEKKEDGKVFWQNLAGYKRQEALRPYLSSEEDRKKGKKFARYQLGDLLLHLEKKHGEDWGKVYDEAWERIDKKVEGLSKHIKLEEERRSEDAQSKAALTDWLRAKASFVIEGLKEADKDEFCRCELKLQKWYGDLRGKPFAIEAENSILDISGFSKQYNCAFIWQKDGVKKLNLYLIINYFKGGKLRFKKIKPEAFEANRFYTVINKKSGEIVPMEVNFNFDDPNLIILPLAFGKRQGREFIWNDLLSLETGSLKLANGRVIEKTLYNRRTRQDEPALFVALTFERREVLDSSNIKTPMNLIGVDRGENIPAVIALTDPEGCPLSRFKDSLGNPTHILRIRESYKEKQRTIQAKKEVEQRRAGGYSRKYASKAKNLADDMVRNTARDLLYYAVTQDAMLIFENLSRGFGRQGKRTFMAERQYTRMEDWLTAKLAYEGLPSKTYLSKTLAQYTSKTCSNCGFTITSADYDRVLEKLKKTATGWMTTINGKELKVEGQITYYNRYKRQNVVKDLSVELDRLSEESVNNDISSWTKGRSGEALSLLKKRFSHRPVQEKFVCLNCGFETHADEQAALNIARSWLFLRSQEYKKYQTNKTTGNTDKRAFVETWQSFYRKKLKEVWKPAV

SEQ ID NO: 37775 - protein, 979 aa, synthetic construct
  REGION 1..979: note = engineered CasX variant
QEIKRINKIRRRLVKDSNTKKAGKTGPMKTLLVRVMTPDLRERLENLRKKPENIPQPISNTSRANLNKLLTDYTEMKKAILHVYWEEFQKDPVGLMSRVAQPASKKIDQNKLKPEMDEKGNLTTAGFACSQCGQPLFVYKLEQVSEKGKAYTNYFGRCNVAEHEKLIKLAQLKPEKDSDEAVTYSLGKFGQRALDFYSIHVTKESTHPVKPLAQIAGNRYASGPVGKALSDACMGTIASFLSKYQDIIIEHQKVVKGNQKRLESLRELAGKENLEYPSVTLPPQPHTKEGVDAYNEVIARVRMWVNLNLWQKLKLSRDDAKPLLRLKGFPSFPLVERQANEVDWWDMVCNVKKLINEKKEDGKVFWQNLAGYKRQEALRPYLSSEEDRKKGKKFARYQLGDLLLHLEKKHGEDWGKVYDEAWERIDKKVEGLSKHIKLEEERRSEDAQSKAALTDWLRAKASFVIEGLKEADKDEFCRCELKLQKWYGDLRGKPFAIEAENSILDISGFSKQYNCAFIWQKDGVKKLNLYLIINYFKGGKLRFKKIKPEAFEANRFYTVINKKSGEIVPMEVNFNFDDPNLIILPLAFGKRQGREFIWNDLLSLETGSLKLANGRVIEKTLYNRRTRQDEPALFVALTFERREVLDSSNIKTPMNLIGVDRGENIPAVIALTDPEGCPLSRFKDSLGNPTHILRIRESYKEKQRTIQAKKEVEQRRAGGYSRKYASKAKNLADDMVRNTARDLLYYAVTQDAMLIFENLSRGFGRQGKRTFMAERQYTRMEDWLTAKLAYEGLPSKTYLSKTLAQYTSKTCSNCGFTITSADYDRVLEKLKKTATGWMTTINGKELKVEGQITYYNRYKRQNVVKDLSVELDRLSEESVNNDISSWTKGRSGEALSLLKKRFSHRPVQEKFVCLNCGFETHADEQAALNIARSWLFLRSQEYKKYQTNKTTGNTDKRAFVETWQSFYRKKLKEVWKPAV

SEQ ID NO: 37776 - protein, 978 aa, synthetic construct
  REGION 1..978: note = engineered CasX variant
QEIKRINKIRRRLVKDSNTKKAGKTGPMKTLLVRVMTPDLRERLENLRKKPENIPQPISNTSRANLNKLLTDYTEMKKAILHVYWEEFQKDPVGLMSRVAQPASKKIDQNKLKPEMDEKGNLTTAGFACSQCGQPLFVYKLEQVSEKGKAYTNYFGRCNVAEHEKLILLAQLKPEKDSDEAVTYSLGKFGQRALDFYSIHVTKESTHPVKPLAQIAGNRYASPVGKALSDACMGTIASFLSKYQDIIIEHQKVVKGNQKRLESLRELAGKENLEYPSVTLPPQPHTKEGVDAYNEVIARVRMWVNLNLWQKLKLSRDDAKPLLRLKGFPSFPLVERQANEVDWWDMVCNVKKLINEKKEDGKVFWQNLAGYKRQEALRPYLSSEEDRKKGKKFARYQLGDLLLHLEKKHGEDWGKVYDEAWERIDKKVEGLSKHIKLEEERRSEDAQSKAALTDWLRAKASFVIEGLKEADKDEFCRCELKLQKWYGDLRGKPFAIEAENSILDISGFSKQYNCAFIWQKDGVKKLNLYLIINYFKGGKLRFKKIKPEAFEANRFYTVINKKSGEIVPMEVNFNFDDPNLIILPLAFGKRQGREFIWNDLLSLETGSLKLANGRVIEKTLYNRRTRQDEPALFVALTFERREVLDSSNIKTPMNLIGVDRGENIPAVIALTDPEGCPLSRFKDSLGNPTHILRIRESYKEKQRTIQAKKEVEQRRAGGYSRKYASKAKNLADDMVRNTARDLLYYAVTQDAMLIFENLSRGFGRQGKRTFMAERQYTRMEDWLTAKLAYEGLPSKTYLSKTLAQYTSKTCSNCGFTITSADYDRVLEKLKKTATGWMTTINGKELKVEGQITYYNRYKRQNVVKDLSVELDRLSEESVNNDISSWTKGRSGEALSLLKKRFSHRPVQEKFVCLNCGFETHADEQAALNIARSWLFLRSQEYKKYQTNKTTGNTDKRAFVETWQSFYRKKLKEVWKPAV

SEQ ID NO: 37777 - protein, 979 aa, synthetic construct
  REGION 1..979: note = engineered CasX variant
QEIKRINKIRRRLVKDSNTKKAGKTGPMKTLLVRVMTPDLRERLENLRKKPENIPQPISNTSRANLNKLLTDYTEMKKAILHVYWEEFQKDPVGLMSRVAQPASKKIDQNKLKPEMDEKGNLTTAGFACSQCGQPLFVYKLEQVSEKGKAYTNYFGRCNVAEHEKLILLAQLKPEKDSDEAVTYSLGKFGQRALDFYSIHVTKESTHPVKPLAQIAGNRYASYPVGKALSDACMGTIASFLSKYQDIIIEHQKVVKGNQKRLESLRELAGKENLEYPSVTLPPQPHTKEGVDAYNEVIARVRMWVNLNLWQKLKLSRDDAKPLLRLKGFPSFPLVERQANEVDWWDMVCNVKKLINEKKEDGKVFWQNLAGYKRQEALRPYLSSEEDRKKGKKFARYQLGDLLLHLEKKHGEDWGKVYDEAWERIDKKVEGLSKHIKLEEERRSEDAQSKAALTDWLRAKASFVIEGLKEADKDEFCRCELKLQKWYGDLRGKPFAIEAENSILDISGFSKQYNCAFIWQKDGVKKLNLYLIINYFKGGKLRFKKIKPEAFEANRFYTVINKKSGEIVPMEVNFNFDDPNLIILPLAFGKRQGREFIWNDLLSLETGSLKLANGRVIEKTLYNRRTRQDEPALFVALTFERREVLDSSNIKTPMNLIGVDRGENIPAVIALTDPEGCPLSRFKDSLGNPTHILRIGESYKEKQRTIQAKKEVEQRRAGGYSRKYASKAKNLADDMVRNTARDLLYYAVTQDAMLIFENLSRGFGRQGKRTFSAERQYTRMEDWLTAKLAYEGLPSKTYLSKTLAQYTSKTCSNCGFTITSADYDRVLEKLKKTATGWMTTINGKELKVEGQITYYNRYKRQNVVKDLSVELDRLSEESVNNDISSWTKGRSGEALSLLKKRFSHRPVQEKFVCLNCGFETHADEQAALNIARSWLFLRSQEYKKYQTNKTTGNTDKRAFVETWQSFYRKKLKEVWKPAV

SEQ ID NO: 37778 - protein, 979 aa, synthetic construct
  REGION 1..979: note = engineered CasX variant
QEIKRINKIRRRLVKDSNTKKAGKTGPMKTLLVRVMTPDLRERLENLRKKPENIPQPISNTSRANLNKLLTDYTEMKKAILHVYWEEFQKDPVGLMSRVAQPASKKIDQNKLKPEMDEKGNLTTAGFACSQCGQPLFVYKLEQVSEKGKAYTNYFGRCNVAEHEKLILLAQLKPEKDSDEAVTYSLGKFGQRALDFYSIHVTKESTHPVKPLAQIAGNRYASHPVGKALSDACMGTIASFLSKYQDIIIEHQKVVKGNQKRLESLRELAGKENLEYPSVTLPPQPHTKEGVDAYNEVIARVRMWVNLNLWQKLKLSRDDAKPLLRLKGFPSFPLVERQANEVDWWDMVCNVKKLINEKKEDGKVFWQNLAGYKRQEALRPYLSSEEDRKKGKKFARYQLGDLLLHLEKKHGEDWGKVYDEAWERIDKKVEGLSKHIKLEEERRSEDAQSKAALTDWLRAKASFVIEGLKEADKDEFCRCELKLQKWYGDLRGKPFAIEAENSILDISGFSKQYNCAFIWQKDGVKKLNLYLIINYFKGGKLRFKKIKPEAFEANRFYTVINKKSGEIVPMEVNFNFDDPNLIILPLAFGKRQGREFIWNDLLSLETGSLKLANGRVIEKTLYNRRTRQDEPALFVALTFERREVLDSSNIKTPMNLIGVDRGENIPAVIALTDPEGCPLSRFKDSLGNPTHILRIGESYKEKQRTIQAKKEVEQRRAGGYSRKYASKAKNLADDMVRNTARDLLYYAVTQDAMLIFENLSRGFGRQGKRTFSAERQYTRMEDWLTAKLAYEGLPSKTYLSKTLAQYTSKTCSNCGFTITSADYDRVLEKLKKTATGWMTTINGKELKVEGQITYYNRYKRQNVVKDLSVELDRLSEESVNNDISSWTKGRSGEALSLLKKRFSHRPVQEKFVCLNCGFETHADEQAALNIARSWLFLRSQEYKKYQTNKTTGNTDKRAFVETWQSFYRKKLKEVWKPAV

SEQ ID NO: 37779 - protein, 979 aa, synthetic construct
  REGION 1..979: note = engineered CasX variant
QEIKRINKIRRRLVKDSNTKKAGKTGPMKTLLVRVMTPDLRERLENLRKKPENIPQPISNTSRANLNKLLTDYTEMKKAILHVYWEEFQKDPVGLMSRVAQPASKKIDQNKLKPEMDEKGNLTTAGFACSQCGQPLFVYKLEQVSEKGKAYTNYFGRCNVAEHEKLILLAQLKPEKDSDEAVTYSLGKFGQRALDFYSIHVTKESTHPVKPLAQIAGNRYASSPVGKALSDACMGTIASFLSKYQDIIIEHQKVVKGNQKRLESLRELAGKENLEYPSVTLPPQPHTKEGVDAYNEVIARVRMWVNLNLWQKLKLSRDDAKPLLRLKGFPSFPLVERQANEVDWWDMVCNVKKLINEKKEDGKVFWQNLAGYKRQEALRPYLSSEEDRKKGKKFARYQLGDLLLHLEKKHGEDWGKVYDEAWERIDKKVEGLSKHIKLEEERRSEDAQSKAALTDWLRAKASFVIEGLKEADKDEFCRCELKLQKWYGDLRGKPFAIEAENSILDISGFSKQYNCAFIWQKDGVKKLNLYLIINYFKGGKLRFKKIKPEAFEANRFYTVINKKSGEIVPMEVNFNFDDPNLIILPLAFGKRQGREFIWNDLLSLETGSLKLANGRVIEKTLYNRRTRQDEPALFVALTFERREVLDSSNIKTPMNLIGVDRGENIPAVIALTDPEGCPLSRFKDSLGNPTHILRIGESYKEKQRTIQAKKEVEQRRAGGYSRKYASKAKNLADDMVRNTARDLLYYAVTQDAMLIFENLSRGFGRQGKRTFSAERQYTRMEDWLTAKLAYEGLPSKTYLSKTLAQYTSKTCSNCGFTITSADYDRVLEKLKKTATGWMTTINGKELKVEGQITYYNRYKRQNVVKDLSVELDRLSEESVNNDISSWTKGRSGEALSLLKKRFSHRPVQEKFVCLNCGFETHADEQAALNIARSWLFLRSQEYKKYQTNKTTGNTDKRAFVETWQSFYRKKLKEVWKPAV

SEQ ID NO: 37780 - protein, 979 aa, synthetic construct
  REGION 1..979: note = engineered CasX variant
QEIKRINKIRRRLVKDSNTKKAGKTGPMKTLLVRVMTPDLRERLENLRKKPENIPQPISNTSRANLNKLLTDYTEMKKAILHVYWEEFQKDPVGLMSRVAQPASKKIDQNKLKPEMDEKGNLTTAGFACSQCGQPLFVYKLEQVSEKGKAYTNYFGRCNVAEHEKLILLAQLKPEKDSDEAVTYSLGKFGQRALDFYSIHVTKESTHPVKPLAQIAGNRYASTPVGKALSDACMGTIASFLSKYQDIIIEHQKVVKGNQKRLESLRELAGKENLEYPSVTLPPQPHTKEGVDAYNEVIARVRMWVNLNLWQKLKLSRDDAKPLLRLKGFPSFPLVERQANEVDWWDMVCNVKKLINEKKEDGKVFWQNLAGYKRQEALRPYLSSEEDRKKGKKFARYQLGDLLLHLEKKHGEDWGKVYDEAWERIDKKVEGLSKHIKLEEERRSEDAQSKAALTDWLRAKASFVIEGLKEADKDEFCRCELKLQKWYGDLRGKPFAIEAENSILDISGFSKQYNCAFIWQKDGVKKLNLYLIINYFKGGKLRFKKIKPEAFEANRFYTVINKKSGEIVPMEVNFNFDDPNLIILPLAFGKRQGREFIWNDLLSLETGSLKLANGRVIEKTLYNRRTRQDEPALFVALTFERREVLDSSNIKTPMNLIGVDRGENIPAVIALTDPEGCPLSRFKDSLGNPTHILRIGESYKEKQRTIQAKKEVEQRRAGGYSRKYASKAKNLADDMVRNTARDLLYYAVTQDAMLIFENLSRGFGRQGKRTFSAERQYTRMEDWLTAKLAYEGLPSKTYLSKTLAQYTSKTCSNCGFTITSADYDRVLEKLKKTATGWMTTINGKELKVEGQITYYNRYKRQNVVKDLSVELDRLSEESVNNDISSWTKGRSGEALSLLKKRFSHRPVQEKFVCLNCGFETHADEQAALNIARSWLFLRSQEYKKYQTNKTTGNTDKRAFVETWQSFYRKKLKEVWKPAV

SEQ ID NO: 37781 - protein, 979 aa, synthetic construct
  REGION 1..979: note = engineered CasX variant
QEIKRINKIRRRLVKDSNTKKAGKTGPMKTLLVRVMTPDLRERLENLRKKPENIPQPISNTSRANLNKLLTDYTEMKKAILHVYWEEFQKDPVGLMSRVAQPASKKIDQNKLKPEMDEKGNLTTAGFACSQCGQPLFVYKLEQVSEKGKAYTNYFGRCNVAEHEKLILLAQLKPEKDSDEAVTYSLGKFGQRALDFYSIHVTKESTHPVKPLAQIAGNRYASAPVGKALSDACMGTIASFLSKYQDIIIEHQKVVKGNQKRLESLRELAGKENLEYPSVTLPPQPHTKEGVDAYNEVIARVRMWVNLNLWQKLKLSRDDAKPLLRLKGFPSFPLVERQANEVDWWDMVCNVKKLINEKKEDGKVFWQNLAGYKRQEALRPYLSSEEDRKKGKKFARYQLGDLLLHLEKKHGEDWGKVYDEAWERIDKKVEGLSKHIKLEEERRSEDAQSKAALTDWLRAKASFVIEGLKEADKDEFCRCELKLQKWYGDLRGKPFAIEAENSILDISGFSKQYNCAFIWQKDGVKKLNLYLIINYFKGGKLRFKKIKPEAFEANRFYTVINKKSGEIVPMEVNFNFDDPNLIILPLAFGKRQGREFIWNDLLSLETGSLKLANGRVIEKTLYNRRTRQDEPALFVALTFERREVLDSSNIKTPMNLIGVDRGENIPAVIALTDPEGCPLSRFKDSLGNPTHILRIGESYKEKQRTIQAKKEVEQRRAGGYSRKYASKAKNLADDMVRNTARDLLYYAVTQDAMLIFENLSRGFGRQGKRTFSAERQYTRMEDWLTAKLAYEGLPSKTYLSKTLAQYTSKTCSNCGFTITSADYDRVLEKLKKTATGWMTTINGKELKVEGQITYYNRYKRQNVVKDLSVELDRLSEESVNNDISSWTKGRSGEALSLLKKRFSHRPVQEKFVCLNCGFETHADEQAALNIARSWLFLRSQEYKKYQTNKTTGNTDKRAFVETWQSFYRKKLKEVWKPAV

SEQ ID NO: 37782 - protein, 979 aa, synthetic construct
  REGION 1..979: note = engineered CasX variant
QEIKRINKIRRRLVKDSNTKKAGKTGPMKTLLVRVMTPDLRERLENLRKKPENIPQPISNTSRANLNKLLTDYTEMKKAILHVYWEEFQKDPVGLMSRVAQPASKKIDQNKLKPEMDEKGNLTTAGFACSQCGQPLFVYKLEQVSEKGKAYTNYFGRCNVAEHEKLILLAQLKPEKDSDEAVTYSLGKFGQRALDFYSIHVTKESTHPVKPLAQIAGNRYASVPVGKALSDACMGTIASFLSKYQDIIIEHQKVVKGNQKRLESLRELAGKENLEYPSVTLPPQPHTKEGVDAYNEVIARVRMWVNLNLWQKLKLSRDDAKPLLRLKGFPSFPLVERQANEVDWWDMVCNVKKLINEKKEDGKVFWQNLAGYKRQEALRPYLSSEEDRKKGKKFARYQLGDLLLHLEKKHGEDWGKVYDEAWERIDKKVEGLSKHIKLEEERRSEDAQSKAALTDWLRAKASFVIEGLKEADKDEFCRCELKLQKWYGDLRGKPFAIEAENSILDISGFSKQYNCAFIWQKDGVKKLNLYLIINYFKGGKLRFKKIKPEAFEANRFYTVINKKSGEIVPMEVNFNFDDPNLIILPLAFGKRQGREFIWNDLLSLETGSLKLANGRVIEKTLYNRRTRQDEPALFVALTFERREVLDSSNIKTPMNLIGVDRGENIPAVIALTDPEGCPLSRFKDSLGNPTHILRIGESYKEKQRTIQAKKEVEQRRAGGYSRKYASKAKNLADDMVRNTARDLLYYAVTQDAMLIFENLSRGFGRQGKRTFSAERQYTRMEDWLTAKLAYEGLPSKTYLSKTLAQYTSKTCSNCGFTITSADYDRVLEKLKKTATGWMTTINGKELKVEGQITYYNRYKRQNVVKDLSVELDRLSEESVNNDISSWTKGRSGEALSLLKKRFSHRPVQEKFVCLNCGFETHADEQAALNIARSWLFLRSQEYKKYQTNKTTGNTDKRAFVETWQSFYRKKLKEVWKPAV

SEQ ID NO: 37783 - protein, 979 aa, synthetic construct
  REGION 1..979: note = engineered CasX variant
QEIKRINKIRRRLVKDSNTKKAGKTGPMKTLLVRVMTPDLRERLENLRKKPENIPQPISNTSRANLNKLLTDYTEMKKAILHVYWEEFQKDPVGLMSRVAQPASKKIDQNKLKPEMDEKGNLTTAGFACSQCGQPLFVYKLEQVSEKGKAYTNYFGRCNVAEHEKLIKLAQLKPEKDSDEAVTYSLGKFGQRALDFYSIHVTKESTHPVKPLAQIAGNRYASGPVGKALSDACMGTIASFLSKYQDIIIEHQKVVKGNQKRLESLRELAGKENLEYPSVTLPPQPHTKEGVDAYNEVIARVRMWVNLNLWQKLKLSRDDAKPLLRLKGFPSFPLVERQANEVDWWDMVCNVKKLINEKKEDGKVFWQNLAGYKRQEALRPYLSSEEDRKKGKKFARYQLGDLLLHLEKKHGEDWGKVYDEAWERIDKKVEGLSKHIKLEEERRSEDAQSKAALTDWLRAKASFVIEGLKEADKDEFCRCELKLQKWYGDLRGKPFAIEAENSILDISGFSKQYNCAFIWQKDGVKKLNLYLIINYFKGGKLRFKKIKPEAFEANRFYTVINKKSGEIVPMEVNFNFDDPNLIILPLAFGKRQGREFIWNDLLSLETGSLKLANGRVIEKTLYNRRTRQDEPALFVALTFERREVLDSSNIKTPMNLIGVDRGENIPAVIALTDPEGCPLSRFKDSLGNPTHILRIGESYKEKQRTIQAKKEVEQRRAGGYSRKYASKAKNLADDMVRNTARDLLYYAVTQDAMLIFENLSRGFGRQGKRTFSAERQYTRMEDWLTAKLAYEGLPSKTYLSKTLAQYTSKTCSNCGFTITSADYDRVLEKLKKTATGWMTTINGKELKVEGQITYYNRYKRQNVVKDLSVELDRLSEESVNNDISSWTKGRSGEALSLLKKRFSHRPVQEKFVCLNCGFETHADEQAALNIARSWLFLRSQEYKKYQTNKTTGNTDKRAFVETWQSFYRKKLKEVWKPAV

SEQ ID NO: 37784 - protein, 978 aa, synthetic construct
  REGION 1..978: note = engineered CasX variant
QEIKRINKIRRRLVKDSNTKKAGKTGPMKTLLVRVMTPDLRERLENLRKKPENIPQPISNTSRANLNKLLTDYTEMKKAILHVYWEEFQKDPVGLMSRVAQPASKKIDQNKLKPEMDEKGNLTTAGFACSQCGQPLFVYKLEQVSEKGKAYTNYFGRCNVAEHEKLILLAQLKPEKDSDEAVTYSLGKFGQRALDFYSIHVTKESTHPVKPLAQIAGNRYASPVGKALSDACMGTIASFLSKYQDIIIEHQKVVKGNQKRLESLRELAGKENLEYPSVTLPPQPHTKEGVDAYNEVIARVRMWVNLNLWQKLKLSRDDAKPLLRLKGFPSFPLVERQANEVDWWDMVCNVKKLINEKKEDGKVFWQNLAGYKRQEALRPYLSSEEDRKKGKKFARYQLGDLLLHLEKKHGEDWGKVYDEAWERIDKKVEGLSKHIKLEEERRSEDAQSKAALTDWLRAKASFVIEGLKEADKDEFCRCELKLQKWYGDLRGKPFAIEAENSILDISGFSKQYNCAFIWQKDGVKKLNLYLIINYFKGGKLRFKKIKPEAFEANRFYTVINKKSGEIVPMEVNFNFDDPNLIILPLAFGKRQGREFIWNDLLSLETGSLKLANGRVIEKTLYNRRTRQDEPALFVALTFERREVLDSSNIKTPMNLIGVDRGENIPAVIALTDPEGCPLSRFKDSLGNPTHILRIGESYKEKQRTIQAKKEVEQRRAGGYSRKYASKAKNLADDMVRNTARDLLYYAVTQDAMLIFENLSRGFGRQGKRTFSAERQYTRMEDWLTAKLAYEGLPSKTYLSKTLAQYTSKTCSNCGFTITSADYDRVLEKLKKTATGWMTTINGKELKVEGQITYYNRYKRQNVVKDLSVELDRLSEESVNNDISSWTKGRSGEALSLLKKRFSHRPVQEKFVCLNCGFETHADEQAALNIARSWLFLRSQEYKKYQTNKTTGNTDKRAFVETWQSFYRKKLKEVWKPAV

SEQ ID NO: 37785 - protein, 979 aa, synthetic construct
  REGION 1..979: note = engineered CasX variant
QEIKRINKIRRRLVKDSNTKKAGKTGPMKTLLVRVMTPDLRERLENLRKKPENIPQPISNTSRANLNKLLTDYTEMKKAILHVYWEEFQKDPVGLMSRVAQPASKKIDQNKLKPEMDEKGNLTTAGFACSQCGQPLFVYKLEQVSEKGKAYTNYFGRCNVAEHEKLILLAQLKPEKDSDEAVTYSLGKFGQRALDFYSIHVTKESTHPVKPLAQIAGNRYASYPVGKALSDACMGTIASFLSKYQDIIIEHQKVVKGNQKRLESLRELAGKENLEYPSVTLPPQPHTKEGVDAYNEVIARVRMWVNLNLWQKLKLSRDDAKPLLRLKGFPSFPLVERQANEVDWWDMVCNVKKLINEKKEDGKVFWQNLAGYKRQEALRPYLSSEEDRKKGKKFARYQLGDLLLHLEKKHGEDWGKVYDEAWERIDKKVEGLSKHIKLEEERRSEDAQSKAALTDWLRAKASFVIEGLKEADKDEFCRCELKLQKWYGDLRGKPFAIEAENSILDISGFSKQYNCAFIWQKDGVKKLNLYLIINYFKGGKLRFKKIKPEAFEANRFYTVINKKSGEIVPMEVNFNFDDPNLIILPLAFGKRQGREFIWNDLLSLETGSLKLANGRVIEKTLYNRRTRQDEPALFVALTFERREVLDSSNIKTPMNLIGVDRGENIPAVIALTDPEGCPLSRFKDSLGNPTHILRIGESYKEKQRTIQAKKEVEQRRAGGYSRKYASKAKNLADDMVRNTARDLLYYAVTQDAMLIFENLSRGFGRQGKRTFMAERQYTRMEDWLTAKLAYEGLPSKTYLSKTLAQYTSKTCSNCGFTITSADYDRVLEKLKKTATGWMTTINGKELKVEGQITYYNRYKRQNVVKDLSVELDRLSEESVNNDISSWDKGRSGEALSLLKKRFSHRPVQEKFVCLNCGFETHADEQAALNIARSWLFLRSQEYKKYQTNKTTGNTDKRAFVETWQSFYRKKLKEVWKPAV

SEQ ID NO: 37786 - protein, 979 aa, synthetic construct
  REGION 1..979: note = engineered CasX variant
QEIKRINKIRRRLVKDSNTKKAGKTGPMKTLLVRVMTPDLRERLENLRKKPENIPQPISNTSRANLNKLLTDYTEMKKAILHVYWEEFQKDPVGLMSRVAQPASKKIDQNKLKPEMDEKGNLTTAGFACSQCGQPLFVYKLEQVSEKGKAYTNYFGRCNVAEHEKLILLAQLKPEKDSDEAVTYSLGKFGQRALDFYSIHVTKESTHPVKPLAQIAGNRYASHPVGKALSDACMGTIASFLSKYQDIIIEHQKVVKGNQKRLESLRELAGKENLEYPSVTLPPQPHTKEGVDAYNEVIARVRMWVNLNLWQKLKLSRDDAKPLLRLKGFPSFPLVERQANEVDWWDMVCNVKKLINEKKEDGKVFWQNLAGYKRQEALRPYLSSEEDRKKGKKFARYQLGDLLLHLEKKHGEDWGKVYDEAWERIDKKVEGLSKHIKLEEERRSEDAQSKAALTDWLRAKASFVIEGLKEADKDEFCRCELKLQKWYGDLRGKPFAIEAENSILDISGFSKQYNCAFIWQKDGVKKLNLYLIINYFKGGKLRFKKIKPEAFEANRFYTVINKKSGEIVPMEVNFNFDDPNLIILPLAFGKRQGREFIWNDLLSLETGSLKLANGRVIEKTLYNRRTRQDEPALFVALTFERREVLDSSNIKTPMNLIGVDRGENIPAVIALTDPEGCPLSRFKDSLGNPTHILRIGESYKEKQRTIQAKKEVEQRRAGGYSRKYASKAKNLADDMVRNTARDLLYYAVTQDAMLIFENLSRGFGRQGKRTFMAERQYTRMEDWLTAKLAYEGLPSKTYLSKTLAQYTSKTCSNCGFTITSADYDRVLEKLKKTATGWMTTINGKELKVEGQITYYNRYKRQNVVKDLSVELDRLSEESVNNDISSWDKGRSGEALSLLKKRFSHRPVQEKFVCLNCGFETHADEQAALNIARSWLFLRSQEYKKYQTNKTTGNTDKRAFVETWQSFYRKKLKEVWKPAV

SEQ ID NO: 37787 - protein, 979 aa, synthetic construct
  REGION 1..979: note = engineered CasX variant
QEIKRINKIRRRLVKDSNTKKAGKTGPMKTLLVRVMTPDLRERLENLRKKPENIPQPISNTSRANLNKLLTDYTEMKKAILHVYWEEFQKDPVGLMSRVAQPASKKIDQNKLKPEMDEKGNLTTAGFACSQCGQPLFVYKLEQVSEKGKAYTNYFGRCNVAEHEKLILLAQLKPEKDSDEAVTYSLGKFGQRALDFYSIHVTKESTHPVKPLAQIAGNRYASSPVGKALSDACMGTIASFLSKYQDIIIEHQKVVKGNQKRLESLRELAGKENLEYPSVTLPPQPHTKEGVDAYNEVIARVRMWVNLNLWQKLKLSRDDAKPLLRLKGFPSFPLVERQANEVDWWDMVCNVKKLINEKKEDGKVFWQNLAGYKRQEALRPYLSSEEDRKKGKKFARYQLGDLLLHLEKKHGEDWGKVYDEAWERIDKKVEGLSKHIKLEEERRSEDAQSKAALTDWLRAKASFVIEGLKEADKDEFCRCELKLQKWYGDLRGKPFAIEAENSILDISGFSKQYNCAFIWQKDGVKKLNLYLIINYFKGGKLRFKKIKPEAFEANRFYTVINKKSGEIVPMEVNFNFDDPNLIILPLAFGKRQGREFIWNDLLSLETGSLKLANGRVIEKTLYNRRTRQDEPALFVALTFERREVLDSSNIKTPMNLIGVDRGENIPAVIALTDPEGCPLSRFKDSLGNPTHILRIGESYKEKQRTIQAKKEVEQRRAGGYSRKYASKAKNLADDMVRNTARDLLYYAVTQDAMLIFENLSRGFGRQGKRTFMAERQYTRMEDWLTAKLAYEGLPSKTYLSKTLAQYTSKTCSNCGFTITSADYDRVLEKLKKTATGWMTTINGKELKVEGQITYYNRYKRQNVVKDLSVELDRLSEESVNNDISSWDKGRSGEALSLLKKRFSHRPVQEKFVCLNCGFETHADEQAALNIARSWLFLRSQEYKKYQTNKTTGNTDKRAFVETWQSFYRKKLKEVWKPAV

SEQ ID NO: 37788 - protein, 979 aa, synthetic construct
  REGION 1..979: note = engineered CasX variant
QEIKRINKIRRRLVKDSNTKKAGKTGPMKTLLVRVMTPDLRERLENLRKKPENIPQPISNTSRANLNKLLTDYTEMKKAILHVYWEEFQKDPVGLMSRVAQPASKKIDQNKLKPEMDEKGNLTTAGFACSQCGQPLFVYKLEQVSEKGKAYTNYFGRCNVAEHEKLILLAQLKPEKDSDEAVTYSLGKFGQRALDFYSIHVTKESTHPVKPLAQIAGNRYASTPVGKALSDACMGTIASFLSKYQDIIIEHQKVVKGNQKRLESLRELAGKENLEYPSVTLPPQPHTKEGVDAYNEVIARVRMWVNLNLWQKLKLSRDDAKPLLRLKGFPSFPLVERQANEVDWWDMVCNVKKLINEKKEDGKVFWQNLAGYKRQEALRPYLSSEEDRKKGKKFARYQLGDLLLHLEKKHGEDWGKVYDEAWERIDKKVEGLSKHIKLEEERRSEDAQSKAALTDWLRAKASFVIEGLKEADKDEFCRCELKLQKWYGDLRGKPFAIEAENSILDISGFSKQYNCAFIWQKDGVKKLNLYLIINYFKGGKLRFKKIKPEAFEANRFYTVINKKSGEIVPMEVNFNFDDPNLIILPLAFGKRQGREFIWNDLLSLETGSLKLANGRVIEKTLYNRRTRQDEPALFVALTFERREVLDSSNIKTPMNLIGVDRGENIPAVIALTDPEGCPLSRFKDSLGNPTHILRIGESYKEKQRTIQAKKEVEQRRAGGYSRKYASKAKNLADDMVRNTARDLLYYAVTQDAMLIFENLSRGFGRQGKRTFMAERQYTRMEDWLTAKLAYEGLPSKTYLSKTLAQYTSKTCSNCGFTITSADYDRVLEKLKKTATGWMTTINGKELKVEGQITYYNRYKRQNVVKDLSVELDRLSEESVNNDISSWDKGRSGEALSLLKKRFSHRPVQEKFVCLNCGFETHADEQAALNIARSWLFLRSQEYKKYQTNKTTGNTDKRAFVETWQSFYRKKLKEVWKPAV

SEQ ID NO: 37789 - protein, 979 aa, synthetic construct
  REGION 1..979: note = engineered CasX variant
QEIKRINKIRRRLVKDSNTKKAGKTGPMKTLLVRVMTPDLRERLENLRKKPENIPQPISNTSRANLNKLLTDYTEMKKAILHVYWEEFQKDPVGLMSRVAQPASKKIDQNKLKPEMDEKGNLTTAGFACSQCGQPLFVYKLEQVSEKGKAYTNYFGRCNVAEHEKLILLAQLKPEKDSDEAVTYSLGKFGQRALDFYSIHVTKESTHPVKPLAQIAGNRYASAPVGKALSDACMGTIASFLSKYQDIIIEHQKVVKGNQKRLESLRELAGKENLEYPSVTLPPQPHTKEGVDAYNEVIARVRMWVNLNLWQKLKLSRDDAKPLLRLKGFPSFPLVERQANEVDWWDMVCNVKKLINEKKEDGKVFWQNLAGYKRQEALRPYLSSEEDRKKGKKFARYQLGDLLLHLEKKHGEDWGKVYDEAWERIDKKVEGLSKHIKLEEERRSEDAQSKAALTDWLRAKASFVIEGLKEADKDEFCRCELKLQKWYGDLRGKPFAIEAENSILDISGFSKQYNCAFIWQKDGVKKLNLYLIINYFKGGKLRFKKIKPEAFEANRFYTVINKKSGEIVPMEVNFNFDDPNLIILPLAFGKRQGREFIWNDLLSLETGSLKLANGRVIEKTLYNRRTRQDEPALFVALTFERREVLDSSNIKTPMNLIGVDRGENIPAVIALTDPEGCPLSRFKDSLGNPTHILRIGESYKEKQRTIQAKKEVEQRRAGGYSRKYASKAKNLADDMVRNTARDLLYYAVTQDAMLIFENLSRGFGRQGKRTFMAERQYTRMEDWLTAKLAYEGLPSKTYLSKTLAQYTSKTCSNCGFTITSADYDRVLEKLKKTATGWMTTINGKELKVEGQITYYNRYKRQNVVKDLSVELDRLSEESVNNDISSWDKGRSGEALSLLKKRFSHRPVQEKFVCLNCGFETHADEQAALNIARSWLFLRSQEYKKYQTNKTTGNTDKRAFVETWQSFYRKKLKEVWKPAV

SEQ ID NO: 37790 - protein, 979 aa, synthetic construct
  REGION 1..979: note = engineered CasX variant
QEIKRINKIRRRLVKDSNTKKAGKTGPMKTLLVRVMTPDLRERLENLRKKPENIPQPISNTSRANLNKLLTDYTEMKKAILHVYWEEFQKDPVGLMSRVAQPASKKIDQNKLKPEMDEKGNLTTAGFACSQCGQPLFVYKLEQVSEKGKAYTNYFGRCNVAEHEKLILLAQLKPEKDSDEAVTYSLGKFGQRALDFYSIHVTKESTHPVKPLAQIAGNRYASVPVGKALSDACMGTIASFLSKYQDIIIEHQKVVKGNQKRLESLRELAGKENLEYPSVTLPPQPHTKEGVDAYNEVIARVRMWVNLNLWQKLKLSRDDAKPLLRLKGFPSFPLVERQANEVDWWDMVCNVKKLINEKKEDGKVFWQNLAGYKRQEALRPYLSSEEDRKKGKKFARYQLGDLLLHLEKKHGEDWGKVYDEAWERIDKKVEGLSKHIKLEEERRSEDAQSKAALTDWLRAKASFVIEGLKEADKDEFCRCELKLQKWYGDLRGKPFAIEAENSILDISGFSKQYNCAFIWQKDGVKKLNLYLIINYFKGGKLRFKKIKPEAFEANRFYTVINKKSGEIVPMEVNFNFDDPNLIILPLAFGKRQGREFIWNDLLSLETGSLKLANGRVIEKTLYNRRTRQDEPALFVALTFERREVLDSSNIKTPMNLIGVDRGENIPAVIALTDPEGCPLSRFKDSLGNPTHILRIGESYKEKQRTIQAKKEVEQRRAGGYSRKYASKAKNLADDMVRNTARDLLYYAVTQDAMLIFENLSRGFGRQGKRTFMAERQYTRMEDWLTAKLAYEGLPSKTYLSKTLAQYTSKTCSNCGFTITSADYDRVLEKLKKTATGWMTTINGKELKVEGQITYYNRYKRQNVVKDLSVELDRLSEESVNNDISSWDKGRSGEALSLLKKRFSHRPVQEKFVCLNCGFETHADEQAALNIARSWLFLRSQEYKKYQTNKTTGNTDKRAFVETWQSFYRKKLKEVWKPAV

SEQ ID NO: 37791 - protein, 979 aa, synthetic construct
  REGION 1..979: note = engineered CasX variant
QEIKRINKIRRRLVKDSNTKKAGKTGPMKTLLVRVMTPDLRERLENLRKKPENIPQPISNTSRANLNKLLTDYTEMKKAILHVYWEEFQKDPVGLMSRVAQPASKKIDQNKLKPEMDEKGNLTTAGFACSQCGQPLFVYKLEQVSEKGKAYTNYFGRCNVAEHEKLIKLAQLKPEKDSDEAVTYSLGKFGQRALDFYSIHVTKESTHPVKPLAQIAGNRYASGPVGKALSDACMGTIASFLSKYQDIIIEHQKVVKGNQKRLESLRELAGKENLEYPSVTLPPQPHTKEGVDAYNEVIARVRMWVNLNLWQKLKLSRDDAKPLLRLKGFPSFPLVERQANEVDWWDMVCNVKKLINEKKEDGKVFWQNLAGYKRQEALRPYLSSEEDRKKGKKFARYQLGDLLLHLEKKHGEDWGKVYDEAWERIDKKVEGLSKHIKLEEERRSEDAQSKAALTDWLRAKASFVIEGLKEADKDEFCRCELKLQKWYGDLRGKPFAIEAENSILDISGFSKQYNCAFIWQKDGVKKLNLYLIINYFKGGKLRFKKIKPEAFEANRFYTVINKKSGEIVPMEVNFNFDDPNLIILPLAFGKRQGREFIWNDLLSLETGSLKLANGRVIEKTLYNRRTRQDEPALFVALTFERREVLDSSNIKTPMNLIGVDRGENIPAVIALTDPEGCPLSRFKDSLGNPTHILRIGESYKEKQRTIQAKKEVEQRRAGGYSRKYASKAKNLADDMVRNTARDLLYYAVTQDAMLIFENLSRGFGRQGKRTFMAERQYTRMEDWLTAKLAYEGLPSKTYLSKTLAQYTSKTCSNCGFTITSADYDRVLEKLKKTATGWMTTINGKELKVEGQITYYNRYKRQNVVKDLSVELDRLSEESVNNDISSWDKGRSGEALSLLKKRFSHRPVQEKFVCLNCGFETHADEQAALNIARSWLFLRSQEYKKYQTNKTTGNTDKRAFVETWQSFYRKKLKEVWKPAV

SEQ ID NO: 37792 - protein, 978 aa, synthetic construct
  REGION 1..978: note = engineered CasX variant
QEIKRINKIRRRLVKDSNTKKAGKTGPMKTLLVRVMTPDLRERLENLRKKPENIPQPISNTSRANLNKLLTDYTEMKKAILHVYWEEFQKDPVGLMSRVAQPASKKIDQNKLKPEMDEKGNLTTAGFACSQCGQPLFVYKLEQVSEKGKAYTNYFGRCNVAEHEKLILLAQLKPEKDSDEAVTYSLGKFGQRALDFYSIHVTKESTHPVKPLAQIAGNRYASPVGKALSDACMGTIASFLSKYQDIIIEHQKVVKGNQKRLESLRELAGKENLEYPSVTLPPQPHTKEGVDAYNEVIARVRMWVNLNLWQKLKLSRDDAKPLLRLKGFPSFPLVERQANEVDWWDMVCNVKKLINEKKEDGKVFWQNLAGYKRQEALRPYLSSEEDRKKGKKFARYQLGDLLLHLEKKHGEDWGKVYDEAWERIDKKVEGLSKHIKLEEERRSEDAQSKAALTDWLRAKASFVIEGLKEADKDEFCRCELKLQKWYGDLRGKPFAIEAENSILDISGFSKQYNCAFIWQKDGVKKLNLYLIINYFKGGKLRFKKIKPEAFEANRFYTVINKKSGEIVPMEVNFNFDDPNLIILPLAFGKRQGREFIWNDLLSLETGSLKLANGRVIEKTLYNRRTRQDEPALFVALTFERREVLDSSNIKTPMNLIGVDRGENIPAVIALTDPEGCPLSRFKDSLGNPTHILRIGESYKEKQRTIQAKKEVEQRRAGGYSRKYASKAKNLADDMVRNTARDLLYYAVTQDAMLIFENLSRGFGRQGKRTFMAERQYTRMEDWLTAKLAYEGLPSKTYLSKTLAQYTSKTCSNCGFTITSADYDRVLEKLKKTATGWMTTINGKELKVEGQITYYNRYKRQNVVKDLSVELDRLSEESVNNDISSWDKGRSGEALSLLKKRFSHRPVQEKFVCLNCGFETHADEQAALNIARSWLFLRSQEYKKYQTNKTTGNTDKRAFVETWQSFYRKKLKEVWKPAV

SEQ ID NO: 37793 - protein, 979 aa, synthetic construct
  REGION 1..979: note = engineered CasX variant
QEIKRINKIRRRLVKDSNTKKAGKTGPMKTLLVRVMTPDLRERLENLRKKPENIPQPISNTSRANLNKLLTDYTEMKKAILHVYWEEFQVDPVGLMSRVAQPASKKIDQNKLKPEMDEKGNLTTAGFACSQCGQPLFVYKLEQVSEKGKAYTNYFGRCNVAEHEKLILLAQLKPEKDSDEAVTYSLGKFGQRALDFYSIHVTKESTHPVKPLAQIAGNRYASYPVGKALSDACMGTIASFLSKYQDIIIEHQKVVKGNQKRLESLRELAGKENLEYPSVTLPPQPHTKEGVDAYNEVIARVRMWVNLNLWQKLKLSRDDAKPLLRLKGFPSFPLVERQANEVDWWDMVCNVKKLINEKKEDGKVFWQNLAGYKRQEALRPYLSSEEDRKKGKKFARYQLGDLLLHLEKKHGEDWGKVYDEAWERIDKKVEGLSKHIKLEEERRSEDAQSKAALTDWLRAKASFVIEGLKEADKDEFCRCELKLQKWYGDLRGKPFAIEAENSILDISGFSKQYNCAFIWQKDGVKKLNLYLIINYFKGGKLRFKKIKPEAFEANRFYTVINKKSGEIVPMEVNFNFDDPNLIILPLAFGKRQGREFIWNDLLSLETGSLKLANGRVIEKTLYNRRTRQDEPALFVALTFERREVLDSSNIKTPMNLIGVDRGENIPAVIALTDPEGCPLSRFKDSLGNPTHILRIGESYKEKQRTIQAKKEVEQRRAGGYSRKYASKAKNLADDMVRNTARDLLYYAVTQDAMLIFENLSRGFGRQGKRTFMAERQYTRMEDWLTAKLAYEGLPSKTYLSKTLAQYTSKTCSNCGFTITSADYDRVLEKLKKTATGWMTTINGKELKVEGQITYYNRYKRQNVVKDLSVELDRLSEESVNNDISSWTKGRSGEALSLLKKRFSHRPVQEKFVCLNCGFETHADEQAALNIARSWLFLRSQEYKKYQTNKTTGNTDKRAFVETWQSFYRKKLKEVWKPAV

SEQ ID NO: 37794 - protein, 979 aa, synthetic construct
  REGION 1..979: note = engineered CasX variant
QEIKRINKIRRRLVKDSNTKKAGKTGPMKTLLVRVMTPDLRERLENLRKKPENIPQPISNTSRANLNKLLTDYTEMKKAILHVYWEEFQVDPVGLMSRVAQPASKKIDQNKLKPEMDEKGNLTTAGFACSQCGQPLFVYKLEQVSEKGKAYTNYFGRCNVAEHEKLILLAQLKPEKDSDEAVTYSLGKFGQRALDFYSIHVTKESTHPVKPLAQIAGNRYASHPVGKALSDACMGTIASFLSKYQDIIIEHQKVVKGNQKRLESLRELAGKENLEYPSVTLPPQPHTKEGVDAYNEVIARVRMWVNLNLWQKLKLSRDDAKPLLRLKGFPSFPLVERQANEVDWWDMVCNVKKLINEKKEDGKVFWQNLAGYKRQEALRPYLSSEEDRKKGKKFARYQLGDLLLHLEKKHGEDWGKVYDEAWERIDKKVEGLSKHIKLEEERRSEDAQSKAALTDWLRAKASFVIEGLKEADKDEFCRCELKLQKWYGDLRGKPFAIEAENSILDISGFSKQYNCAFIWQKDGVKKLNLYLIINYFKGGKLRFKKIKPEAFEANRFYTVINKKSGEIVPMEVNFNFDDPNLIILPLAFGKRQGREFIWNDLLSLETGSLKLANGRVIEKTLYNRRTRQDEPALFVALTFERREVLDSSNIKTPMNLIGVDRGENIPAVIALTDPEGCPLSRFKDSLGNPTHILRIGESYKEKQRTIQAKKEVEQRRAGGYSRKYASKAKNLADDMVRNTARDLLYYAVTQDAMLIFENLSRGFGRQGKRTFMAERQYTRMEDWLTAKLAYEGLPSKTYLSKTLAQYTSKTCSNCGFTITSADYDRVLEKLKKTATGWMTTINGKELKVEGQITYYNRYKRQNVVKDLSVELDRLSEESVNNDISSWTKGRSGEALSLLKKRFSHRPVQEKFVCLNCGFETHADEQAALNIARSWLFLRSQEYKKYQTNKTTGNTDKRAFVETWQSFYRKKLKEVWKPAV

SEQ ID NO: 37795 - protein, 979 aa, synthetic construct
  REGION 1..979: note = engineered CasX variant
QEIKRINKIRRRLVKDSNTKKAGKTGPMKTLLVRVMTPDLRERLENLRKKPENIPQPISNTSRANLNKLLTDYTEMKKAILHVYWEEFQVDPVGLMSRVAQPASKKIDQNKLKPEMDEKGNLTTAGFACSQCGQPLFVYKLEQVSEKGKAYTNYFGRCNVAEHEKLILLAQLKPEKDSDEAVTYSLGKFGQRALDFYSIHVTKESTHPVKPLAQIAGNRYASSPVGKALSDACMGTIASFLSKYQDIIIEHQKVVKGNQKRLESLRELAGKENLEYPSVTLPPQPHTKEGVDAYNEVIARVRMWVNLNLWQKLKLSRDDAKPLLRLKGFPSFPLVERQANEVDWWDMVCNVKKLINEKKEDGKVFWQNLAGYKRQEALRPYLSSEEDRKKGKKFARYQLGDLLLHLEKKHGEDWGKVYDEAWERIDKKVEGLSKHIKLEEERRSEDAQSKAALTDWLRAKASFVIEGLKEADKDEFCRCELKLQKWYGDLRGKPFAIEAENSILDISGFSKQYNCAFIWQKDGVKKLNLYLIINYFKGGKLRFKKIKPEAFEANRFYTVINKKSGEIVPMEVNFNFDDPNLIILPLAFGKRQGREFIWNDLLSLETGSLKLANGRVIEKTLYNRRTRQDEPALFVALTFERREVLDSSNIKTPMNLIGVDRGENIPAVIALTDPEGCPLSRFKDSLGNPTHILRIGESYKEKQRTIQAKKEVEQRRAGGYSRKYASKAKNLADDMVRNTARDLLYYAVTQDAMLIFENLSRGFGRQGKRTFMAERQYTRMEDWLTAKLAYEGLPSKTYLSKTLAQYTSKTCSNCGFTITSADYDRVLEKLKKTATGWMTTINGKELKVEGQITYYNRYKRQNVVKDLSVELDRLSEESVNNDISSWTKGRSGEALSLLKKRFSHRPVQEKFVCLNCGFETHADEQAALNIARSWLFLRSQEYKKYQTNKTTGNTDKRAFVETWQSFYRKKLKEVWKPAV

SEQ ID NO: 37796 - protein, 979 aa, synthetic construct
  REGION 1..979: note = engineered CasX variant
QEIKRINKIRRRLVKDSNTKKAGKTGPMKTLLVRVMTPDLRERLENLRKKPENIPQPISNTSRANLNKLLTDYTEMKKAILHVYWEEFQVDPVGLMSRVAQPASKKIDQNKLKPEMDEKGNLTTAGFACSQCGQPLFVYKLEQVSEKGKAYTNYFGRCNVAEHEKLILLAQLKPEKDSDEAVTYSLGKFGQRALDFYSIHVTKESTHPVKPLAQIAGNRYASTPVGKALSDACMGTIASFLSKYQDIIIEHQKVVKGNQKRLESLRELAGKENLEYPSVTLPPQPHTKEGVDAYNEVIARVRMWVNLNLWQKLKLSRDDAKPLLRLKGFPSFPLVERQANEVDWWDMVCNVKKLINEKKEDGKVFWQNLAGYKRQEALRPYLSSEEDRKKGKKFARYQLGDLLLHLEKKHGEDWGKVYDEAWERIDKKVEGLSKHIKLEEERRSEDAQSKAALTDWLRAKASFVIEGLKEADKDEFCRCELKLQKWYGDLRGKPFAIEAENSILDISGFSKQYNCAFIWQKDGVKKLNLYLIINYFKGGKLRFKKIKPEAFEANRFYTVINKKSGEIVPMEVNFNFDDPNLIILPLAFGKRQGREFIWNDLLSLETGSLKLANGRVIEKTLYNRRTRQDEPALFVALTFERREVLDSSNIKTPMNLIGVDRGENIPAVIALTDPEGCPLSRFKDSLGNPTHILRIGESYKEKQRTIQAKKEVEQRRAGGYSRKYASKAKNLADDMVRNTARDLLYYAVTQDAMLIFENLSRGFGRQGKRTFMAERQYTRMEDWLTAKLAYEGLPSKTYLSKTLAQYTSKTCSNCGFTITSADYDRVLEKLKKTATGWMTTINGKELKVEGQITYYNRYKRQNVVKDLSVELDRLSEESVNNDISSWTKGRSGEALSLLKKRFSHRPVQEKFVCLNCGFETHADEQAALNIARSWLFLRSQEYKKYQTNKTTGNTDKRAFVETWQSFYRKKLKEVWKPAV

SEQ ID NO: 37797 - protein, 979 aa, synthetic construct
  REGION 1..979: note = engineered CasX variant
QEIKRINKIRRRLVKDSNTKKAGKTGPMKTLLVRVMTPDLRERLENLRKKPENIPQPISNTSRANLNKLLTDYTEMKKAILHVYWEEFQVDPVGLMSRVAQPASKKIDQNKLKPEMDEKGNLTTAGFACSQCGQPLFVYKLEQVSEKGKAYTNYFGRCNVAEHEKLILLAQLKPEKDSDEAVTYSLGKFGQRALDFYSIHVTKESTHPVKPLAQIAGNRYASAPVGKALSDACMGTIASFLSKYQDIIIEHQKVVKGNQKRLESLRELAGKENLEYPSVTLPPQPHTKEGVDAYNEVIARVRMWVNLNLWQKLKLSRDDAKPLLRLKGFPSFPLVERQANEVDWWDMVCNVKKLINEKKEDGKVFWQNLAGYKRQEALRPYLSSEEDRKKGKKFARYQLGDLLLHLEKKHGEDWGKVYDEAWERIDKKVEGLSKHIKLEEERRSEDAQSKAALTDWLRAKASFVIEGLKEADKDEFCRCELKLQKWYGDLRGKPFAIEAENSILDISGFSKQYNCAFIWQKDGVKKLNLYLIINYFKGGKLRFKKIKPEAFEANRFYTVINKKSGEIVPMEVNFNFDDPNLIILPLAFGKRQGREFIWNDLLSLETGSLKLANGRVIEKTLYNRRTRQDEPALFVALTFERREVLDSSNIKTPMNLIGVDRGENIPAVIALTDPEGCPLSRFKDSLGNPTHILRIGESYKEKQRTIQAKKEVEQRRAGGYSRKYASKAKNLADDMVRNTARDLLYYAVTQDAMLIFENLSRGFGRQGKRTFMAERQYTRMEDWLTAKLAYEGLPSKTYLSKTLAQYTSKTCSNCGFTITSADYDRVLEKLKKTATGWMTTINGKELKVEGQITYYNRYKRQNVVKDLSVELDRLSEESVNNDISSWTKGRSGEALSLLKKRFSHRPVQEKFVCLNCGFETHADEQAALNIARSWLFLRSQEYKKYQTNKTTGNTDKRAFVETWQSFYRKKLKEVWKPAV

SEQ ID NO: 37798 - protein, 979 aa, synthetic construct
  REGION 1..979: note = engineered CasX variant
QEIKRINKIRRRLVKDSNTKKAGKTGPMKTLLVRVMTPDLRERLENLRKKPENIPQPISNTSRANLNKLLTDYTEMKKAILHVYWEEFQVDPVGLMSRVAQPASKKIDQNKLKPEMDEKGNLTTAGFACSQCGQPLFVYKLEQVSEKGKAYTNYFGRCNVAEHEKLILLAQLKPEKDSDEAVTYSLGKFGQRALDFYSIHVTKESTHPVKPLAQIAGNRYASVPVGKALSDACMGTIASFLSKYQDIIIEHQKVVKGNQKRLESLRELAGKENLEYPSVTLPPQPHTKEGVDAYNEVIARVRMWVNLNLWQKLKLSRDDAKPLLRLKGFPSFPLVERQANEVDWWDMVCNVKKLINEKKEDGKVFWQNLAGYKRQEALRPYLSSEEDRKKGKKFARYQLGDLLLHLEKKHGEDWGKVYDEAWERIDKKVEGLSKHIKLEEERRSEDAQSKAALTDWLRAKASFVIEGLKEADKDEFCRCELKLQKWYGDLRGKPFAIEAENSILDISGFSKQYNCAFIWQKDGVKKLNLYLIINYFKGGKLRFKKIKPEAFEANRFYTVINKKSGEIVPMEVNFNFDDPNLIILPLAFGKRQGREFIWNDLLSLETGSLKLANGRVIEKTLYNRRTRQDEPALFVALTFERREVLDSSNIKTPMNLIGVDRGENIPAVIALTDPEGCPLSRFKDSLGNPTHILRIGESYKEKQRTIQAKKEVEQRRAGGYSRKYASKAKNLADDMVRNTARDLLYYAVTQDAMLIFENLSRGFGRQGKRTFMAERQYTRMEDWLTAKLAYEGLPSKTYLSKTLAQYTSKTCSNCGFTITSADYDRVLEKLKKTATGWMTTINGKELKVEGQITYYNRYKRQNVVKDLSVELDRLSEESVNNDISSWTKGRSGEALSLLKKRFSHRPVQEKFVCLNCGFETHADEQAALNIARSWLFLRSQEYKKYQTNKTTGNTDKRAFVETWQSFYRKKLKEVWKPAV

SEQ ID NO: 37799 - protein, 979 aa, synthetic construct
  REGION 1..979: note = engineered CasX variant
QEIKRINKIRRRLVKDSNTKKAGKTGPMKTLLVRVMTPDLRERLENLRKKPENIPQPISNTSRANLNKLLTDYTEMKKAILHVYWEEFQVDPVGLMSRVAQPASKKIDQNKLKPEMDEKGNLTTAGFACSQCGQPLFVYKLEQVSEKGKAYTNYFGRCNVAEHEKLIKLAQLKPEKDSDEAVTYSLGKFGQRALDFYSIHVTKESTHPVKPLAQIAGNRYASGPVGKALSDACMGTIASFLSKYQDIIIEHQKVVKGNQKRLESLRELAGKENLEYPSVTLPPQPHTKEGVDAYNEVIARVRMWVNLNLWQKLKLSRDDAKPLLRLKGFPSFPLVERQANEVDWWDMVCNVKKLINEKKEDGKVFWQNLAGYKRQEALRPYLSSEEDRKKGKKFARYQLGDLLLHLEKKHGEDWGKVYDEAWERIDKKVEGLSKHIKLEEERRSEDAQSKAALTDWLRAKASFVIEGLKEADKDEFCRCELKLQKWYGDLRGKPFAIEAENSILDISGFSKQYNCAFIWQKDGVKKLNLYLIINYFKGGKLRFKKIKPEAFEANRFYTVINKKSGEIVPMEVNFNFDDPNLIILPLAFGKRQGREFIWNDLLSLETGSLKLANGRVIEKTLYNRRTRQDEPALFVALTFERREVLDSSNIKTPMNLIGVDRGENIPAVIALTDPEGCPLSRFKDSLGNPTHILRIGESYKEKQRTIQAKKEVEQRRAGGYSRKYASKAKNLADDMVRNTARDLLYYAVTQDAMLIFENLSRGFGRQGKRTFMAERQYTRMEDWLTAKLAYEGLPSKTYLSKTLAQYTSKTCSNCGFTITSADYDRVLEKLKKTATGWMTTINGKELKVEGQITYYNRYKRQNVVKDLSVELDRLSEESVNNDISSWTKGRSGEALSLLKKRFSHRPVQEKFVCLNCGFETHADEQAALNIARSWLFLRSQEYKKYQTNKTTGNTDKRAFVETWQSFYRKKLKEVWKPAV

SEQ ID NO: 37800 - protein, 978 aa, synthetic construct
  REGION 1..978: note = engineered CasX variant
QEIKRINKIRRRLVKDSNTKKAGKTGPMKTLLVRVMTPDLRERLENLRKKPENIPQPISNTSRANLNKLLTDYTEMKKAILHVYWEEFQVDPVGLMSRVAQPASKKIDQNKLKPEMDEKGNLTTAGFACSQCGQPLFVYKLEQVSEKGKAYTNYFGRCNVAEHEKLILLAQLKPEKDSDEAVTYSLGKFGQRALDFYSIHVTKESTHPVKPLAQIAGNRYASPVGKALSDACMGTIASFLSKYQDIIIEHQKVVKGNQKRLESLRELAGKENLEYPSVTLPPQPHTKEGVDAYNEVIARVRMWVNLNLWQKLKLSRDDAKPLLRLKGFPSFPLVERQANEVDWWDMVCNVKKLINEKKEDGKVFWQNLAGYKRQEALRPYLSSEEDRKKGKKFARYQLGDLLLHLEKKHGEDWGKVYDEAWERIDKKVEGLSKHIKLEEERRSEDAQSKAALTDWLRAKASFVIEGLKEADKDEFCRCELKLQKWYGDLRGKPFAIEAENSILDISGFSKQYNCAFIWQKDGVKKLNLYLIINYFKGGKLRFKKIKPEAFEANRFYTVINKKSGEIVPMEVNFNFDDPNLIILPLAFGKRQGREFIWNDLLSLETGSLKLANGRVIEKTLYNRRTRQDEPALFVALTFERREVLDSSNIKTPMNLIGVDRGENIPAVIALTDPEGCPLSRFKDSLGNPTHILRIGESYKEKQRTIQAKKEVEQRRAGGYSRKYASKAKNLADDMVRNTARDLLYYAVTQDAMLIFENLSRGFGRQGKRTFMAERQYTRMEDWLTAKLAYEGLPSKTYLSKTLAQYTSKTCSNCGFTITSADYDRVLEKLKKTATGWMTTINGKELKVEGQITYYNRYKRQNVVKDLSVELDRLSEESVNNDISSWTKGRSGEALSLLKKRFSHRPVQEKFVCLNCGFETHADEQAALNIARSWLFLRSQEYKKYQTNKTTGNTDKRAFVETWQSFYRKKLKEVWKPAV

SEQ ID NO: 37801 - protein, 979 aa, synthetic construct
  REGION 1..979: note = engineered CasX variant
QEIKRLNKIRRRLVKDSNTKKAGKTGPMKTLLVRVMTPDLRERLENLRKKPENIPQPISNTSRANLNKLLTDYTEMKKAILHVYWEEFQKDPVGLMSRVAQPASKKIDQNKLKPEMDEKGNLTTAGFACSQCGQPLFVYKLEQVSEKGKAYTNYFGRCNVAEHEKLILLAQLKPEKDSDEAVTYSLGKFGQRALDFYSIHVTKESTHPVKPLAQIAGNRYASYPVGKALSDACMGTIASFLSKYQDIIIEHQKVVKGNQKRLESLRELAGKENLEYPSVTLPPQPHTKEGVDAYNEVIARVRMWVNLNLWQKLKLSRDDAKPLLRLKGFPSFPLVERQANEVDWWDMVCNVKKLINEKKEDGKVFWQNLAGYKRQEALRPYLSSEEDRKKGKKFARYQLGDLLLHLEKKHGEDWGKVYDEAWERIDKKVEGLSKHIKLEEERRSEDAQSKAALTDWLRAKASFVIEGLKEADKDEFCRCELKLQKWYGDLRGKPFAIEAENSILDISGFSKQYNCAFIWQKDGVKKLNLYLIINYFKGGKLRFKKIKPEAFEANRFYTVINKKSGEIVPMEVNFNFDDPNLIILPLAFGKRQGREFIWNDLLSLETGSLKLANGRVIEKTLYNRRTRQDEPALFVALTFERREVLDSSNIKTPMNLIGVDRGENIPAVIALTDPEGCPLSRFKDSLGNPTHILRIGESYKEKQRTIQAKKEVEQRRAGGYSRKYASKAKNLADDMVRNTARDLLYYAVTQDAMLIFENLSRGFGRQGKRTFMAERQYTRMEDWLTAKLAYEGLPSKTYLSKTLAQYTSKTCSNCGFTITSADYDRVLEKLKKTATGWMTTINGKELKVEGQITYYNRYKRQNVVKDLSVELDRLSEESVNNDISSWTKGRSGEALSLLKKRFSHRPVQEKFVCLNCGFETHADEQAALNIARSWLFLRSQEYKKYQTNKTTGNTDKRAFVETWQSFYRKKLKEVWKPAV

SEQ ID NO: 37802 - protein, 979 aa, synthetic construct
  REGION 1..979: note = engineered CasX variant
QEIKRLNKIRRRLVKDSNTKKAGKTGPMKTLLVRVMTPDLRERLENLRKKPENIPQPISNTSRANLNKLLTDYTEMKKAILHVYWEEFQKDPVGLMSRVAQPASKKIDQNKLKPEMDEKGNLTTAGFACSQCGQPLFVYKLEQVSEKGKAYTNYFGRCNVAEHEKLILLAQLKPEKDSDEAVTYSLGKFGQRALDFYSIHVTKESTHPVKPLAQIAGNRYASHPVGKALSDACMGTIASFLSKYQDIIIEHQKVVKGNQKRLESLRELAGKENLEYPSVTLPPQPHTKEGVDAYNEVIARVRMWVNLNLWQKLKLSRDDAKPLLRLKGFPSFPLVERQANEVDWWDMVCNVKKLINEKKEDGKVFWQNLAGYKRQEALRPYLSSEEDRKKGKKFARYQLGDLLLHLEKKHGEDWGKVYDEAWERIDKKVEGLSKHIKLEEERRSEDAQSKAALTDWLRAKASFVIEGLKEADKDEFCRCELKLQKWYGDLRGKPFAIEAENSILDISGFSKQYNCAFIWQKDGVKKLNLYLIINYFKGGKLRFKKIKPEAFEANRFYTVINKKSGEIVPMEVNFNFDDPNLIILPLAFGKRQGREFIWNDLLSLETGSLKLANGRVIEKTLYNRRTRQDEPALFVALTFERREVLDSSNIKTPMNLIGVDRGENIPAVIALTDPEGCPLSRFKDSLGNPTHILRIGESYKEKQRTIQAKKEVEQRRAGGYSRKYASKAKNLADDMVRNTARDLLYYAVTQDAMLIFENLSRGFGRQGKRTFMAERQYTRMEDWLTAKLAYEGLPSKTYLSKTLAQYTSKTCSNCGFTITSADYDRVLEKLKKTATGWMTTINGKELKVEGQITYYNRYKRQNVVKDLSVELDRLSEESVNNDISSWTKGRSGEALSLLKKRFSHRPVQEKFVCLNCGFETHADEQAALNIARSWLFLRSQEYKKYQTNKTTGNTDKRAFVETWQSFYRKKLKEVWKPAV

SEQ ID NO: 37803 - protein, 979 aa, synthetic construct
  REGION 1..979: note = engineered CasX variant
QEIKRLNKIRRRLVKDSNTKKAGKTGPMKTLLVRVMTPDLRERLENLRKKPENIPQPISNTSRANLNKLLTDYTEMKKAILHVYWEEFQKDPVGLMSRVAQPASKKIDQNKLKPEMDEKGNLTTAGFACSQCGQPLFVYKLEQVSEKGKAYTNYFGRCNVAEHEKLILLAQLKPEKDSDEAVTYSLGKFGQRALDFYSIHVTKESTHPVKPLAQIAGNRYASSPVGKALSDACMGTIASFLSKYQDIIIEHQKVVKGNQKRLESLRELAGKENLEYPSVTLPPQPHTKEGVDAYNEVIARVRMWVNLNLWQKLKLSRDDAKPLLRLKGFPSFPLVERQANEVDWWDMVCNVKKLINEKKEDGKVFWQNLAGYKRQEALRPYLSSEEDRKKGKKFARYQLGDLLLHLEKKHGEDWGKVYDEAWERIDKKVEGLSKHIKLEEERRSEDAQSKAALTDWLRAKASFVIEGLKEADKDEFCRCELKLQKWYGDLRGKPFAIEAENSILDISGFSKQYNCAFIWQKDGVKKLNLYLIINYFKGGKLRFKKIKPEAFEANRFYTVINKKSGEIVPMEVNFNFDDPNLIILPLAFGKRQGREFIWNDLLSLETGSLKLANGRVIEKTLYNRRTRQDEPALFVALTFERREVLDSSNIKTPMNLIGVDRGENIPAVIALTDPEGCPLSRFKDSLGNPTHILRIGESYKEKQRTIQAKKEVEQRRAGGYSRKYASKAKNLADDMVRNTARDLLYYAVTQDAMLIFENLSRGFGRQGKRTFMAERQYTRMEDWLTAKLAYEGLPSKTYLSKTLAQYTSKTCSNCGFTITSADYDRVLEKLKKTATGWMTTINGKELKVEGQITYYNRYKRQNVVKDLSVELDRLSEESVNNDISSWTKGRSGEALSLLKKRFSHRPVQEKFVCLNCGFETHADEQAALNIARSWLFLRSQEYKKYQTNKTTGNTDKRAFVETWQSFYRKKLKEVWKPAV

SEQ ID NO: 37804 - protein, 979 aa, synthetic construct
  REGION 1..979: note = engineered CasX variant
QEIKRLNKIRRRLVKDSNTKKAGKTGPMKTLLVRVMTPDLRERLENLRKKPENIPQPISNTSRANLNKLLTDYTEMKKAILHVYWEEFQKDPVGLMSRVAQPASKKIDQNKLKPEMDEKGNLTTAGFACSQCGQPLFVYKLEQVSEKGKAYTNYFGRCNVAEHEKLILLAQLKPEKDSDEAVTYSLGKFGQRALDFYSIHVTKESTHPVKPLAQIAGNRYASTPVGKALSDACMGTIASFLSKYQDIIIEHQKVVKGNQKRLESLRELAGKENLEYPSVTLPPQPHTKEGVDAYNEVIARVRMWVNLNLWQKLKLSRDDAKPLLRLKGFPSFPLVERQANEVDWWDMVCNVKKLINEKKEDGKVFWQNLAGYKRQEALRPYLSSEEDRKKGKKFARYQLGDLLLHLEKKHGEDWGKVYDEAWERIDKKVEGLSKHIKLEEERRSEDAQSKAALTDWLRAKASFVIEGLKEADKDEFCRCELKLQKWYGDLRGKPFAIEAENSILDISGFSKQYNCAFIWQKDGVKKLNLYLIINYFKGGKLRFKKIKPEAFEANRFYTVINKKSGEIVPMEVNFNFDDPNLIILPLAFGKRQGREFIWNDLLSLETGSLKLANGRVIEKTLYNRRTRQDEPALFVALTFERREVLDSSNIKTPMNLIGVDRGENIPAVIALTDPEGCPLSRFKDSLGNPTHILRIGESYKEKQRTIQAKKEVEQRRAGGYSRKYASKAKNLADDMVRNTARDLLYYAVTQDAMLIFENLSRGFGRQGKRTFMAERQYTRMEDWLTAKLAYEGLPSKTYLSKTLAQYTSKTCSNCGFTITSADYDRVLEKLKKTATGWMTTINGKELKVEGQITYYNRYKRQNVVKDLSVELDRLSEESVNNDISSWTKGRSGEALSLLKKRFSHRPVQEKFVCLNCGFETHADEQAALNIARSWLFLRSQEYKKYQTNKTTGNTDKRAFVETWQSFYRKKLKEVWKPAV

SEQ ID NO: 37805 - protein, 979 aa, synthetic construct
  REGION 1..979: note = engineered CasX variant
QEIKRLNKIRRRLVKDSNTKKAGKTGPMKTLLVRVMTPDLRERLENLRKKPENIPQPISNTSRANLNKLLTDYTEMKKAILHVYWEEFQKDPVGLMSRVAQPASKKIDQNKLKPEMDEKGNLTTAGFACSQCGQPLFVYKLEQVSEKGKAYTNYFGRCNVAEHEKLILLAQLKPEKDSDEAVTYSLGKFGQRALDFYSIHVTKESTHPVKPLAQIAGNRYASAPVGKALSDACMGTIASFLSKYQDIIIEHQKVVKGNQKRLESLRELAGKENLEYPSVTLPPQPHTKEGVDAYNEVIARVRMWVNLNLWQKLKLSRDDAKPLLRLKGFPSFPLVERQANEVDWWDMVCNVKKLINEKKEDGKVFWQNLAGYKRQEALRPYLSSEEDRKKGKKFARYQLGDLLLHLEKKHGEDWGKVYDEAWERIDKKVEGLSKHIKLEEERRSEDAQSKAALTDWLRAKASFVIEGLKEADKDEFCRCELKLQKWYGDLRGKPFAIEAENSILDISGFSKQYNCAFIWQKDGVKKLNLYLIINYFKGGKLRFKKIKPEAFEANRFYTVINKKSGEIVPMEVNFNFDDPNLIILPLAFGKRQGREFIWNDLLSLETGSLKLANGRVIEKTLYNRRTRQDEPALFVALTFERREVLDSSNIKTPMNLIGVDRGENIPAVIALTDPEGCPLSRFKDSLGNPTHILRIGESYKEKQRTIQAKKEVEQRRAGGYSRKYASKAKNLADDMVRNTARDLLYYAVTQDAMLIFENLSRGFGRQGKRTFMAERQYTRMEDWLTAKLAYEGLPSKTYLSKTLAQYTSKTCSNCGFTITSADYDRVLEKLKKTATGWMTTINGKELKVEGQITYYNRYKRQNVVKDLSVELDRLSEESVNNDISSWTKGRSGEALSLLKKRFSHRPVQEKFVCLNCGFETHADEQAALNIARSWLFLRSQEYKKYQTNKTTGNTDKRAFVETWQSFYRKKLKEVWKPAV

SEQ ID NO: 37806 - protein, 979 aa, synthetic construct
  REGION 1..979: note = engineered CasX variant
QEIKRLNKIRRRLVKDSNTKKAGKTGPMKTLLVRVMTPDLRERLENLRKKPENIPQPISNTSRANLNKLLTDYTEMKKAILHVYWEEFQKDPVGLMSRVAQPASKKIDQNKLKPEMDEKGNLTTAGFACSQCGQPLFVYKLEQVSEKGKAYTNYFGRCNVAEHEKLILLAQLKPEKDSDEAVTYSLGKFGQRALDFYSIHVTKESTHPVKPLAQIAGNRYASVPVGKALSDACMGTIASFLSKYQDIIIEHQKVVKGNQKRLESLRELAGKENLEYPSVTLPPQPHTKEGVDAYNEVIARVRMWVNLNLWQKLKLSRDDAKPLLRLKGFPSFPLVERQANEVDWWDMVCNVKKLINEKKEDGKVFWQNLAGYKRQEALRPYLSSEEDRKKGKKFARYQLGDLLLHLEKKHGEDWGKVYDEAWERIDKKVEGLSKHIKLEEERRSEDAQSKAALTDWLRAKASFVIEGLKEADKDEFCRCELKLQKWYGDLRGKPFAIEAENSILDISGFSKQYNCAFIWQKDGVKKLNLYLIINYFKGGKLRFKKIKPEAFEANRFYTVINKKSGEIVPMEVNFNFDDPNLIILPLAFGKRQGREFIWNDLLSLETGSLKLANGRVIEKTLYNRRTRQDEPALFVALTFERREVLDSSNIKTPMNLIGVDRGENIPAVIALTDPEGCPLSRFKDSLGNPTHILRIGESYKEKQRTIQAKKEVEQRRAGGYSRKYASKAKNLADDMVRNTARDLLYYAVTQDAMLIFENLSRGFGRQGKRTFMAERQYTRMEDWLTAKLAYEGLPSKTYLSKTLAQYTSKTCSNCGFTITSADYDRVLEKLKKTATGWMTTINGKELKVEGQITYYNRYKRQNVVKDLSVELDRLSEESVNNDISSWTKGRSGEALSLLKKRFSHRPVQEKFVCLNCGFETHADEQAALNIARSWLFLRSQEYKKYQTNKTTGNTDKRAFVETWQSFYRKKLKEVWKPAV

SEQ ID NO: 37807 - protein, 979 aa, synthetic construct
  REGION 1..979: note = engineered CasX variant
QEIKRLNKIRRRLVKDSNTKKAGKTGPMKTLLVRVMTPDLRERLENLRKKPENIPQPISNTSRANLNKLLTDYTEMKKAILHVYWEEFQKDPVGLMSRVAQPASKKIDQNKLKPEMDEKGNLTTAGFACSQCGQPLFVYKLEQVSEKGKAYTNYFGRCNVAEHEKLIKLAQLKPEKDSDEAVTYSLGKFGQRALDFYSIHVTKESTHPVKPLAQIAGNRYASGPVGKALSDACMGTIASFLSKYQDIIIEHQKVVKGNQKRLESLRELAGKENLEYPSVTLPPQPHTKEGVDAYNEVIARVRMWVNLNLWQKLKLSRDDAKPLLRLKGFPSFPLVERQANEVDWWDMVCNVKKLINEKKEDGKVFWQNLAGYKRQEALRPYLSSEEDRKKGKKFARYQLGDLLLHLEKKHGEDWGKVYDEAWERIDKKVEGLSKHIKLEEERRSEDAQSKAALTDWLRAKASFVIEGLKEADKDEFCRCELKLQKWYGDLRGKPFAIEAENSILDISGFSKQYNCAFIWQKDGVKKLNLYLIINYFKGGKLRFKKIKPEAFEANRFYTVINKKSGEIVPMEVNFNFDDPNLIILPLAFGKRQGREFIWNDLLSLETGSLKLANGRVIEKTLYNRRTRQDEPALFVALTFERREVLDSSNIKTPMNLIGVDRGENIPAVIALTDPEGCPLSRFKDSLGNPTHILRIGESYKEKQRTIQAKKEVEQRRAGGYSRKYASKAKNLADDMVRNTARDLLYYAVTQDAMLIFENLSRGFGRQGKRTFMAERQYTRMEDWLTAKLAYEGLPSKTYLSKTLAQYTSKTCSNCGFTITSADYDRVLEKLKKTATGWMTTINGKELKVEGQITYYNRYKRQNVVKDLSVELDRLSEESVNNDISSWTKGRSGEALSLLKKRFSHRPVQEKFVCLNCGFETHADEQAALNIARSWLFLRSQEYKKYQTNKTTGNTDKRAFVETWQSFYRKKLKEVWKPAV

SEQ ID NO: 37808 - protein, 978 aa, synthetic construct
  REGION 1..978: note = engineered CasX variant
QEIKRLNKIRRRLVKDSNTKKAGKTGPMKTLLVRVMTPDLRERLENLRKKPENIPQPISNTSRANLNKLLTDYTEMKKAILHVYWEEFQKDPVGLMSRVAQPASKKIDQNKLKPEMDEKGNLTTAGFACSQCGQPLFVYKLEQVSEKGKAYTNYFGRCNVAEHEKLILLAQLKPEKDSDEAVTYSLGKFGQRALDFYSIHVTKESTHPVKPLAQIAGNRYASPVGKALSDACMGTIASFLSKYQDIIIEHQKVVKGNQKRLESLRELAGKENLEYPSVTLPPQPHTKEGVDAYNEVIARVRMWVNLNLWQKLKLSRDDAKPLLRLKGFPSFPLVERQANEVDWWDMVCNVKKLINEKKEDGKVFWQNLAGYKRQEALRPYLSSEEDRKKGKKFARYQLGDLLLHLEKKHGEDWGKVYDEAWERIDKKVEGLSKHIKLEEERRSEDAQSKAALTDWLRAKASFVIEGLKEADKDEFCRCELKLQKWYGDLRGKPFAIEAENSILDISGFSKQYNCAFIWQKDGVKKLNLYLIINYFKGGKLRFKKIKPEAFEANRFYTVINKKSGEIVPMEVNFNFDDPNLIILPLAFGKRQGREFIWNDLLSLETGSLKLANGRVIEKTLYNRRTRQDEPALFVALTFERREVLDSSNIKTPMNLIGVDRGENIPAVIALTDPEGCPLSRFKDSLGNPTHILRIGESYKEKQRTIQAKKEVEQRRAGGYSRKYASKAKNLADDMVRNTARDLLYYAVTQDAMLIFENLSRGFGRQGKRTFMAERQYTRMEDWLTAKLAYEGLPSKTYLSKTLAQYTSKTCSNCGFTITSADYDRVLEKLKKTATGWMTTINGKELKVEGQITYYNRYKRQNVVKDLSVELDRLSEESVNNDISSWTKGRSGEALSLLKKRFSHRPVQEKFVCLNCGFETHADEQAALNIARSWLFLRSQEYKKYQTNKTTGNTDKRAFVETWQSFYRKKLKEVWKPAV

SEQ ID NO: 37809 - protein, 979 aa, synthetic construct
  REGION 1..979: note = engineered CasX variant
QEIKRINKIRRRLVKDSNTKKAGKTGPMKTLLVRVMTPDLRERLENLRKKPENIPQPISNTSRANLNKLLTDYTEMKKAILHVYWEEFQKDPVGLMSRVAQPASKKIDQNKLKPEMDEKGNLTTAGFACSQCGQPLFVYKLEQVSEKGKAYTNYVGRCNVAEHEKLILLAQLKPEKDSDEAVTYSLGKFGQRALDFYSIHVTKESTHPVKPLAQIAGNRYASYPVGKALSDACMGTIASFLSKYQDIIIEHQKVVKGNQKRLESLRELAGKENLEYPSVTLPPQPHTKEGVDAYNEVIARVRMWVNLNLWQKLKLSRDDAKPLLRLKGFPSFPLVERQANEVDWWDMVCNVKKLINEKKEDGKVFWQNLAGYKRQEALRPYLSSEEDRKKGKKFARYQLGDLLLHLEKKHGEDWGKVYDEAWERIDKKVEGLSKHIKLEEERRSEDAQSKAALTDWLRAKASFVIEGLKEADKDEFCRCELKLQKWYGDLRGKPFAIEAENSILDISGFSKQYNCAFIWQKDGVKKLNLYLIINYFKGGKLRFKKIKPEAFEANRFYTVINKKSGEIVPMEVNFNFDDPNLIILPLAFGKRQGREFIWNDLLSLETGSLKLANGRVIEKTLYNRRTRQDEPALFVALTFERREVLDSSNIKTPMNLIGVDRGENIPAVIALTDPEGCPLSRFKDSLGNPTHILRIGESYKEKQRTIQAKKEVEQRRAGGYSRKYASKAKNLADDMVRNTARDLLYYAVTQDAMLIFENLSRGFGRQGKRTFMAERQYTRMEDWLTAKLAYEGLPSKTYLSKTLAQYTSKTCSNCGFTITSADYDRVLEKLKKTATGWMTTINGKELKVEGQITYYNRYKRQNVVKDLSVELDRLSEESVNNDISSWTKGRSGEALSLLKKRFSHRPVQEKFVCLNCGFETHADEQAALNIARSWLFLRSQEYKKYQTNKTTGNTDKRAFVETWQSFYRKKLKEVWKPAV

SEQ ID NO: 37810 - protein, 979 aa, synthetic construct
  REGION 1..979: note = engineered CasX variant
QEIKRINKIRRRLVKDSNTKKAGKTGPMKTLLVRVMTPDLRERLENLRKKPENIPQPISNTSRANLNKLLTDYTEMKKAILHVYWEEFQKDPVGLMSRVAQPASKKIDQNKLKPEMDEKGNLTTAGFACSQCGQPLFVYKLEQVSEKGKAYTNYVGRCNVAEHEKLILLAQLKPEKDSDEAVTYSLGKFGQRALDFYSIHVTKESTHPVKPLAQIAGNRYASHPVGKALSDACMGTIASFLSKYQDIIIEHQKVVKGNQKRLESLRELAGKENLEYPSVTLPPQPHTKEGVDAYNEVIARVRMWVNLNLWQKLKLSRDDAKPLLRLKGFPSFPLVERQANEVDWWDMVCNVKKLINEKKEDGKVFWQNLAGYKRQEALRPYLSSEEDRKKGKKFARYQLGDLLLHLEKKHGEDWGKVYDEAWERIDKKVEGLSKHIKLEEERRSEDAQSKAALTDWLRAKASFVIEGLKEADKDEFCRCELKLQKWYGDLRGKPFAIEAENSILDISGFSKQYNCAFIWQKDGVKKLNLYLIINYFKGGKLRFKKIKPEAFEANRFYTVINKKSGEIVPMEVNFNFDDPNLIILPLAFGKRQGREFIWNDLLSLETGSLKLANGRVIEKTLYNRRTRQDEPALFVALTFERREVLDSSNIKTPMNLIGVDRGENIPAVIALTDPEGCPLSRFKDSLGNPTHILRIGESYKEKQRTIQAKKEVEQRRAGGYSRKYASKAKNLADDMVRNTARDLLYYAVTQDAMLIFENLSRGFGRQGKRTFMAERQYTRMEDWLTAKLAYEGLPSKTYLSKTLAQYTSKTCSNCGFTITSADYDRVLEKLKKTATGWMTTINGKELKVEGQITYYNRYKRQNVVKDLSVELDRLSEESVNNDISSWTKGRSGEALSLLKKRFSHRPVQEKFVCLNCGFETHADEQAALNIARSWLFLRSQEYKKYQTNKTTGNTDKRAFVETWQSFYRKKLKEVWKPAV

SEQ ID NO: 37811 - protein, 979 aa, synthetic construct
  REGION 1..979: note = engineered CasX variant
QEIKRINKIRRRLVKDSNTKKAGKTGPMKTLLVRVMTPDLRERLENLRKKPENIPQPISNTSRANLNKLLTDYTEMKKAILHVYWEEFQKDPVGLMSRVAQPASKKIDQNKLKPEMDEKGNLTTAGFACSQCGQPLFVYKLEQVSEKGKAYTNYVGRCNVAEHEKLILLAQLKPEKDSDEAVTYSLGKFGQRALDFYSIHVTKESTHPVKPLAQIAGNRYASSPVGKALSDACMGTIASFLSKYQDIIIEHQKVVKGNQKRLESLRELAGKENLEYPSVTLPPQPHTKEGVDAYNEVIARVRMWVNLNLWQKLKLSRDDAKPLLRLKGFPSFPLVERQANEVDWWDMVCNVKKLINEKKEDGKVFWQNLAGYKRQEALRPYLSSEEDRKKGKKFARYQLGDLLLHLEKKHGEDWGKVYDEAWERIDKKVEGLSKHIKLEEERRSEDAQSKAALTDWLRAKASFVIEGLKEADKDEFCRCELKLQKWYGDLRGKPFAIEAENSILDISGFSKQYNCAFIWQKDGVKKLNLYLIINYFKGGKLRFKKIKPEAFEANRFYTVINKKSGEIVPMEVNFNFDDPNLIILPLAFGKRQGREFIWNDLLSLETGSLKLANGRVIEKTLYNRRTRQDEPALFVALTFERREVLDSSNIKTPMNLIGVDRGENIPAVIALTDPEGCPLSRFKDSLGNPTHILRIGESYKEKQRTIQAKKEVEQRRAGGYSRKYASKAKNLADDMVRNTARDLLYYAVTQDAMLIFENLSRGFGRQGKRTFMAERQYTRMEDWLTAKLAYEGLPSKTYLSKTLAQYTSKTCSNCGFTITSADYDRVLEKLKKTATGWMTTINGKELKVEGQITYYNRYKRQNVVKDLSVELDRLSEESVNNDISSWTKGRSGEALSLLKKRFSHRPVQEKFVCLNCGFETHADEQAALNIARSWLFLRSQEYKKYQTNKTTGNTDKRAFVETWQSFYRKKLKEVWKPAV

SEQ ID NO: 37812 - protein, 979 aa, synthetic construct
  REGION 1..979: note = engineered CasX variant
QEIKRINKIRRRLVKDSNTKKAGKTGPMKTLLVRVMTPDLRERLENLRKKPENIPQPISNTSRANLNKLLTDYTEMKKAILHVYWEEFQKDPVGLMSRVAQPASKKIDQNKLKPEMDEKGNLTTAGFACSQCGQPLFVYKLEQVSEKGKAYTNYVGRCNVAEHEKLILLAQLKPEKDSDEAVTYSLGKFGQRALDFYSIHVTKESTHPVKPLAQIAGNRYASTPVGKALSDACMGTIASFLSKYQDIIIEHQKVVKGNQKRLESLRELAGKENLEYPSVTLPPQPHTKEGVDAYNEVIARVRMWVNLNLWQKLKLSRDDAKPLLRLKGFPSFPLVERQANEVDWWDMVCNVKKLINEKKEDGKVFWQNLAGYKRQEALRPYLSSEEDRKKGKKFARYQLGDLLLHLEKKHGEDWGKVYDEAWERIDKKVEGLSKHIKLEEERRSEDAQSKAALTDWLRAKASFVIEGLKEADKDEFCRCELKLQKWYGDLRGKPFAIEAENSILDISGFSKQYNCAFIWQKDGVKKLNLYLIINYFKGGKLRFKKIKPEAFEANRFYTVINKKSGEIVPMEVNFNFDDPNLIILPLAFGKRQGREFIWNDLLSLETGSLKLANGRVIEKTLYNRRTRQDEPALFVALTFERREVLDSSNIKTPMNLIGVDRGENIPAVIALTDPEGCPLSRFKDSLGNPTHILRIGESYKEKQRTIQAKKEVEQRRAGGYSRKYASKAKNLADDMVRNTARDLLYYAVTQDAMLIFENLSRGFGRQGKRTFMAERQYTRMEDWLTAKLAYEGLPSKTYLSKTLAQYTSKTCSNCGFTITSADYDRVLEKLKKTATGWMTTINGKELKVEGQITYYNRYKRQNVVKDLSVELDRLSEESVNNDISSWTKGRSGEALSLLKKRFSHRPVQEKFVCLNCGFETHADEQAALNIARSWLFLRSQEYKKYQTNKTTGNTDKRAFVETWQSFYRKKLKEVWKPAV

SEQ ID NO: 37813 - protein, 979 aa, synthetic construct
  REGION 1..979: note = engineered CasX variant
QEIKRINKIRRRLVKDSNTKKAGKTGPMKTLLVRVMTPDLRERLENLRKKPENIPQPISNTSRANLNKLLTDYTEMKKAILHVYWEEFQKDPVGLMSRVAQPASKKIDQNKLKPEMDEKGNLTTAGFACSQCGQPLFVYKLEQVSEKGKAYTNYVGRCNVAEHEKLILLAQLKPEKDSDEAVTYSLGKFGQRALDFYSIHVTKESTHPVKPLAQIAGNRYASAPVGKALSDACMGTIASFLSKYQDIIIEHQKVVKGNQKRLESLRELAGKENLEYPSVTLPPQPHTKEGVDAYNEVIARVRMWVNLNLWQKLKLSRDDAKPLLRLKGFPSFPLVERQANEVDWWDMVCNVKKLINEKKEDGKVFWQNLAGYKRQEALRPYLSSEEDRKKGKKFARYQLGDLLLHLEKKHGEDWGKVYDEAWERIDKKVEGLSKHIKLEEERRSEDAQSKAALTDWLRAKASFVIEGLKEADKDEFCRCELKLQKWYGDLRGKPFAIEAENSILDISGFSKQYNCAFIWQKDGVKKLNLYLIINYFKGGKLRFKKIKPEAFEANRFYTVINKKSGEIVPMEVNFNFDDPNLIILPLAFGKRQGREFIWNDLLSLETGSLKLANGRVIEKTLYNRRTRQDEPALFVALTFERREVLDSSNIKTPMNLIGVDRGENIPAVIALTDPEGCPLSRFKDSLGNPTHILRIGESYKEKQRTIQAKKEVEQRRAGGYSRKYASKAKNLADDMVRNTARDLLYYAVTQDAMLIFENLSRGFGRQGKRTFMAERQYTRMEDWLTAKLAYEGLPSKTYLSKTLAQYTSKTCSNCGFTITSADYDRVLEKLKKTATGWMTTINGKELKVEGQITYYNRYKRQNVVKDLSVELDRLSEESVNNDISSWTKGRSGEALSLLKKRFSHRPVQEKFVCLNCGFETHADEQAALNIARSWLFLRSQEYKKYQTNKTTGNTDKRAFVETWQSFYRKKLKEVWKPAV

SEQ ID NO: 37814 - protein, 979 aa, synthetic construct
  REGION 1..979: note = engineered CasX variant
QEIKRINKIRRRLVKDSNTKKAGKTGPMKTLLVRVMTPDLRERLENLRKKPENIPQPISNTSRANLNKLLTDYTEMKKAILHVYWEEFQKDPVGLMSRVAQPASKKIDQNKLKPEMDEKGNLTTAGFACSQCGQPLFVYKLEQVSEKGKAYTNYVGRCNVAEHEKLILLAQLKPEKDSDEAVTYSLGKFGQRALDFYSIHVTKESTHPVKPLAQIAGNRYASVPVGKALSDACMGTIASFLSKYQDIIIEHQKVVKGNQKRLESLRELAGKENLEYPSVTLPPQPHTKEGVDAYNEVIARVRMWVNLNLWQKLKLSRDDAKPLLRLKGFPSFPLVERQANEVDWWDMVCNVKKLINEKKEDGKVFWQNLAGYKRQEALRPYLSSEEDRKKGKKFARYQLGDLLLHLEKKHGEDWGKVYDEAWERIDKKVEGLSKHIKLEEERRSEDAQSKAALTDWLRAKASFVIEGLKEADKDEFCRCELKLQKWYGDLRGKPFAIEAENSILDISGFSKQYNCAFIWQKDGVKKLNLYLIINYFKGGKLRFKKIKPEAFEANRFYTVINKKSGEIVPMEVNFNFDDPNLIILPLAFGKRQGREFIWNDLLSLETGSLKLANGRVIEKTLYNRRTRQDEPALFVALTFERREVLDSSNIKTPMNLIGVDRGENIPAVIALTDPEGCPLSRFKDSLGNPTHILRIGESYKEKQRTIQAKKEVEQRRAGGYSRKYASKAKNLADDMVRNTARDLLYYAVTQDAMLIFENLSRGFGRQGKRTFMAERQYTRMEDWLTAKLAYEGLPSKTYLSKTLAQYTSKTCSNCGFTITSADYDRVLEKLKKTATGWMTTINGKELKVEGQITYYNRYKRQNVVKDLSVELDRLSEESVNNDISSWTKGRSGEALSLLKKRFSHRPVQEKFVCLNCGFETHADEQAALNIARSWLFLRSQEYKKYQTNKTTGNTDKRAFVETWQSFYRKKLKEVWKPAV

SEQ ID NO: 37815 - protein, 979 aa, synthetic construct
  REGION 1..979: note = engineered CasX variant
QEIKRINKIRRRLVKDSNTKKAGKTGPMKTLLVRVMTPDLRERLENLRKKPENIPQPISNTSRANLNKLLTDYTEMKKAILHVYWEEFQKDPVGLMSRVAQPASKKIDQNKLKPEMDEKGNLTTAGFACSQCGQPLFVYKLEQVSEKGKAYTNYVGRCNVAEHEKLIKLAQLKPEKDSDEAVTYSLGKFGQRALDFYSIHVTKESTHPVKPLAQIAGNRYASGPVGKALSDACMGTIASFLSKYQDIIIEHQKVVKGNQKRLESLRELAGKENLEYPSVTLPPQPHTKEGVDAYNEVIARVRMWVNLNLWQKLKLSRDDAKPLLRLKGFPSFPLVERQANEVDWWDMVCNVKKLINEKKEDGKVFWQNLAGYKRQEALRPYLSSEEDRKKGKKFARYQLGDLLLHLEKKHGEDWGKVYDEAWERIDKKVEGLSKHIKLEEERRSEDAQSKAALTDWLRAKASFVIEGLKEADKDEFCRCELKLQKWYGDLRGKPFAIEAENSILDISGFSKQYNCAFIWQKDGVKKLNLYLIINYFKGGKLRFKKIKPEAFEANRFYTVINKKSGEIVPMEVNFNFDDPNLIILPLAFGKRQGREFIWNDLLSLETGSLKLANGRVIEKTLYNRRTRQDEPALFVALTFERREVLDSSNIKTPMNLIGVDRGENIPAVIALTDPEGCPLSRFKDSLGNPTHILRIGESYKEKQRTIQAKKEVEQRRAGGYSRKYASKAKNLADDMVRNTARDLLYYAVTQDAMLIFENLSRGFGRQGKRTFMAERQYTRMEDWLTAKLAYEGLPSKTYLSKTLAQYTSKTCSNCGFTITSADYDRVLEKLKKTATGWMTTINGKELKVEGQITYYNRYKRQNVVKDLSVELDRLSEESVNNDISSWTKGRSGEALSLLKKRFSHRPVQEKFVCLNCGFETHADEQAALNIARSWLFLRSQEYKKYQTNKTTGNTDKRAFVETWQSFYRKKLKEVWKPAV

SEQ ID NO: 37816 - protein, 978 aa, synthetic construct
  REGION 1..978: note = engineered CasX variant
QEIKRINKIRRRLVKDSNTKKAGKTGPMKTLLVRVMTPDLRERLENLRKKPENIPQPISNTSRANLNKLLTDYTEMKKAILHVYWEEFQKDPVGLMSRVAQPASKKIDQNKLKPEMDEKGNLTTAGFACSQCGQPLFVYKLEQVSEKGKAYTNYVGRCNVAEHEKLILLAQLKPEKDSDEAVTYSLGKFGQRALDFYSIHVTKESTHPVKPLAQIAGNRYASPVGKALSDACMGTIASFLSKYQDIIIEHQKVVKGNQKRLESLRELAGKENLEYPSVTLPPQPHTKEGVDAYNEVIARVRMWVNLNLWQKLKLSRDDAKPLLRLKGFPSFPLVERQANEVDWWDMVCNVKKLINEKKEDGKVFWQNLAGYKRQEALRPYLSSEEDRKKGKKFARYQLGDLLLHLEKKHGEDWGKVYDEAWERIDKKVEGLSKHIKLEEERRSEDAQSKAALTDWLRAKASFVIEGLKEADKDEFCRCELKLQKWYGDLRGKPFAIEAENSILDISGFSKQYNCAFIWQKDGVKKLNLYLIINYFKGGKLRFKKIKPEAFEANRFYTVINKKSGEIVPMEVNFNFDDPNLIILPLAFGKRQGREFIWNDLLSLETGSLKLANGRVIEKTLYNRRTRQDEPALFVALTFERREVLDSSNIKTPMNLIGVDRGENIPAVIALTDPEGCPLSRFKDSLGNPTHILRIGESYKEKQRTIQAKKEVEQRRAGGYSRKYASKAKNLADDMVRNTARDLLYYAVTQDAMLIFENLSRGFGRQGKRTFMAERQYTRMEDWLTAKLAYEGLPSKTYLSKTLAQYTSKTCSNCGFTITSADYDRVLEKLKKTATGWMTTINGKELKVEGQITYYNRYKRQNVVKDLSVELDRLSEESVNNDISSWTKGRSGEALSLLKKRFSHRPVQEKFVCLNCGFETHADEQAALNIARSWLFLRSQEYKKYQTNKTTGNTDKRAFVETWQSFYRKKLKEVWKPAV

SEQ ID NO: 37817 - protein, 979 aa, synthetic construct
  REGION 1..979: note = engineered CasX variant
QEIKRINKIRRRLVKDSNTKKAGKTGPMKTLLVRVMTPDLRERLENLRKKPENIPQPISNTSRANLNKLLTDYTEMKKAILHVYWEEFQKDPVGLMSRVAQPASKKIDQNKLKPEMDEKGNLTTAGFACSQCGQPLFVYKLEQVSEKGKAYTNYFGRCNVAEHEKLILLAQLKPEKDSDEAVTYSLGKFGQRALDFYSIHVTKESTHPVKPLAQIAGNRYASYPVGKALSDACMGTIASFLSKYQDIIIEHQKVVKGNQKRLESLRELAGKENLEYPSVTLPPQPHTKEGVDAYNEVIARVRMWVNLNLWQKLKLSRDDAKPLLRLKGFPSFPLVERQANEVDWWDMVCNVKKLINEKKEDGKVFWQNLAGYKRQEALRPYLSSEEDRKKGKKFARYQLGDLLLHLEKKHGEDWGKVYDEAWERIDKKVEGLSKHIKLEEERRSEDAQSKAALTDWLRAKASFVIEGLKEADKDEFCRCELKLQKWYGDLRGKPFAIEAENSILDISGFSKQYNCAFIWQKDGVKKLNLYLIINYFKGGKLRFKKIKPEAFEANRFYTVINKKSGEIVPMEVNFNFDDPNLIILPLAFGKRQGREFIWNDLLSLETGSLKLANGRVIEKTLYNRRTRQDEPALFVALTFERREVLDSSNIKTPMNLIGVDRGENIPAVIALTDPEGCPLSRFKDSLGNPTHILRIGESYKEKQRTIQAKKEVEQRRAGGYSRKYASKAKNLADDMVRNTARDLLYYAVTQDAMLIFENLSRGFGRQGKRTFMAERQYTRMEDWLTAKLAYEGLASKTYLSKTLAQYTSKTCSNCGFTITSADYDRVLEKLKKTATGWMTTINGKELKVEGQITYYNRYKRQNVVKDLSVELDRLSEESVNNDISSWTKGRSGEALSLLKKRFSHRPVQEKFVCLNCGFETHADEQAALNIARSWLFLRSQEYKKYQTNKTTGNTDKRAFVETWQSFYRKKLKEVWKPAV

SEQ ID NO: 37818 - protein, 979 aa, synthetic construct
  REGION 1..979: note = engineered CasX variant
QEIKRINKIRRRLVKDSNTKKAGKTGPMKTLLVRVMTPDLRERLENLRKKPENIPQPISNTSRANLNKLLTDYTEMKKAILHVYWEEFQKDPVGLMSRVAQPASKKIDQNKLKPEMDEKGNLTTAGFACSQCGQPLFVYKLEQVSEKGKAYTNYFGRCNVAEHEKLILLAQLKPEKDSDEAVTYSLGKFGQRALDFYSIHVTKESTHPVKPLAQIAGNRYASHPVGKALSDACMGTIASFLSKYQDIIIEHQKVVKGNQKRLESLRELAGKENLEYPSVTLPPQPHTKEGVDAYNEVIARVRMWVNLNLWQKLKLSRDDAKPLLRLKGFPSFPLVERQANEVDWWDMVCNVKKLINEKKEDGKVFWQNLAGYKRQEALRPYLSSEEDRKKGKKFARYQLGDLLLHLEKKHGEDWGKVYDEAWERIDKKVEGLSKHIKLEEERRSEDAQSKAALTDWLRAKASFVIEGLKEADKDEFCRCELKLQKWYGDLRGKPFAIEAENSILDISGFSKQYNCAFIWQKDGVKKLNLYLIINYFKGGKLRFKKIKPEAFEANRFYTVINKKSGEIVPMEVNFNFDDPNLIILPLAFGKRQGREFIWNDLLSLETGSLKLANGRVIEKTLYNRRTRQDEPALFVALTFERREVLDSSNIKTPMNLIGVDRGENIPAVIALTDPEGCPLSRFKDSLGNPTHILRIGESYKEKQRTIQAKKEVEQRRAGGYSRKYASKAKNLADDMVRNTARDLLYYAVTQDAMLIFENLSRGFGRQGKRTFMAERQYTRMEDWLTAKLAYEGLASKTYLSKTLAQYTSKTCSNCGFTITSADYDRVLEKLKKTATGWMTTINGKELKVEGQITYYNRYKRQNVVKDLSVELDRLSEESVNNDISSWTKGRSGEALSLLKKRFSHRPVQEKFVCLNCGFETHADEQAALNIARSWLFLRSQEYKKYQTNKTTGNTDKRAFVETWQSFYRKKLKEVWKPAV

SEQ ID NO: 37819 - protein, 979 aa, synthetic construct
  REGION 1..979: note = engineered CasX variant
QEIKRINKIRRRLVKDSNTKKAGKTGPMKTLLVRVMTPDLRERLENLRKKPENIPQPISNTSRANLNKLLTDYTEMKKAILHVYWEEFQKDPVGLMSRVAQPASKKIDQNKLKPEMDEKGNLTTAGFACSQCGQPLFVYKLEQVSEKGKAYTNYFGRCNVAEHEKLILLAQLKPEKDSDEAVTYSLGKFGQRALDFYSIHVTKESTHPVKPLAQIAGNRYASSPVGKALSDACMGTIASFLSKYQDIIIEHQKVVKGNQKRLESLRELAGKENLEYPSVTLPPQPHTKEGVDAYNEVIARVRMWVNLNLWQKLKLSRDDAKPLLRLKGFPSFPLVERQANEVDWWDMVCNVKKLINEKKEDGKVFWQNLAGYKRQEALRPYLSSEEDRKKGKKFARYQLGDLLLHLEKKHGEDWGKVYDEAWERIDKKVEGLSKHIKLEEERRSEDAQSKAALTDWLRAKASFVIEGLKEADKDEFCRCELKLQKWYGDLRGKPFAIEAENSILDISGFSKQYNCAFIWQKDGVKKLNLYLIINYFKGGKLRFKKIKPEAFEANRFYTVINKKSGEIVPMEVNFNFDDPNLIILPLAFGKRQGREFIWNDLLSLETGSLKLANGRVIEKTLYNRRTRQDEPALFVALTFERREVLDSSNIKTPMNLIGVDRGENIPAVIALTDPEGCPLSRFKDSLGNPTHILRIGESYKEKQRTIQAKKEVEQRRAGGYSRKYASKAKNLADDMVRNTARDLLYYAVTQDAMLIFENLSRGFGRQGKRTFMAERQYTRMEDWLTAKLAYEGLASKTYLSKTLAQYTSKTCSNCGFTITSADYDRVLEKLKKTATGWMTTINGKELKVEGQITYYNRYKRQNVVKDLSVELDRLSEESVNNDISSWTKGRSGEALSLLKKRFSHRPVQEKFVCLNCGFETHADEQAALNIARSWLFLRSQEYKKYQTNKTTGNTDKRAFVETWQSFYRKKLKEVWKPAV

SEQ ID NO: 37820 - protein, 979 aa, synthetic construct
  REGION 1..979: note = engineered CasX variant
QEIKRINKIRRRLVKDSNTKKAGKTGPMKTLLVRVMTPDLRERLENLRKKPENIPQPISNTSRANLNKLLTDYTEMKKAILHVYWEEFQKDPVGLMSRVAQPASKKIDQNKLKPEMDEKGNLTTAGFACSQCGQPLFVYKLEQVSEKGKAYTNYFGRCNVAEHEKLILLAQLKPEKDSDEAVTYSLGKFGQRALDFYSIHVTKESTHPVKPLAQIAGNRYASTPVGKALSDACMGTIASFLSKYQDIIIEHQKVVKGNQKRLESLRELAGKENLEYPSVTLPPQPHTKEGVDAYNEVIARVRMWVNLNLWQKLKLSRDDAKPLLRLKGFPSFPLVERQANEVDWWDMVCNVKKLINEKKEDGKVFWQNLAGYKRQEALRPYLSSEEDRKKGKKFARYQLGDLLLHLEKKHGEDWGKVYDEAWERIDKKVEGLSKHIKLEEERRSEDAQSKAALTDWLRAKASFVIEGLKEADKDEFCRCELKLQKWYGDLRGKPFAIEAENSILDISGFSKQYNCAFIWQKDGVKKLNLYLIINYFKGGKLRFKKIKPEAFEANRFYTVINKKSGEIVPMEVNFNFDDPNLIILPLAFGKRQGREFIWNDLLSLETGSLKLANGRVIEKTLYNRRTRQDEPALFVALTFERREVLDSSNIKTPMNLIGVDRGENIPAVIALTDPEGCPLSRFKDSLGNPTHILRIGESYKEKQRTIQAKKEVEQRRAGGYSRKYASKAKNLADDMVRNTARDLLYYAVTQDAMLIFENLSRGFGRQGKRTFMAERQYTRMEDWLTAKLAYEGLASKTYLSKTLAQYTSKTCSNCGFTITSADYDRVLEKLKKTATGWMTTINGKELKVEGQITYYNRYKRQNVVKDLSVELDRLSEESVNNDISSWTKGRSGEALSLLKKRFSHRPVQEKFVCLNCGFETHADEQAALNIARSWLFLRSQEYKKYQTNKTTGNTDKRAFVETWQSFYRKKLKEVWKPAV

SEQ ID NO: 37821 - protein, 979 aa, synthetic construct
  REGION 1..979: note = engineered CasX variant
QEIKRINKIRRRLVKDSNTKKAGKTGPMKTLLVRVMTPDLRERLENLRKKPENIPQPISNTSRANLNKLLTDYTEMKKAILHVYWEEFQKDPVGLMSRVAQPASKKIDQNKLKPEMDEKGNLTTAGFACSQCGQPLFVYKLEQVSEKGKAYTNYFGRCNVAEHEKLILLAQLKPEKDSDEAVTYSLGKFGQRALDFYSIHVTKESTHPVKPLAQIAGNRYASAPVGKALSDACMGTIASFLSKYQDIIIEHQKVVKGNQKRLESLRELAGKENLEYPSVTLPPQPHTKEGVDAYNEVIARVRMWVNLNLWQKLKLSRDDAKPLLRLKGFPSFPLVERQANEVDWWDMVCNVKKLINEKKEDGKVFWQNLAGYKRQEALRPYLSSEEDRKKGKKFARYQLGDLLLHLEKKHGEDWGKVYDEAWERIDKKVEGLSKHIKLEEERRSEDAQSKAALTDWLRAKASFVIEGLKEADKDEFCRCELKLQKWYGDLRGKPFAIEAENSILDISGFSKQYNCAFIWQKDGVKKLNLYLIINYFKGGKLRFKKIKPEAFEANRFYTVINKKSGEIVPMEVNFNFDDPNLIILPLAFGKRQGREFIWNDLLSLETGSLKLANGRVIEKTLYNRRTRQDEPALFVALTFERREVLDSSNIKTPMNLIGVDRGENIPAVIALTDPEGCPLSRFKDSLGNPTHILRIGESYKEKQRTIQAKKEVEQRRAGGYSRKYASKAKNLADDMVRNTARDLLYYAVTQDAMLIFENLSRGFGRQGKRTFMAERQYTRMEDWLTAKLAYEGLASKTYLSKTLAQYTSKTCSNCGFTITSADYDRVLEKLKKTATGWMTTINGKELKVEGQITYYNRYKRQNVVKDLSVELDRLSEESVNNDISSWTKGRSGEALSLLKKRFSHRPVQEKFVCLNCGFETHADEQAALNIARSWLFLRSQEYKKYQTNKTTGNTDKRAFVETWQSFYRKKLKEVWKPAV

SEQ ID NO: 37822 - protein, 979 aa, synthetic construct
  REGION 1..979: note = engineered CasX variant
QEIKRINKIRRRLVKDSNTKKAGKTGPMKTLLVRVMTPDLRERLENLRKKPENIPQPISNTSRANLNKLLTDYTEMKKAILHVYWEEFQKDPVGLMSRVAQPASKKIDQNKLKPEMDEKGNLTTAGFACSQCGQPLFVYKLEQVSEKGKAYTNYFGRCNVAEHEKLILLAQLKPEKDSDEAVTYSLGKFGQRALDFYSIHVTKESTHPVKPLAQIAGNRYASVPVGKALSDACMGTIASFLSKYQDIIIEHQKVVKGNQKRLESLRELAGKENLEYPSVTLPPQPHTKEGVDAYNEVIARVRMWVNLNLWQKLKLSRDDAKPLLRLKGFPSFPLVERQANEVDWWDMVCNVKKLINEKKEDGKVFWQNLAGYKRQEALRPYLSSEEDRKKGKKFARYQLGDLLLHLEKKHGEDWGKVYDEAWERIDKKVEGLSKHIKLEEERRSEDAQSKAALTDWLRAKASFVIEGLKEADKDEFCRCELKLQKWYGDLRGKPFAIEAENSILDISGFSKQYNCAFIWQKDGVKKLNLYLIINYFKGGKLRFKKIKPEAFEANRFYTVINKKSGEIVPMEVNFNFDDPNLIILPLAFGKRQGREFIWNDLLSLETGSLKLANGRVIEKTLYNRRTRQDEPALFVALTFERREVLDSSNIKTPMNLIGVDRGENIPAVIALTDPEGCPLSRFKDSLGNPTHILRIGESYKEKQRTIQAKKEVEQRRAGGYSRKYASKAKNLADDMVRNTARDLLYYAVTQDAMLIFENLSRGFGRQGKRTFMAERQYTRMEDWLTAKLAYEGLASKTYLSKTLAQYTSKTCSNCGFTITSADYDRVLEKLKKTATGWMTTINGKELKVEGQITYYNRYKRQNVVKDLSVELDRLSEESVNNDISSWTKGRSGEALSLLKKRFSHRPVQEKFVCLNCGFETHADEQAALNIARSWLFLRSQEYKKYQTNKTTGNTDKRAFVETWQSFYRKKLKEVWKPAV

SEQ ID NO: 37823 - protein, 979 aa, synthetic construct
  REGION 1..979: note = engineered CasX variant
QEIKRINKIRRRLVKDSNTKKAGKTGPMKTLLVRVMTPDLRERLENLRKKPENIPQPISNTSRANLNKLLTDYTEMKKAILHVYWEEFQKDPVGLMSRVAQPASKKIDQNKLKPEMDEKGNLTTAGFACSQCGQPLFVYKLEQVSEKGKAYTNYFGRCNVAEHEKLIKLAQLKPEKDSDEAVTYSLGKFGQRALDFYSIHVTKESTHPVKPLAQIAGNRYASGPVGKALSDACMGTIASFLSKYQDIIIEHQKVVKGNQKRLESLRELAGKENLEYPSVTLPPQPHTKEGVDAYNEVIARVRMWVNLNLWQKLKLSRDDAKPLLRLKGFPSFPLVERQANEVDWWDMVCNVKKLINEKKEDGKVFWQNLAGYKRQEALRPYLSSEEDRKKGKKFARYQLGDLLLHLEKKHGEDWGKVYDEAWERIDKKVEGLSKHIKLEEERRSEDAQSKAALTDWLRAKASFVIEGLKEADKDEFCRCELKLQKWYGDLRGKPFAIEAENSILDISGFSKQYNCAFIWQKDGVKKLNLYLIINYFKGGKLRFKKIKPEAFEANRFYTVINKKSGEIVPMEVNFNFDDPNLIILPLAFGKRQGREFIWNDLLSLETGSLKLANGRVIEKTLYNRRTRQDEPALFVALTFERREVLDSSNIKTPMNLIGVDRGENIPAVIALTDPEGCPLSRFKDSLGNPTHILRIGESYKEKQRTIQAKKEVEQRRAGGYSRKYASKAKNLADDMVRNTARDLLYYAVTQDAMLIFENLSRGFGRQGKRTFMAERQYTRMEDWLTAKLAYEGLASKTYLSKTLAQYTSKTCSNCGFTITSADYDRVLEKLKKTATGWMTTINGKELKVEGQITYYNRYKRQNVVKDLSVELDRLSEESVNNDISSWTKGRSGEALSLLKKRFSHRPVQEKFVCLNCGFETHADEQAALNIARSWLFLRSQEYKKYQTNKTTGNTDKRAFVETWQSFYRKKLKEVWKPAV

SEQ ID NO: 37824 - protein, 978 aa, synthetic construct
  REGION 1..978: note = engineered CasX variant
QEIKRINKIRRRLVKDSNTKKAGKTGPMKTLLVRVMTPDLRERLENLRKKPENIPQPISNTSRANLNKLLTDYTEMKKAILHVYWEEFQKDPVGLMSRVAQPASKKIDQNKLKPEMDEKGNLTTAGFACSQCGQPLFVYKLEQVSEKGKAYTNYFGRCNVAEHEKLILLAQLKPEKDSDEAVTYSLGKFGQRALDFYSIHVTKESTHPVKPLAQIAGNRYASPVGKALSDACMGTIASFLSKYQDIIIEHQKVVKGNQKRLESLRELAGKENLEYPSVTLPPQPHTKEGVDAYNEVIARVRMWVNLNLWQKLKLSRDDAKPLLRLKGFPSFPLVERQANEVDWWDMVCNVKKLINEKKEDGKVFWQNLAGYKRQEALRPYLSSEEDRKKGKKFARYQLGDLLLHLEKKHGEDWGKVYDEAWERIDKKVEGLSKHIKLEEERRSEDAQSKAALTDWLRAKASFVIEGLKEADKDEFCRCELKLQKWYGDLRGKPFAIEAENSILDISGFSKQYNCAFIWQKDGVKKLNLYLIINYFKGGKLRFKKIKPEAFEANRFYTVINKKSGEIVPMEVNFNFDDPNLIILPLAFGKRQGREFIWNDLLSLETGSLKLANGRVIEKTLYNRRTRQDEPALFVALTFERREVLDSSNIKTPMNLIGVDRGENIPAVIALTDPEGCPLSRFKDSLGNPTHILRIGESYKEKQRTIQAKKEVEQRRAGGYSRKYASKAKNLADDMVRNTARDLLYYAVTQDAMLIFENLSRGFGRQGKRTFMAERQYTRMEDWLTAKLAYEGLASKTYLSKTLAQYTSKTCSNCGFTITSADYDRVLEKLKKTATGWMTTINGKELKVEGQITYYNRYKRQNVVKDLSVELDRLSEESVNNDISSWTKGRSGEALSLLKKRFSHRPVQEKFVCLNCGFETHADEQAALNIARSWLFLRSQEYKKYQTNKTTGNTDKRAFVETWQSFYRKKLKEVWKPAV

SEQ ID NO: 37825 - protein, 979 aa, synthetic construct
  REGION 1..979: note = engineered CasX variant
QEIKRINKIRRRLVKDSNTKKAGKTGPMKTLLVRVMTPDLRERLENLRKKPENIPQPISNTSRANLNKLLTDYTEMKKAILHVYWEEFQKDPVGLMSRVAQPASKKIDQNKLKPEMDEKGNLTTAGFACSQCGQPLFVYKLEQVSEKGKAYTNYFGRCNVAEHEKLILLAQLKPEKDSDEAVTYSLGKFGQRALDFYSIHVTKESTHPVKPLAQIAGNRYASYPVGKALSDACMGTIASFLSKYQDIIIEHQKVVKGNQKRLESLRELAGKENLEYPSVTLPPQPHTKEGVDAYNEVIARVRMWVNLNLWQKLKLSRDDAKPLLRLKGFPSFPLVERQANEVDWWDMVCNVKKLINEKKEDGKVFWQNLAGYKRQEALRPYLSSEEDRKKGKKFARYQLGDLLLHLEKKHGEDWGKVYDEAWERIDKKVEGLSKHIKLEEERRSEDAQSKAALTDWLRAKASFVIEGLKEADKDEFCRCELKLQKWYGDLRGKPFAIEAENSILDISGFSKQYNCAFIWQKDGVKKLNLYLIINYFKGGKLRFKKIKPEAFEANRFYTVINKKSGEIVPMEVNFNFDDPNLIILPLAFGKRQGREFIWNDLLSLETGSLKLANGRVIEKTLYNRRTRQDEPALFVALTFERREVLDSSNIKTPMNLIGVDRGENIPAVIALTDPEGCPLSRFKDSLGNPTHILRIGESYKEKQRTIQAKKEVEQRRAGGYSRKYASKAKNLADDMVRNTARDLLYYAVTQDAMLIFENLSRGFGRQGKRTFMAERQYTRMEDWLTAKLAYEGLPSKVYLSKTLAQYTSKTCSNCGFTITSADYDRVLEKLKKTATGWMTTINGKELKVEGQITYYNRYKRQNVVKDLSVELDRLSEESVNNDISSWTKGRSGEALSLLKKRFSHRPVQEKFVCLNCGFETHADEQAALNIARSWLFLRSQEYKKYQTNKTTGNTDKRAFVETWQSFYRKKLKEVWKPAV

SEQ ID NO: 37826 - protein, 979 aa, synthetic construct
  REGION 1..979: note = engineered CasX variant
QEIKRINKIRRRLVKDSNTKKAGKTGPMKTLLVRVMTPDLRERLENLRKKPENIPQPISNTSRANLNKLLTDYTEMKKAILHVYWEEFQKDPVGLMSRVAQPASKKIDQNKLKPEMDEKGNLTTAGFACSQCGQPLFVYKLEQVSEKGKAYTNYFGRCNVAEHEKLILLAQLKPEKDSDEAVTYSLGKFGQRALDFYSIHVTKESTHPVKPLAQIAGNRYASHPVGKALSDACMGTIASFLSKYQDIIIEHQKVVKGNQKRLESLRELAGKENLEYPSVTLPPQPHTKEGVDAYNEVIARVRMWVNLNLWQKLKLSRDDAKPLLRLKGFPSFPLVERQANEVDWWDMVCNVKKLINEKKEDGKVFWQNLAGYKRQEALRPYLSSEEDRKKGKKFARYQLGDLLLHLEKKHGEDWGKVYDEAWERIDKKVEGLSKHIKLEEERRSEDAQSKAALTDWLRAKASFVIEGLKEADKDEFCRCELKLQKWYGDLRGKPFAIEAENSILDISGFSKQYNCAFIWQKDGVKKLNLYLIINYFKGGKLRFKKIKPEAFEANRFYTVINKKSGEIVPMEVNFNFDDPNLIILPLAFGKRQGREFIWNDLLSLETGSLKLANGRVIEKTLYNRRTRQDEPALFVALTFERREVLDSSNIKTPMNLIGVDRGENIPAVIALTDPEGCPLSRFKDSLGNPTHILRIGESYKEKQRTIQAKKEVEQRRAGGYSRKYASKAKNLADDMVRNTARDLLYYAVTQDAMLIFENLSRGFGRQGKRTFMAERQYTRMEDWLTAKLAYEGLPSKVYLSKTLAQYTSKTCSNCGFTITSADYDRVLEKLKKTATGWMTTINGKELKVEGQITYYNRYKRQNVVKDLSVELDRLSEESVNNDISSWTKGRSGEALSLLKKRFSHRPVQEKFVCLNCGFETHADEQAALNIARSWLFLRSQEYKKYQTNKTTGNTDKRAFVETWQSFYRKKLKEVWKPAV

SEQ ID NO: 37827 - protein, 979 aa, synthetic construct
  REGION 1..979: note = engineered CasX variant
QEIKRINKIRRRLVKDSNTKKAGKTGPMKTLLVRVMTPDLRERLENLRKKPENIPQPISNTSRANLNKLLTDYTEMKKAILHVYWEEFQKDPVGLMSRVAQPASKKIDQNKLKPEMDEKGNLTTAGFACSQCGQPLFVYKLEQVSEKGKAYTNYFGRCNVAEHEKLILLAQLKPEKDSDEAVTYSLGKFGQRALDFYSIHVTKESTHPVKPLAQIAGNRYASSPVGKALSDACMGTIASFLSKYQDIIIEHQKVVKGNQKRLESLRELAGKENLEYPSVTLPPQPHTKEGVDAYNEVIARVRMWVNLNLWQKLKLSRDDAKPLLRLKGFPSFPLVERQANEVDWWDMVCNVKKLINEKKEDGKVFWQNLAGYKRQEALRPYLSSEEDRKKGKKFARYQLGDLLLHLEKKHGEDWGKVYDEAWERIDKKVEGLSKHIKLEEERRSEDAQSKAALTDWLRAKASFVIEGLKEADKDEFCRCELKLQKWYGDLRGKPFAIEAENSILDISGFSKQYNCAFIWQKDGVKKLNLYLIINYFKGGKLRFKKIKPEAFEANRFYTVINKKSGEIVPMEVNFNFDDPNLIILPLAFGKRQGREFIWNDLLSLETGSLKLANGRVIEKTLYNRRTRQDEPALFVALTFERREVLDSSNIKTPMNLIGVDRGENIPAVIALTDPEGCPLSRFKDSLGNPTHILRIGESYKEKQRTIQAKKEVEQRRAGGYSRKYASKAKNLADDMVRNTARDLLYYAVTQDAMLIFENLSRGFGRQGKRTFMAERQYTRMEDWLTAKLAYEGLPSKVYLSKTLAQYTSKTCSNCGFTITSADYDRVLEKLKKTATGWMTTINGKELKVEGQITYYNRYKRQNVVKDLSVELDRLSEESVNNDISSWTKGRSGEALSLLKKRFSHRPVQEKFVCLNCGFETHADEQAALNIARSWLFLRSQEYKKYQTNKTTGNTDKRAFVETWQSFYRKKLKEVWKPAV

SEQ ID NO: 37828 - protein, 979 aa, synthetic construct
  REGION 1..979: note = engineered CasX variant
QEIKRINKIRRRLVKDSNTKKAGKTGPMKTLLVRVMTPDLRERLENLRKKPENIPQPISNTSRANLNKLLTDYTEMKKAILHVYWEEFQKDPVGLMSRVAQPASKKIDQNKLKPEMDEKGNLTTAGFACSQCGQPLFVYKLEQVSEKGKAYTNYFGRCNVAEHEKLILLAQLKPEKDSDEAVTYSLGKFGQRALDFYSIHVTKESTHPVKPLAQIAGNRYASTPVGKALSDACMGTIASFLSKYQDIIIEHQKVVKGNQKRLESLRELAGKENLEYPSVTLPPQPHTKEGVDAYNEVIARVRMWVNLNLWQKLKLSRDDAKPLLRLKGFPSFPLVERQANEVDWWDMVCNVKKLINEKKEDGKVFWQNLAGYKRQEALRPYLSSEEDRKKGKKFARYQLGDLLLHLEKKHGEDWGKVYDEAWERIDKKVEGLSKHIKLEEERRSEDAQSKAALTDWLRAKASFVIEGLKEADKDEFCRCELKLQKWYGDLRGKPFAIEAENSILDISGFSKQYNCAFIWQKDGVKKLNLYLIINYFKGGKLRFKKIKPEAFEANRFYTVINKKSGEIVPMEVNFNFDDPNLIILPLAFGKRQGREFIWNDLLSLETGSLKLANGRVIEKTLYNRRTRQDEPALFVALTFERREVLDSSNIKTPMNLIGVDRGENIPAVIALTDPEGCPLSRFKDSLGNPTHILRIGESYKEKQRTIQAKKEVEQRRAGGYSRKYASKAKNLADDMVRNTARDLLYYAVTQDAMLIFENLSRGFGRQGKRTFMAERQYTRMEDWLTAKLAYEGLPSKVYLSKTLAQYTSKTCSNCGFTITSADYDRVLEKLKKTATGWMTTINGKELKVEGQITYYNRYKRQNVVKDLSVELDRLSEESVNNDISSWTKGRSGEALSLLKKRFSHRPVQEKFVCLNCGFETHADEQAALNIARSWLFLRSQEYKKYQTNKTTGNTDKRAFVETWQSFYRKKLKEVWKPAV

SEQ ID NO: 37829 - protein, 979 aa, synthetic construct
  REGION 1..979: note = engineered CasX variant
QEIKRINKIRRRLVKDSNTKKAGKTGPMKTLLVRVMTPDLRERLENLRKKPENIPQPISNTSRANLNKLLTDYTEMKKAILHVYWEEFQKDPVGLMSRVAQPASKKIDQNKLKPEMDEKGNLTTAGFACSQCGQPLFVYKLEQVSEKGKAYTNYFGRCNVAEHEKLILLAQLKPEKDSDEAVTYSLGKFGQRALDFYSIHVTKESTHPVKPLAQIAGNRYASAPVGKALSDACMGTIASFLSKYQDIIIEHQKVVKGNQKRLESLRELAGKENLEYPSVTLPPQPHTKEGVDAYNEVIARVRMWVNLNLWQKLKLSRDDAKPLLRLKGFPSFPLVERQANEVDWWDMVCNVKKLINEKKEDGKVFWQNLAGYKRQEALRPYLSSEEDRKKGKKFARYQLGDLLLHLEKKHGEDWGKVYDEAWERIDKKVEGLSKHIKLEEERRSEDAQSKAALTDWLRAKASFVIEGLKEADKDEFCRCELKLQKWYGDLRGKPFAIEAENSILDISGFSKQYNCAFIWQKDGVKKLNLYLIINYFKGGKLRFKKIKPEAFEANRFYTVINKKSGEIVPMEVNFNFDDPNLIILPLAFGKRQGREFIWNDLLSLETGSLKLANGRVIEKTLYNRRTRQDEPALFVALTFERREVLDSSNIKTPMNLIGVDRGENIPAVIALTDPEGCPLSRFKDSLGNPTHILRIGESYKEKQRTIQAKKEVEQRRAGGYSRKYASKAKNLADDMVRNTARDLLYYAVTQDAMLIFENLSRGFGRQGKRTFMAERQYTRMEDWLTAKLAYEGLPSKVYLSKTLAQYTSKTCSNCGFTITSADYDRVLEKLKKTATGWMTTINGKELKVEGQITYYNRYKRQNVVKDLSVELDRLSEESVNNDISSWTKGRSGEALSLLKKRFSHRPVQEKFVCLNCGFETHADEQAALNIARSWLFLRSQEYKKYQTNKTTGNTDKRAFVETWQSFYRKKLKEVWKPAV

SEQ ID NO: 37830 - protein, 979 aa, synthetic construct
  REGION 1..979: note = engineered CasX variant
QEIKRINKIRRRLVKDSNTKKAGKTGPMKTLLVRVMTPDLRERLENLRKKPENIPQPISNTSRANLNKLLTDYTEMKKAILHVYWEEFQKDPVGLMSRVAQPASKKIDQNKLKPEMDEKGNLTTAGFACSQCGQPLFVYKLEQVSEKGKAYTNYFGRCNVAEHEKLILLAQLKPEKDSDEAVTYSLGKFGQRALDFYSIHVTKESTHPVKPLAQIAGNRYASVPVGKALSDACMGTIASFLSKYQDIIIEHQKVVKGNQKRLESLRELAGKENLEYPSVTLPPQPHTKEGVDAYNEVIARVRMWVNLNLWQKLKLSRDDAKPLLRLKGFPSFPLVERQANEVDWWDMVCNVKKLINEKKEDGKVFWQNLAGYKRQEALRPYLSSEEDRKKGKKFARYQLGDLLLHLEKKHGEDWGKVYDEAWERIDKKVEGLSKHIKLEEERRSEDAQSKAALTDWLRAKASFVIEGLKEADKDEFCRCELKLQKWYGDLRGKPFAIEAENSILDISGFSKQYNCAFIWQKDGVKKLNLYLIINYFKGGKLRFKKIKPEAFEANRFYTVINKKSGEIVPMEVNFNFDDPNLIILPLAFGKRQGREFIWNDLLSLETGSLKLANGRVIEKTLYNRRTRQDEPALFVALTFERREVLDSSNIKTPMNLIGVDRGENIPAVIALTDPEGCPLSRFKDSLGNPTHILRIGESYKEKQRTIQAKKEVEQRRAGGYSRKYASKAKNLADDMVRNTARDLLYYAVTQDAMLIFENLSRGFGRQGKRTFMAERQYTRMEDWLTAKLAYEGLPSKVYLSKTLAQYTSKTCSNCGFTITSADYDRVLEKLKKTATGWMTTINGKELKVEGQITYYNRYKRQNVVKDLSVELDRLSEESVNNDISSWTKGRSGEALSLLKKRFSHRPVQEKFVCLNCGFETHADEQAALNIARSWLFLRSQEYKKYQTNKTTGNTDKRAFVETWQSFYRKKLKEVWKPAV

SEQ ID NO: 37831 - protein, 979 aa, synthetic construct
  REGION 1..979: note = engineered CasX variant
QEIKRINKIRRRLVKDSNTKKAGKTGPMKTLLVRVMTPDLRERLENLRKKPENIPQPISNTSRANLNKLLTDYTEMKKAILHVYWEEFQKDPVGLMSRVAQPASKKIDQNKLKPEMDEKGNLTTAGFACSQCGQPLFVYKLEQVSEKGKAYTNYFGRCNVAEHEKLIKLAQLKPEKDSDEAVTYSLGKFGQRALDFYSIHVTKESTHPVKPLAQIAGNRYASGPVGKALSDACMGTIASFLSKYQDIIIEHQKVVKGNQKRLESLRELAGKENLEYPSVTLPPQPHTKEGVDAYNEVIARVRMWVNLNLWQKLKLSRDDAKPLLRLKGFPSFPLVERQANEVDWWDMVCNVKKLINEKKEDGKVFWQNLAGYKRQEALRPYLSSEEDRKKGKKFARYQLGDLLLHLEKKHGEDWGKVYDEAWERIDKKVEGLSKHIKLEEERRSEDAQSKAALTDWLRAKASFVIEGLKEADKDEFCRCELKLQKWYGDLRGKPFAIEAENSILDISGFSKQYNCAFIWQKDGVKKLNLYLIINYFKGGKLRFKKIKPEAFEANRFYTVINKKSGEIVPMEVNFNFDDPNLIILPLAFGKRQGREFIWNDLLSLETGSLKLANGRVIEKTLYNRRTRQDEPALFVALTFERREVLDSSNIKTPMNLIGVDRGENIPAVIALTDPEGCPLSRFKDSLGNPTHILRIGESYKEKQRTIQAKKEVEQRRAGGYSRKYASKAKNLADDMVRNTARDLLYYAVTQDAMLIFENLSRGFGRQGKRTFMAERQYTRMEDWLTAKLAYEGLPSKVYLSKTLAQYTSKTCSNCGFTITSADYDRVLEKLKKTATGWMTTINGKELKVEGQITYYNRYKRQNVVKDLSVELDRLSEESVNNDISSWTKGRSGEALSLLKKRFSHRPVQEKFVCLNCGFETHADEQAALNIARSWLFLRSQEYKKYQTNKTTGNTDKRAFVETWQSFYRKKLKEVWKPAV

SEQ ID NO: 37832 - protein, 978 aa, synthetic construct
  REGION 1..978: note = engineered CasX variant
QEIKRINKIRRRLVKDSNTKKAGKTGPMKTLLVRVMTPDLRERLENLRKKPENIPQPISNTSRANLNKLLTDYTEMKKAILHVYWEEFQKDPVGLMSRVAQPASKKIDQNKLKPEMDEKGNLTTAGFACSQCGQPLFVYKLEQVSEKGKAYTNYFGRCNVAEHEKLILLAQLKPEKDSDEAVTYSLGKFGQRALDFYSIHVTKESTHPVKPLAQIAGNRYASPVGKALSDACMGTIASFLSKYQDIIIEHQKVVKGNQKRLESLRELAGKENLEYPSVTLPPQPHTKEGVDAYNEVIARVRMWVNLNLWQKLKLSRDDAKPLLRLKGFPSFPLVERQANEVDWWDMVCNVKKLINEKKEDGKVFWQNLAGYKRQEALRPYLSSEEDRKKGKKFARYQLGDLLLHLEKKHGEDWGKVYDEAWERIDKKVEGLSKHIKLEEERRSEDAQSKAALTDWLRAKASFVIEGLKEADKDEFCRCELKLQKWYGDLRGKPFAIEAENSILDISGFSKQYNCAFIWQKDGVKKLNLYLIINYFKGGKLRFKKIKPEAFEANRFYTVINKKSGEIVPMEVNFNFDDPNLIILPLAFGKRQGREFIWNDLLSLETGSLKLANGRVIEKTLYNRRTRQDEPALFVALTFERREVLDSSNIKTPMNLIGVDRGENIPAVIALTDPEGCPLSRFKDSLGNPTHILRIGESYKEKQRTIQAKKEVEQRRAGGYSRKYASKAKNLADDMVRNTARDLLYYAVTQDAMLIFENLSRGFGRQGKRTFMAERQYTRMEDWLTAKLAYEGLPSKVYLSKTLAQYTSKTCSNCGFTITSADYDRVLEKLKKTATGWMTTINGKELKVEGQITYYNRYKRQNVVKDLSVELDRLSEESVNNDISSWTKGRSGEALSLLKKRFSHRPVQEKFVCLNCGFETHADEQAALNIARSWLFLRSQEYKKYQTNKTTGNTDKRAFVETWQSFYRKKLKEVWKPAV

SEQ ID NO: 37833 - protein, 980 aa, synthetic construct
  REGION 1..980: note = engineered CasX variant
QEIKRINKIRRRLVKDSNTKKAGKTGPMKTLLVRVMTPDLRERLENLRKKPENIPQPISNTSRANLNKLLTDYTEMKKAILHVYWEEFQKDPVGLMSRVAQPASKKIDQNKLKPEMDEKGNLTTAGFACSQCGQPLFVYKLEQVSEKGKAYTNYFGRCNVAEHEKLILLAQLKPEKDSDEAVTYSLGKFGQRALDFYSIHVTKESTHPVKPLAQIAGNRYASYPVGKALSDACMGTIASFLSKYQDIIIEHQKVVKGNQKRLESLRELAGKENLEYPSVTLPPQPHTKEGVDAYNEVIARVRMWVNLNLWQKLKLSRDDAKPLLRLKGFPSFPLVERQANEVDWWDMVCNVKKLINEKKEDGKVFWQNLAGYKRQEALRPYLSSEEDRKKGKKFARYQLGDLLLHLEKKHGEDWGKVYDEAWERIDKKVEGLSKHIKLEEERRSEDAQSKAALTDWLRAKASFVIEGLKEADKDEFCRCELKLQKWYGDLRGKPFAIEAENSILDISGFSKQYNCAFIWQKDGVKKLNLYLIINYFKGGKLRFKKIKPEAFEANRFYTVINKKSGEIVPMEVNFNFDDPNLIILPLAFGKRQGREFIWNDLLSLETGSLKLANGRVIEKTLYNRRTRQDEPALFVALTFERREVLDSSNIKTPMNLIGVDRGENIPAVIALTDPEGCPLSRFKDSLGNPTHILRIGESYKEKQRTIQAKKEVEQRRAGGYSRKYASKAKNLADDMVRNTARDLLYYAVTQDAMLIFENLSRGFGRQGKRTFMAERQYTRMEDWLTAKLAYEGPLPSKTYLSKTLAQYTSKTCSNCGFTITSADYDRVLEKLKKTATGWMTTINGKELKVEGQITYYNRYKRQNVVKDLSVELDRLSEESVNNDISSWTKGRSGEALSLLKKRFSHRPVQEKFVCLNCGFETHADEQAALNIARSWLFLRSQEYKKYQTNKTTGNTDKRAFVETWQSFYRKKLKEVWKPAV

SEQ ID NO: 37834 - protein, 980 aa, synthetic construct
  REGION 1..980: note = engineered CasX variant
QEIKRINKIRRRLVKDSNTKKAGKTGPMKTLLVRVMTPDLRERLENLRKKPENIPQPISNTSRANLNKLLTDYTEMKKAILHVYWEEFQKDPVGLMSRVAQPASKKIDQNKLKPEMDEKGNLTTAGFACSQCGQPLFVYKLEQVSEKGKAYTNYFGRCNVAEHEKLILLAQLKPEKDSDEAVTYSLGKFGQRALDFYSIHVTKESTHPVKPLAQIAGNRYASHPVGKALSDACMGTIASFLSKYQDIIIEHQKVVKGNQKRLESLRELAGKENLEYPSVTLPPQPHTKEGVDAYNEVIARVRMWVNLNLWQKLKLSRDDAKPLLRLKGFPSFPLVERQANEVDWWDMVCNVKKLINEKKEDGKVFWQNLAGYKRQEALRPYLSSEEDRKKGKKFARYQLGDLLLHLEKKHGEDWGKVYDEAWERIDKKVEGLSKHIKLEEERRSEDAQSKAALTDWLRAKASFVIEGLKEADKDEFCRCELKLQKWYGDLRGKPFAIEAENSILDISGFSKQYNCAFIWQKDGVKKLNLYLIINYFKGGKLRFKKIKPEAFEANRFYTVINKKSGEIVPMEVNFNFDDPNLIILPLAFGKRQGREFIWNDLLSLETGSLKLANGRVIEKTLYNRRTRQDEPALFVALTFERREVLDSSNIKTPMNLIGVDRGENIPAVIALTDPEGCPLSRFKDSLGNPTHILRIGESYKEKQRTIQAKKEVEQRRAGGYSRKYASKAKNLADDMVRNTARDLLYYAVTQDAMLIFENLSRGFGRQGKRTFMAERQYTRMEDWLTAKLAYEGPLPSKTYLSKTLAQYTSKTCSNCGFTITSADYDRVLEKLKKTATGWMTTINGKELKVEGQITYYNRYKRQNVVKDLSVELDRLSEESVNNDISSWTKGRSGEALSLLKKRFSHRPVQEKFVCLNCGFETHADEQAALNIARSWLFLRSQEYKKYQTNKTTGNTDKRAFVETWQSFYRKKLKEVWKPAV

SEQ ID NO: 37835 - protein, 980 aa, synthetic construct
  REGION 1..980: note = engineered CasX variant
QEIKRINKIRRRLVKDSNTKKAGKTGPMKTLLVRVMTPDLRERLENLRKKPENIPQPISNTSRANLNKLLTDYTEMKKAILHVYWEEFQKDPVGLMSRVAQPASKKIDQNKLKPEMDEKGNLTTAGFACSQCGQPLFVYKLEQVSEKGKAYTNYFGRCNVAEHEKLILLAQLKPEKDSDEAVTYSLGKFGQRALDFYSIHVTKESTHPVKPLAQIAGNRYASSPVGKALSDACMGTIASFLSKYQDIIIEHQKVVKGNQKRLESLRELAGKENLEYPSVTLPPQPHTKEGVDAYNEVIARVRMWVNLNLWQKLKLSRDDAKPLLRLKGFPSFPLVERQANEVDWWDMVCNVKKLINEKKEDGKVFWQNLAGYKRQEALRPYLSSEEDRKKGKKFARYQLGDLLLHLEKKHGEDWGKVYDEAWERIDKKVEGLSKHIKLEEERRSEDAQSKAALTDWLRAKASFVIEGLKEADKDEFCRCELKLQKWYGDLRGKPFAIEAENSILDISGFSKQYNCAFIWQKDGVKKLNLYLIINYFKGGKLRFKKIKPEAFEANRFYTVINKKSGEIVPMEVNFNFDDPNLIILPLAFGKRQGREFIWNDLLSLETGSLKLANGRVIEKTLYNRRTRQDEPALFVALTFERREVLDSSNIKTPMNLIGVDRGENIPAVIALTDPEGCPLSRFKDSLGNPTHILRIGESYKEKQRTIQAKKEVEQRRAGGYSRKYASKAKNLADDMVRNTARDLLYYAVTQDAMLIFENLSRGFGRQGKRTFMAERQYTRMEDWLTAKLAYEGPLPSKTYLSKTLAQYTSKTCSNCGFTITSADYDRVLEKLKKTATGWMTTINGKELKVEGQITYYNRYKRQNVVKDLSVELDRLSEESVNNDISSWTKGRSGEALSLLKKRFSHRPVQEKFVCLNCGFETHADEQAALNIARSWLFLRSQEYKKYQTNKTTGNTDKRAFVETWQSFYRKKLKEVWKPAV

SEQ ID NO: 37836 - protein, 980 aa, synthetic construct
  REGION 1..980: note = engineered CasX variant
QEIKRINKIRRRLVKDSNTKKAGKTGPMKTLLVRVMTPDLRERLENLRKKPENIPQPISNTSRANLNKLLTDYTEMKKAILHVYWEEFQKDPVGLMSRVAQPASKKIDQNKLKPEMDEKGNLTTAGFACSQCGQPLFVYKLEQVSEKGKAYTNYFGRCNVAEHEKLILLAQLKPEKDSDEAVTYSLGKFGQRALDFYSIHVTKESTHPVKPLAQIAGNRYASTPVGKALSDACMGTIASFLSKYQDIIIEHQKVVKGNQKRLESLRELAGKENLEYPSVTLPPQPHTKEGVDAYNEVIARVRMWVNLNLWQKLKLSRDDAKPLLRLKGFPSFPLVERQANEVDWWDMVCNVKKLINEKKEDGKVFWQNLAGYKRQEALRPYLSSEEDRKKGKKFARYQLGDLLLHLEKKHGEDWGKVYDEAWERIDKKVEGLSKHIKLEEERRSEDAQSKAALTDWLRAKASFVIEGLKEADKDEFCRCELKLQKWYGDLRGKPFAIEAENSILDISGFSKQYNCAFIWQKDGVKKLNLYLIINYFKGGKLRFKKIKPEAFEANRFYTVINKKSGEIVPMEVNFNFDDPNLIILPLAFGKRQGREFIWNDLLSLETGSLKLANGRVIEKTLYNRRTRQDEPALFVALTFERREVLDSSNIKTPMNLIGVDRGENIPAVIALTDPEGCPLSRFKDSLGNPTHILRIGESYKEKQRTIQAKKEVEQRRAGGYSRKYASKAKNLADDMVRNTARDLLYYAVTQDAMLIFENLSRGFGRQGKRTFMAERQYTRMEDWLTAKLAYEGPLPSKTYLSKTLAQYTSKTCSNCGFTITSADYDRVLEKLKKTATGWMTTINGKELKVEGQITYYNRYKRQNVVKDLSVELDRLSEESVNNDISSWTKGRSGEALSLLKKRFSHRPVQEKFVCLNCGFETHADEQAALNIARSWLFLRSQEYKKYQTNKTTGNTDKRAFVETWQSFYRKKLKEVWKPAV

SEQ ID NO: 37837 - protein, 980 aa, synthetic construct
  REGION 1..980: note = engineered CasX variant
QEIKRINKIRRRLVKDSNTKKAGKTGPMKTLLVRVMTPDLRERLENLRKKPENIPQPISNTSRANLNKLLTDYTEMKKAILHVYWEEFQKDPVGLMSRVAQPASKKIDQNKLKPEMDEKGNLTTAGFACSQCGQPLFVYKLEQVSEKGKAYTNYFGRCNVAEHEKLILLAQLKPEKDSDEAVTYSLGKFGQRALDFYSIHVTKESTHPVKPLAQIAGNRYASAPVGKALSDACMGTIASFLSKYQDIIIEHQKVVKGNQKRLESLRELAGKENLEYPSVTLPPQPHTKEGVDAYNEVIARVRMWVNLNLWQKLKLSRDDAKPLLRLKGFPSFPLVERQANEVDWWDMVCNVKKLINEKKEDGKVFWQNLAGYKRQEALRPYLSSEEDRKKGKKFARYQLGDLLLHLEKKHGEDWGKVYDEAWERIDKKVEGLSKHIKLEEERRSEDAQSKAALTDWLRAKASFVIEGLKEADKDEFCRCELKLQKWYGDLRGKPFAIEAENSILDISGFSKQYNCAFIWQKDGVKKLNLYLIINYFKGGKLRFKKIKPEAFEANRFYTVINKKSGEIVPMEVNFNFDDPNLIILPLAFGKRQGREFIWNDLLSLETGSLKLANGRVIEKTLYNRRTRQDEPALFVALTFERREVLDSSNIKTPMNLIGVDRGENIPAVIALTDPEGCPLSRFKDSLGNPTHILRIGESYKEKQRTIQAKKEVEQRRAGGYSRKYASKAKNLADDMVRNTARDLLYYAVTQDAMLIFENLSRGFGRQGKRTFMAERQYTRMEDWLTAKLAYEGPLPSKTYLSKTLAQYTSKTCSNCGFTITSADYDRVLEKLKKTATGWMTTINGKELKVEGQITYYNRYKRQNVVKDLSVELDRLSEESVNNDISSWTKGRSGEALSLLKKRFSHRPVQEKFVCLNCGFETHADEQAALNIARSWLFLRSQEYKKYQTNKTTGNTDKRAFVETWQSFYRKKLKEVWKPAV

SEQ ID NO: 37838 - protein, 980 aa, synthetic construct
  REGION 1..980: note = engineered CasX variant
QEIKRINKIRRRLVKDSNTKKAGKTGPMKTLLVRVMTPDLRERLENLRKKPENIPQPISNTSRANLNKLLTDYTEMKKAILHVYWEEFQKDPVGLMSRVAQPASKKIDQNKLKPEMDEKGNLTTAGFACSQCGQPLFVYKLEQVSEKGKAYTNYFGRCNVAEHEKLILLAQLKPEKDSDEAVTYSLGKFGQRALDFYSIHVTKESTHPVKPLAQIAGNRYASVPVGKALSDACMGTIASFLSKYQDIIIEHQKVVKGNQKRLESLRELAGKENLEYPSVTLPPQPHTKEGVDAYNEVIARVRMWVNLNLWQKLKLSRDDAKPLLRLKGFPSFPLVERQANEVDWWDMVCNVKKLINEKKEDGKVFWQNLAGYKRQEALRPYLSSEEDRKKGKKFARYQLGDLLLHLEKKHGEDWGKVYDEAWERIDKKVEGLSKHIKLEEERRSEDAQSKAALTDWLRAKASFVIEGLKEADKDEFCRCELKLQKWYGDLRGKPFAIEAENSILDISGFSKQYNCAFIWQKDGVKKLNLYLIINYFKGGKLRFKKIKPEAFEANRFYTVINKKSGEIVPMEVNFNFDDPNLIILPLAFGKRQGREFIWNDLLSLETGSLKLANGRVIEKTLYNRRTRQDEPALFVALTFERREVLDSSNIKTPMNLIGVDRGENIPAVIALTDPEGCPLSRFKDSLGNPTHILRIGESYKEKQRTIQAKKEVEQRRAGGYSRKYASKAKNLADDMVRNTARDLLYYAVTQDAMLIFENLSRGFGRQGKRTFMAERQYTRMEDWLTAKLAYEGPLPSKTYLSKTLAQYTSKTCSNCGFTITSADYDRVLEKLKKTATGWMTTINGKELKVEGQITYYNRYKRQNVVKDLSVELDRLSEESVNNDISSWTKGRSGEALSLLKKRFSHRPVQEKFVCLNCGFETHADEQAALNIARSWLFLRSQEYKKYQTNKTTGNTDKRAFVETWQSFYRKKLKEVWKPAV

SEQ ID NO: 37839 - protein, 980 aa, synthetic construct
  REGION 1..980: note = engineered CasX variant
QEIKRINKIRRRLVKDSNTKKAGKTGPMKTLLVRVMTPDLRERLENLRKKPENIPQPISNTSRANLNKLLTDYTEMKKAILHVYWEEFQKDPVGLMSRVAQPASKKIDQNKLKPEMDEKGNLTTAGFACSQCGQPLFVYKLEQVSEKGKAYTNYFGRCNVAEHEKLIKLAQLKPEKDSDEAVTYSLGKFGQRALDFYSIHVTKESTHPVKPLAQIAGNRYASGPVGKALSDACMGTIASFLSKYQDIIIEHQKVVKGNQKRLESLRELAGKENLEYPSVTLPPQPHTKEGVDAYNEVIARVRMWVNLNLWQKLKLSRDDAKPLLRLKGFPSFPLVERQANEVDWWDMVCNVKKLINEKKEDGKVFWQNLAGYKRQEALRPYLSSEEDRKKGKKFARYQLGDLLLHLEKKHGEDWGKVYDEAWERIDKKVEGLSKHIKLEEERRSEDAQSKAALTDWLRAKASFVIEGLKEADKDEFCRCELKLQKWYGDLRGKPFAIEAENSILDISGFSKQYNCAFIWQKDGVKKLNLYLIINYFKGGKLRFKKIKPEAFEANRFYTVINKKSGEIVPMEVNFNFDDPNLIILPLAFGKRQGREFIWNDLLSLETGSLKLANGRVIEKTLYNRRTRQDEPALFVALTFERREVLDSSNIKTPMNLIGVDRGENIPAVIALTDPEGCPLSRFKDSLGNPTHILRIGESYKEKQRTIQAKKEVEQRRAGGYSRKYASKAKNLADDMVRNTARDLLYYAVTQDAMLIFENLSRGFGRQGKRTFMAERQYTRMEDWLTAKLAYEGPLPSKTYLSKTLAQYTSKTCSNCGFTITSADYDRVLEKLKKTATGWMTTINGKELKVEGQITYYNRYKRQNVVKDLSVELDRLSEESVNNDISSWTKGRSGEALSLLKKRFSHRPVQEKFVCLNCGFETHADEQAALNIARSWLFLRSQEYKKYQTNKTTGNTDKRAFVETWQSFYRKKLKEVWKPAV

SEQ ID NO: 37840 - protein, 979 aa, synthetic construct
  REGION 1..979: note = engineered CasX variant
QEIKRINKIRRRLVKDSNTKKAGKTGPMKTLLVRVMTPDLRERLENLRKKPENIPQPISNTSRANLNKLLTDYTEMKKAILHVYWEEFQKDPVGLMSRVAQPASKKIDQNKLKPEMDEKGNLTTAGFACSQCGQPLFVYKLEQVSEKGKAYTNYFGRCNVAEHEKLILLAQLKPEKDSDEAVTYSLGKFGQRALDFYSIHVTKESTHPVKPLAQIAGNRYASPVGKALSDACMGTIASFLSKYQDIIIEHQKVVKGNQKRLESLRELAGKENLEYPSVTLPPQPHTKEGVDAYNEVIARVRMWVNLNLWQKLKLSRDDAKPLLRLKGFPSFPLVERQANEVDWWDMVCNVKKLINEKKEDGKVFWQNLAGYKRQEALRPYLSSEEDRKKGKKFARYQLGDLLLHLEKKHGEDWGKVYDEAWERIDKKVEGLSKHIKLEEERRSEDAQSKAALTDWLRAKASFVIEGLKEADKDEFCRCELKLQKWYGDLRGKPFAIEAENSILDISGFSKQYNCAFIWQKDGVKKLNLYLIINYFKGGKLRFKKIKPEAFEANRFYTVINKKSGEIVPMEVNFNFDDPNLIILPLAFGKRQGREFIWNDLLSLETGSLKLANGRVIEKTLYNRRTRQDEPALFVALTFERREVLDSSNIKTPMNLIGVDRGENIPAVIALTDPEGCPLSRFKDSLGNPTHILRIGESYKEKQRTIQAKKEVEQRRAGGYSRKYASKAKNLADDMVRNTARDLLYYAVTQDAMLIFENLSRGFGRQGKRTFMAERQYTRMEDWLTAKLAYEGPLPSKTYLSKTLAQYTSKTCSNCGFTITSADYDRVLEKLKKTATGWMTTINGKELKVEGQITYYNRYKRQNVVKDLSVELDRLSEESVNNDISSWTKGRSGEALSLLKKRFSHRPVQEKFVCLNCGFETHADEQAALNIARSWLFLRSQEYKKYQTNKTTGNTDKRAFVETWQSFYRKKLKEVWKPAV

SEQ ID NO: 37841 - protein, 980 aa, synthetic construct
  REGION 1..980: note = engineered CasX variant
QEIKRINKIRRRLVKDSNTKKAGKTGPMKTLLVRVMTPDLRERLENLRKKPENIPQPISNTSRANLNKLLTDYTEMKKAILHVYWEEFQKDPVGLMSRVAQPASKKIDQNKLKPEMDEKGNLTTAGFACSQCGQPLFVYKLEQVSEKGKAYTNYFGRCNVAEHEKLILLAQLKPEKDSDEAVTYSLGKFGQRALDFYSIHVTKESTHPVKPLAQIAGNRYASYPVGKALSDACMGTIASFLSKYQDIIIEHQKVVKGNQKRLESLRELAGKENLEYPSVTLPPQPHTKEGVDAYNEVIARVRMWVNLNLWQKLKLSRDDAKPLLRLKGFPSFPLVERQANEVDWWDMVCNVKKLINEKKEDGKVFWQNLAGYKRQEALRPYLSSEEDVRKKGKKFARYQLGDLLLHLEKKHGEDWGKVYDEAWERIDKKVEGLSKHIKLEEERRSEDAQSKAALTDWLRAKASFVIEGLKEADKDEFCRCELKLQKWYGDLRGKPFAIEAENSILDISGFSKQYNCAFIWQKDGVKKLNLYLIINYFKGGKLRFKKIKPEAFEANRFYTVINKKSGEIVPMEVNFNFDDPNLIILPLAFGKRQGREFIWNDLLSLETGSLKLANGRVIEKTLYNRRTRQDEPALFVALTFERREVLDSSNIKTPMNLIGVDRGENIPAVIALTDPEGCPLSRFKDSLGNPTHILRIGESYKEKQRTIQAKKEVEQRRAGGYSRKYASKAKNLADDMVRNTARDLLYYAVTQDAMLIFENLSRGFGRQGKRTFMAERQYTRMEDWLTAKLAYEGLPSKTYLSKTLAQYTSKTCSNCGFTITSADYDRVLEKLKKTATGWMTTINGKELKVEGQITYYNRYKRQNVVKDLSVELDRLSEESVNNDISSWTKGRSGEALSLLKKRFSHRPVQEKFVCLNCGFETHADEQAALNIARSWLFLRSQEYKKYQTNKTTGNTDKRAFVETWQSFYRKKLKEVWKPAV

SEQ ID NO: 37842 - protein, 980 aa, synthetic construct
  REGION 1..980: note = engineered CasX variant
QEIKRINKIRRRLVKDSNTKKAGKTGPMKTLLVRVMTPDLRERLENLRKKPENIPQPISNTSRANLNKLLTDYTEMKKAILHVYWEEFQKDPVGLMSRVAQPASKKIDQNKLKPEMDEKGNLTTAGFACSQCGQPLFVYKLEQVSEKGKAYTNYFGRCNVAEHEKLILLAQLKPEKDSDEAVTYSLGKFGQRALDFYSIHVTKESTHPVKPLAQIAGNRYASHPVGKALSDACMGTIASFLSKYQDIIIEHQKVVKGNQKRLESLRELAGKENLEYPSVTLPPQPHTKEGVDAYNEVIARVRMWVNLNLWQKLKLSRDDAKPLLRLKGFPSFPLVERQANEVDWWDMVCNVKKLINEKKEDGKVFWQNLAGYKRQEALRPYLSSEEDVRKKGKKFARYQLGDLLLHLEKKHGEDWGKVYDEAWERIDKKVEGLSKHIKLEEERRSEDAQSKAALTDWLRAKASFVIEGLKEADKDEFCRCELKLQKWYGDLRGKPFAIEAENSILDISGFSKQYNCAFIWQKDGVKKLNLYLIINYFKGGKLRFKKIKPEAFEANRFYTVINKKSGEIVPMEVNFNFDDPNLIILPLAFGKRQGREFIWNDLLSLETGSLKLANGRVIEKTLYNRRTRQDEPALFVALTFERREVLDSSNIKTPMNLIGVDRGENIPAVIALTDPEGCPLSRFKDSLGNPTHILRIGESYKEKQRTIQAKKEVEQRRAGGYSRKYASKAKNLADDMVRNTARDLLYYAVTQDAMLIFENLSRGFGRQGKRTFMAERQYTRMEDWLTAKLAYEGLPSKTYLSKTLAQYTSKTCSNCGFTITSADYDRVLEKLKKTATGWMTTINGKELKVEGQITYYNRYKRQNVVKDLSVELDRLSEESVNNDISSWTKGRSGEALSLLKKRFSHRPVQEKFVCLNCGFETHADEQAALNIARSWLFLRSQEYKKYQTNKTTGNTDKRAFVETWQSFYRKKLKEVWKPAV

SEQ ID NO: 37843 - protein, 980 aa, synthetic construct
  REGION 1..980: note = engineered CasX variant
QEIKRINKIRRRLVKDSNTKKAGKTGPMKTLLVRVMTPDLRERLENLRKKPENIPQPISNTSRANLNKLLTDYTEMKKAILHVYWEEFQKDPVGLMSRVAQPASKKIDQNKLKPEMDEKGNLTTAGFACSQCGQPLFVYKLEQVSEKGKAYTNYFGRCNVAEHEKLILLAQLKPEKDSDEAVTYSLGKFGQRALDFYSIHVTKESTHPVKPLAQIAGNRYASSPVGKALSDACMGTIASFLSKYQDIIIEHQKVVKGNQKRLESLRELAGKENLEYPSVTLPPQPHTKEGVDAYNEVIARVRMWVNLNLWQKLKLSRDDAKPLLRLKGFPSFPLVERQANEVDWWDMVCNVKKLINEKKEDGKVFWQNLAGYKRQEALRPYLSSEEDVRKKGKKFARYQLGDLLLHLEKKHGEDWGKVYDEAWERIDKKVEGLSKHIKLEEERRSEDAQSKAALTDWLRAKASFVIEGLKEADKDEFCRCELKLQKWYGDLRGKPFAIEAENSILDISGFSKQYNCAFIWQKDGVKKLNLYLIINYFKGGKLRFKKIKPEAFEANRFYTVINKKSGEIVPMEVNFNFDDPNLIILPLAFGKRQGREFIWNDLLSLETGSLKLANGRVIEKTLYNRRTRQDEPALFVALTFERREVLDSSNIKTPMNLIGVDRGENIPAVIALTDPEGCPLSRFKDSLGNPTHILRIGESYKEKQRTIQAKKEVEQRRAGGYSRKYASKAKNLADDMVRNTARDLLYYAVTQDAMLIFENLSRGFGRQGKRTFMAERQYTRMEDWLTAKLAYEGLPSKTYLSKTLAQYTSKTCSNCGFTITSADYDRVLEKLKKTATGWMTTINGKELKVEGQITYYNRYKRQNVVKDLSVELDRLSEESVNNDISSWTKGRSGEALSLLKKRFSHRPVQEKFVCLNCGFETHADEQAALNIARSWLFLRSQEYKKYQTNKTTGNTDKRAFVETWQSFYRKKLKEVWKPAV

SEQ ID NO: 37844 - protein, 980 aa, synthetic construct
  REGION 1..980: note = engineered CasX variant
QEIKRINKIRRRLVKDSNTKKAGKTGPMKTLLVRVMTPDLRERLENLRKKPENIPQPISNTSRANLNKLLTDYTEMKKAILHVYWEEFQKDPVGLMSRVAQPASKKIDQNKLKPEMDEKGNLTTAGFACSQCGQPLFVYKLEQVSEKGKAYTNYFGRCNVAEHEKLILLAQLKPEKDSDEAVTYSLGKFGQRALDFYSIHVTKESTHPVKPLAQIAGNRYASTPVGKALSDACMGTIASFLSKYQDIIIEHQKVVKGNQKRLESLRELAGKENLEYPSVTLPPQPHTKEGVDAYNEVIARVRMWVNLNLWQKLKLSRDDAKPLLRLKGFPSFPLVERQANEVDWWDMVCNVKKLINEKKEDGKVFWQNLAGYKRQEALRPYLSSEEDVRKKGKKFARYQLGDLLLHLEKKHGEDWGKVYDEAWERIDKKVEGLSKHIKLEEERRSEDAQSKAALTDWLRAKASFVIEGLKEADKDEFCRCELKLQKWYGDLRGKPFAIEAENSILDISGFSKQYNCAFIWQKDGVKKLNLYLIINYFKGGKLRFKKIKPEAFEANRFYTVINKKSGEIVPMEVNFNFDDPNLIILPLAFGKRQGREFIWNDLLSLETGSLKLANGRVIEKTLYNRRTRQDEPALFVALTFERREVLDSSNIKTPMNLIGVDRGENIPAVIALTDPEGCPLSRFKDSLGNPTHILRIGESYKEKQRTIQAKKEVEQRRAGGYSRKYASKAKNLADDMVRNTARDLLYYAVTQDAMLIFENLSRGFGRQGKRTFMAERQYTRMEDWLTAKLAYEGLPSKTYLSKTLAQYTSKTCSNCGFTITSADYDRVLEKLKKTATGWMTTINGKELKVEGQITYYNRYKRQNVVKDLSVELDRLSEESVNNDISSWTKGRSGEALSLLKKRFSHRPVQEKFVCLNCGFETHADEQAALNIARSWLFLRSQEYKKYQTNKTTGNTDKRAFVETWQSFYRKKLKEVWKPAV

SEQ ID NO: 37845 - protein, 980 aa, synthetic construct
  REGION 1..980: note = engineered CasX variant
QEIKRINKIRRRLVKDSNTKKAGKTGPMKTLLVRVMTPDLRERLENLRKKPENIPQPISNTSRANLNKLLTDYTEMKKAILHVYWEEFQKDPVGLMSRVAQPASKKIDQNKLKPEMDEKGNLTTAGFACSQCGQPLFVYKLEQVSEKGKAYTNYFGRCNVAEHEKLILLAQLKPEKDSDEAVTYSLGKFGQRALDFYSIHVTKESTHPVKPLAQIAGNRYASAPVGKALSDACMGTIASFLSKYQDIIIEHQKVVKGNQKRLESLRELAGKENLEYPSVTLPPQPHTKEGVDAYNEVIARVRMWVNLNLWQKLKLSRDDAKPLLRLKGFPSFPLVERQANEVDWWDMVCNVKKLINEKKEDGKVFWQNLAGYKRQEALRPYLSSEEDVRKKGKKFARYQLGDLLLHLEKKHGEDWGKVYDEAWERIDKKVEGLSKHIKLEEERRSEDAQSKAALTDWLRAKASFVIEGLKEADKDEFCRCELKLQKWYGDLRGKPFAIEAENSILDISGFSKQYNCAFIWQKDGVKKLNLYLIINYFKGGKLRFKKIKPEAFEANRFYTVINKKSGEIVPMEVNFNFDDPNLIILPLAFGKRQGREFIWNDLLSLETGSLKLANGRVIEKTLYNRRTRQDEPALFVALTFERREVLDSSNIKTPMNLIGVDRGENIPAVIALTDPEGCPLSRFKDSLGNPTHILRIGESYKEKQRTIQAKKEVEQRRAGGYSRKYASKAKNLADDMVRNTARDLLYYAVTQDAMLIFENLSRGFGRQGKRTFMAERQYTRMEDWLTAKLAYEGLPSKTYLSKTLAQYTSKTCSNCGFTITSADYDRVLEKLKKTATGWMTTINGKELKVEGQITYYNRYKRQNVVKDLSVELDRLSEESVNNDISSWTKGRSGEALSLLKKRFSHRPVQEKFVCLNCGFETHADEQAALNIARSWLFLRSQEYKKYQTNKTTGNTDKRAFVETWQSFYRKKLKEVWKPAV

SEQ ID NO: 37846 - protein, 980 aa, synthetic construct
  REGION 1..980: note = engineered CasX variant
QEIKRINKIRRRLVKDSNTKKAGKTGPMKTLLVRVMTPDLRERLENLRKKPENIPQPISNTSRANLNKLLTDYTEMKKAILHVYWEEFQKDPVGLMSRVAQPASKKIDQNKLKPEMDEKGNLTTAGFACSQCGQPLFVYKLEQVSEKGKAYTNYFGRCNVAEHEKLILLAQLKPEKDSDEAVTYSLGKFGQRALDFYSIHVTKESTHPVKPLAQIAGNRYASVPVGKALSDACMGTIASFLSKYQDIIIEHQKVVKGNQKRLESLRELAGKENLEYPSVTLPPQPHTKEGVDAYNEVIARVRMWVNLNLWQKLKLSRDDAKPLLRLKGFPSFPLVERQANEVDWWDMVCNVKKLINEKKEDGKVFWQNLAGYKRQEALRPYLSSEEDVRKKGKKFARYQLGDLLLHLEKKHGEDWGKVYDEAWERIDKKVEGLSKHIKLEEERRSEDAQSKAALTDWLRAKASFVIEGLKEADKDEFCRCELKLQKWYGDLRGKPFAIEAENSILDISGFSKQYNCAFIWQKDGVKKLNLYLIINYFKGGKLRFKKIKPEAFEANRFYTVINKKSGEIVPMEVNFNFDDPNLIILPLAFGKRQGREFIWNDLLSLETGSLKLANGRVIEKTLYNRRTRQDEPALFVALTFERREVLDSSNIKTPMNLIGVDRGENIPAVIALTDPEGCPLSRFKDSLGNPTHILRIGESYKEKQRTIQAKKEVEQRRAGGYSRKYASKAKNLADDMVRNTARDLLYYAVTQDAMLIFENLSRGFGRQGKRTFMAERQYTRMEDWLTAKLAYEGLPSKTYLSKTLAQYTSKTCSNCGFTITSADYDRVLEKLKKTATGWMTTINGKELKVEGQITYYNRYKRQNVVKDLSVELDRLSEESVNNDISSWTKGRSGEALSLLKKRFSHRPVQEKFVCLNCGFETHADEQAALNIARSWLFLRSQEYKKYQTNKTTGNTDKRAFVETWQSFYRKKLKEVWKPAV

SEQ ID NO: 37847 - protein, 980 aa, synthetic construct
  REGION 1..980: note = engineered CasX variant
QEIKRINKIRRRLVKDSNTKKAGKTGPMKTLLVRVMTPDLRERLENLRKKPENIPQPISNTSRANLNKLLTDYTEMKKAILHVYWEEFQKDPVGLMSRVAQPASKKIDQNKLKPEMDEKGNLTTAGFACSQCGQPLFVYKLEQVSEKGKAYTNYFGRCNVAEHEKLIKLAQLKPEKDSDEAVTYSLGKFGQRALDFYSIHVTKESTHPVKPLAQIAGNRYASGPVGKALSDACMGTIASFLSKYQDIIIEHQKVVKGNQKRLESLRELAGKENLEYPSVTLPPQPHTKEGVDAYNEVIARVRMWVNLNLWQKLKLSRDDAKPLLRLKGFPSFPLVERQANEVDWWDMVCNVKKLINEKKEDGKVFWQNLAGYKRQEALRPYLSSEEDVRKKGKKFARYQLGDLLLHLEKKHGEDWGKVYDEAWERIDKKVEGLSKHIKLEEERRSEDAQSKAALTDWLRAKASFVIEGLKEADKDEFCRCELKLQKWYGDLRGKPFAIEAENSILDISGFSKQYNCAFIWQKDGVKKLNLYLIINYFKGGKLRFKKIKPEAFEANRFYTVINKKSGEIVPMEVNFNFDDPNLIILPLAFGKRQGREFIWNDLLSLETGSLKLANGRVIEKTLYNRRTRQDEPALFVALTFERREVLDSSNIKTPMNLIGVDRGENIPAVIALTDPEGCPLSRFKDSLGNPTHILRIGESYKEKQRTIQAKKEVEQRRAGGYSRKYASKAKNLADDMVRNTARDLLYYAVTQDAMLIFENLSRGFGRQGKRTFMAERQYTRMEDWLTAKLAYEGLPSKTYLSKTLAQYTSKTCSNCGFTITSADYDRVLEKLKKTATGWMTTINGKELKVEGQITYYNRYKRQNVVKDLSVELDRLSEESVNNDISSWTKGRSGEALSLLKKRFSHRPVQEKFVCLNCGFETHADEQAALNIARSWLFLRSQEYKKYQTNKTTGNTDKRAFVETWQSFYRKKLKEVWKPAV

SEQ ID NO: 37848 - protein, 979 aa, synthetic construct
  REGION 1..979: note = engineered CasX variant
QEIKRINKIRRRLVKDSNTKKAGKTGPMKTLLVRVMTPDLRERLENLRKKPENIPQPISNTSRANLNKLLTDYTEMKKAILHVYWEEFQKDPVGLMSRVAQPASKKIDQNKLKPEMDEKGNLTTAGFACSQCGQPLFVYKLEQVSEKGKAYTNYFGRCNVAEHEKLILLAQLKPEKDSDEAVTYSLGKFGQRALDFYSIHVTKESTHPVKPLAQIAGNRYASPVGKALSDACMGTIASFLSKYQDIIIEHQKVVKGNQKRLESLRELAGKENLEYPSVTLPPQPHTKEGVDAYNEVIARVRMWVNLNLWQKLKLSRDDAKPLLRLKGFPSFPLVERQANEVDWWDMVCNVKKLINEKKEDGKVFWQNLAGYKRQEALRPYLSSEEDVRKKGKKFARYQLGDLLLHLEKKHGEDWGKVYDEAWERIDKKVEGLSKHIKLEEERRSEDAQSKAALTDWLRAKASFVIEGLKEADKDEFCRCELKLQKWYGDLRGKPFAIEAENSILDISGFSKQYNCAFIWQKDGVKKLNLYLIINYFKGGKLRFKKIKPEAFEANRFYTVINKKSGEIVPMEVNFNFDDPNLIILPLAFGKRQGREFIWNDLLSLETGSLKLANGRVIEKTLYNRRTRQDEPALFVALTFERREVLDSSNIKTPMNLIGVDRGENIPAVIALTDPEGCPLSRFKDSLGNPTHILRIGESYKEKQRTIQAKKEVEQRRAGGYSRKYASKAKNLADDMVRNTARDLLYYAVTQDAMLIFENLSRGFGRQGKRTFMAERQYTRMEDWLTAKLAYEGLPSKTYLSKTLAQYTSKTCSNCGFTITSADYDRVLEKLKKTATGWMTTINGKELKVEGQITYYNRYKRQNVVKDLSVELDRLSEESVNNDISSWTKGRSGEALSLLKKRFSHRPVQEKFVCLNCGFETHADEQAALNIARSWLFLRSQEYKKYQTNKTTGNTDKRAFVETWQSFYRKKLKEVWKPAV

SEQ ID NO: 37849 - protein, 979 aa, synthetic construct
  REGION 1..979: note = engineered CasX variant
QEIKRINKIRRRLVKDSNTKKAGKTGPMKTLLVRVMTPDLRERLENLRKKPENIPQPISNTSRANLNKLLTDYTEMKKAILHVYWEEFQKDPVGLMSRVAQPASKKIDQNKLKPEMDEKGNLTTAGFACSQCGQPLFVYKLEQVSEKGKAYTNYFGRCNVAEHEKLILLAQLKPEKDSDEAVTYSLGKFGQRALDFYSIHVTKESTHPVKPLAQIAGNRYASYPVGKALSDACMGTIASFLSKYQDIIIEHQKVVKGNQKRLESLRELAGKENLEYPSVTLPPQPHTKEGVDAYNEVIARVRMWVNLNLWQKLKLSRDDAKPLLRLKGFPSFPLVERQANEVDWWDMVCNVKKLINEKKEDGKVFWQNLAGYKRQEALRPYLSSEEDRKKGKKFARYQLGDLLLHLEKKHGEDWGKVYDEAWERIDKKVEGLSKHIKLEEERRSEDAQSKAALTDWLRAKASFVIEGLKEADKDEFCRCELKLQKWYGDLRGKPFAIEAENSILDISGFSKQYNCAFIWQKDGVKKLNLYLIINYFKGGKLRFKKIKPEAFEANRFYTVINKKSGEIVPMEVNFNFDDPNLIILPLAFGKRQGREFIWNDLLSLETGSLKLANGRVIEKTLYNRRTRQDEPALFVALTFERREVLDSSNIKTPMNLIGVDRGENIPAVIALTDPEGCPLSRFKDSLGNPTHILRIGESYKEKQRTIQAKKEVEQRRAGGYSRKYASKAKNLADDMVRNTARDLLYYAVTQDAMLIFENLSRGFGRQGKRTFMAERQYTRMEDWLTAKLAYEGLPSKTYLSKTLAQYTSKTCSNCGFTITSADYDRMLEKLKKTATGWMTTINGKELKVEGQITYYNRYKRQNVVKDLSVELDRLSEESVNNDISSWTKGRSGEALSLLKKRFSHRPVQEKFVCLNCGFETHADEQAALNIARSWLFLRSQEYKKYQTNKTTGNTDKRAFVETWQSFYRKKLKEVWKPAV

SEQ ID NO: 37850 - protein, 979 aa, synthetic construct
  REGION 1..979: note = engineered CasX variant
QEIKRINKIRRRLVKDSNTKKAGKTGPMKTLLVRVMTPDLRERLENLRKKPENIPQPISNTSRANLNKLLTDYTEMKKAILHVYWEEFQKDPVGLMSRVAQPASKKIDQNKLKPEMDEKGNLTTAGFACSQCGQPLFVYKLEQVSEKGKAYTNYFGRCNVAEHEKLILLAQLKPEKDSDEAVTYSLGKFGQRALDFYSIHVTKESTHPVKPLAQIAGNRYASHPVGKALSDACMGTIASFLSKYQDIIIEHQKVVKGNQKRLESLRELAGKENLEYPSVTLPPQPHTKEGVDAYNEVIARVRMWVNLNLWQKLKLSRDDAKPLLRLKGFPSFPLVERQANEVDWWDMVCNVKKLINEKKEDGKVFWQNLAGYKRQEALRPYLSSEEDRKKGKKFARYQLGDLLLHLEKKHGEDWGKVYDEAWERIDKKVEGLSKHIKLEEERRSEDAQSKAALTDWLRAKASFVIEGLKEADKDEFCRCELKLQKWYGDLRGKPFAIEAENSILDISGFSKQYNCAFIWQKDGVKKLNLYLIINYFKGGKLRFKKIKPEAFEANRFYTVINKKSGEIVPMEVNFNFDDPNLIILPLAFGKRQGREFIWNDLLSLETGSLKLANGRVIEKTLYNRRTRQDEPALFVALTFERREVLDSSNIKTPMNLIGVDRGENIPAVIALTDPEGCPLSRFKDSLGNPTHILRIGESYKEKQRTIQAKKEVEQRRAGGYSRKYASKAKNLADDMVRNTARDLLYYAVTQDAMLIFENLSRGFGRQGKRTFMAERQYTRMEDWLTAKLAYEGLPSKTYLSKTLAQYTSKTCSNCGFTITSADYDRMLEKLKKTATGWMTTINGKELKVEGQITYYNRYKRQNVVKDLSVELDRLSEESVNNDISSWTKGRSGEALSLLKKRFSHRPVQEKFVCLNCGFETHADEQAALNIARSWLFLRSQEYKKYQTNKTTGNTDKRAFVETWQSFYRKKLKEVWKPAV

SEQ ID NO: 37851 - protein, 979 aa, synthetic construct
  REGION 1..979: note = engineered CasX variant
QEIKRINKIRRRLVKDSNTKKAGKTGPMKTLLVRVMTPDLRERLENLRKKPENIPQPISNTSRANLNKLLTDYTEMKKAILHVYWEEFQKDPVGLMSRVAQPASKKIDQNKLKPEMDEKGNLTTAGFACSQCGQPLFVYKLEQVSEKGKAYTNYFGRCNVAEHEKLILLAQLKPEKDSDEAVTYSLGKFGQRALDFYSIHVTKESTHPVKPLAQIAGNRYASSPVGKALSDACMGTIASFLSKYQDIIIEHQKVVKGNQKRLESLRELAGKENLEYPSVTLPPQPHTKEGVDAYNEVIARVRMWVNLNLWQKLKLSRDDAKPLLRLKGFPSFPLVERQANEVDWWDMVCNVKKLINEKKEDGKVFWQNLAGYKRQEALRPYLSSEEDRKKGKKFARYQLGDLLLHLEKKHGEDWGKVYDEAWERIDKKVEGLSKHIKLEEERRSEDAQSKAALTDWLRAKASFVIEGLKEADKDEFCRCELKLQKWYGDLRGKPFAIEAENSILDISGFSKQYNCAFIWQKDGVKKLNLYLIINYFKGGKLRFKKIKPEAFEANRFYTVINKKSGEIVPMEVNFNFDDPNLIILPLAFGKRQGREFIWNDLLSLETGSLKLANGRVIEKTLYNRRTRQDEPALFVALTFERREVLDSSNIKTPMNLIGVDRGENIPAVIALTDPEGCPLSRFKDSLGNPTHILRIGESYKEKQRTIQAKKEVEQRRAGGYSRKYASKAKNLADDMVRNTARDLLYYAVTQDAMLIFENLSRGFGRQGKRTFMAERQYTRMEDWLTAKLAYEGLPSKTYLSKTLAQYTSKTCSNCGFTITSADYDRMLEKLKKTATGWMTTINGKELKVEGQITYYNRYKRQNVVKDLSVELDRLSEESVNNDISSWTKGRSGEALSLLKKRFSHRPVQEKFVCLNCGFETHADEQAALNIARSWLFLRSQEYKKYQTNKTTGNTDKRAFVETWQSFYRKKLKEVWKPAV

SEQ ID NO: 37852 - protein, 979 aa, synthetic construct
  REGION 1..979: note = engineered CasX variant
QEIKRINKIRRRLVKDSNTKKAGKTGPMKTLLVRVMTPDLRERLENLRKKPENIPQPISNTSRANLNKLLTDYTEMKKAILHVYWEEFQKDPVGLMSRVAQPASKKIDQNKLKPEMDEKGNLTTAGFACSQCGQPLFVYKLEQVSEKGKAYTNYFGRCNVAEHEKLILLAQLKPEKDSDEAVTYSLGKFGQRALDFYSIHVTKESTHPVKPLAQIAGNRYASTPVGKALSDACMGTIASFLSKYQDIIIEHQKVVKGNQKRLESLRELAGKENLEYPSVTLPPQPHTKEGVDAYNEVIARVRMWVNLNLWQKLKLSRDDAKPLLRLKGFPSFPLVERQANEVDWWDMVCNVKKLINEKKEDGKVFWQNLAGYKRQEALRPYLSSEEDRKKGKKFARYQLGDLLLHLEKKHGEDWGKVYDEAWERIDKKVEGLSKHIKLEEERRSEDAQSKAALTDWLRAKASFVIEGLKEADKDEFCRCELKLQKWYGDLRGKPFAIEAENSILDISGFSKQYNCAFIWQKDGVKKLNLYLIINYFKGGKLRFKKIKPEAFEANRFYTVINKKSGEIVPMEVNFNFDDPNLIILPLAFGKRQGREFIWNDLLSLETGSLKLANGRVIEKTLYNRRTRQDEPALFVALTFERREVLDSSNIKTPMNLIGVDRGENIPAVIALTDPEGCPLSRFKDSLGNPTHILRIGESYKEKQRTIQAKKEVEQRRAGGYSRKYASKAKNLADDMVRNTARDLLYYAVTQDAMLIFENLSRGFGRQGKRTFMAERQYTRMEDWLTAKLAYEGLPSKTYLSKTLAQYTSKTCSNCGFTITSADYDRMLEKLKKTATGWMTTINGKELKVEGQITYYNRYKRQNVVKDLSVELDRLSEESVNNDISSWTKGRSGEALSLLKKRFSHRPVQEKFVCLNCGFETHADEQAALNIARSWLFLRSQEYKKYQTNKTTGNTDKRAFVETWQSFYRKKLKEVWKPAV

SEQ ID NO: 37853 - protein, 979 aa, synthetic construct
  REGION 1..979: note = engineered CasX variant
QEIKRINKIRRRLVKDSNTKKAGKTGPMKTLLVRVMTPDLRERLENLRKKPENIPQPISNTSRANLNKLLTDYTEMKKAILHVYWEEFQKDPVGLMSRVAQPASKKIDQNKLKPEMDEKGNLTTAGFACSQCGQPLFVYKLEQVSEKGKAYTNYFGRCNVAEHEKLILLAQLKPEKDSDEAVTYSLGKFGQRALDFYSIHVTKESTHPVKPLAQIAGNRYASAPVGKALSDACMGTIASFLSKYQDIIIEHQKVVKGNQKRLESLRELAGKENLEYPSVTLPPQPHTKEGVDAYNEVIARVRMWVNLNLWQKLKLSRDDAKPLLRLKGFPSFPLVERQANEVDWWDMVCNVKKLINEKKEDGKVFWQNLAGYKRQEALRPYLSSEEDRKKGKKFARYQLGDLLLHLEKKHGEDWGKVYDEAWERIDKKVEGLSKHIKLEEERRSEDAQSKAALTDWLRAKASFVIEGLKEADKDEFCRCELKLQKWYGDLRGKPFAIEAENSILDISGFSKQYNCAFIWQKDGVKKLNLYLIINYFKGGKLRFKKIKPEAFEANRFYTVINKKSGEIVPMEVNFNFDDPNLIILPLAFGKRQGREFIWNDLLSLETGSLKLANGRVIEKTLYNRRTRQDEPALFVALTFERREVLDSSNIKTPMNLIGVDRGENIPAVIALTDPEGCPLSRFKDSLGNPTHILRIGESYKEKQRTIQAKKEVEQRRAGGYSRKYASKAKNLADDMVRNTARDLLYYAVTQDAMLIFENLSRGFGRQGKRTFMAERQYTRMEDWLTAKLAYEGLPSKTYLSKTLAQYTSKTCSNCGFTITSADYDRMLEKLKKTATGWMTTINGKELKVEGQITYYNRYKRQNVVKDLSVELDRLSEESVNNDISSWTKGRSGEALSLLKKRFSHRPVQEKFVCLNCGFETHADEQAALNIARSWLFLRSQEYKKYQTNKTTGNTDKRAFVETWQSFYRKKLKEVWKPAV

SEQ ID NO: 37854 - protein, 979 aa, synthetic construct
  REGION 1..979: note = engineered CasX variant
QEIKRINKIRRRLVKDSNTKKAGKTGPMKTLLVRVMTPDLRERLENLRKKPENIPQPISNTSRANLNKLLTDYTEMKKAILHVYWEEFQKDPVGLMSRVAQPASKKIDQNKLKPEMDEKGNLTTAGFACSQCGQPLFVYKLEQVSEKGKAYTNYFGRCNVAEHEKLILLAQLKPEKDSDEAVTYSLGKFGQRALDFYSIHVTKESTHPVKPLAQIAGNRYASVPVGKALSDACMGTIASFLSKYQDIIIEHQKVVKGNQKRLESLRELAGKENLEYPSVTLPPQPHTKEGVDAYNEVIARVRMWVNLNLWQKLKLSRDDAKPLLRLKGFPSFPLVERQANEVDWWDMVCNVKKLINEKKEDGKVFWQNLAGYKRQEALRPYLSSEEDRKKGKKFARYQLGDLLLHLEKKHGEDWGKVYDEAWERIDKKVEGLSKHIKLEEERRSEDAQSKAALTDWLRAKASFVIEGLKEADKDEFCRCELKLQKWYGDLRGKPFAIEAENSILDISGFSKQYNCAFIWQKDGVKKLNLYLIINYFKGGKLRFKKIKPEAFEANRFYTVINKKSGEIVPMEVNFNFDDPNLIILPLAFGKRQGREFIWNDLLSLETGSLKLANGRVIEKTLYNRRTRQDEPALFVALTFERREVLDSSNIKTPMNLIGVDRGENIPAVIALTDPEGCPLSRFKDSLGNPTHILRIGESYKEKQRTIQAKKEVEQRRAGGYSRKYASKAKNLADDMVRNTARDLLYYAVTQDAMLIFENLSRGFGRQGKRTFMAERQYTRMEDWLTAKLAYEGLPSKTYLSKTLAQYTSKTCSNCGFTITSADYDRMLEKLKKTATGWMTTINGKELKVEGQITYYNRYKRQNVVKDLSVELDRLSEESVNNDISSWTKGRSGEALSLLKKRFSHRPVQEKFVCLNCGFETHADEQAALNIARSWLFLRSQEYKKYQTNKTTGNTDKRAFVETWQSFYRKKLKEVWKPAV

SEQ ID NO: 37855 - protein, 979 aa, synthetic construct
  REGION 1..979: note = engineered CasX variant
QEIKRINKIRRRLVKDSNTKKAGKTGPMKTLLVRVMTPDLRERLENLRKKPENIPQPISNTSRANLNKLLTDYTEMKKAILHVYWEEFQKDPVGLMSRVAQPASKKIDQNKLKPEMDEKGNLTTAGFACSQCGQPLFVYKLEQVSEKGKAYTNYFGRCNVAEHEKLIKLAQLKPEKDSDEAVTYSLGKFGQRALDFYSIHVTKESTHPVKPLAQIAGNRYASGPVGKALSDACMGTIASFLSKYQDIIIEHQKVVKGNQKRLESLRELAGKENLEYPSVTLPPQPHTKEGVDAYNEVIARVRMWVNLNLWQKLKLSRDDAKPLLRLKGFPSFPLVERQANEVDWWDMVCNVKKLINEKKEDGKVFWQNLAGYKRQEALRPYLSSEEDRKKGKKFARYQLGDLLLHLEKKHGEDWGKVYDEAWERIDKKVEGLSKHIKLEEERRSEDAQSKAALTDWLRAKASFVIEGLKEADKDEFCRCELKLQKWYGDLRGKPFAIEAENSILDISGFSKQYNCAFIWQKDGVKKLNLYLIINYFKGGKLRFKKIKPEAFEANRFYTVINKKSGEIVPMEVNFNFDDPNLIILPLAFGKRQGREFIWNDLLSLETGSLKLANGRVIEKTLYNRRTRQDEPALFVALTFERREVLDSSNIKTPMNLIGVDRGENIPAVIALTDPEGCPLSRFKDSLGNPTHILRIGESYKEKQRTIQAKKEVEQRRAGGYSRKYASKAKNLADDMVRNTARDLLYYAVTQDAMLIFENLSRGFGRQGKRTFMAERQYTRMEDWLTAKLAYEGLPSKTYLSKTLAQYTSKTCSNCGFTITSADYDRMLEKLKKTATGWMTTINGKELKVEGQITYYNRYKRQNVVKDLSVELDRLSEESVNNDISSWTKGRSGEALSLLKKRFSHRPVQEKFVCLNCGFETHADEQAALNIARSWLFLRSQEYKKYQTNKTTGNTDKRAFVETWQSFYRKKLKEVWKPAV

SEQ ID NO: 37856 - protein, 978 aa, synthetic construct
  REGION 1..978: note = engineered CasX variant
QEIKRINKIRRRLVKDSNTKKAGKTGPMKTLLVRVMTPDLRERLENLRKKPENIPQPISNTSRANLNKLLTDYTEMKKAILHVYWEEFQKDPVGLMSRVAQPASKKIDQNKLKPEMDEKGNLTTAGFACSQCGQPLFVYKLEQVSEKGKAYTNYFGRCNVAEHEKLILLAQLKPEKDSDEAVTYSLGKFGQRALDFYSIHVTKESTHPVKPLAQIAGNRYASPVGKALSDACMGTIASFLSKYQDIIIEHQKVVKGNQKRLESLRELAGKENLEYPSVTLPPQPHTKEGVDAYNEVIARVRMWVNLNLWQKLKLSRDDAKPLLRLKGFPSFPLVERQANEVDWWDMVCNVKKLINEKKEDGKVFWQNLAGYKRQEALRPYLSSEEDRKKGKKFARYQLGDLLLHLEKKHGEDWGKVYDEAWERIDKKVEGLSKHIKLEEERRSEDAQSKAALTDWLRAKASFVIEGLKEADKDEFCRCELKLQKWYGDLRGKPFAIEAENSILDISGFSKQYNCAFIWQKDGVKKLNLYLIINYFKGGKLRFKKIKPEAFEANRFYTVINKKSGEIVPMEVNFNFDDPNLIILPLAFGKRQGREFIWNDLLSLETGSLKLANGRVIEKTLYNRRTRQDEPALFVALTFERREVLDSSNIKTPMNLIGVDRGENIPAVIALTDPEGCPLSRFKDSLGNPTHILRIGESYKEKQRTIQAKKEVEQRRAGGYSRKYASKAKNLADDMVRNTARDLLYYAVTQDAMLIFENLSRGFGRQGKRTFMAERQYTRMEDWLTAKLAYEGLPSKTYLSKTLAQYTSKTCSNCGFTITSADYDRMLEKLKKTATGWMTTINGKELKVEGQITYYNRYKRQNVVKDLSVELDRLSEESVNNDISSWTKGRSGEALSLLKKRFSHRPVQEKFVCLNCGFETHADEQAALNIARSWLFLRSQEYKKYQTNKTTGNTDKRAFVETWQSFYRKKLKEVWKPAV

SEQ ID NO: 37857 - protein, 979 aa, synthetic construct
  REGION 1..979: note = engineered CasX variant
QEIKRINKIRRRLVKDSNTKKAGKTGPMKTLLVRVMTPDLRERLENLRKKPENIPQPISNTSRANLNKLLTDYTEMKKAILHVYWEEFQKDPVGLMSRVAQPASKKIDQNKLKPEMDEKGNLTTAGFACSQCGQPLFVYKLEQVSEKGKAYTNYFGRCNVAEHEKLILLAQLKPEKDSDEAVTYSLGKFGQRALDFYSIHVTKESTHPVKPLAQIAGNRYASYPVGKALSDACMGTIASFLSKYQDIIIEHQKVVKGNQKRLESLRELAGKENLEYPSVTLPPQPHTKEGVDAYNEVIARVRMWVNLNLWQKLKLSRDDAKPLLRLKGFPSFPLVERQANEVDWWDMVCNVKKLINEKKEDGKVFWQNLAGYKRQEALRPYLSSEEDRKKGKKFARYQLGDLLLHLEKKHGEDWGKVYDEAWERIDKKVEGLSKHIKLEEERRSEDAQSKAALTDWLRAKASFVIEGLKEADKDEFCRCELKLQKWYGDLRGKPFAIEAENSILDISGFSKQYNCAFIWQKDGVKKLNLYLIINYFKGGKLRFKKIKPEAFEANRFYTVINKKSGEIVPMEVNFNFDDPNLIILPLAFGKRQGREFIWNDLLSLETGSLKLANGRVIEKTLYNRRTRQDEPALFVALTFERREVLDSSNIKTPMNLIGVDRGENIPAVIALTDPEGCPLSRFKDSLGNPTHILRIGESYKEKQRTIQAKKEVEQRRAGGYSRKYASKAKNLADDMVRNTARDLLYYAVTQDAMLIFENLSRGFGRQGKRTFMAERQYTRMEDWLTAKLAYEGLPSKTYLSKTLAQYTSKTCSNCGFTITSADYDRVLEKLKKTATGWMTTINGKELKVEGQITYYNRYKRQNVVKDLSVELDRLSEESVNNDISSWTKGRQGEALSLLKKRFSHRPVQEKFVCLNCGFETHADEQAALNIARSWLFLRSQEYKKYQTNKTTGNTDKRAFVETWQSFYRKKLKEVWKPAV

SEQ ID NO: 37858 - protein, 979 aa, synthetic construct
  REGION 1..979: note = engineered CasX variant
QEIKRINKIRRRLVKDSNTKKAGKTGPMKTLLVRVMTPDLRERLENLRKKPENIPQPISNTSRANLNKLLTDYTEMKKAILHVYWEEFQKDPVGLMSRVAQPASKKIDQNKLKPEMDEKGNLTTAGFACSQCGQPLFVYKLEQVSEKGKAYTNYFGRCNVAEHEKLILLAQLKPEKDSDEAVTYSLGKFGQRALDFYSIHVTKESTHPVKPLAQIAGNRYASHPVGKALSDACMGTIASFLSKYQDIIIEHQKVVKGNQKRLESLRELAGKENLEYPSVTLPPQPHTKEGVDAYNEVIARVRMWVNLNLWQKLKLSRDDAKPLLRLKGFPSFPLVERQANEVDWWDMVCNVKKLINEKKEDGKVFWQNLAGYKRQEALRPYLSSEEDRKKGKKFARYQLGDLLLHLEKKHGEDWGKVYDEAWERIDKKVEGLSKHIKLEEERRSEDAQSKAALTDWLRAKASFVIEGLKEADKDEFCRCELKLQKWYGDLRGKPFAIEAENSILDISGFSKQYNCAFIWQKDGVKKLNLYLIINYFKGGKLRFKKIKPEAFEANRFYTVINKKSGEIVPMEVNFNFDDPNLIILPLAFGKRQGREFIWNDLLSLETGSLKLANGRVIEKTLYNRRTRQDEPALFVALTFERREVLDSSNIKTPMNLIGVDRGENIPAVIALTDPEGCPLSRFKDSLGNPTHILRIGESYKEKQRTIQAKKEVEQRRAGGYSRKYASKAKNLADDMVRNTARDLLYYAVTQDAMLIFENLSRGFGRQGKRTFMAERQYTRMEDWLTAKLAYEGLPSKTYLSKTLAQYTSKTCSNCGFTITSADYDRVLEKLKKTATGWMTTINGKELKVEGQITYYNRYKRQNVVKDLSVELDRLSEESVNNDISSWTKGRQGEALSLLKKRFSHRPVQEKFVCLNCGFETHADEQAALNIARSWLFLRSQEYKKYQTNKTTGNTDKRAFVETWQSFYRKKLKEVWKPAV

SEQ ID NO: 37859 - protein, 979 aa, synthetic construct
  REGION 1..979: note = engineered CasX variant
QEIKRINKIRRRLVKDSNTKKAGKTGPMKTLLVRVMTPDLRERLENLRKKPENIPQPISNTSRANLNKLLTDYTEMKKAILHVYWEEFQKDPVGLMSRVAQPASKKIDQNKLKPEMDEKGNLTTAGFACSQCGQPLFVYKLEQVSEKGKAYTNYFGRCNVAEHEKLILLAQLKPEKDSDEAVTYSLGKFGQRALDFYSIHVTKESTHPVKPLAQIAGNRYASSPVGKALSDACMGTIASFLSKYQDIIIEHQKVVKGNQKRLESLRELAGKENLEYPSVTLPPQPHTKEGVDAYNEVIARVRMWVNLNLWQKLKLSRDDAKPLLRLKGFPSFPLVERQANEVDWWDMVCNVKKLINEKKEDGKVFWQNLAGYKRQEALRPYLSSEEDRKKGKKFARYQLGDLLLHLEKKHGEDWGKVYDEAWERIDKKVEGLSKHIKLEEERRSEDAQSKAALTDWLRAKASFVIEGLKEADKDEFCRCELKLQKWYGDLRGKPFAIEAENSILDISGFSKQYNCAFIWQKDGVKKLNLYLIINYFKGGKLRFKKIKPEAFEANRFYTVINKKSGEIVPMEVNFNFDDPNLIILPLAFGKRQGREFIWNDLLSLETGSLKLANGRVIEKTLYNRRTRQDEPALFVALTFERREVLDSSNIKTPMNLIGVDRGENIPAVIALTDPEGCPLSRFKDSLGNPTHILRIGESYKEKQRTIQAKKEVEQRRAGGYSRKYASKAKNLADDMVRNTARDLLYYAVTQDAMLIFENLSRGFGRQGKRTFMAERQYTRMEDWLTAKLAYEGLPSKTYLSKTLAQYTSKTCSNCGFTITSADYDRVLEKLKKTATGWMTTINGKELKVEGQITYYNRYKRQNVVKDLSVELDRLSEESVNNDISSWTKGRQGEALSLLKKRFSHRPVQEKFVCLNCGFETHADEQAALNIARSWLFLRSQEYKKYQTNKTTGNTDKRAFVETWQSFYRKKLKEVWKPAV

SEQ ID NO: 37860 - protein, 979 aa, synthetic construct
  REGION 1..979: note = engineered CasX variant
QEIKRINKIRRRLVKDSNTKKAGKTGPMKTLLVRVMTPDLRERLENLRKKPENIPQPISNTSRANLNKLLTDYTEMKKAILHVYWEEFQKDPVGLMSRVAQPASKKIDQNKLKPEMDEKGNLTTAGFACSQCGQPLFVYKLEQVSEKGKAYTNYFGRCNVAEHEKLILLAQLKPEKDSDEAVTYSLGKFGQRALDFYSIHVTKESTHPVKPLAQIAGNRYASTPVGKALSDACMGTIASFLSKYQDIIIEHQKVVKGNQKRLESLRELAGKENLEYPSVTLPPQPHTKEGVDAYNEVIARVRMWVNLNLWQKLKLSRDDAKPLLRLKGFPSFPLVERQANEVDWWDMVCNVKKLINEKKEDGKVFWQNLAGYKRQEALRPYLSSEEDRKKGKKFARYQLGDLLLHLEKKHGEDWGKVYDEAWERIDKKVEGLSKHIKLEEERRSEDAQSKAALTDWLRAKASFVIEGLKEADKDEFCRCELKLQKWYGDLRGKPFAIEAENSILDISGFSKQYNCAFIWQKDGVKKLNLYLIINYFKGGKLRFKKIKPEAFEANRFYTVINKKSGEIVPMEVNFNFDDPNLIILPLAFGKRQGREFIWNDLLSLETGSLKLANGRVIEKTLYNRRTRQDEPALFVALTFERREVLDSSNIKTPMNLIGVDRGENIPAVIALTDPEGCPLSRFKDSLGNPTHILRIGESYKEKQRTIQAKKEVEQRRAGGYSRKYASKAKNLADDMVRNTARDLLYYAVTQDAMLIFENLSRGFGRQGKRTFMAERQYTRMEDWLTAKLAYEGLPSKTYLSKTLAQYTSKTCSNCGFTITSADYDRVLEKLKKTATGWMTTINGKELKVEGQITYYNRYKRQNVVKDLSVELDRLSEESVNNDISSWTKGRQGEALSLLKKRFSHRPVQEKFVCLNCGFETHADEQAALNIARSWLFLRSQEYKKYQTNKTTGNTDKRAFVETWQSFYRKKLKEVWKPAV

SEQ ID NO: 37861 - protein, 979 aa, synthetic construct
  REGION 1..979: note = engineered CasX variant
QEIKRINKIRRRLVKDSNTKKAGKTGPMKTLLVRVMTPDLRERLENLRKKPENIPQPISNTSRANLNKLLTDYTEMKKAILHVYWEEFQKDPVGLMSRVAQPASKKIDQNKLKPEMDEKGNLTTAGFACSQCGQPLFVYKLEQVSEKGKAYTNYFGRCNVAEHEKLILLAQLKPEKDSDEAVTYSLGKFGQRALDFYSIHVTKESTHPVKPLAQIAGNRYASAPVGKALSDACMGTIASFLSKYQDIIIEHQKVVKGNQKRLESLRELAGKENLEYPSVTLPPQPHTKEGVDAYNEVIARVRMWVNLNLWQKLKLSRDDAKPLLRLKGFPSFPLVERQANEVDWWDMVCNVKKLINEKKEDGKVFWQNLAGYKRQEALRPYLSSEEDRKKGKKFARYQLGDLLLHLEKKHGEDWGKVYDEAWERIDKKVEGLSKHIKLEEERRSEDAQSKAALTDWLRAKASFVIEGLKEADKDEFCRCELKLQKWYGDLRGKPFAIEAENSILDISGFSKQYNCAFIWQKDGVKKLNLYLIINYFKGGKLRFKKIKPEAFEANRFYTVINKKSGEIVPMEVNFNFDDPNLIILPLAFGKRQGREFIWNDLLSLETGSLKLANGRVIEKTLYNRRTRQDEPALFVALTFERREVLDSSNIKTPMNLIGVDRGENIPAVIALTDPEGCPLSRFKDSLGNPTHILRIGESYKEKQRTIQAKKEVEQRRAGGYSRKYASKAKNLADDMVRNTARDLLYYAVTQDAMLIFENLSRGFGRQGKRTFMAERQYTRMEDWLTAKLAYEGLPSKTYLSKTLAQYTSKTCSNCGFTITSADYDRVLEKLKKTATGWMTTINGKELKVEGQITYYNRYKRQNVVKDLSVELDRLSEESVNNDISSWTKGRQGEALSLLKKRFSHRPVQEKFVCLNCGFETHADEQAALNIARSWLFLRSQEYKKYQTNKTTGNTDKRAFVETWQSFYRKKLKEVWKPAV

SEQ ID NO: 37862 - protein, 979 aa, synthetic construct
  REGION 1..979: note = engineered CasX variant
QEIKRINKIRRRLVKDSNTKKAGKTGPMKTLLVRVMTPDLRERLENLRKKPENIPQPISNTSRANLNKLLTDYTEMKKAILHVYWEEFQKDPVGLMSRVAQPASKKIDQNKLKPEMDEKGNLTTAGFACSQCGQPLFVYKLEQVSEKGKAYTNYFGRCNVAEHEKLILLAQLKPEKDSDEAVTYSLGKFGQRALDFYSIHVTKESTHPVKPLAQIAGNRYASVPVGKALSDACMGTIASFLSKYQDIIIEHQKVVKGNQKRLESLRELAGKENLEYPSVTLPPQPHTKEGVDAYNEVIARVRMWVNLNLWQKLKLSRDDAKPLLRLKGFPSFPLVERQANEVDWWDMVCNVKKLINEKKEDGKVFWQNLAGYKRQEALRPYLSSEEDRKKGKKFARYQLGDLLLHLEKKHGEDWGKVYDEAWERIDKKVEGLSKHIKLEEERRSEDAQSKAALTDWLRAKASFVIEGLKEADKDEFCRCELKLQKWYGDLRGKPFAIEAENSILDISGFSKQYNCAFIWQKDGVKKLNLYLIINYFKGGKLRFKKIKPEAFEANRFYTVINKKSGEIVPMEVNFNFDDPNLIILPLAFGKRQGREFIWNDLLSLETGSLKLANGRVIEKTLYNRRTRQDEPALFVALTFERREVLDSSNIKTPMNLIGVDRGENIPAVIALTDPEGCPLSRFKDSLGNPTHILRIGESYKEKQRTIQAKKEVEQRRAGGYSRKYASKAKNLADDMVRNTARDLLYYAVTQDAMLIFENLSRGFGRQGKRTFMAERQYTRMEDWLTAKLAYEGLPSKTYLSKTLAQYTSKTCSNCGFTITSADYDRVLEKLKKTATGWMTTINGKELKVEGQITYYNRYKRQNVVKDLSVELDRLSEESVNNDISSWTKGRQGEALSLLKKRFSHRPVQEKFVCLNCGFETHADEQAALNIARSWLFLRSQEYKKYQTNKTTGNTDKRAFVETWQSFYRKKLKEVWKPAV

SEQ ID NO: 37863 - protein, 979 aa, synthetic construct
  REGION 1..979: note = engineered CasX variant
QEIKRINKIRRRLVKDSNTKKAGKTGPMKTLLVRVMTPDLRERLENLRKKPENIPQPISNTSRANLNKLLTDYTEMKKAILHVYWEEFQKDPVGLMSRVAQPASKKIDQNKLKPEMDEKGNLTTAGFACSQCGQPLFVYKLEQVSEKGKAYTNYFGRCNVAEHEKLIKLAQLKPEKDSDEAVTYSLGKFGQRALDFYSIHVTKESTHPVKPLAQIAGNRYASGPVGKALSDACMGTIASFLSKYQDIIIEHQKVVKGNQKRLESLRELAGKENLEYPSVTLPPQPHTKEGVDAYNEVIARVRMWVNLNLWQKLKLSRDDAKPLLRLKGFPSFPLVERQANEVDWWDMVCNVKKLINEKKEDGKVFWQNLAGYKRQEALRPYLSSEEDRKKGKKFARYQLGDLLLHLEKKHGEDWGKVYDEAWERIDKKVEGLSKHIKLEEERRSEDAQSKAALTDWLRAKASFVIEGLKEADKDEFCRCELKLQKWYGDLRGKPFAIEAENSILDISGFSKQYNCAFIWQKDGVKKLNLYLIINYFKGGKLRFKKIKPEAFEANRFYTVINKKSGEIVPMEVNFNFDDPNLIILPLAFGKRQGREFIWNDLLSLETGSLKLANGRVIEKTLYNRRTRQDEPALFVALTFERREVLDSSNIKTPMNLIGVDRGENIPAVIALTDPEGCPLSRFKDSLGNPTHILRIGESYKEKQRTIQAKKEVEQRRAGGYSRKYASKAKNLADDMVRNTARDLLYYAVTQDAMLIFENLSRGFGRQGKRTFMAERQYTRMEDWLTAKLAYEGLPSKTYLSKTLAQYTSKTCSNCGFTITSADYDRVLEKLKKTATGWMTTINGKELKVEGQITYYNRYKRQNVVKDLSVELDRLSEESVNNDISSWTKGRQGEALSLLKKRFSHRPVQEKFVCLNCGFETHADEQAALNIARSWLFLRSQEYKKYQTNKTTGNTDKRAFVETWQSFYRKKLKEVWKPAV

SEQ ID NO: 37864 - protein, 978 aa, synthetic construct
  REGION 1..978: note = engineered CasX variant
QEIKRINKIRRRLVKDSNTKKAGKTGPMKTLLVRVMTPDLRERLENLRKKPENIPQPISNTSRANLNKLLTDYTEMKKAILHVYWEEFQKDPVGLMSRVAQPASKKIDQNKLKPEMDEKGNLTTAGFACSQCGQPLFVYKLEQVSEKGKAYTNYFGRCNVAEHEKLILLAQLKPEKDSDEAVTYSLGKFGQRALDFYSIHVTKESTHPVKPLAQIAGNRYASPVGKALSDACMGTIASFLSKYQDIIIEHQKVVKGNQKRLESLRELAGKENLEYPSVTLPPQPHTKEGVDAYNEVIARVRMWVNLNLWQKLKLSRDDAKPLLRLKGFPSFPLVERQANEVDWWDMVCNVKKLINEKKEDGKVFWQNLAGYKRQEALRPYLSSEEDRKKGKKFARYQLGDLLLHLEKKHGEDWGKVYDEAWERIDKKVEGLSKHIKLEEERRSEDAQSKAALTDWLRAKASFVIEGLKEADKDEFCRCELKLQKWYGDLRGKPFAIEAENSILDISGFSKQYNCAFIWQKDGVKKLNLYLIINYFKGGKLRFKKIKPEAFEANRFYTVINKKSGEIVPMEVNFNFDDPNLIILPLAFGKRQGREFIWNDLLSLETGSLKLANGRVIEKTLYNRRTRQDEPALFVALTFERREVLDSSNIKTPMNLIGVDRGENIPAVIALTDPEGCPLSRFKDSLGNPTHILRIGESYKEKQRTIQAKKEVEQRRAGGYSRKYASKAKNLADDMVRNTARDLLYYAVTQDAMLIFENLSRGFGRQGKRTFMAERQYTRMEDWLTAKLAYEGLPSKTYLSKTLAQYTSKTCSNCGFTITSADYDRVLEKLKKTATGWMTTINGKELKVEGQITYYNRYKRQNVVKDLSVELDRLSEESVNNDISSWTKGRQGEALSLLKKRFSHRPVQEKFVCLNCGFETHADEQAALNIARSWLFLRSQEYKKYQTNKTTGNTDKRAFVETWQSFYRKKLKEVWKPAV

SEQ ID NO: 37865 - protein, 979 aa, synthetic construct
  REGION 1..979: note = engineered CasX variant
QEIKRINKIRRRLVKDSNTKKAGKTGPMKTLLVRVMTPDLRERLENLRKKPENIPQPISNTSRANLNKLLTDYTEMKKAILHVYWEEFQKDPVGLMSRVAQPASKKIDQNKLKPEMDEKGNLTTAGFACSQCGQPLFVYKLEQVSEKGKAYTNYFGRCNVAEHEKLILLAQLKPEKDSDEAVTYSLGKFGQRALDFYSIHVTKESTHPVKPLAQIAGNRYASYPVGKALSDACMGTIASFLSKYQDIIIEHQKVVKGNQKRLESLRELAGKENLEYPSVTLPPQPHTKEGVDAYNEVIARVRMWVNLNLWQKLKLSRDDAKPLLRLKGFPSFPLVERQANEVDWWDMVCNVKKLINEKKEDGKVFWQNLAGYKRQEALRPYLSSEEDRKKGKKFARYQLGDLLLHLEKKHGEDWGKVYDEAWERIDKKVEGLSKHIKLEEERRSEDAQSKAALTDWLRAKASFVIEGLKEADKDEFCRCELKLQKWYGDLRGKPFAIEAENSILDISGFSKQYNCAFIWQKDGVKKLNLYLIINYFKGGKLRFKKIKPEAFEANRFYTVINKKSGEIVPMEVNFNFDDPNLIILPLAFGKRQGREFIWNDLLSLETGSLKLANGRVIEKTLYNRRTRQDEPALFVALTFERREVLDSSNIKTPMNLIGVDRGENIPAVIALTDPEGCPLSRFKDSLGNPTHILRIGESYKEKQRTIQAKKEVEQRRAGGYSRKYASKAKNLADDMVRNTARDLLYYAVTQDAMLIFENLSRGFGRQGKRTFMAERQYTRMEDWLTAKLAYEGLPSKTYLSKTLAQYTSKTCSNCGFTITSADYDRVLEKLKKTATGWMTTINGKELKVEGQITYYNRYKRQNVVKDLSVELDRLSEESVNNDISSWTKGRSGEALSLLKKRFSHRPVQEKFVCLNCEFETHADEQAALNIARSWLFLRSQEYKKYQTNKTTGNTDKRAFVETWQSFYRKKLKEVWKPAV

SEQ ID NO: 37866 - protein, 979 aa, synthetic construct
  REGION 1..979: note = engineered CasX variant
QEIKRINKIRRRLVKDSNTKKAGKTGPMKTLLVRVMTPDLRERLENLRKKPENIPQPISNTSRANLNKLLTDYTEMKKAILHVYWEEFQKDPVGLMSRVAQPASKKIDQNKLKPEMDEKGNLTTAGFACSQCGQPLFVYKLEQVSEKGKAYTNYFGRCNVAEHEKLILLAQLKPEKDSDEAVTYSLGKFGQRALDFYSIHVTKESTHPVKPLAQIAGNRYASHPVGKALSDACMGTIASFLSKYQDIIIEHQKVVKGNQKRLESLRELAGKENLEYPSVTLPPQPHTKEGVDAYNEVIARVRMWVNLNLWQKLKLSRDDAKPLLRLKGFPSFPLVERQANEVDWWDMVCNVKKLINEKKEDGKVFWQNLAGYKRQEALRPYLSSEEDRKKGKKFARYQLGDLLLHLEKKHGEDWGKVYDEAWERIDKKVEGLSKHIKLEEERRSEDAQSKAALTDWLRAKASFVIEGLKEADKDEFCRCELKLQKWYGDLRGKPFAIEAENSILDISGFSKQYNCAFIWQKDGVKKLNLYLIINYFKGGKLRFKKIKPEAFEANRFYTVINKKSGEIVPMEVNFNFDDPNLIILPLAFGKRQGREFIWNDLLSLETGSLKLANGRVIEKTLYNRRTRQDEPALFVALTFERREVLDSSNIKTPMNLIGVDRGENIPAVIALTDPEGCPLSRFKDSLGNPTHILRIGESYKEKQRTIQAKKEVEQRRAGGYSRKYASKAKNLADDMVRNTARDLLYYAVTQDAMLIFENLSRGFGRQGKRTFMAERQYTRMEDWLTAKLAYEGLPSKTYLSKTLAQYTSKTCSNCGFTITSADYDRVLEKLKKTATGWMTTINGKELKVEGQITYYNRYKRQNVVKDLSVELDRLSEESVNNDISSWTKGRSGEALSLLKKRFSHRPVQEKFVCLNCEFETHADEQAALNIARSWLFLRSQEYKKYQTNKTTGNTDKRAFVETWQSFYRKKLKEVWKPAV

SEQ ID NO: 37867 - protein, 979 aa, synthetic construct
  REGION 1..979: note = engineered CasX variant
QEIKRINKIRRRLVKDSNTKKAGKTGPMKTLLVRVMTPDLRERLENLRKKPENIPQPISNTSRANLNKLLTDYTEMKKAILHVYWEEFQKDPVGLMSRVAQPASKKIDQNKLKPEMDEKGNLTTAGFACSQCGQPLFVYKLEQVSEKGKAYTNYFGRCNVAEHEKLILLAQLKPEKDSDEAVTYSLGKFGQRALDFYSIHVTKESTHPVKPLAQIAGNRYASSPVGKALSDACMGTIASFLSKYQDIIIEHQKVVKGNQKRLESLRELAGKENLEYPSVTLPPQPHTKEGVDAYNEVIARVRMWVNLNLWQKLKLSRDDAKPLLRLKGFPSFPLVERQANEVDWWDMVCNVKKLINEKKEDGKVFWQNLAGYKRQEALRPYLSSEEDRKKGKKFARYQLGDLLLHLEKKHGEDWGKVYDEAWERIDKKVEGLSKHIKLEEERRSEDAQSKAALTDWLRAKASFVIEGLKEADKDEFCRCELKLQKWYGDLRGKPFAIEAENSILDISGFSKQYNCAFIWQKDGVKKLNLYLIINYFKGGKLRFKKIKPEAFEANRFYTVINKKSGEIVPMEVNFNFDDPNLIILPLAFGKRQGREFIWNDLLSLETGSLKLANGRVIEKTLYNRRTRQDEPALFVALTFERREVLDSSNIKTPMNLIGVDRGENIPAVIALTDPEGCPLSRFKDSLGNPTHILRIGESYKEKQRTIQAKKEVEQRRAGGYSRKYASKAKNLADDMVRNTARDLLYYAVTQDAMLIFENLSRGFGRQGKRTFMAERQYTRMEDWLTAKLAYEGLPSKTYLSKTLAQYTSKTCSNCGFTITSADYDRVLEKLKKTATGWMTTINGKELKVEGQITYYNRYKRQNVVKDLSVELDRLSEESVNNDISSWTKGRSGEALSLLKKRFSHRPVQEKFVCLNCEFETHADEQAALNIARSWLFLRSQEYKKYQTNKTTGNTDKRAFVETWQSFYRKKLKEVWKPAV

SEQ ID NO: 37868 - protein, 979 aa, synthetic construct
  REGION 1..979: note = engineered CasX variant
QEIKRINKIRRRLVKDSNTKKAGKTGPMKTLLVRVMTPDLRERLENLRKKPENIPQPISNTSRANLNKLLTDYTEMKKAILHVYWEEFQKDPVGLMSRVAQPASKKIDQNKLKPEMDEKGNLTTAGFACSQCGQPLFVYKLEQVSEKGKAYTNYFGRCNVAEHEKLILLAQLKPEKDSDEAVTYSLGKFGQRALDFYSIHVTKESTHPVKPLAQIAGNRYASTPVGKALSDACMGTIASFLSKYQDIIIEHQKVVKGNQKRLESLRELAGKENLEYPSVTLPPQPHTKEGVDAYNEVIARVRMWVNLNLWQKLKLSRDDAKPLLRLKGFPSFPLVERQANEVDWWDMVCNVKKLINEKKEDGKVFWQNLAGYKRQEALRPYLSSEEDRKKGKKFARYQLGDLLLHLEKKHGEDWGKVYDEAWERIDKKVEGLSKHIKLEEERRSEDAQSKAALTDWLRAKASFVIEGLKEADKDEFCRCELKLQKWYGDLRGKPFAIEAENSILDISGFSKQYNCAFIWQKDGVKKLNLYLIINYFKGGKLRFKKIKPEAFEANRFYTVINKKSGEIVPMEVNFNFDDPNLIILPLAFGKRQGREFIWNDLLSLETGSLKLANGRVIEKTLYNRRTRQDEPALFVALTFERREVLDSSNIKTPMNLIGVDRGENIPAVIALTDPEGCPLSRFKDSLGNPTHILRIGESYKEKQRTIQAKKEVEQRRAGGYSRKYASKAKNLADDMVRNTARDLLYYAVTQDAMLIFENLSRGFGRQGKRTFMAERQYTRMEDWLTAKLAYEGLPSKTYLSKTLAQYTSKTCSNCGFTITSADYDRVLEKLKKTATGWMTTINGKELKVEGQITYYNRYKRQNVVKDLSVELDRLSEESVNNDISSWTKGRSGEALSLLKKRFSHRPVQEKFVCLNCEFETHADEQAALNIARSWLFLRSQEYKKYQTNKTTGNTDKRAFVETWQSFYRKKLKEVWKPAV

SEQ ID NO: 37869 - protein, 979 aa, synthetic construct
  REGION 1..979: note = engineered CasX variant
QEIKRINKIRRRLVKDSNTKKAGKTGPMKTLLVRVMTPDLRERLENLRKKPENIPQPISNTSRANLNKLLTDYTEMKKAILHVYWEEFQKDPVGLMSRVAQPASKKIDQNKLKPEMDEKGNLTTAGFACSQCGQPLFVYKLEQVSEKGKAYTNYFGRCNVAEHEKLILLAQLKPEKDSDEAVTYSLGKFGQRALDFYSIHVTKESTHPVKPLAQIAGNRYASAPVGKALSDACMGTIASFLSKYQDIIIEHQKVVKGNQKRLESLRELAGKENLEYPSVTLPPQPHTKEGVDAYNEVIARVRMWVNLNLWQKLKLSRDDAKPLLRLKGFPSFPLVERQANEVDWWDMVCNVKKLINEKKEDGKVFWQNLAGYKRQEALRPYLSSEEDRKKGKKFARYQLGDLLLHLEKKHGEDWGKVYDEAWERIDKKVEGLSKHIKLEEERRSEDAQSKAALTDWLRAKASFVIEGLKEADKDEFCRCELKLQKWYGDLRGKPFAIEAENSILDISGFSKQYNCAFIWQKDGVKKLNLYLIINYFKGGKLRFKKIKPEAFEANRFYTVINKKSGEIVPMEVNFNFDDPNLIILPLAFGKRQGREFIWNDLLSLETGSLKLANGRVIEKTLYNRRTRQDEPALFVALTFERREVLDSSNIKTPMNLIGVDRGENIPAVIALTDPEGCPLSRFKDSLGNPTHILRIGESYKEKQRTIQAKKEVEQRRAGGYSRKYASKAKNLADDMVRNTARDLLYYAVTQDAMLIFENLSRGFGRQGKRTFMAERQYTRMEDWLTAKLAYEGLPSKTYLSKTLAQYTSKTCSNCGFTITSADYDRVLEKLKKTATGWMTTINGKELKVEGQITYYNRYKRQNVVKDLSVELDRLSEESVNNDISSWTKGRSGEALSLLKKRFSHRPVQEKFVCLNCEFETHADEQAALNIARSWLFLRSQEYKKYQTNKTTGNTDKRAFVETWQSFYRKKLKEVWKPAV

SEQ ID NO: 37870 - protein, 979 aa, synthetic construct
  REGION 1..979: note = engineered CasX variant
QEIKRINKIRRRLVKDSNTKKAGKTGPMKTLLVRVMTPDLRERLENLRKKPENIPQPISNTSRANLNKLLTDYTEMKKAILHVYWEEFQKDPVGLMSRVAQPASKKIDQNKLKPEMDEKGNLTTAGFACSQCGQPLFVYKLEQVSEKGKAYTNYFGRCNVAEHEKLILLAQLKPEKDSDEAVTYSLGKFGQRALDFYSIHVTKESTHPVKPLAQIAGNRYASVPVGKALSDACMGTIASFLSKYQDIIIEHQKVVKGNQKRLESLRELAGKENLEYPSVTLPPQPHTKEGVDAYNEVIARVRMWVNLNLWQKLKLSRDDAKPLLRLKGFPSFPLVERQANEVDWWDMVCNVKKLINEKKEDGKVFWQNLAGYKRQEALRPYLSSEEDRKKGKKFARYQLGDLLLHLEKKHGEDWGKVYDEAWERIDKKVEGLSKHIKLEEERRSEDAQSKAALTDWLRAKASFVIEGLKEADKDEFCRCELKLQKWYGDLRGKPFAIEAENSILDISGFSKQYNCAFIWQKDGVKKLNLYLIINYFKGGKLRFKKIKPEAFEANRFYTVINKKSGEIVPMEVNFNFDDPNLIILPLAFGKRQGREFIWNDLLSLETGSLKLANGRVIEKTLYNRRTRQDEPALFVALTFERREVLDSSNIKTPMNLIGVDRGENIPAVIALTDPEGCPLSRFKDSLGNPTHILRIGESYKEKQRTIQAKKEVEQRRAGGYSRKYASKAKNLADDMVRNTARDLLYYAVTQDAMLIFENLSRGFGRQGKRTFMAERQYTRMEDWLTAKLAYEGLPSKTYLSKTLAQYTSKTCSNCGFTITSADYDRVLEKLKKTATGWMTTINGKELKVEGQITYYNRYKRQNVVKDLSVELDRLSEESVNNDISSWTKGRSGEALSLLKKRFSHRPVQEKFVCLNCEFETHADEQAALNIARSWLFLRSQEYKKYQTNKTTGNTDKRAFVETWQSFYRKKLKEVWKPAV

SEQ ID NO: 37871 - protein, 979 aa, synthetic construct
  REGION 1..979: note = engineered CasX variant
QEIKRINKIRRRLVKDSNTKKAGKTGPMKTLLVRVMTPDLRERLENLRKKPENIPQPISNTSRANLNKLLTDYTEMKKAILHVYWEEFQKDPVGLMSRVAQPASKKIDQNKLKPEMDEKGNLTTAGFACSQCGQPLFVYKLEQVSEKGKAYTNYFGRCNVAEHEKLIKLAQLKPEKDSDEAVTYSLGKFGQRALDFYSIHVTKESTHPVKPLAQIAGNRYASGPVGKALSDACMGTIASFLSKYQDIIIEHQKVVKGNQKRLESLRELAGKENLEYPSVTLPPQPHTKEGVDAYNEVIARVRMWVNLNLWQKLKLSRDDAKPLLRLKGFPSFPLVERQANEVDWWDMVCNVKKLINEKKEDGKVFWQNLAGYKRQEALRPYLSSEEDRKKGKKFARYQLGDLLLHLEKKHGEDWGKVYDEAWERIDKKVEGLSKHIKLEEERRSEDAQSKAALTDWLRAKASFVIEGLKEADKDEFCRCELKLQKWYGDLRGKPFAIEAENSILDISGFSKQYNCAFIWQKDGVKKLNLYLIINYFKGGKLRFKKIKPEAFEANRFYTVINKKSGEIVPMEVNFNFDDPNLIILPLAFGKRQGREFIWNDLLSLETGSLKLANGRVIEKTLYNRRTRQDEPALFVALTFERREVLDSSNIKTPMNLIGVDRGENIPAVIALTDPEGCPLSRFKDSLGNPTHILRIGESYKEKQRTIQAKKEVEQRRAGGYSRKYASKAKNLADDMVRNTARDLLYYAVTQDAMLIFENLSRGFGRQGKRTFMAERQYTRMEDWLTAKLAYEGLPSKTYLSKTLAQYTSKTCSNCGFTITSADYDRVLEKLKKTATGWMTTINGKELKVEGQITYYNRYKRQNVVKDLSVELDRLSEESVNNDISSWTKGRSGEALSLLKKRFSHRPVQEKFVCLNCEFETHADEQAALNIARSWLFLRSQEYKKYQTNKTTGNTDKRAFVETWQSFYRKKLKEVWKPAV

SEQ ID NO: 37872 - protein, 978 aa, synthetic construct
  REGION 1..978: note = engineered CasX variant
QEIKRINKIRRRLVKDSNTKKAGKTGPMKTLLVRVMTPDLRERLENLRKKPENIPQPISNTSRANLNKLLTDYTEMKKAILHVYWEEFQKDPVGLMSRVAQPASKKIDQNKLKPEMDEKGNLTTAGFACSQCGQPLFVYKLEQVSEKGKAYTNYFGRCNVAEHEKLILLAQLKPEKDSDEAVTYSLGKFGQRALDFYSIHVTKESTHPVKPLAQIAGNRYASPVGKALSDACMGTIASFLSKYQDIIIEHQKVVKGNQKRLESLRELAGKENLEYPSVTLPPQPHTKEGVDAYNEVIARVRMWVNLNLWQKLKLSRDDAKPLLRLKGFPSFPLVERQANEVDWWDMVCNVKKLINEKKEDGKVFWQNLAGYKRQEALRPYLSSEEDRKKGKKFARYQLGDLLLHLEKKHGEDWGKVYDEAWERIDKKVEGLSKHIKLEEERRSEDAQSKAALTDWLRAKASFVIEGLKEADKDEFCRCELKLQKWYGDLRGKPFAIEAENSILDISGFSKQYNCAFIWQKDGVKKLNLYLIINYFKGGKLRFKKIKPEAFEANRFYTVINKKSGEIVPMEVNFNFDDPNLIILPLAFGKRQGREFIWNDLLSLETGSLKLANGRVIEKTLYNRRTRQDEPALFVALTFERREVLDSSNIKTPMNLIGVDRGENIPAVIALTDPEGCPLSRFKDSLGNPTHILRIGESYKEKQRTIQAKKEVEQRRAGGYSRKYASKAKNLADDMVRNTARDLLYYAVTQDAMLIFENLSRGFGRQGKRTFMAERQYTRMEDWLTAKLAYEGLPSKTYLSKTLAQYTSKTCSNCGFTITSADYDRVLEKLKKTATGWMTTINGKELKVEGQITYYNRYKRQNVVKDLSVELDRLSEESVNNDISSWTKGRSGEALSLLKKRFSHRPVQEKFVCLNCEFETHADEQAALNIARSWLFLRSQEYKKYQTNKTTGNTDKRAFVETWQSFYRKKLKEVWKPAV

SEQ ID NO: 37873 - protein, 980 aa, synthetic construct
  REGION 1..980: note = engineered CasX variant
QEIKRINKIRRRLVKDSNTKKAGKTGPMKTLLVRVMTPDLRERLENLRKKPENIPQPISNTSRANLNKLLTDYTEMKKAILHVYWEEFQKDPVGLMSRVAQPASKKIDQNKLKPEMDEKGNLTTAGFACSQCGQPLFVYKLEQVSEKGKAYTNYFGRCNVAEHEKLILLAQLKPEKDSDEAVTYSLGKFGQRALDFYSIHVTKESTHPVKPLAQIAGNRYASYPVGKALSDACMGTIASFLSKYQDIIIEHQKVVKGNQKRLESLRELAGKENLEYPSVTLPPQPHTKEGVDAYNEVIARVRMWVNLNLWQKLKLSRDDAKPLLRLKGFPSFPLVERQANEVDWWDMVCNVKKLINEKKEDGKVFWQNLAGYKRQEALRPYLSSEEDRKKGKKFARYQLGDLLLHLEKKHGEDWGKVYDEAWERIDKKVEGLSKHIKLEEERRSEDAQSKAALTDWLRAKASFVIEGLKEADKDEFCRCELKLQKWYGDLRGKPFAIEAENSILDISGFSKQYNCAFIWQKDGVKKLNLYLIINYFKGGKLRFKKIKPEAFEANRFYTVINKKSGEIVPMEVNFNFDDPNLIILPLAFGKRQGREFIWNDLLSLETGSLKLANGRVIEKTLYNRRTRQDEPALFVALTFERREVLDSSNIKTPMNLIGVDRGENIPAVIALTDPEGCPLSRFKDSLGNPTHILRIGESYKEKQRTIQAKKEVEQRRAGGYSRKYASKAKNLADDMVRNTARDLLYYAVTQDAMLIFENLSRGFGRQGKRTFMAERQYTRMEDWLTAKLAYEGLPSKTYLSKTLAQYTSKTCSNCGFTITSADYDRVLEKLKKTATGWMTTINGKELKVEGQITYYNRYKRQNVVKDLSVELDRLSEESVNNDISSWTKGRSGEALSLLKKRFSHRPVQEKFVCLNCGFETHADEQAALNIARSWLFLRSQEYKKYQTNKTSTGNTDKRAFVETWQSFYRKKLKEVWKPAV

SEQ ID NO: 37874 - protein, 980 aa, synthetic construct
  REGION 1..980: note = engineered CasX variant
QEIKRINKIRRRLVKDSNTKKAGKTGPMKTLLVRVMTPDLRERLENLRKKPENIPQPISNTSRANLNKLLTDYTEMKKAILHVYWEEFQKDPVGLMSRVAQPASKKIDQNKLKPEMDEKGNLTTAGFACSQCGQPLFVYKLEQVSEKGKAYTNYFGRCNVAEHEKLILLAQLKPEKDSDEAVTYSLGKFGQRALDFYSIHVTKESTHPVKPLAQIAGNRYASHPVGKALSDACMGTIASFLSKYQDIIIEHQKVVKGNQKRLESLRELAGKENLEYPSVTLPPQPHTKEGVDAYNEVIARVRMWVNLNLWQKLKLSRDDAKPLLRLKGFPSFPLVERQANEVDWWDMVCNVKKLINEKKEDGKVFWQNLAGYKRQEALRPYLSSEEDRKKGKKFARYQLGDLLLHLEKKHGEDWGKVYDEAWERIDKKVEGLSKHIKLEEERRSEDAQSKAALTDWLRAKASFVIEGLKEADKDEFCRCELKLQKWYGDLRGKPFAIEAENSILDISGFSKQYNCAFIWQKDGVKKLNLYLIINYFKGGKLRFKKIKPEAFEANRFYTVINKKSGEIVPMEVNFNFDDPNLIILPLAFGKRQGREFIWNDLLSLETGSLKLANGRVIEKTLYNRRTRQDEPALFVALTFERREVLDSSNIKTPMNLIGVDRGENIPAVIALTDPEGCPLSRFKDSLGNPTHILRIGESYKEKQRTIQAKKEVEQRRAGGYSRKYASKAKNLADDMVRNTARDLLYYAVTQDAMLIFENLSRGFGRQGKRTFMAERQYTRMEDWLTAKLAYEGLPSKTYLSKTLAQYTSKTCSNCGFTITSADYDRVLEKLKKTATGWMTTINGKELKVEGQITYYNRYKRQNVVKDLSVELDRLSEESVNNDISSWTKGRSGEALSLLKKRFSHRPVQEKFVCLNCGFETHADEQAALNIARSWLFLRSQEYKKYQTNKTSTGNTDKRAFVETWQSFYRKKLKEVWKPAV

SEQ ID NO: 37875 - protein, 980 aa, synthetic construct
  REGION 1..980: note = engineered CasX variant
QEIKRINKIRRRLVKDSNTKKAGKTGPMKTLLVRVMTPDLRERLENLRKKPENIPQPISNTSRANLNKLLTDYTEMKKAILHVYWEEFQKDPVGLMSRVAQPASKKIDQNKLKPEMDEKGNLTTAGFACSQCGQPLFVYKLEQVSEKGKAYTNYFGRCNVAEHEKLILLAQLKPEKDSDEAVTYSLGKFGQRALDFYSIHVTKESTHPVKPLAQIAGNRYASSPVGKALSDACMGTIASFLSKYQDIIIEHQKVVKGNQKRLESLRELAGKENLEYPSVTLPPQPHTKEGVDAYNEVIARVRMWVNLNLWQKLKLSRDDAKPLLRLKGFPSFPLVERQANEVDWWDMVCNVKKLINEKKEDGKVFWQNLAGYKRQEALRPYLSSEEDRKKGKKFARYQLGDLLLHLEKKHGEDWGKVYDEAWERIDKKVEGLSKHIKLEEERRSEDAQSKAALTDWLRAKASFVIEGLKEADKDEFCRCELKLQKWYGDLRGKPFAIEAENSILDISGFSKQYNCAFIWQKDGVKKLNLYLIINYFKGGKLRFKKIKPEAFEANRFYTVINKKSGEIVPMEVNFNFDDPNLIILPLAFGKRQGREFIWNDLLSLETGSLKLANGRVIEKTLYNRRTRQDEPALFVALTFERREVLDSSNIKTPMNLIGVDRGENIPAVIALTDPEGCPLSRFKDSLGNPTHILRIGESYKEKQRTIQAKKEVEQRRAGGYSRKYASKAKNLADDMVRNTARDLLYYAVTQDAMLIFENLSRGFGRQGKRTFMAERQYTRMEDWLTAKLAYEGLPSKTYLSKTLAQYTSKTCSNCGFTITSADYDRVLEKLKKTATGWMTTINGKELKVEGQITYYNRYKRQNVVKDLSVELDRLSEESVNNDISSWTKGRSGEALSLLKKRFSHRPVQEKFVCLNCGFETHADEQAALNIARSWLFLRSQEYKKYQTNKTSTGNTDKRAFVETWQSFYRKKLKEVWKPAV

SEQ ID NO: 37876 - protein, 980 aa, synthetic construct
  REGION 1..980: note = engineered CasX variant
QEIKRINKIRRRLVKDSNTKKAGKTGPMKTLLVRVMTPDLRERLENLRKKPENIPQPISNTSRANLNKLLTDYTEMKKAILHVYWEEFQKDPVGLMSRVAQPASKKIDQNKLKPEMDEKGNLTTAGFACSQCGQPLFVYKLEQVSEKGKAYTNYFGRCNVAEHEKLILLAQLKPEKDSDEAVTYSLGKFGQRALDFYSIHVTKESTHPVKPLAQIAGNRYASTPVGKALSDACMGTIASFLSKYQDIIIEHQKVVKGNQKRLESLRELAGKENLEYPSVTLPPQPHTKEGVDAYNEVIARVRMWVNLNLWQKLKLSRDDAKPLLRLKGFPSFPLVERQANEVDWWDMVCNVKKLINEKKEDGKVFWQNLAGYKRQEALRPYLSSEEDRKKGKKFARYQLGDLLLHLEKKHGEDWGKVYDEAWERIDKKVEGLSKHIKLEEERRSEDAQSKAALTDWLRAKASFVIEGLKEADKDEFCRCELKLQKWYGDLRGKPFAIEAENSILDISGFSKQYNCAFIWQKDGVKKLNLYLIINYFKGGKLRFKKIKPEAFEANRFYTVINKKSGEIVPMEVNFNFDDPNLIILPLAFGKRQGREFIWNDLLSLETGSLKLANGRVIEKTLYNRRTRQDEPALFVALTFERREVLDSSNIKTPMNLIGVDRGENIPAVIALTDPEGCPLSRFKDSLGNPTHILRIGESYKEKQRTIQAKKEVEQRRAGGYSRKYASKAKNLADDMVRNTARDLLYYAVTQDAMLIFENLSRGFGRQGKRTFMAERQYTRMEDWLTAKLAYEGLPSKTYLSKTLAQYTSKTCSNCGFTITSADYDRVLEKLKKTATGWMTTINGKELKVEGQITYYNRYKRQNVVKDLSVELDRLSEESVNNDISSWTKGRSGEALSLLKKRFSHRPVQEKFVCLNCGFETHADEQAALNIARSWLFLRSQEYKKYQTNKTSTGNTDKRAFVETWQSFYRKKLKEVWKPAV

SEQ ID NO: 37877 - protein, 980 aa, synthetic construct
  REGION 1..980: note = engineered CasX variant
QEIKRINKIRRRLVKDSNTKKAGKTGPMKTLLVRVMTPDLRERLENLRKKPENIPQPISNTSRANLNKLLTDYTEMKKAILHVYWEEFQKDPVGLMSRVAQPASKKIDQNKLKPEMDEKGNLTTAGFACSQCGQPLFVYKLEQVSEKGKAYTNYFGRCNVAEHEKLILLAQLKPEKDSDEAVTYSLGKFGQRALDFYSIHVTKESTHPVKPLAQIAGNRYASAPVGKALSDACMGTIASFLSKYQDIIIEHQKVVKGNQKRLESLRELAGKENLEYPSVTLPPQPHTKEGVDAYNEVIARVRMWVNLNLWQKLKLSRDDAKPLLRLKGFPSFPLVERQANEVDWWDMVCNVKKLINEKKEDGKVFWQNLAGYKRQEALRPYLSSEEDRKKGKKFARYQLGDLLLHLEKKHGEDWGKVYDEAWERIDKKVEGLSKHIKLEEERRSEDAQSKAALTDWLRAKASFVIEGLKEADKDEFCRCELKLQKWYGDLRGKPFAIEAENSILDISGFSKQYNCAFIWQKDGVKKLNLYLIINYFKGGKLRFKKIKPEAFEANRFYTVINKKSGEIVPMEVNFNFDDPNLIILPLAFGKRQGREFIWNDLLSLETGSLKLANGRVIEKTLYNRRTRQDEPALFVALTFERREVLDSSNIKTPMNLIGVDRGENIPAVIALTDPEGCPLSRFKDSLGNPTHILRIGESYKEKQRTIQAKKEVEQRRAGGYSRKYASKAKNLADDMVRNTARDLLYYAVTQDAMLIFENLSRGFGRQGKRTFMAERQYTRMEDWLTAKLAYEGLPSKTYLSKTLAQYTSKTCSNCGFTITSADYDRVLEKLKKTATGWMTTINGKELKVEGQITYYNRYKRQNVVKDLSVELDRLSEESVNNDISSWTKGRSGEALSLLKKRFSHRPVQEKFVCLNCGFETHADEQAALNIARSWLFLRSQEYKKYQTNKTSTGNTDKRAFVETWQSFYRKKLKEVWKPAV

SEQ ID NO: 37878 - protein, 980 aa, synthetic construct
  REGION 1..980: note = engineered CasX variant
QEIKRINKIRRRLVKDSNTKKAGKTGPMKTLLVRVMTPDLRERLENLRKKPENIPQPISNTSRANLNKLLTDYTEMKKAILHVYWEEFQKDPVGLMSRVAQPASKKIDQNKLKPEMDEKGNLTTAGFACSQCGQPLFVYKLEQVSEKGKAYTNYFGRCNVAEHEKLILLAQLKPEKDSDEAVTYSLGKFGQRALDFYSIHVTKESTHPVKPLAQIAGNRYASVPVGKALSDACMGTIASFLSKYQDIIIEHQKVVKGNQKRLESLRELAGKENLEYPSVTLPPQPHTKEGVDAYNEVIARVRMWVNLNLWQKLKLSRDDAKPLLRLKGFPSFPLVERQANEVDWWDMVCNVKKLINEKKEDGKVFWQNLAGYKRQEALRPYLSSEEDRKKGKKFARYQLGDLLLHLEKKHGEDWGKVYDEAWERIDKKVEGLSKHIKLEEERRSEDAQSKAALTDWLRAKASFVIEGLKEADKDEFCRCELKLQKWYGDLRGKPFAIEAENSILDISGFSKQYNCAFIWQKDGVKKLNLYLIINYFKGGKLRFKKIKPEAFEANRFYTVINKKSGEIVPMEVNFNFDDPNLIILPLAFGKRQGREFIWNDLLSLETGSLKLANGRVIEKTLYNRRTRQDEPALFVALTFERREVLDSSNIKTPMNLIGVDRGENIPAVIALTDPEGCPLSRFKDSLGNPTHILRIGESYKEKQRTIQAKKEVEQRRAGGYSRKYASKAKNLADDMVRNTARDLLYYAVTQDAMLIFENLSRGFGRQGKRTFMAERQYTRMEDWLTAKLAYEGLPSKTYLSKTLAQYTSKTCSNCGFTITSADYDRVLEKLKKTATGWMTTINGKELKVEGQITYYNRYKRQNVVKDLSVELDRLSEESVNNDISSWTKGRSGEALSLLKKRFSHRPVQEKFVCLNCGFETHADEQAALNIARSWLFLRSQEYKKYQTNKTSTGNTDKRAFVETWQSFYRKKLKEVWKPAV

SEQ ID NO: 37879 - protein, 980 aa, synthetic construct
  REGION 1..980: note = engineered CasX variant
QEIKRINKIRRRLVKDSNTKKAGKTGPMKTLLVRVMTPDLRERLENLRKKPENIPQPISNTSRANLNKLLTDYTEMKKAILHVYWEEFQKDPVGLMSRVAQPASKKIDQNKLKPEMDEKGNLTTAGFACSQCGQPLFVYKLEQVSEKGKAYTNYFGRCNVAEHEKLIKLAQLKPEKDSDEAVTYSLGKFGQRALDFYSIHVTKESTHPVKPLAQIAGNRYASGPVGKALSDACMGTIASFLSKYQDIIIEHQKVVKGNQKRLESLRELAGKENLEYPSVTLPPQPHTKEGVDAYNEVIARVRMWVNLNLWQKLKLSRDDAKPLLRLKGFPSFPLVERQANEVDWWDMVCNVKKLINEKKEDGKVFWQNLAGYKRQEALRPYLSSEEDRKKGKKFARYQLGDLLLHLEKKHGEDWGKVYDEAWERIDKKVEGLSKHIKLEEERRSEDAQSKAALTDWLRAKASFVIEGLKEADKDEFCRCELKLQKWYGDLRGKPFAIEAENSILDISGFSKQYNCAFIWQKDGVKKLNLYLIINYFKGGKLRFKKIKPEAFEANRFYTVINKKSGEIVPMEVNFNFDDPNLIILPLAFGKRQGREFIWNDLLSLETGSLKLANGRVIEKTLYNRRTRQDEPALFVALTFERREVLDSSNIKTPMNLIGVDRGENIPAVIALTDPEGCPLSRFKDSLGNPTHILRIGESYKEKQRTIQAKKEVEQRRAGGYSRKYASKAKNLADDMVRNTARDLLYYAVTQDAMLIFENLSRGFGRQGKRTFMAERQYTRMEDWLTAKLAYEGLPSKTYLSKTLAQYTSKTCSNCGFTITSADYDRVLEKLKKTATGWMTTINGKELKVEGQITYYNRYKRQNVVKDLSVELDRLSEESVNNDISSWTKGRSGEALSLLKKRFSHRPVQEKFVCLNCGFETHADEQAALNIARSWLFLRSQEYKKYQTNKTSTGNTDKRAFVETWQSFYRKKLKEVWKPAV

SEQ ID NO: 37880 - protein, 979 aa, synthetic construct
  REGION 1..979: note = engineered CasX variant
QEIKRINKIRRRLVKDSNTKKAGKTGPMKTLLVRVMTPDLRERLENLRKKPENIPQPISNTSRANLNKLLTDYTEMKKAILHVYWEEFQKDPVGLMSRVAQPASKKIDQNKLKPEMDEKGNLTTAGFACSQCGQPLFVYKLEQVSEKGKAYTNYFGRCNVAEHEKLILLAQLKPEKDSDEAVTYSLGKFGQRALDFYSIHVTKESTHPVKPLAQIAGNRYASPVGKALSDACMGTIASFLSKYQDIIIEHQKVVKGNQKRLESLRELAGKENLEYPSVTLPPQPHTKEGVDAYNEVIARVRMWVNLNLWQKLKLSRDDAKPLLRLKGFPSFPLVERQANEVDWWDMVCNVKKLINEKKEDGKVFWQNLAGYKRQEALRPYLSSEEDRKKGKKFARYQLGDLLLHLEKKHGEDWGKVYDEAWERIDKKVEGLSKHIKLEEERRSEDAQSKAALTDWLRAKASFVIEGLKEADKDEFCRCELKLQKWYGDLRGKPFAIEAENSILDISGFSKQYNCAFIWQKDGVKKLNLYLIINYFKGGKLRFKKIKPEAFEANRFYTVINKKSGEIVPMEVNFNFDDPNLIILPLAFGKRQGREFIWNDLLSLETGSLKLANGRVIEKTLYNRRTRQDEPALFVALTFERREVLDSSNIKTPMNLIGVDRGENIPAVIALTDPEGCPLSRFKDSLGNPTHILRIGESYKEKQRTIQAKKEVEQRRAGGYSRKYASKAKNLADDMVRNTARDLLYYAVTQDAMLIFENLSRGFGRQGKRTFMAERQYTRMEDWLTAKLAYEGLPSKTYLSKTLAQYTSKTCSNCGFTITSADYDRVLEKLKKTATGWMTTINGKELKVEGQITYYNRYKRQNVVKDLSVELDRLSEESVNNDISSWTKGRSGEALSLLKKRFSHRPVQEKFVCLNCGFETHADEQAALNIARSWLFLRSQEYKKYQTNKTSTGNTDKRAFVETWQSFYRKKLKEVWKPAV

SEQ ID NO: 37881 - protein, 980 aa, synthetic construct
  REGION 1..980: note = engineered CasX variant
QEIKRINKIRRRLVKDSNTKKAGKTGPMKTLLVRVMTPDLRERLENLRKKPENIPQPISNTSRANLNKLLTDYTEMKKAILHVYWEEFQKDPVGLMSRVAQPASKKIDQNKLKPEMDEKGNLTTAGFACSQCGQPLFVYKLEQVSEKGKAYTNYFGRCNVAEHEKLILLAQLKPEKDSDEAVTYSLGKFGQRALDFYSIHVTKESTHPVKPLAQIAGNRYASYPVGKALSDACMGTIASFLSKYQDIIIEHQKVVKGNQKRLESLRELAGKENLEYPSVTLPPQPHTKEGVDAYNEVIARVRMWVNLNLWQKLKLSRDDAKPLLRLKGFPSFPLVERQANEVDWWDMVCNVKKLINEKKEDGKVFWQNLAGYKRQEALRPYLSSEEDRKKGKKFARYQLGDLLLHLEKKHGEDWGKVYDEAWERIDKKVEGLSKHIKLEEERRSEDAQSKAALTDWLRAKASFVIEGLKEADKDEFCRCELKLQKWYGDLRGKPFAIEAENSILDISGFSKQYNCAFIWQKDGVKKLNLYLIINYFKGGKLRFKKIKPEAFEANRFYTVINKKSGEIVPMEVNFNFDDPNLIILPLAFGKRQGREFIWNDLLSLETGSLKLANGRVIEKTLYNRRTRQDEPALFVALTFERREVLDSSNIKTPMNLIGVDRGENIPAVIALTDPEGCPLSRFKDSLGNPTHILRIGESYKEKQRTIQAKKEVEQRRAGGYSRKYASKAKNLADDMVRNTARDLLYYAVTQDAMLIFENLSRGFGRQGKRTFMAERQYTRMEDWLTAKLAYEGLPSKTYLSKTLAQYTSKTCSNCGFTITSADYDRVLEKLKKTATGWMTTINGKELKVEGQITYYNRYKRQNVVKDLSVELDRLSEESVNNDISSWTKGRSGEALSLLKKRFSHRPVQEKFVCLNCGFETHADEQAALNIARSWLFLRSQEYKKYQTNKTTGKNTDKRAFVETWQSFYRKKLKEVWKPAV

SEQ ID NO: 37882 - protein, 980 aa, synthetic construct
  REGION 1..980: note = engineered CasX variant
QEIKRINKIRRRLVKDSNTKKAGKTGPMKTLLVRVMTPDLRERLENLRKKPENIPQPISNTSRANLNKLLTDYTEMKKAILHVYWEEFQKDPVGLMSRVAQPASKKIDQNKLKPEMDEKGNLTTAGFACSQCGQPLFVYKLEQVSEKGKAYTNYFGRCNVAEHEKLILLAQLKPEKDSDEAVTYSLGKFGQRALDFYSIHVTKESTHPVKPLAQIAGNRYASHPVGKALSDACMGTIASFLSKYQDIIIEHQKVVKGNQKRLESLRELAGKENLEYPSVTLPPQPHTKEGVDAYNEVIARVRMWVNLNLWQKLKLSRDDAKPLLRLKGFPSFPLVERQANEVDWWDMVCNVKKLINEKKEDGKVFWQNLAGYKRQEALRPYLSSEEDRKKGKKFARYQLGDLLLHLEKKHGEDWGKVYDEAWERIDKKVEGLSKHIKLEEERRSEDAQSKAALTDWLRAKASFVIEGLKEADKDEFCRCELKLQKWYGDLRGKPFAIEAENSILDISGFSKQYNCAFIWQKDGVKKLNLYLIINYFKGGKLRFKKIKPEAFEANRFYTVINKKSGEIVPMEVNFNFDDPNLIILPLAFGKRQGREFIWNDLLSLETGSLKLANGRVIEKTLYNRRTRQDEPALFVALTFERREVLDSSNIKTPMNLIGVDRGENIPAVIALTDPEGCPLSRFKDSLGNPTHILRIGESYKEKQRTIQAKKEVEQRRAGGYSRKYASKAKNLADDMVRNTARDLLYYAVTQDAMLIFENLSRGFGRQGKRTFMAERQYTRMEDWLTAKLAYEGLPSKTYLSKTLAQYTSKTCSNCGFTITSADYDRVLEKLKKTATGWMTTINGKELKVEGQITYYNRYKRQNVVKDLSVELDRLSEESVNNDISSWTKGRSGEALSLLKKRFSHRPVQEKFVCLNCGFETHADEQAALNIARSWLFLRSQEYKKYQTNKTTGKNTDKRAFVETWQSFYRKKLKEVWKPAV

SEQ ID NO: 37883 - protein, 980 aa, synthetic construct
  REGION 1..980: note = engineered CasX variant
QEIKRINKIRRRLVKDSNTKKAGKTGPMKTLLVRVMTPDLRERLENLRKKPENIPQPISNTSRANLNKLLTDYTEMKKAILHVYWEEFQKDPVGLMSRVAQPASKKIDQNKLKPEMDEKGNLTTAGFACSQCGQPLFVYKLEQVSEKGKAYTNYFGRCNVAEHEKLILLAQLKPEKDSDEAVTYSLGKFGQRALDFYSIHVTKESTHPVKPLAQIAGNRYASSPVGKALSDACMGTIASFLSKYQDIIIEHQKVVKGNQKRLESLRELAGKENLEYPSVTLPPQPHTKEGVDAYNEVIARVRMWVNLNLWQKLKLSRDDAKPLLRLKGFPSFPLVERQANEVDWWDMVCNVKKLINEKKEDGKVFWQNLAGYKRQEALRPYLSSEEDRKKGKKFARYQLGDLLLHLEKKHGEDWGKVYDEAWERIDKKVEGLSKHIKLEEERRSEDAQSKAALTDWLRAKASFVIEGLKEADKDEFCRCELKLQKWYGDLRGKPFAIEAENSILDISGFSKQYNCAFIWQKDGVKKLNLYLIINYFKGGKLRFKKIKPEAFEANRFYTVINKKSGEIVPMEVNFNFDDPNLIILPLAFGKRQGREFIWNDLLSLETGSLKLANGRVIEKTLYNRRTRQDEPALFVALTFERREVLDSSNIKTPMNLIGVDRGENIPAVIALTDPEGCPLSRFKDSLGNPTHILRIGESYKEKQRTIQAKKEVEQRRAGGYSRKYASKAKNLADDMVRNTARDLLYYAVTQDAMLIFENLSRGFGRQGKRTFMAERQYTRMEDWLTAKLAYEGLPSKTYLSKTLAQYTSKTCSNCGFTITSADYDRVLEKLKKTATGWMTTINGKELKVEGQITYYNRYKRQNVVKDLSVELDRLSEESVNNDISSWTKGRSGEALSLLKKRFSHRPVQEKFVCLNCGFETHADEQAALNIARSWLFLRSQEYKKYQTNKTTGKNTDKRAFVETWQSFYRKKLKEVWKPAV

SEQ ID NO: 37884 - protein, 980 aa, synthetic construct
  REGION 1..980: note = engineered CasX variant
QEIKRINKIRRRLVKDSNTKKAGKTGPMKTLLVRVMTPDLRERLENLRKKPENIPQPISNTSRANLNKLLTDYTEMKKAILHVYWEEFQKDPVGLMSRVAQPASKKIDQNKLKPEMDEKGNLTTAGFACSQCGQPLFVYKLEQVSEKGKAYTNYFGRCNVAEHEKLILLAQLKPEKDSDEAVTYSLGKFGQRALDFYSIHVTKESTHPVKPLAQIAGNRYASTPVGKALSDACMGTIASFLSKYQDIIIEHQKVVKGNQKRLESLRELAGKENLEYPSVTLPPQPHTKEGVDAYNEVIARVRMWVNLNLWQKLKLSRDDAKPLLRLKGFPSFPLVERQANEVDWWDMVCNVKKLINEKKEDGKVFWQNLAGYKRQEALRPYLSSEEDRKKGKKFARYQLGDLLLHLEKKHGEDWGKVYDEAWERIDKKVEGLSKHIKLEEERRSEDAQSKAALTDWLRAKASFVIEGLKEADKDEFCRCELKLQKWYGDLRGKPFAIEAENSILDISGFSKQYNCAFIWQKDGVKKLNLYLIINYFKGGKLRFKKIKPEAFEANRFYTVINKKSGEIVPMEVNFNFDDPNLIILPLAFGKRQGREFIWNDLLSLETGSLKLANGRVIEKTLYNRRTRQDEPALFVALTFERREVLDSSNIKTPMNLIGVDRGENIPAVIALTDPEGCPLSRFKDSLGNPTHILRIGESYKEKQRTIQAKKEVEQRRAGGYSRKYASKAKNLADDMVRNTARDLLYYAVTQDAMLIFENLSRGFGRQGKRTFMAERQYTRMEDWLTAKLAYEGLPSKTYLSKTLAQYTSKTCSNCGFTITSADYDRVLEKLKKTATGWMTTINGKELKVEGQITYYNRYKRQNVVKDLSVELDRLSEESVNNDISSWTKGRSGEALSLLKKRFSHRPVQEKFVCLNCGFETHADEQAALNIARSWLFLRSQEYKKYQTNKTTGKNTDKRAFVETWQSFYRKKLKEVWKPAV

SEQ ID NO: 37885 - protein, 980 aa, synthetic construct
  REGION 1..980: note = engineered CasX variant
QEIKRINKIRRRLVKDSNTKKAGKTGPMKTLLVRVMTPDLRERLENLRKKPENIPQPISNTSRANLNKLLTDYTEMKKAILHVYWEEFQKDPVGLMSRVAQPASKKIDQNKLKPEMDEKGNLTTAGFACSQCGQPLFVYKLEQVSEKGKAYTNYFGRCNVAEHEKLILLAQLKPEKDSDEAVTYSLGKFGQRALDFYSIHVTKESTHPVKPLAQIAGNRYASAPVGKALSDACMGTIASFLSKYQDIIIEHQKVVKGNQKRLESLRELAGKENLEYPSVTLPPQPHTKEGVDAYNEVIARVRMWVNLNLWQKLKLSRDDAKPLLRLKGFPSFPLVERQANEVDWWDMVCNVKKLINEKKEDGKVFWQNLAGYKRQEALRPYLSSEEDRKKGKKFARYQLGDLLLHLEKKHGEDWGKVYDEAWERIDKKVEGLSKHIKLEEERRSEDAQSKAALTDWLRAKASFVIEGLKEADKDEFCRCELKLQKWYGDLRGKPFAIEAENSILDISGFSKQYNCAFIWQKDGVKKLNLYLIINYFKGGKLRFKKIKPEAFEANRFYTVINKKSGEIVPMEVNFNFDDPNLIILPLAFGKRQGREFIWNDLLSLETGSLKLANGRVIEKTLYNRRTRQDEPALFVALTFERREVLDSSNIKTPMNLIGVDRGENIPAVIALTDPEGCPLSRFKDSLGNPTHILRIGESYKEKQRTIQAKKEVEQRRAGGYSRKYASKAKNLADDMVRNTARDLLYYAVTQDAMLIFENLSRGFGRQGKRTFMAERQYTRMEDWLTAKLAYEGLPSKTYLSKTLAQYTSKTCSNCGFTITSADYDRVLEKLKKTATGWMTTINGKELKVEGQITYYNRYKRQNVVKDLSVELDRLSEESVNNDISSWTKGRSGEALSLLKKRFSHRPVQEKFVCLNCGFETHADEQAALNIARSWLFLRSQEYKKYQTNKTTGKNTDKRAFVETWQSFYRKKLKEVWKPAV

SEQ ID NO: 37886 - protein, 980 aa, synthetic construct
  REGION 1..980: note = engineered CasX variant
QEIKRINKIRRRLVKDSNTKKAGKTGPMKTLLVRVMTPDLRERLENLRKKPENIPQPISNTSRANLNKLLTDYTEMKKAILHVYWEEFQKDPVGLMSRVAQPASKKIDQNKLKPEMDEKGNLTTAGFACSQCGQPLFVYKLEQVSEKGKAYTNYFGRCNVAEHEKLILLAQLKPEKDSDEAVTYSLGKFGQRALDFYSIHVTKESTHPVKPLAQIAGNRYASVPVGKALSDACMGTIASFLSKYQDIIIEHQKVVKGNQKRLESLRELAGKENLEYPSVTLPPQPHTKEGVDAYNEVIARVRMWVNLNLWQKLKLSRDDAKPLLRLKGFPSFPLVERQANEVDWWDMVCNVKKLINEKKEDGKVFWQNLAGYKRQEALRPYLSSEEDRKKGKKFARYQLGDLLLHLEKKHGEDWGKVYDEAWERIDKKVEGLSKHIKLEEERRSEDAQSKAALTDWLRAKASFVIEGLKEADKDEFCRCELKLQKWYGDLRGKPFAIEAENSILDISGFSKQYNCAFIWQKDGVKKLNLYLIINYFKGGKLRFKKIKPEAFEANRFYTVINKKSGEIVPMEVNFNFDDPNLIILPLAFGKRQGREFIWNDLLSLETGSLKLANGRVIEKTLYNRRTRQDEPALFVALTFERREVLDSSNIKTPMNLIGVDRGENIPAVIALTDPEGCPLSRFKDSLGNPTHILRIGESYKEKQRTIQAKKEVEQRRAGGYSRKYASKAKNLADDMVRNTARDLLYYAVTQDAMLIFENLSRGFGRQGKRTFMAERQYTRMEDWLTAKLAYEGLPSKTYLSKTLAQYTSKTCSNCGFTITSADYDRVLEKLKKTATGWMTTINGKELKVEGQITYYNRYKRQNVVKDLSVELDRLSEESVNNDISSWTKGRSGEALSLLKKRFSHRPVQEKFVCLNCGFETHADEQAALNIARSWLFLRSQEYKKYQTNKTTGKNTDKRAFVETWQSFYRKKLKEVWKPAV

SEQ ID NO: 37887 - protein, 980 aa, synthetic construct
  REGION 1..980: note = engineered CasX variant
QEIKRINKIRRRLVKDSNTKKAGKTGPMKTLLVRVMTPDLRERLENLRKKPENIPQPISNTSRANLNKLLTDYTEMKKAILHVYWEEFQKDPVGLMSRVAQPASKKIDQNKLKPEMDEKGNLTTAGFACSQCGQPLFVYKLEQVSEKGKAYTNYFGRCNVAEHEKLIKLAQLKPEKDSDEAVTYSLGKFGQRALDFYSIHVTKESTHPVKPLAQIAGNRYASGPVGKALSDACMGTIASFLSKYQDIIIEHQKVVKGNQKRLESLRELAGKENLEYPSVTLPPQPHTKEGVDAYNEVIARVRMWVNLNLWQKLKLSRDDAKPLLRLKGFPSFPLVERQANEVDWWDMVCNVKKLINEKKEDGKVFWQNLAGYKRQEALRPYLSSEEDRKKGKKFARYQLGDLLLHLEKKHGEDWGKVYDEAWERIDKKVEGLSKHIKLEEERRSEDAQSKAALTDWLRAKASFVIEGLKEADKDEFCRCELKLQKWYGDLRGKPFAIEAENSILDISGFSKQYNCAFIWQKDGVKKLNLYLIINYFKGGKLRFKKIKPEAFEANRFYTVINKKSGEIVPMEVNFNFDDPNLIILPLAFGKRQGREFIWNDLLSLETGSLKLANGRVIEKTLYNRRTRQDEPALFVALTFERREVLDSSNIKTPMNLIGVDRGENIPAVIALTDPEGCPLSRFKDSLGNPTHILRIGESYKEKQRTIQAKKEVEQRRAGGYSRKYASKAKNLADDMVRNTARDLLYYAVTQDAMLIFENLSRGFGRQGKRTFMAERQYTRMEDWLTAKLAYEGLPSKTYLSKTLAQYTSKTCSNCGFTITSADYDRVLEKLKKTATGWMTTINGKELKVEGQITYYNRYKRQNVVKDLSVELDRLSEESVNNDISSWTKGRSGEALSLLKKRFSHRPVQEKFVCLNCGFETHADEQAALNIARSWLFLRSQEYKKYQTNKTTGKNTDKRAFVETWQSFYRKKLKEVWKPAV

SEQ ID NO: 37888 - protein, 979 aa, synthetic construct
  REGION 1..979: note = engineered CasX variant
QEIKRINKIRRRLVKDSNTKKAGKTGPMKTLLVRVMTPDLRERLENLRKKPENIPQPISNTSRANLNKLLTDYTEMKKAILHVYWEEFQKDPVGLMSRVAQPASKKIDQNKLKPEMDEKGNLTTAGFACSQCGQPLFVYKLEQVSEKGKAYTNYFGRCNVAEHEKLILLAQLKPEKDSDEAVTYSLGKFGQRALDFYSIHVTKESTHPVKPLAQIAGNRYASPVGKALSDACMGTIASFLSKYQDIIIEHQKVVKGNQKRLESLRELAGKENLEYPSVTLPPQPHTKEGVDAYNEVIARVRMWVNLNLWQKLKLSRDDAKPLLRLKGFPSFPLVERQANEVDWWDMVCNVKKLINEKKEDGKVFWQNLAGYKRQEALRPYLSSEEDRKKGKKFARYQLGDLLLHLEKKHGEDWGKVYDEAWERIDKKVEGLSKHIKLEEERRSEDAQSKAALTDWLRAKASFVIEGLKEADKDEFCRCELKLQKWYGDLRGKPFAIEAENSILDISGFSKQYNCAFIWQKDGVKKLNLYLIINYFKGGKLRFKKIKPEAFEANRFYTVINKKSGEIVPMEVNFNFDDPNLIILPLAFGKRQGREFIWNDLLSLETGSLKLANGRVIEKTLYNRRTRQDEPALFVALTFERREVLDSSNIKTPMNLIGVDRGENIPAVIALTDPEGCPLSRFKDSLGNPTHILRIGESYKEKQRTIQAKKEVEQRRAGGYSRKYASKAKNLADDMVRNTARDLLYYAVTQDAMLIFENLSRGFGRQGKRTFMAERQYTRMEDWLTAKLAYEGLPSKTYLSKTLAQYTSKTCSNCGFTITSADYDRVLEKLKKTATGWMTTINGKELKVEGQITYYNRYKRQNVVKDLSVELDRLSEESVNNDISSWTKGRSGEALSLLKKRFSHRPVQEKFVCLNCGFETHADEQAALNIARSWLFLRSQEYKKYQTNKTTGKNTDKRAFVETWQSFYRKKLKEVWKPAV

SEQ ID NO: 37889 - protein, 979 aa, synthetic construct
  REGION 1..979: note = engineered CasX variant
QEIKRINKIRRRLVKDSNTKKAGKTGPMKTLLVRVMTPDLRERLENLRKKPENIPQPISNTSRANLNKLLTDYTEMKKAILHVYWEEFQKDPVGLMSRVAQPASKKIDQNKLKPEMDEKGNLTTAGFACSQCGQPLFVYKLEQVSEKGKAYTNYFGRCNVAEHEKLILLAQLKPEKDSDEAVTYSLGKFGQRALDFYSIHVTKESTHPVKPLAQIAGNRYASYPVGKALSDACMGTIASFLSKYQDIIIEHQKVVKGNQKRLESLRELAGKENLEYPSVTLPPQPHTKEGVDAYNEVIARVRMWVNLNLWQKLKLSRDDAKPLLRLKKFPSFPLVERQANEVDWWDMVCNVKKLINEKKEDGKVFWQNLAGYKRQEALRPYLSSEEDRKKGKKFARYQLGDLLLHLEKKHGEDWGKVYDEAWERIDKKVEGLSKHIKLEEERRSEDAQSKAALTDWLRAKASFVIEGLKEADKDEFCRCELKLQKWYGDLRGKPFAIEAENSILDISGFSKQYNCAFIWQKDGVKKLNLYLIINYFKGGKLRFKKIKPEAFEANRFYTVINKKSGEIVPMEVNFNFDDPNLIILPLAFGKRQGREFIWNDLLSLETGSLKLANGRVIEKTLYNRRTRQDEPALFVALTFERREVLDSSNIKTPMNLIGVDRGENIPAVIALTDPEGCPLSRFKDSLGNPTHILRIGESYKEKQRTIQAKKEVEQRRAGGYSRKYASKAKNLADDMVRNTARDLLYYAVTQDAMLIFENLSRGFGRQGKRTFMAERQYTRMEDWLTAKLAYEGLPSKTYLSKTLAQYTSKTCSNCGFTITSADYDRVLEKLKKTATGWMTTINGKELKVEGQITYYNRYKRQNVVKDLSVELDRLSEESVNNDISSWTKGRSGEALSLLKKRFSHRPVQEKFVCLNCGFETHADEQAALNIARSWLFLRSQEYKKYQTNKTTGNTDKRAFVETWQSFYRKKLKEVWKPAV

SEQ ID NO: 37890 - protein, 979 aa, synthetic construct
  REGION 1..979: note = engineered CasX variant
QEIKRINKIRRRLVKDSNTKKAGKTGPMKTLLVRVMTPDLRERLENLRKKPENIPQPISNTSRANLNKLLTDYTEMKKAILHVYWEEFQKDPVGLMSRVAQPASKKIDQNKLKPEMDEKGNLTTAGFACSQCGQPLFVYKLEQVSEKGKAYTNYFGRCNVAEHEKLILLAQLKPEKDSDEAVTYSLGKFGQRALDFYSIHVTKESTHPVKPLAQIAGNRYASHPVGKALSDACMGTIASFLSKYQDIIIEHQKVVKGNQKRLESLRELAGKENLEYPSVTLPPQPHTKEGVDAYNEVIARVRMWVNLNLWQKLKLSRDDAKPLLRLKKFPSFPLVERQANEVDWWDMVCNVKKLINEKKEDGKVFWQNLAGYKRQEALRPYLSSEEDRKKGKKFARYQLGDLLLHLEKKHGEDWGKVYDEAWERIDKKVEGLSKHIKLEEERRSEDAQSKAALTDWLRAKASFVIEGLKEADKDEFCRCELKLQKWYGDLRGKPFAIEAENSILDISGFSKQYNCAFIWQKDGVKKLNLYLIINYFKGGKLRFKKIKPEAFEANRFYTVINKKSGEIVPMEVNFNFDDPNLIILPLAFGKRQGREFIWNDLLSLETGSLKLANGRVIEKTLYNRRTRQDEPALFVALTFERREVLDSSNIKTPMNLIGVDRGENIPAVIALTDPEGCPLSRFKDSLGNPTHILRIGESYKEKQRTIQAKKEVEQRRAGGYSRKYASKAKNLADDMVRNTARDLLYYAVTQDAMLIFENLSRGFGRQGKRTFMAERQYTRMEDWLTAKLAYEGLPSKTYLSKTLAQYTSKTCSNCGFTITSADYDRVLEKLKKTATGWMTTINGKELKVEGQITYYNRYKRQNVVKDLSVELDRLSEESVNNDISSWTKGRSGEALSLLKKRFSHRPVQEKFVCLNCGFETHADEQAALNIARSWLFLRSQEYKKYQTNKTTGNTDKRAFVETWQSFYRKKLKEVWKPAV

SEQ ID NO: 37891 - protein, 979 aa, synthetic construct
  REGION 1..979: note = engineered CasX variant
QEIKRINKIRRRLVKDSNTKKAGKTGPMKTLLVRVMTPDLRERLENLRKKPENIPQPISNTSRANLNKLLTDYTEMKKAILHVYWEEFQKDPVGLMSRVAQPASKKIDQNKLKPEMDEKGNLTTAGFACSQCGQPLFVYKLEQVSEKGKAYTNYFGRCNVAEHEKLILLAQLKPEKDSDEAVTYSLGKFGQRALDFYSIHVTKESTHPVKPLAQIAGNRYASSPVGKALSDACMGTIASFLSKYQDIIIEHQKVVKGNQKRLESLRELAGKENLEYPSVTLPPQPHTKEGVDAYNEVIARVRMWVNLNLWQKLKLSRDDAKPLLRLKKFPSFPLVERQANEVDWWDMVCNVKKLINEKKEDGKVFWQNLAGYKRQEALRPYLSSEEDRKKGKKFARYQLGDLLLHLEKKHGEDWGKVYDEAWERIDKKVEGLSKHIKLEEERRSEDAQSKAALTDWLRAKASFVIEGLKEADKDEFCRCELKLQKWYGDLRGKPFAIEAENSILDISGFSKQYNCAFIWQKDGVKKLNLYLIINYFKGGKLRFKKIKPEAFEANRFYTVINKKSGEIVPMEVNFNFDDPNLIILPLAFGKRQGREFIWNDLLSLETGSLKLANGRVIEKTLYNRRTRQDEPALFVALTFERREVLDSSNIKTPMNLIGVDRGENIPAVIALTDPEGCPLSRFKDSLGNPTHILRIGESYKEKQRTIQAKKEVEQRRAGGYSRKYASKAKNLADDMVRNTARDLLYYAVTQDAMLIFENLSRGFGRQGKRTFMAERQYTRMEDWLTAKLAYEGLPSKTYLSKTLAQYTSKTCSNCGFTITSADYDRVLEKLKKTATGWMTTINGKELKVEGQITYYNRYKRQNVVKDLSVELDRLSEESVNNDISSWTKGRSGEALSLLKKRFSHRPVQEKFVCLNCGFETHADEQAALNIARSWLFLRSQEYKKYQTNKTTGNTDKRAFVETWQSFYRKKLKEVWKPAV

SEQ ID NO: 37892 - protein, 979 aa, synthetic construct
  REGION 1..979: note = engineered CasX variant
QEIKRINKIRRRLVKDSNTKKAGKTGPMKTLLVRVMTPDLRERLENLRKKPENIPQPISNTSRANLNKLLTDYTEMKKAILHVYWEEFQKDPVGLMSRVAQPASKKIDQNKLKPEMDEKGNLTTAGFACSQCGQPLFVYKLEQVSEKGKAYTNYFGRCNVAEHEKLILLAQLKPEKDSDEAVTYSLGKFGQRALDFYSIHVTKESTHPVKPLAQIAGNRYASTPVGKALSDACMGTIASFLSKYQDIIIEHQKVVKGNQKRLESLRELAGKENLEYPSVTLPPQPHTKEGVDAYNEVIARVRMWVNLNLWQKLKLSRDDAKPLLRLKKFPSFPLVERQANEVDWWDMVCNVKKLINEKKEDGKVFWQNLAGYKRQEALRPYLSSEEDRKKGKKFARYQLGDLLLHLEKKHGEDWGKVYDEAWERIDKKVEGLSKHIKLEEERRSEDAQSKAALTDWLRAKASFVIEGLKEADKDEFCRCELKLQKWYGDLRGKPFAIEAENSILDISGFSKQYNCAFIWQKDGVKKLNLYLIINYFKGGKLRFKKIKPEAFEANRFYTVINKKSGEIVPMEVNFNFDDPNLIILPLAFGKRQGREFIWNDLLSLETGSLKLANGRVIEKTLYNRRTRQDEPALFVALTFERREVLDSSNIKTPMNLIGVDRGENIPAVIALTDPEGCPLSRFKDSLGNPTHILRIGESYKEKQRTIQAKKEVEQRRAGGYSRKYASKAKNLADDMVRNTARDLLYYAVTQDAMLIFENLSRGFGRQGKRTFMAERQYTRMEDWLTAKLAYEGLPSKTYLSKTLAQYTSKTCSNCGFTITSADYDRVLEKLKKTATGWMTTINGKELKVEGQITYYNRYKRQNVVKDLSVELDRLSEESVNNDISSWTKGRSGEALSLLKKRFSHRPVQEKFVCLNCGFETHADEQAALNIARSWLFLRSQEYKKYQTNKTTGNTDKRAFVETWQSFYRKKLKEVWKPAV

SEQ ID NO: 37893 - protein, 979 aa, synthetic construct
  REGION 1..979: note = engineered CasX variant
QEIKRINKIRRRLVKDSNTKKAGKTGPMKTLLVRVMTPDLRERLENLRKKPENIPQPISNTSRANLNKLLTDYTEMKKAILHVYWEEFQKDPVGLMSRVAQPASKKIDQNKLKPEMDEKGNLTTAGFACSQCGQPLFVYKLEQVSEKGKAYTNYFGRCNVAEHEKLILLAQLKPEKDSDEAVTYSLGKFGQRALDFYSIHVTKESTHPVKPLAQIAGNRYASAPVGKALSDACMGTIASFLSKYQDIIIEHQKVVKGNQKRLESLRELAGKENLEYPSVTLPPQPHTKEGVDAYNEVIARVRMWVNLNLWQKLKLSRDDAKPLLRLKKFPSFPLVERQANEVDWWDMVCNVKKLINEKKEDGKVFWQNLAGYKRQEALRPYLSSEEDRKKGKKFARYQLGDLLLHLEKKHGEDWGKVYDEAWERIDKKVEGLSKHIKLEEERRSEDAQSKAALTDWLRAKASFVIEGLKEADKDEFCRCELKLQKWYGDLRGKPFAIEAENSILDISGFSKQYNCAFIWQKDGVKKLNLYLIINYFKGGKLRFKKIKPEAFEANRFYTVINKKSGEIVPMEVNFNFDDPNLIILPLAFGKRQGREFIWNDLLSLETGSLKLANGRVIEKTLYNRRTRQDEPALFVALTFERREVLDSSNIKTPMNLIGVDRGENIPAVIALTDPEGCPLSRFKDSLGNPTHILRIGESYKEKQRTIQAKKEVEQRRAGGYSRKYASKAKNLADDMVRNTARDLLYYAVTQDAMLIFENLSRGFGRQGKRTFMAERQYTRMEDWLTAKLAYEGLPSKTYLSKTLAQYTSKTCSNCGFTITSADYDRVLEKLKKTATGWMTTINGKELKVEGQITYYNRYKRQNVVKDLSVELDRLSEESVNNDISSWTKGRSGEALSLLKKRFSHRPVQEKFVCLNCGFETHADEQAALNIARSWLFLRSQEYKKYQTNKTTGNTDKRAFVETWQSFYRKKLKEVWKPAV

SEQ ID NO: 37894 - protein, 979 aa, synthetic construct
  REGION 1..979: note = engineered CasX variant
QEIKRINKIRRRLVKDSNTKKAGKTGPMKTLLVRVMTPDLRERLENLRKKPENIPQPISNTSRANLNKLLTDYTEMKKAILHVYWEEFQKDPVGLMSRVAQPASKKIDQNKLKPEMDEKGNLTTAGFACSQCGQPLFVYKLEQVSEKGKAYTNYFGRCNVAEHEKLILLAQLKPEKDSDEAVTYSLGKFGQRALDFYSIHVTKESTHPVKPLAQIAGNRYASVPVGKALSDACMGTIASFLSKYQDIIIEHQKVVKGNQKRLESLRELAGKENLEYPSVTLPPQPHTKEGVDAYNEVIARVRMWVNLNLWQKLKLSRDDAKPLLRLKKFPSFPLVERQANEVDWWDMVCNVKKLINEKKEDGKVFWQNLAGYKRQEALRPYLSSEEDRKKGKKFARYQLGDLLLHLEKKHGEDWGKVYDEAWERIDKKVEGLSKHIKLEEERRSEDAQSKAALTDWLRAKASFVIEGLKEADKDEFCRCELKLQKWYGDLRGKPFAIEAENSILDISGFSKQYNCAFIWQKDGVKKLNLYLIINYFKGGKLRFKKIKPEAFEANRFYTVINKKSGEIVPMEVNFNFDDPNLIILPLAFGKRQGREFIWNDLLSLETGSLKLANGRVIEKTLYNRRTRQDEPALFVALTFERREVLDSSNIKTPMNLIGVDRGENIPAVIALTDPEGCPLSRFKDSLGNPTHILRIGESYKEKQRTIQAKKEVEQRRAGGYSRKYASKAKNLADDMVRNTARDLLYYAVTQDAMLIFENLSRGFGRQGKRTFMAERQYTRMEDWLTAKLAYEGLPSKTYLSKTLAQYTSKTCSNCGFTITSADYDRVLEKLKKTATGWMTTINGKELKVEGQITYYNRYKRQNVVKDLSVELDRLSEESVNNDISSWTKGRSGEALSLLKKRFSHRPVQEKFVCLNCGFETHADEQAALNIARSWLFLRSQEYKKYQTNKTTGNTDKRAFVETWQSFYRKKLKEVWKPAV

SEQ ID NO: 37895 - protein, 979 aa, synthetic construct
  REGION 1..979: note = engineered CasX variant
QEIKRINKIRRRLVKDSNTKKAGKTGPMKTLLVRVMTPDLRERLENLRKKPENIPQPISNTSRANLNKLLTDYTEMKKAILHVYWEEFQKDPVGLMSRVAQPASKKIDQNKLKPEMDEKGNLTTAGFACSQCGQPLFVYKLEQVSEKGKAYTNYFGRCNVAEHEKLIKLAQLKPEKDSDEAVTYSLGKFGQRALDFYSIHVTKESTHPVKPLAQIAGNRYASGPVGKALSDACMGTIASFLSKYQDIIIEHQKVVKGNQKRLESLRELAGKENLEYPSVTLPPQPHTKEGVDAYNEVIARVRMWVNLNLWQKLKLSRDDAKPLLRLKKFPSFPLVERQANEVDWWDMVCNVKKLINEKKEDGKVFWQNLAGYKRQEALRPYLSSEEDRKKGKKFARYQLGDLLLHLEKKHGEDWGKVYDEAWERIDKKVEGLSKHIKLEEERRSEDAQSKAALTDWLRAKASFVIEGLKEADKDEFCRCELKLQKWYGDLRGKPFAIEAENSILDISGFSKQYNCAFIWQKDGVKKLNLYLIINYFKGGKLRFKKIKPEAFEANRFYTVINKKSGEIVPMEVNFNFDDPNLIILPLAFGKRQGREFIWNDLLSLETGSLKLANGRVIEKTLYNRRTRQDEPALFVALTFERREVLDSSNIKTPMNLIGVDRGENIPAVIALTDPEGCPLSRFKDSLGNPTHILRIGESYKEKQRTIQAKKEVEQRRAGGYSRKYASKAKNLADDMVRNTARDLLYYAVTQDAMLIFENLSRGFGRQGKRTFMAERQYTRMEDWLTAKLAYEGLPSKTYLSKTLAQYTSKTCSNCGFTITSADYDRVLEKLKKTATGWMTTINGKELKVEGQITYYNRYKRQNVVKDLSVELDRLSEESVNNDISSWTKGRSGEALSLLKKRFSHRPVQEKFVCLNCGFETHADEQAALNIARSWLFLRSQEYKKYQTNKTTGNTDKRAFVETWQSFYRKKLKEVWKPAV

SEQ ID NO: 37896 - protein, 978 aa, synthetic construct
  REGION 1..978: note = engineered CasX variant
QEIKRINKIRRRLVKDSNTKKAGKTGPMKTLLVRVMTPDLRERLENLRKKPENIPQPISNTSRANLNKLLTDYTEMKKAILHVYWEEFQKDPVGLMSRVAQPASKKIDQNKLKPEMDEKGNLTTAGFACSQCGQPLFVYKLEQVSEKGKAYTNYFGRCNVAEHEKLILLAQLKPEKDSDEAVTYSLGKFGQRALDFYSIHVTKESTHPVKPLAQIAGNRYASPVGKALSDACMGTIASFLSKYQDIIIEHQKVVKGNQKRLESLRELAGKENLEYPSVTLPPQPHTKEGVDAYNEVIARVRMWVNLNLWQKLKLSRDDAKPLLRLKKFPSFPLVERQANEVDWWDMVCNVKKLINEKKEDGKVFWQNLAGYKRQEALRPYLSSEEDRKKGKKFARYQLGDLLLHLEKKHGEDWGKVYDEAWERIDKKVEGLSKHIKLEEERRSEDAQSKAALTDWLRAKASFVIEGLKEADKDEFCRCELKLQKWYGDLRGKPFAIEAENSILDISGFSKQYNCAFIWQKDGVKKLNLYLIINYFKGGKLRFKKIKPEAFEANRFYTVINKKSGEIVPMEVNFNFDDPNLIILPLAFGKRQGREFIWNDLLSLETGSLKLANGRVIEKTLYNRRTRQDEPALFVALTFERREVLDSSNIKTPMNLIGVDRGENIPAVIALTDPEGCPLSRFKDSLGNPTHILRIGESYKEKQRTIQAKKEVEQRRAGGYSRKYASKAKNLADDMVRNTARDLLYYAVTQDAMLIFENLSRGFGRQGKRTFMAERQYTRMEDWLTAKLAYEGLPSKTYLSKTLAQYTSKTCSNCGFTITSADYDRVLEKLKKTATGWMTTINGKELKVEGQITYYNRYKRQNVVKDLSVELDRLSEESVNNDISSWTKGRSGEALSLLKKRFSHRPVQEKFVCLNCGFETHADEQAALNIARSWLFLRSQEYKKYQTNKTTGNTDKRAFVETWQSFYRKKLKEVWKPAV

SEQ ID NO: 37897 - protein, 979 aa, synthetic construct
  REGION 1..979: note = engineered CasX variant
QEIKRINKIRRRLVKDSNTKKAGKTGPMKTLLVRVMTPDLRERLENLRKKPENIPQPISNTSRANLNKLLTDYTEMKKAILHVYWEEFQKDPVGLMSRVAQPASKKIDQNKLKPEMDEKGNLTTAGFACSQCGQPLFVYKLEQVSEKGKAYTNYFGRCNVAEHEKLILLAQLKPEKDSDEAVTYSLGKFGQRALDFYSIHVTKESTHPVKPLAQIAGNRYASYPVGKALSDACMGTIASFLSKYQDIIIEHQKVVKGNQKRLESLRELAGKENLEYPSVTLPPQPHTKEGVDAYNEVIARVRMWVNLNLWQKLKLSRDDAKPLLRLKGFPSFPLVERQANEVDWWDMVCNVKKLINEKKEDGKVFWQNLAGYKRQEALRPYLSSEEDRKKGKKFARYQLGDLLLHLEKKHGEDWGKVYDEAWERIDKKVEGLSKHIKLEEERRSEDAQSKAALTDWLRAKASFVIEGLKEADKDEFCRCELKLQKWYGDLRGKPFAIEAENSILDISGFSKQYNCAFIWQKDGVKKLNLYLIINYFKGGKLRFKKIKPEAFEANRFYTVINKKSGEIVPMEVNFNFDDPNLIILPLAFGKRQGREFIWNDLLSLETGSLKLANGRVIEKTLYNRRTRQDEPALFVALTFERREVLDSSNIKTPMNLIGVDRGENIPAVIALTDPEGCPLSRFKDSLGNPTHILRIGERYKEKQRTIQAKKEVEQRRAGGYSRKYASKAKNLADDMVRNTARDLLYYAVTQDAMLIFENLSRGFGRQGKRTFMAERQYTRMEDWLTAKLAYEGLPSKTYLSKTLAQYTSKTCSNCGFTITSADYDRVLEKLKKTATGWMTTINGKELKVEGQITYYNRYKRQNVVKDLSVELDRLSEESVNNDISSWTKGRSGEALSLLKKRFSHRPVQEKFVCLNCGFETHADEQAALNIARSWLFLRSQEYKKYQTNKTTGNTDKRAFVETWQSFYRKKLKEVWKPAV

SEQ ID NO: 37898 - protein, 979 aa, synthetic construct
  REGION 1..979: note = engineered CasX variant
QEIKRINKIRRRLVKDSNTKKAGKTGPMKTLLVRVMTPDLRERLENLRKKPENIPQPISNTSRANLNKLLTDYTEMKKAILHVYWEEFQKDPVGLMSRVAQPASKKIDQNKLKPEMDEKGNLTTAGFACSQCGQPLFVYKLEQVSEKGKAYTNYFGRCNVAEHEKLILLAQLKPEKDSDEAVTYSLGKFGQRALDFYSIHVTKESTHPVKPLAQIAGNRYASHPVGKALSDACMGTIASFLSKYQDIIIEHQKVVKGNQKRLESLRELAGKENLEYPSVTLPPQPHTKEGVDAYNEVIARVRMWVNLNLWQKLKLSRDDAKPLLRLKGFPSFPLVERQANEVDWWDMVCNVKKLINEKKEDGKVFWQNLAGYKRQEALRPYLSSEEDRKKGKKFARYQLGDLLLHLEKKHGEDWGKVYDEAWERIDKKVEGLSKHIKLEEERRSEDAQSKAALTDWLRAKASFVIEGLKEADKDEFCRCELKLQKWYGDLRGKPFAIEAENSILDISGFSKQYNCAFIWQKDGVKKLNLYLIINYFKGGKLRFKKIKPEAFEANRFYTVINKKSGEIVPMEVNFNFDDPNLIILPLAFGKRQGREFIWNDLLSLETGSLKLANGRVIEKTLYNRRTRQDEPALFVALTFERREVLDSSNIKTPMNLIGVDRGENIPAVIALTDPEGCPLSRFKDSLGNPTHILRIGERYKEKQRTIQAKKEVEQRRAGGYSRKYASKAKNLADDMVRNTARDLLYYAVTQDAMLIFENLSRGFGRQGKRTFMAERQYTRMEDWLTAKLAYEGLPSKTYLSKTLAQYTSKTCSNCGFTITSADYDRVLEKLKKTATGWMTTINGKELKVEGQITYYNRYKRQNVVKDLSVELDRLSEESVNNDISSWTKGRSGEALSLLKKRFSHRPVQEKFVCLNCGFETHADEQAALNIARSWLFLRSQEYKKYQTNKTTGNTDKRAFVETWQSFYRKKLKEVWKPAV

SEQ ID NO: 37899 - protein, 979 aa, synthetic construct
  REGION 1..979: note = engineered CasX variant
QEIKRINKIRRRLVKDSNTKKAGKTGPMKTLLVRVMTPDLRERLENLRKKPENIPQPISNTSRANLNKLLTDYTEMKKAILHVYWEEFQKDPVGLMSRVAQPASKKIDQNKLKPEMDEKGNLTTAGFACSQCGQPLFVYKLEQVSEKGKAYTNYFGRCNVAEHEKLILLAQLKPEKDSDEAVTYSLGKFGQRALDFYSIHVTKESTHPVKPLAQIAGNRYASSPVGKALSDACMGTIASFLSKYQDIIIEHQKVVKGNQKRLESLRELAGKENLEYPSVTLPPQPHTKEGVDAYNEVIARVRMWVNLNLWQKLKLSRDDAKPLLRLKGFPSFPLVERQANEVDWWDMVCNVKKLINEKKEDGKVFWQNLAGYKRQEALRPYLSSEEDRKKGKKFARYQLGDLLLHLEKKHGEDWGKVYDEAWERIDKKVEGLSKHIKLEEERRSEDAQSKAALTDWLRAKASFVIEGLKEADKDEFCRCELKLQKWYGDLRGKPFAIEAENSILDISGFSKQYNCAFIWQKDGVKKLNLYLIINYFKGGKLRFKKIKPEAFEANRFYTVINKKSGEIVPMEVNFNFDDPNLIILPLAFGKRQGREFIWNDLLSLETGSLKLANGRVIEKTLYNRRTRQDEPALFVALTFERREVLDSSNIKTPMNLIGVDRGENIPAVIALTDPEGCPLSRFKDSLGNPTHILRIGERYKEKQRTIQAKKEVEQRRAGGYSRKYASKAKNLADDMVRNTARDLLYYAVTQDAMLIFENLSRGFGRQGKRTFMAERQYTRMEDWLTAKLAYEGLPSKTYLSKTLAQYTSKTCSNCGFTITSADYDRVLEKLKKTATGWMTTINGKELKVEGQITYYNRYKRQNVVKDLSVELDRLSEESVNNDISSWTKGRSGEALSLLKKRFSHRPVQEKFVCLNCGFETHADEQAALNIARSWLFLRSQEYKKYQTNKTTGNTDKRAFVETWQSFYRKKLKEVWKPAV

SEQ ID NO: 37900 - protein, 979 aa, synthetic construct
  REGION 1..979: note = engineered CasX variant
QEIKRINKIRRRLVKDSNTKKAGKTGPMKTLLVRVMTPDLRERLENLRKKPENIPQPISNTSRANLNKLLTDYTEMKKAILHVYWEEFQKDPVGLMSRVAQPASKKIDQNKLKPEMDEKGNLTTAGFACSQCGQPLFVYKLEQVSEKGKAYTNYFGRCNVAEHEKLILLAQLKPEKDSDEAVTYSLGKFGQRALDFYSIHVTKESTHPVKPLAQIAGNRYASTPVGKALSDACMGTIASFLSKYQDIIIEHQKVVKGNQKRLESLRELAGKENLEYPSVTLPPQPHTKEGVDAYNEVIARVRMWVNLNLWQKLKLSRDDAKPLLRLKGFPSFPLVERQANEVDWWDMVCNVKKLINEKKEDGKVFWQNLAGYKRQEALRPYLSSEEDRKKGKKFARYQLGDLLLHLEKKHGEDWGKVYDEAWERIDKKVEGLSKHIKLEEERRSEDAQSKAALTDWLRAKASFVIEGLKEADKDEFCRCELKLQKWYGDLRGKPFAIEAENSILDISGFSKQYNCAFIWQKDGVKKLNLYLIINYFKGGKLRFKKIKPEAFEANRFYTVINKKSGEIVPMEVNFNFDDPNLIILPLAFGKRQGREFIWNDLLSLETGSLKLANGRVIEKTLYNRRTRQDEPALFVALTFERREVLDSSNIKTPMNLIGVDRGENIPAVIALTDPEGCPLSRFKDSLGNPTHILRIGERYKEKQRTIQAKKEVEQRRAGGYSRKYASKAKNLADDMVRNTARDLLYYAVTQDAMLIFENLSRGFGRQGKRTFMAERQYTRMEDWLTAKLAYEGLPSKTYLSKTLAQYTSKTCSNCGFTITSADYDRVLEKLKKTATGWMTTINGKELKVEGQITYYNRYKRQNVVKDLSVELDRLSEESVNNDISSWTKGRSGEALSLLKKRFSHRPVQEKFVCLNCGFETHADEQAALNIARSWLFLRSQEYKKYQTNKTTGNTDKRAFVETWQSFYRKKLKEVWKPAV

SEQ ID NO: 37901 - protein, 979 aa, synthetic construct
  REGION 1..979: note = engineered CasX variant
QEIKRINKIRRRLVKDSNTKKAGKTGPMKTLLVRVMTPDLRERLENLRKKPENIPQPISNTSRANLNKLLTDYTEMKKAILHVYWEEFQKDPVGLMSRVAQPASKKIDQNKLKPEMDEKGNLTTAGFACSQCGQPLFVYKLEQVSEKGKAYTNYFGRCNVAEHEKLILLAQLKPEKDSDEAVTYSLGKFGQRALDFYSIHVTKESTHPVKPLAQIAGNRYASAPVGKALSDACMGTIASFLSKYQDIIIEHQKVVKGNQKRLESLRELAGKENLEYPSVTLPPQPHTKEGVDAYNEVIARVRMWVNLNLWQKLKLSRDDAKPLLRLKGFPSFPLVERQANEVDWWDMVCNVKKLINEKKEDGKVFWQNLAGYKRQEALRPYLSSEEDRKKGKKFARYQLGDLLLHLEKKHGEDWGKVYDEAWERIDKKVEGLSKHIKLEEERRSEDAQSKAALTDWLRAKASFVIEGLKEADKDEFCRCELKLQKWYGDLRGKPFAIEAENSILDISGFSKQYNCAFIWQKDGVKKLNLYLIINYFKGGKLRFKKIKPEAFEANRFYTVINKKSGEIVPMEVNFNFDDPNLIILPLAFGKRQGREFIWNDLLSLETGSLKLANGRVIEKTLYNRRTRQDEPALFVALTFERREVLDSSNIKTPMNLIGVDRGENIPAVIALTDPEGCPLSRFKDSLGNPTHILRIGERYKEKQRTIQAKKEVEQRRAGGYSRKYASKAKNLADDMVRNTARDLLYYAVTQDAMLIFENLSRGFGRQGKRTFMAERQYTRMEDWLTAKLAYEGLPSKTYLSKTLAQYTSKTCSNCGFTITSADYDRVLEKLKKTATGWMTTINGKELKVEGQITYYNRYKRQNVVKDLSVELDRLSEESVNNDISSWTKGRSGEALSLLKKRFSHRPVQEKFVCLNCGFETHADEQAALNIARSWLFLRSQEYKKYQTNKTTGNTDKRAFVETWQSFYRKKLKEVWKPAV

SEQ ID NO: 37902 - protein, 979 aa, synthetic construct
  REGION 1..979: note = engineered CasX variant
QEIKRINKIRRRLVKDSNTKKAGKTGPMKTLLVRVMTPDLRERLENLRKKPENIPQPISNTSRANLNKLLTDYTEMKKAILHVYWEEFQKDPVGLMSRVAQPASKKIDQNKLKPEMDEKGNLTTAGFACSQCGQPLFVYKLEQVSEKGKAYTNYFGRCNVAEHEKLILLAQLKPEKDSDEAVTYSLGKFGQRALDFYSIHVTKESTHPVKPLAQIAGNRYASVPVGKALSDACMGTIASFLSKYQDIIIEHQKVVKGNQKRLESLRELAGKENLEYPSVTLPPQPHTKEGVDAYNEVIARVRMWVNLNLWQKLKLSRDDAKPLLRLKGFPSFPLVERQANEVDWWDMVCNVKKLINEKKEDGKVFWQNLAGYKRQEALRPYLSSEEDRKKGKKFARYQLGDLLLHLEKKHGEDWGKVYDEAWERIDKKVEGLSKHIKLEEERRSEDAQSKAALTDWLRAKASFVIEGLKEADKDEFCRCELKLQKWYGDLRGKPFAIEAENSILDISGFSKQYNCAFIWQKDGVKKLNLYLIINYFKGGKLRFKKIKPEAFEANRFYTVINKKSGEIVPMEVNFNFDDPNLIILPLAFGKRQGREFIWNDLLSLETGSLKLANGRVIEKTLYNRRTRQDEPALFVALTFERREVLDSSNIKTPMNLIGVDRGENIPAVIALTDPEGCPLSRFKDSLGNPTHILRIGERYKEKQRTIQAKKEVEQRRAGGYSRKYASKAKNLADDMVRNTARDLLYYAVTQDAMLIFENLSRGFGRQGKRTFMAERQYTRMEDWLTAKLAYEGLPSKTYLSKTLAQYTSKTCSNCGFTITSADYDRVLEKLKKTATGWMTTINGKELKVEGQITYYNRYKRQNVVKDLSVELDRLSEESVNNDISSWTKGRSGEALSLLKKRFSHRPVQEKFVCLNCGFETHADEQAALNIARSWLFLRSQEYKKYQTNKTTGNTDKRAFVETWQSFYRKKLKEVWKPAV

SEQ ID NO: 37903 - protein, 979 aa, synthetic construct
  REGION 1..979: note = engineered CasX variant
QEIKRINKIRRRLVKDSNTKKAGKTGPMKTLLVRVMTPDLRERLENLRKKPENIPQPISNTSRANLNKLLTDYTEMKKAILHVYWEEFQKDPVGLMSRVAQPASKKIDQNKLKPEMDEKGNLTTAGFACSQCGQPLFVYKLEQVSEKGKAYTNYFGRCNVAEHEKLIKLAQLKPEKDSDEAVTYSLGKFGQRALDFYSIHVTKESTHPVKPLAQIAGNRYASGPVGKALSDACMGTIASFLSKYQDIIIEHQKVVKGNQKRLESLRELAGKENLEYPSVTLPPQPHTKEGVDAYNEVIARVRMWVNLNLWQKLKLSRDDAKPLLRLKGFPSFPLVERQANEVDWWDMVCNVKKLINEKKEDGKVFWQNLAGYKRQEALRPYLSSEEDRKKGKKFARYQLGDLLLHLEKKHGEDWGKVYDEAWERIDKKVEGLSKHIKLEEERRSEDAQSKAALTDWLRAKASFVIEGLKEADKDEFCRCELKLQKWYGDLRGKPFAIEAENSILDISGFSKQYNCAFIWQKDGVKKLNLYLIINYFKGGKLRFKKIKPEAFEANRFYTVINKKSGEIVPMEVNFNFDDPNLIILPLAFGKRQGREFIWNDLLSLETGSLKLANGRVIEKTLYNRRTRQDEPALFVALTFERREVLDSSNIKTPMNLIGVDRGENIPAVIALTDPEGCPLSRFKDSLGNPTHILRIGERYKEKQRTIQAKKEVEQRRAGGYSRKYASKAKNLADDMVRNTARDLLYYAVTQDAMLIFENLSRGFGRQGKRTFMAERQYTRMEDWLTAKLAYEGLPSKTYLSKTLAQYTSKTCSNCGFTITSADYDRVLEKLKKTATGWMTTINGKELKVEGQITYYNRYKRQNVVKDLSVELDRLSEESVNNDISSWTKGRSGEALSLLKKRFSHRPVQEKFVCLNCGFETHADEQAALNIARSWLFLRSQEYKKYQTNKTTGNTDKRAFVETWQSFYRKKLKEVWKPAV

SEQ ID NO: 37904 - protein, 978 aa, synthetic construct
  REGION 1..978: note = engineered CasX variant
QEIKRINKIRRRLVKDSNTKKAGKTGPMKTLLVRVMTPDLRERLENLRKKPENIPQPISNTSRANLNKLLTDYTEMKKAILHVYWEEFQKDPVGLMSRVAQPASKKIDQNKLKPEMDEKGNLTTAGFACSQCGQPLFVYKLEQVSEKGKAYTNYFGRCNVAEHEKLILLAQLKPEKDSDEAVTYSLGKFGQRALDFYSIHVTKESTHPVKPLAQIAGNRYASPVGKALSDACMGTIASFLSKYQDIIIEHQKVVKGNQKRLESLRELAGKENLEYPSVTLPPQPHTKEGVDAYNEVIARVRMWVNLNLWQKLKLSRDDAKPLLRLKGFPSFPLVERQANEVDWWDMVCNVKKLINEKKEDGKVFWQNLAGYKRQEALRPYLSSEEDRKKGKKFARYQLGDLLLHLEKKHGEDWGKVYDEAWERIDKKVEGLSKHIKLEEERRSEDAQSKAALTDWLRAKASFVIEGLKEADKDEFCRCELKLQKWYGDLRGKPFAIEAENSILDISGFSKQYNCAFIWQKDGVKKLNLYLIINYFKGGKLRFKKIKPEAFEANRFYTVINKKSGEIVPMEVNFNFDDPNLIILPLAFGKRQGREFIWNDLLSLETGSLKLANGRVIEKTLYNRRTRQDEPALFVALTFERREVLDSSNIKTPMNLIGVDRGENIPAVIALTDPEGCPLSRFKDSLGNPTHILRIGERYKEKQRTIQAKKEVEQRRAGGYSRKYASKAKNLADDMVRNTARDLLYYAVTQDAMLIFENLSRGFGRQGKRTFMAERQYTRMEDWLTAKLAYEGLPSKTYLSKTLAQYTSKTCSNCGFTITSADYDRVLEKLKKTATGWMTTINGKELKVEGQITYYNRYKRQNVVKDLSVELDRLSEESVNNDISSWTKGRSGEALSLLKKRFSHRPVQEKFVCLNCGFETHADEQAALNIARSWLFLRSQEYKKYQTNKTTGNTDKRAFVETWQSFYRKKLKEVWKPAV

SEQ ID NO: 37905 - protein, 979 aa, synthetic construct
  REGION 1..979: note = engineered CasX variant
QEIKRINKIRRRLVKDSNTKKAGKTGPMKTLLVRVMTPDLRERLENLRKKPENIPQPISNTSRANLNKLLTDYTEMKKAILHVYWEEFQKDPVGLMSRVAQPASKKIDQNKLKPEMDEKGNLTTAGFACSQCGQPLFVYKLEQVSEKGKAYTNYFGRCNVAEHEKLILLAQLKPEKDSDEAVTYSLGKFGQRALDFYSIHVTKESTHPVKPLAQIAGNRYASYPVGKALSDACMGTIASFLSKYQDIIIEHQKVVKGNQKRLESLRELAGKENLEYPSVTLPPQPHTKEGVDAYNEVIARVRMWVNLNLWQKLKLSRDDAKPLLRLKGFPSFPLVERQANEVDWWDMVCNVKKLINEKKEDGKVFWQNLAGYKRQEALRPYLSSEEDRKKGKKFARYQLGDLLLHLEKKHGEDWGKVYDEAWERIDKKVEGLSKHIKLEEERRSEDAQSKAALTDWLRAKASFVIEGLKEADKDEFCRCELKLQKWYGDLRGKPFAIEAENSILDISGFSKQYNCAFIWQKDGVKKLNLYLIINYFKGGKLRFKKIKPEAFEANRFYTVINKKSGEIVPMEVNFNFDDPNLIILPLAFGKRQGREFIWNDLLSLETGSLQLANGRVIEKTLYNRRTRQDEPALFVALTFERREVLDSSNIKTPMNLIGVDRGENIPAVIALTDPEGCPLSRFKDSLGNPTHILRIGESYKEKQRTIQAKKEVEQRRAGGYSRKYASKAKNLADDMVRNTARDLLYYAVTQDAMLIFENLSRGFGRQGKRTFMAERQYTRMEDWLTAKLAYEGLPSKTYLSKTLAQYTSKTCSNCGFTITSADYDRVLEKLKKTATGWMTTINGKELKVEGQITYYNRYKRQNVVKDLSVELDRLSEESVNNDISSWTKGRSGEALSLLKKRFSHRPVQEKFVCLNCGFETHADEQAALNIARSWLFLRSQEYKKYQTNKTTGNTDKRAFVETWQSFYRKKLKEVWKPAV

SEQ ID NO: 37906 - protein, 979 aa, synthetic construct
  REGION 1..979: note = engineered CasX variant
QEIKRINKIRRRLVKDSNTKKAGKTGPMKTLLVRVMTPDLRERLENLRKKPENIPQPISNTSRANLNKLLTDYTEMKKAILHVYWEEFQKDPVGLMSRVAQPASKKIDQNKLKPEMDEKGNLTTAGFACSQCGQPLFVYKLEQVSEKGKAYTNYFGRCNVAEHEKLILLAQLKPEKDSDEAVTYSLGKFGQRALDFYSIHVTKESTHPVKPLAQIAGNRYASHPVGKALSDACMGTIASFLSKYQDIIIEHQKVVKGNQKRLESLRELAGKENLEYPSVTLPPQPHTKEGVDAYNEVIARVRMWVNLNLWQKLKLSRDDAKPLLRLKGFPSFPLVERQANEVDWWDMVCNVKKLINEKKEDGKVFWQNLAGYKRQEALRPYLSSEEDRKKGKKFARYQLGDLLLHLEKKHGEDWGKVYDEAWERIDKKVEGLSKHIKLEEERRSEDAQSKAALTDWLRAKASFVIEGLKEADKDEFCRCELKLQKWYGDLRGKPFAIEAENSILDISGFSKQYNCAFIWQKDGVKKLNLYLIINYFKGGKLRFKKIKPEAFEANRFYTVINKKSGEIVPMEVNFNFDDPNLIILPLAFGKRQGREFIWNDLLSLETGSLQLANGRVIEKTLYNRRTRQDEPALFVALTFERREVLDSSNIKTPMNLIGVDRGENIPAVIALTDPEGCPLSRFKDSLGNPTHILRIGESYKEKQRTIQAKKEVEQRRAGGYSRKYASKAKNLADDMVRNTARDLLYYAVTQDAMLIFENLSRGFGRQGKRTFMAERQYTRMEDWLTAKLAYEGLPSKTYLSKTLAQYTSKTCSNCGFTITSADYDRVLEKLKKTATGWMTTINGKELKVEGQITYYNRYKRQNVVKDLSVELDRLSEESVNNDISSWTKGRSGEALSLLKKRFSHRPVQEKFVCLNCGFETHADEQAALNIARSWLFLRSQEYKKYQTNKTTGNTDKRAFVETWQSFYRKKLKEVWKPAV

SEQ ID NO: 37907 - protein, 979 aa, synthetic construct
  REGION 1..979: note = engineered CasX variant
QEIKRINKIRRRLVKDSNTKKAGKTGPMKTLLVRVMTPDLRERLENLRKKPENIPQPISNTSRANLNKLLTDYTEMKKAILHVYWEEFQKDPVGLMSRVAQPASKKIDQNKLKPEMDEKGNLTTAGFACSQCGQPLFVYKLEQVSEKGKAYTNYFGRCNVAEHEKLILLAQLKPEKDSDEAVTYSLGKFGQRALDFYSIHVTKESTHPVKPLAQIAGNRYASSPVGKALSDACMGTIASFLSKYQDIIIEHQKVVKGNQKRLESLRELAGKENLEYPSVTLPPQPHTKEGVDAYNEVIARVRMWVNLNLWQKLKLSRDDAKPLLRLKGFPSFPLVERQANEVDWWDMVCNVKKLINEKKEDGKVFWQNLAGYKRQEALRPYLSSEEDRKKGKKFARYQLGDLLLHLEKKHGEDWGKVYDEAWERIDKKVEGLSKHIKLEEERRSEDAQSKAALTDWLRAKASFVIEGLKEADKDEFCRCELKLQKWYGDLRGKPFAIEAENSILDISGFSKQYNCAFIWQKDGVKKLNLYLIINYFKGGKLRFKKIKPEAFEANRFYTVINKKSGEIVPMEVNFNFDDPNLIILPLAFGKRQGREFIWNDLLSLETGSLQLANGRVIEKTLYNRRTRQDEPALFVALTFERREVLDSSNIKTPMNLIGVDRGENIPAVIALTDPEGCPLSRFKDSLGNPTHILRIGESYKEKQRTIQAKKEVEQRRAGGYSRKYASKAKNLADDMVRNTARDLLYYAVTQDAMLIFENLSRGFGRQGKRTFMAERQYTRMEDWLTAKLAYEGLPSKTYLSKTLAQYTSKTCSNCGFTITSADYDRVLEKLKKTATGWMTTINGKELKVEGQITYYNRYKRQNVVKDLSVELDRLSEESVNNDISSWTKGRSGEALSLLKKRFSHRPVQEKFVCLNCGFETHADEQAALNIARSWLFLRSQEYKKYQTNKTTGNTDKRAFVETWQSFYRKKLKEVWKPAV

SEQ ID NO: 37908 - protein, 979 aa, synthetic construct
  REGION 1..979: note = engineered CasX variant
QEIKRINKIRRRLVKDSNTKKAGKTGPMKTLLVRVMTPDLRERLENLRKKPENIPQPISNTSRANLNKLLTDYTEMKKAILHVYWEEFQKDPVGLMSRVAQPASKKIDQNKLKPEMDEKGNLTTAGFACSQCGQPLFVYKLEQVSEKGKAYTNYFGRCNVAEHEKLILLAQLKPEKDSDEAVTYSLGKFGQRALDFYSIHVTKESTHPVKPLAQIAGNRYASTPVGKALSDACMGTIASFLSKYQDIIIEHQKVVKGNQKRLESLRELAGKENLEYPSVTLPPQPHTKEGVDAYNEVIARVRMWVNLNLWQKLKLSRDDAKPLLRLKGFPSFPLVERQANEVDWWDMVCNVKKLINEKKEDGKVFWQNLAGYKRQEALRPYLSSEEDRKKGKKFARYQLGDLLLHLEKKHGEDWGKVYDEAWERIDKKVEGLSKHIKLEEERRSEDAQSKAALTDWLRAKASFVIEGLKEADKDEFCRCELKLQKWYGDLRGKPFAIEAENSILDISGFSKQYNCAFIWQKDGVKKLNLYLIINYFKGGKLRFKKIKPEAFEANRFYTVINKKSGEIVPMEVNFNFDDPNLIILPLAFGKRQGREFIWNDLLSLETGSLQLANGRVIEKTLYNRRTRQDEPALFVALTFERREVLDSSNIKTPMNLIGVDRGENIPAVIALTDPEGCPLSRFKDSLGNPTHILRIGESYKEKQRTIQAKKEVEQRRAGGYSRKYASKAKNLADDMVRNTARDLLYYAVTQDAMLIFENLSRGFGRQGKRTFMAERQYTRMEDWLTAKLAYEGLPSKTYLSKTLAQYTSKTCSNCGFTITSADYDRVLEKLKKTATGWMTTINGKELKVEGQITYYNRYKRQNVVKDLSVELDRLSEESVNNDISSWTKGRSGEALSLLKKRFSHRPVQEKFVCLNCGFETHADEQAALNIARSWLFLRSQEYKKYQTNKTTGNTDKRAFVETWQSFYRKKLKEVWKPAV

SEQ ID NO: 37909 - protein, 979 aa, synthetic construct
  REGION 1..979: note = engineered CasX variant
QEIKRINKIRRRLVKDSNTKKAGKTGPMKTLLVRVMTPDLRERLENLRKKPENIPQPISNTSRANLNKLLTDYTEMKKAILHVYWEEFQKDPVGLMSRVAQPASKKIDQNKLKPEMDEKGNLTTAGFACSQCGQPLFVYKLEQVSEKGKAYTNYFGRCNVAEHEKLILLAQLKPEKDSDEAVTYSLGKFGQRALDFYSIHVTKESTHPVKPLAQIAGNRYASAPVGKALSDACMGTIASFLSKYQDIIIEHQKVVKGNQKRLESLRELAGKENLEYPSVTLPPQPHTKEGVDAYNEVIARVRMWVNLNLWQKLKLSRDDAKPLLRLKGFPSFPLVERQANEVDWWDMVCNVKKLINEKKEDGKVFWQNLAGYKRQEALRPYLSSEEDRKKGKKFARYQLGDLLLHLEKKHGEDWGKVYDEAWERIDKKVEGLSKHIKLEEERRSEDAQSKAALTDWLRAKASFVIEGLKEADKDEFCRCELKLQKWYGDLRGKPFAIEAENSILDISGFSKQYNCAFIWQKDGVKKLNLYLIINYFKGGKLRFKKIKPEAFEANRFYTVINKKSGEIVPMEVNFNFDDPNLIILPLAFGKRQGREFIWNDLLSLETGSLQLANGRVIEKTLYNRRTRQDEPALFVALTFERREVLDSSNIKTPMNLIGVDRGENIPAVIALTDPEGCPLSRFKDSLGNPTHILRIGESYKEKQRTIQAKKEVEQRRAGGYSRKYASKAKNLADDMVRNTARDLLYYAVTQDAMLIFENLSRGFGRQGKRTFMAERQYTRMEDWLTAKLAYEGLPSKTYLSKTLAQYTSKTCSNCGFTITSADYDRVLEKLKKTATGWMTTINGKELKVEGQITYYNRYKRQNVVKDLSVELDRLSEESVNNDISSWTKGRSGEALSLLKKRFSHRPVQEKFVCLNCGFETHADEQAALNIARSWLFLRSQEYKKYQTNKTTGNTDKRAFVETWQSFYRKKLKEVWKPAV

SEQ ID NO: 37910 - protein, 979 aa, synthetic construct
  REGION 1..979: note = engineered CasX variant
QEIKRINKIRRRLVKDSNTKKAGKTGPMKTLLVRVMTPDLRERLENLRKKPENIPQPISNTSRANLNKLLTDYTEMKKAILHVYWEEFQKDPVGLMSRVAQPASKKIDQNKLKPEMDEKGNLTTAGFACSQCGQPLFVYKLEQVSEKGKAYTNYFGRCNVAEHEKLILLAQLKPEKDSDEAVTYSLGKFGQRALDFYSIHVTKESTHPVKPLAQIAGNRYASVPVGKALSDACMGTIASFLSKYQDIIIEHQKVVKGNQKRLESLRELAGKENLEYPSVTLPPQPHTKEGVDAYNEVIARVRMWVNLNLWQKLKLSRDDAKPLLRLKGFPSFPLVERQANEVDWWDMVCNVKKLINEKKEDGKVFWQNLAGYKRQEALRPYLSSEEDRKKGKKFARYQLGDLLLHLEKKHGEDWGKVYDEAWERIDKKVEGLSKHIKLEEERRSEDAQSKAALTDWLRAKASFVIEGLKEADKDEFCRCELKLQKWYGDLRGKPFAIEAENSILDISGFSKQYNCAFIWQKDGVKKLNLYLIINYFKGGKLRFKKIKPEAFEANRFYTVINKKSGEIVPMEVNFNFDDPNLIILPLAFGKRQGREFIWNDLLSLETGSLQLANGRVIEKTLYNRRTRQDEPALFVALTFERREVLDSSNIKTPMNLIGVDRGENIPAVIALTDPEGCPLSRFKDSLGNPTHILRIGESYKEKQRTIQAKKEVEQRRAGGYSRKYASKAKNLADDMVRNTARDLLYYAVTQDAMLIFENLSRGFGRQGKRTFMAERQYTRMEDWLTAKLAYEGLPSKTYLSKTLAQYTSKTCSNCGFTITSADYDRVLEKLKKTATGWMTTINGKELKVEGQITYYNRYKRQNVVKDLSVELDRLSEESVNNDISSWTKGRSGEALSLLKKRFSHRPVQEKFVCLNCGFETHADEQAALNIARSWLFLRSQEYKKYQTNKTTGNTDKRAFVETWQSFYRKKLKEVWKPAV

SEQ ID NO: 37911 - protein, 979 aa, synthetic construct
  REGION 1..979: note = engineered CasX variant
QEIKRINKIRRRLVKDSNTKKAGKTGPMKTLLVRVMTPDLRERLENLRKKPENIPQPISNTSRANLNKLLTDYTEMKKAILHVYWEEFQKDPVGLMSRVAQPASKKIDQNKLKPEMDEKGNLTTAGFACSQCGQPLFVYKLEQVSEKGKAYTNYFGRCNVAEHEKLIKLAQLKPEKDSDEAVTYSLGKFGQRALDFYSIHVTKESTHPVKPLAQIAGNRYASGPVGKALSDACMGTIASFLSKYQDIIIEHQKVVKGNQKRLESLRELAGKENLEYPSVTLPPQPHTKEGVDAYNEVIARVRMWVNLNLWQKLKLSRDDAKPLLRLKGFPSFPLVERQANEVDWWDMVCNVKKLINEKKEDGKVFWQNLAGYKRQEALRPYLSSEEDRKKGKKFARYQLGDLLLHLEKKHGEDWGKVYDEAWERIDKKVEGLSKHIKLEEERRSEDAQSKAALTDWLRAKASFVIEGLKEADKDEFCRCELKLQKWYGDLRGKPFAIEAENSILDISGFSKQYNCAFIWQKDGVKKLNLYLIINYFKGGKLRFKKIKPEAFEANRFYTVINKKSGEIVPMEVNFNFDDPNLIILPLAFGKRQGREFIWNDLLSLETGSLQLANGRVIEKTLYNRRTRQDEPALFVALTFERREVLDSSNIKTPMNLIGVDRGENIPAVIALTDPEGCPLSRFKDSLGNPTHILRIGESYKEKQRTIQAKKEVEQRRAGGYSRKYASKAKNLADDMVRNTARDLLYYAVTQDAMLIFENLSRGFGRQGKRTFMAERQYTRMEDWLTAKLAYEGLPSKTYLSKTLAQYTSKTCSNCGFTITSADYDRVLEKLKKTATGWMTTINGKELKVEGQITYYNRYKRQNVVKDLSVELDRLSEESVNNDISSWTKGRSGEALSLLKKRFSHRPVQEKFVCLNCGFETHADEQAALNIARSWLFLRSQEYKKYQTNKTTGNTDKRAFVETWQSFYRKKLKEVWKPAV

SEQ ID NO: 37912 - protein, 978 aa, synthetic construct
  REGION 1..978: note = engineered CasX variant
QEIKRINKIRRRLVKDSNTKKAGKTGPMKTLLVRVMTPDLRERLENLRKKPENIPQPISNTSRANLNKLLTDYTEMKKAILHVYWEEFQKDPVGLMSRVAQPASKKIDQNKLKPEMDEKGNLTTAGFACSQCGQPLFVYKLEQVSEKGKAYTNYFGRCNVAEHEKLILLAQLKPEKDSDEAVTYSLGKFGQRALDFYSIHVTKESTHPVKPLAQIAGNRYASPVGKALSDACMGTIASFLSKYQDIIIEHQKVVKGNQKRLESLRELAGKENLEYPSVTLPPQPHTKEGVDAYNEVIARVRMWVNLNLWQKLKLSRDDAKPLLRLKGFPSFPLVERQANEVDWWDMVCNVKKLINEKKEDGKVFWQNLAGYKRQEALRPYLSSEEDRKKGKKFARYQLGDLLLHLEKKHGEDWGKVYDEAWERIDKKVEGLSKHIKLEEERRSEDAQSKAALTDWLRAKASFVIEGLKEADKDEFCRCELKLQKWYGDLRGKPFAIEAENSILDISGFSKQYNCAFIWQKDGVKKLNLYLIINYFKGGKLRFKKIKPEAFEANRFYTVINKKSGEIVPMEVNFNFDDPNLIILPLAFGKRQGREFIWNDLLSLETGSLQLANGRVIEKTLYNRRTRQDEPALFVALTFERREVLDSSNIKTPMNLIGVDRGENIPAVIALTDPEGCPLSRFKDSLGNPTHILRIGESYKEKQRTIQAKKEVEQRRAGGYSRKYASKAKNLADDMVRNTARDLLYYAVTQDAMLIFENLSRGFGRQGKRTFMAERQYTRMEDWLTAKLAYEGLPSKTYLSKTLAQYTSKTCSNCGFTITSADYDRVLEKLKKTATGWMTTINGKELKVEGQITYYNRYKRQNVVKDLSVELDRLSEESVNNDISSWTKGRSGEALSLLKKRFSHRPVQEKFVCLNCGFETHADEQAALNIARSWLFLRSQEYKKYQTNKTTGNTDKRAFVETWQSFYRKKLKEVWKPAV

SEQ ID NO: 37913 - protein, 979 aa, synthetic construct
  REGION 1..979: note = engineered CasX variant
QEIKRINKIRRRLVKDSNTKKAGKTGPMKTLLVRVMTPDLRERLENLRKKPENIPQPISNTSRANLNKLLTDYTEMKKAILHVYWEEFQKDPVGLMSRVAQPASKKIDQNKLKPEMDEKGNLTTAGFACSQCGQPLFVYKLEQVSEKGKAYTNYFGRCNVAEHEKLILLAQLKPEKDSDEAVTYSLGKFGQRALDFYSIHVTKESTHPVKPLAQIAGNRYASYPVGKALSDACMGTIASFLSKYQDIIIEHQKVVKGNQKRLESLRELAGKENLEYPSVTLPPQPHTKEGVDAYNEVIARVRMWVNLNLWQKLKLSRDDAKPLLRLKGFPSFPLVERQANEVDWWDMVCNVKKLINEKKEDGKVFWQNLAGYKRQEALRPYLSSEEDRKKGKKFARYQLGDLLLHLEKKHGEDWGKVYDEAWERIDKKVEGLSKHIKLEEERRSEDAQSKAALTDWLRAKASFVIEGLKEADKDEFCRCELKLQKWYGDLRGKPFAIEAENSILDISGFSKQYNCAFIWQKDGVKKLNLYLIINYFKGGKLRFKKIKPEAFEANRFYTVINKKSGEIVPMEVNFNFDDPNLIILPLAFGKRQGREFIWNDLLSLETGSLKLANGRVIEKTLYNRRTRQDEPALFVALTFERREVLDSSNIKPMSNLIGVDRGENIPAVIALTDPEGCPLSRFKDSLGNPTHILRIRESYKEKQRTIQAKKEVEQRRAGGYSRKYASKAKNLADDMVRNTARDLLYYAVTQDAMLIFENLSRGFGRQGKRTFMAERQYTRMEDWLTAKLAYEGLPSKTYLSKTLAQYTSKTCSNCGFTITSADYDRVLEKLKKTATGWMTTINGKELKVEGQITYYNRYKRQNVVKDLSVELDRLSEESVNNDISSWTKGRSGEALSLLKKRFSHRPVQEKFVCLNCGFETHADEQAALNIARSWLFLRSQEYKKYQTNKTTGNTDKRAFVETWQSFYRKKLKEVWKPAV

SEQ ID NO: 37914 - protein, 979 aa, synthetic construct
  REGION 1..979: note = engineered CasX variant
QEIKRINKIRRRLVKDSNTKKAGKTGPMKTLLVRVMTPDLRERLENLRKKPENIPQPISNTSRANLNKLLTDYTEMKKAILHVYWEEFQKDPVGLMSRVAQPASKKIDQNKLKPEMDEKGNLTTAGFACSQCGQPLFVYKLEQVSEKGKAYTNYFGRCNVAEHEKLILLAQLKPEKDSDEAVTYSLGKFGQRALDFYSIHVTKESTHPVKPLAQIAGNRYASHPVGKALSDACMGTIASFLSKYQDIIIEHQKVVKGNQKRLESLRELAGKENLEYPSVTLPPQPHTKEGVDAYNEVIARVRMWVNLNLWQKLKLSRDDAKPLLRLKGFPSFPLVERQANEVDWWDMVCNVKKLINEKKEDGKVFWQNLAGYKRQEALRPYLSSEEDRKKGKKFARYQLGDLLLHLEKKHGEDWGKVYDEAWERIDKKVEGLSKHIKLEEERRSEDAQSKAALTDWLRAKASFVIEGLKEADKDEFCRCELKLQKWYGDLRGKPFAIEAENSILDISGFSKQYNCAFIWQKDGVKKLNLYLIINYFKGGKLRFKKIKPEAFEANRFYTVINKKSGEIVPMEVNFNFDDPNLIILPLAFGKRQGREFIWNDLLSLETGSLKLANGRVIEKTLYNRRTRQDEPALFVALTFERREVLDSSNIKPMSNLIGVDRGENIPAVIALTDPEGCPLSRFKDSLGNPTHILRIRESYKEKQRTIQAKKEVEQRRAGGYSRKYASKAKNLADDMVRNTARDLLYYAVTQDAMLIFENLSRGFGRQGKRTFMAERQYTRMEDWLTAKLAYEGLPSKTYLSKTLAQYTSKTCSNCGFTITSADYDRVLEKLKKTATGWMTTINGKELKVEGQITYYNRYKRQNVVKDLSVELDRLSEESVNNDISSWTKGRSGEALSLLKKRFSHRPVQEKFVCLNCGFETHADEQAALNIARSWLFLRSQEYKKYQTNKTTGNTDKRAFVETWQSFYRKKLKEVWKPAV

SEQ ID NO: 37915 - protein, 979 aa, synthetic construct
  REGION 1..979: note = engineered CasX variant
QEIKRINKIRRRLVKDSNTKKAGKTGPMKTLLVRVMTPDLRERLENLRKKPENIPQPISNTSRANLNKLLTDYTEMKKAILHVYWEEFQKDPVGLMSRVAQPASKKIDQNKLKPEMDEKGNLTTAGFACSQCGQPLFVYKLEQVSEKGKAYTNYFGRCNVAEHEKLILLAQLKPEKDSDEAVTYSLGKFGQRALDFYSIHVTKESTHPVKPLAQIAGNRYASSPVGKALSDACMGTIASFLSKYQDIIIEHQKVVKGNQKRLESLRELAGKENLEYPSVTLPPQPHTKEGVDAYNEVIARVRMWVNLNLWQKLKLSRDDAKPLLRLKGFPSFPLVERQANEVDWWDMVCNVKKLINEKKEDGKVFWQNLAGYKRQEALRPYLSSEEDRKKGKKFARYQLGDLLLHLEKKHGEDWGKVYDEAWERIDKKVEGLSKHIKLEEERRSEDAQSKAALTDWLRAKASFVIEGLKEADKDEFCRCELKLQKWYGDLRGKPFAIEAENSILDISGFSKQYNCAFIWQKDGVKKLNLYLIINYFKGGKLRFKKIKPEAFEANRFYTVINKKSGEIVPMEVNFNFDDPNLIILPLAFGKRQGREFIWNDLLSLETGSLKLANGRVIEKTLYNRRTRQDEPALFVALTFERREVLDSSNIKPMSNLIGVDRGENIPAVIALTDPEGCPLSRFKDSLGNPTHILRIRESYKEKQRTIQAKKEVEQRRAGGYSRKYASKAKNLADDMVRNTARDLLYYAVTQDAMLIFENLSRGFGRQGKRTFMAERQYTRMEDWLTAKLAYEGLPSKTYLSKTLAQYTSKTCSNCGFTITSADYDRVLEKLKKTATGWMTTINGKELKVEGQITYYNRYKRQNVVKDLSVELDRLSEESVNNDISSWTKGRSGEALSLLKKRFSHRPVQEKFVCLNCGFETHADEQAALNIARSWLFLRSQEYKKYQTNKTTGNTDKRAFVETWQSFYRKKLKEVWKPAV

SEQ ID NO: 37916 - protein, 979 aa, synthetic construct
  REGION 1..979: note = engineered CasX variant
QEIKRINKIRRRLVKDSNTKKAGKTGPMKTLLVRVMTPDLRERLENLRKKPENIPQPISNTSRANLNKLLTDYTEMKKAILHVYWEEFQKDPVGLMSRVAQPASKKIDQNKLKPEMDEKGNLTTAGFACSQCGQPLFVYKLEQVSEKGKAYTNYFGRCNVAEHEKLILLAQLKPEKDSDEAVTYSLGKFGQRALDFYSIHVTKESTHPVKPLAQIAGNRYASTPVGKALSDACMGTIASFLSKYQDIIIEHQKVVKGNQKRLESLRELAGKENLEYPSVTLPPQPHTKEGVDAYNEVIARVRMWVNLNLWQKLKLSRDDAKPLLRLKGFPSFPLVERQANEVDWWDMVCNVKKLINEKKEDGKVFWQNLAGYKRQEALRPYLSSEEDRKKGKKFARYQLGDLLLHLEKKHGEDWGKVYDEAWERIDKKVEGLSKHIKLEEERRSEDAQSKAALTDWLRAKASFVIEGLKEADKDEFCRCELKLQKWYGDLRGKPFAIEAENSILDISGFSKQYNCAFIWQKDGVKKLNLYLIINYFKGGKLRFKKIKPEAFEANRFYTVINKKSGEIVPMEVNFNFDDPNLIILPLAFGKRQGREFIWNDLLSLETGSLKLANGRVIEKTLYNRRTRQDEPALFVALTFERREVLDSSNIKPMSNLIGVDRGENIPAVIALTDPEGCPLSRFKDSLGNPTHILRIRESYKEKQRTIQAKKEVEQRRAGGYSRKYASKAKNLADDMVRNTARDLLYYAVTQDAMLIFENLSRGFGRQGKRTFMAERQYTRMEDWLTAKLAYEGLPSKTYLSKTLAQYTSKTCSNCGFTITSADYDRVLEKLKKTATGWMTTINGKELKVEGQITYYNRYKRQNVVKDLSVELDRLSEESVNNDISSWTKGRSGEALSLLKKRFSHRPVQEKFVCLNCGFETHADEQAALNIARSWLFLRSQEYKKYQTNKTTGNTDKRAFVETWQSFYRKKLKEVWKPAV

SEQ ID NO: 37917 - protein, 979 aa, synthetic construct
  REGION 1..979: note = engineered CasX variant
QEIKRINKIRRRLVKDSNTKKAGKTGPMKTLLVRVMTPDLRERLENLRKKPENIPQPISNTSRANLNKLLTDYTEMKKAILHVYWEEFQKDPVGLMSRVAQPASKKIDQNKLKPEMDEKGNLTTAGFACSQCGQPLFVYKLEQVSEKGKAYTNYFGRCNVAEHEKLILLAQLKPEKDSDEAVTYSLGKFGQRALDFYSIHVTKESTHPVKPLAQIAGNRYASAPVGKALSDACMGTIASFLSKYQDIIIEHQKVVKGNQKRLESLRELAGKENLEYPSVTLPPQPHTKEGVDAYNEVIARVRMWVNLNLWQKLKLSRDDAKPLLRLKGFPSFPLVERQANEVDWWDMVCNVKKLINEKKEDGKVFWQNLAGYKRQEALRPYLSSEEDRKKGKKFARYQLGDLLLHLEKKHGEDWGKVYDEAWERIDKKVEGLSKHIKLEEERRSEDAQSKAALTDWLRAKASFVIEGLKEADKDEFCRCELKLQKWYGDLRGKPFAIEAENSILDISGFSKQYNCAFIWQKDGVKKLNLYLIINYFKGGKLRFKKIKPEAFEANRFYTVINKKSGEIVPMEVNFNFDDPNLIILPLAFGKRQGREFIWNDLLSLETGSLKLANGRVIEKTLYNRRTRQDEPALFVALTFERREVLDSSNIKPMSNLIGVDRGENIPAVIALTDPEGCPLSRFKDSLGNPTHILRIRESYKEKQRTIQAKKEVEQRRAGGYSRKYASKAKNLADDMVRNTARDLLYYAVTQDAMLIFENLSRGFGRQGKRTFMAERQYTRMEDWLTAKLAYEGLPSKTYLSKTLAQYTSKTCSNCGFTITSADYDRVLEKLKKTATGWMTTINGKELKVEGQITYYNRYKRQNVVKDLSVELDRLSEESVNNDISSWTKGRSGEALSLLKKRFSHRPVQEKFVCLNCGFETHADEQAALNIARSWLFLRSQEYKKYQTNKTTGNTDKRAFVETWQSFYRKKLKEVWKPAV

SEQ ID NO: 37918 - protein, 979 aa, synthetic construct
  REGION 1..979: note = engineered CasX variant
QEIKRINKIRRRLVKDSNTKKAGKTGPMKTLLVRVMTPDLRERLENLRKKPENIPQPISNTSRANLNKLLTDYTEMKKAILHVYWEEFQKDPVGLMSRVAQPASKKIDQNKLKPEMDEKGNLTTAGFACSQCGQPLFVYKLEQVSEKGKAYTNYFGRCNVAEHEKLILLAQLKPEKDSDEAVTYSLGKFGQRALDFYSIHVTKESTHPVKPLAQIAGNRYASVPVGKALSDACMGTIASFLSKYQDIIIEHQKVVKGNQKRLESLRELAGKENLEYPSVTLPPQPHTKEGVDAYNEVIARVRMWVNLNLWQKLKLSRDDAKPLLRLKGFPSFPLVERQANEVDWWDMVCNVKKLINEKKEDGKVFWQNLAGYKRQEALRPYLSSEEDRKKGKKFARYQLGDLLLHLEKKHGEDWGKVYDEAWERIDKKVEGLSKHIKLEEERRSEDAQSKAALTDWLRAKASFVIEGLKEADKDEFCRCELKLQKWYGDLRGKPFAIEAENSILDISGFSKQYNCAFIWQKDGVKKLNLYLIINYFKGGKLRFKKIKPEAFEANRFYTVINKKSGEIVPMEVNFNFDDPNLIILPLAFGKRQGREFIWNDLLSLETGSLKLANGRVIEKTLYNRRTRQDEPALFVALTFERREVLDSSNIKPMSNLIGVDRGENIPAVIALTDPEGCPLSRFKDSLGNPTHILRIRESYKEKQRTIQAKKEVEQRRAGGYSRKYASKAKNLADDMVRNTARDLLYYAVTQDAMLIFENLSRGFGRQGKRTFMAERQYTRMEDWLTAKLAYEGLPSKTYLSKTLAQYTSKTCSNCGFTITSADYDRVLEKLKKTATGWMTTINGKELKVEGQITYYNRYKRQNVVKDLSVELDRLSEESVNNDISSWTKGRSGEALSLLKKRFSHRPVQEKFVCLNCGFETHADEQAALNIARSWLFLRSQEYKKYQTNKTTGNTDKRAFVETWQSFYRKKLKEVWKPAV

SEQ ID NO: 37919 - protein, 979 aa, synthetic construct
  REGION 1..979: note = engineered CasX variant
QEIKRINKIRRRLVKDSNTKKAGKTGPMKTLLVRVMTPDLRERLENLRKKPENIPQPISNTSRANLNKLLTDYTEMKKAILHVYWEEFQKDPVGLMSRVAQPASKKIDQNKLKPEMDEKGNLTTAGFACSQCGQPLFVYKLEQVSEKGKAYTNYFGRCNVAEHEKLIKLAQLKPEKDSDEAVTYSLGKFGQRALDFYSIHVTKESTHPVKPLAQIAGNRYASGPVGKALSDACMGTIASFLSKYQDIIIEHQKVVKGNQKRLESLRELAGKENLEYPSVTLPPQPHTKEGVDAYNEVIARVRMWVNLNLWQKLKLSRDDAKPLLRLKGFPSFPLVERQANEVDWWDMVCNVKKLINEKKEDGKVFWQNLAGYKRQEALRPYLSSEEDRKKGKKFARYQLGDLLLHLEKKHGEDWGKVYDEAWERIDKKVEGLSKHIKLEEERRSEDAQSKAALTDWLRAKASFVIEGLKEADKDEFCRCELKLQKWYGDLRGKPFAIEAENSILDISGFSKQYNCAFIWQKDGVKKLNLYLIINYFKGGKLRFKKIKPEAFEANRFYTVINKKSGEIVPMEVNFNFDDPNLIILPLAFGKRQGREFIWNDLLSLETGSLKLANGRVIEKTLYNRRTRQDEPALFVALTFERREVLDSSNIKPMSNLIGVDRGENIPAVIALTDPEGCPLSRFKDSLGNPTHILRIRESYKEKQRTIQAKKEVEQRRAGGYSRKYASKAKNLADDMVRNTARDLLYYAVTQDAMLIFENLSRGFGRQGKRTFMAERQYTRMEDWLTAKLAYEGLPSKTYLSKTLAQYTSKTCSNCGFTITSADYDRVLEKLKKTATGWMTTINGKELKVEGQITYYNRYKRQNVVKDLSVELDRLSEESVNNDISSWTKGRSGEALSLLKKRFSHRPVQEKFVCLNCGFETHADEQAALNIARSWLFLRSQEYKKYQTNKTTGNTDKRAFVETWQSFYRKKLKEVWKPAV

SEQ ID NO: 37920 - protein, 978 aa, synthetic construct
  REGION 1..978: note = engineered CasX variant
QEIKRINKIRRRLVKDSNTKKAGKTGPMKTLLVRVMTPDLRERLENLRKKPENIPQPISNTSRANLNKLLTDYTEMKKAILHVYWEEFQKDPVGLMSRVAQPASKKIDQNKLKPEMDEKGNLTTAGFACSQCGQPLFVYKLEQVSEKGKAYTNYFGRCNVAEHEKLILLAQLKPEKDSDEAVTYSLGKFGQRALDFYSIHVTKESTHPVKPLAQIAGNRYASPVGKALSDACMGTIASFLSKYQDIIIEHQKVVKGNQKRLESLRELAGKENLEYPSVTLPPQPHTKEGVDAYNEVIARVRMWVNLNLWQKLKLSRDDAKPLLRLKGFPSFPLVERQANEVDWWDMVCNVKKLINEKKEDGKVFWQNLAGYKRQEALRPYLSSEEDRKKGKKFARYQLGDLLLHLEKKHGEDWGKVYDEAWERIDKKVEGLSKHIKLEEERRSEDAQSKAALTDWLRAKASFVIEGLKEADKDEFCRCELKLQKWYGDLRGKPFAIEAENSILDISGFSKQYNCAFIWQKDGVKKLNLYLIINYFKGGKLRFKKIKPEAFEANRFYTVINKKSGEIVPMEVNFNFDDPNLIILPLAFGKRQGREFIWNDLLSLETGSLKLANGRVIEKTLYNRRTRQDEPALFVALTFERREVLDSSNIKPMSNLIGVDRGENIPAVIALTDPEGCPLSRFKDSLGNPTHILRIRESYKEKQRTIQAKKEVEQRRAGGYSRKYASKAKNLADDMVRNTARDLLYYAVTQDAMLIFENLSRGFGRQGKRTFMAERQYTRMEDWLTAKLAYEGLPSKTYLSKTLAQYTSKTCSNCGFTITSADYDRVLEKLKKTATGWMTTINGKELKVEGQITYYNRYKRQNVVKDLSVELDRLSEESVNNDISSWTKGRSGEALSLLKKRFSHRPVQEKFVCLNCGFETHADEQAALNIARSWLFLRSQEYKKYQTNKTTGNTDKRAFVETWQSFYRKKLKEVWKPAV

SEQ ID NO: 37921 - protein, 979 aa, synthetic construct
  REGION 1..979: note = engineered CasX variant
QEIKRINKIRRRLVKDSNTKKAGKTGPMKTLLVRVMTPDLRERLENLRKKPENIPQPISNTSRANLNKLLTDYTEMKKAILHVYWEEFQKDPVGLMSRVAQPASKKIDQNKLKPEMDEKGNLTTAGFACSQCGQPLFVYKLEQVSEKGKAYTNYFGRCNVAEHEKLILLAQLKPEKDSDEAVTYSLGKFGQRALDFYSIHVTKESTHPVKPLAQIAGNRYASYPVGKALSDACMGTIASFLSKYQDIIIEHQKVVKGNQKRLESLRELAGKENLEYPSVTLPPQPHTKEGVDAYNEVIARVRMWVNLNLWQKLKLSRDDAKPLLRLKGFPSFPLVERQANEVDWWDMVCNVKKLINEKKEDGKVFWQNLAGYKRQEALRPYLSSEEDRKKGKKFARYQLGDLLLHLEKKHGEDWGKVYDEAWERIDKKVEGLSKHIKLEEERRSEDAQSKAALTDWLRAKASFVIEGLKEADKDEFCRCELKLQKWYGDLRGKPFAIEAENSILDISGFSKQYNCAFIWQKDGVKKLNLYLIINYFKGGKLRFKKIKPEAFEANRFYTVINKKSGEIVPMEVNFNFDDPNLIILPLAFGKRQGREFIWNDLLSLETGSLKLANGRVIEKTLYNRRTRQDEPALFVALTFERREVLDSSNIKPMSNLIGVDRGENIPAVIALTDPEGCPLSRFKDSLGNPTHILRIGESYKEKQRTIQAKKEVEQRRAGGYSRKYASKAKNLADDMVRNTARDLLYYAVTQDAMLIFENLSRGFGRQGKRTFSAERQYTRMEDWLTAKLAYEGLPSKTYLSKTLAQYTSKTCSNCGFTITSADYDRVLEKLKKTATGWMTTINGKELKVEGQITYYNRYKRQNVVKDLSVELDRLSEESVNNDISSWTKGRSGEALSLLKKRFSHRPVQEKFVCLNCGFETHADEQAALNIARSWLFLRSQEYKKYQTNKTTGNTDKRAFVETWQSFYRKKLKEVWKPAV

SEQ ID NO: 37922 - protein, 979 aa, synthetic construct
  REGION 1..979: note = engineered CasX variant
QEIKRINKIRRRLVKDSNTKKAGKTGPMKTLLVRVMTPDLRERLENLRKKPENIPQPISNTSRANLNKLLTDYTEMKKAILHVYWEEFQKDPVGLMSRVAQPASKKIDQNKLKPEMDEKGNLTTAGFACSQCGQPLFVYKLEQVSEKGKAYTNYFGRCNVAEHEKLILLAQLKPEKDSDEAVTYSLGKFGQRALDFYSIHVTKESTHPVKPLAQIAGNRYASHPVGKALSDACMGTIASFLSKYQDIIIEHQKVVKGNQKRLESLRELAGKENLEYPSVTLPPQPHTKEGVDAYNEVIARVRMWVNLNLWQKLKLSRDDAKPLLRLKGFPSFPLVERQANEVDWWDMVCNVKKLINEKKEDGKVFWQNLAGYKRQEALRPYLSSEEDRKKGKKFARYQLGDLLLHLEKKHGEDWGKVYDEAWERIDKKVEGLSKHIKLEEERRSEDAQSKAALTDWLRAKASFVIEGLKEADKDEFCRCELKLQKWYGDLRGKPFAIEAENSILDISGFSKQYNCAFIWQKDGVKKLNLYLIINYFKGGKLRFKKIKPEAFEANRFYTVINKKSGEIVPMEVNFNFDDPNLIILPLAFGKRQGREFIWNDLLSLETGSLKLANGRVIEKTLYNRRTRQDEPALFVALTFERREVLDSSNIKPMSNLIGVDRGENIPAVIALTDPEGCPLSRFKDSLGNPTHILRIGESYKEKQRTIQAKKEVEQRRAGGYSRKYASKAKNLADDMVRNTARDLLYYAVTQDAMLIFENLSRGFGRQGKRTFSAERQYTRMEDWLTAKLAYEGLPSKTYLSKTLAQYTSKTCSNCGFTITSADYDRVLEKLKKTATGWMTTINGKELKVEGQITYYNRYKRQNVVKDLSVELDRLSEESVNNDISSWTKGRSGEALSLLKKRFSHRPVQEKFVCLNCGFETHADEQAALNIARSWLFLRSQEYKKYQTNKTTGNTDKRAFVETWQSFYRKKLKEVWKPAV

SEQ ID NO: 37923 - protein, 979 aa, synthetic construct
  REGION 1..979: note = engineered CasX variant
QEIKRINKIRRRLVKDSNTKKAGKTGPMKTLLVRVMTPDLRERLENLRKKPENIPQPISNTSRANLNKLLTDYTEMKKAILHVYWEEFQKDPVGLMSRVAQPASKKIDQNKLKPEMDEKGNLTTAGFACSQCGQPLFVYKLEQVSEKGKAYTNYFGRCNVAEHEKLILLAQLKPEKDSDEAVTYSLGKFGQRALDFYSIHVTKESTHPVKPLAQIAGNRYASSPVGKALSDACMGTIASFLSKYQDIIIEHQKVVKGNQKRLESLRELAGKENLEYPSVTLPPQPHTKEGVDAYNEVIARVRMWVNLNLWQKLKLSRDDAKPLLRLKGFPSFPLVERQANEVDWWDMVCNVKKLINEKKEDGKVFWQNLAGYKRQEALRPYLSSEEDRKKGKKFARYQLGDLLLHLEKKHGEDWGKVYDEAWERIDKKVEGLSKHIKLEEERRSEDAQSKAALTDWLRAKASFVIEGLKEADKDEFCRCELKLQKWYGDLRGKPFAIEAENSILDISGFSKQYNCAFIWQKDGVKKLNLYLIINYFKGGKLRFKKIKPEAFEANRFYTVINKKSGEIVPMEVNFNFDDPNLIILPLAFGKRQGREFIWNDLLSLETGSLKLANGRVIEKTLYNRRTRQDEPALFVALTFERREVLDSSNIKPMSNLIGVDRGENIPAVIALTDPEGCPLSRFKDSLGNPTHILRIGESYKEKQRTIQAKKEVEQRRAGGYSRKYASKAKNLADDMVRNTARDLLYYAVTQDAMLIFENLSRGFGRQGKRTFSAERQYTRMEDWLTAKLAYEGLPSKTYLSKTLAQYTSKTCSNCGFTITSADYDRVLEKLKKTATGWMTTINGKELKVEGQITYYNRYKRQNVVKDLSVELDRLSEESVNNDISSWTKGRSGEALSLLKKRFSHRPVQEKFVCLNCGFETHADEQAALNIARSWLFLRSQEYKKYQTNKTTGNTDKRAFVETWQSFYRKKLKEVWKPAV

SEQ ID NO: 37924 - protein, 979 aa, synthetic construct
  REGION 1..979: note = engineered CasX variant
QEIKRINKIRRRLVKDSNTKKAGKTGPMKTLLVRVMTPDLRERLENLRKKPENIPQPISNTSRANLNKLLTDYTEMKKAILHVYWEEFQKDPVGLMSRVAQPASKKIDQNKLKPEMDEKGNLTTAGFACSQCGQPLFVYKLEQVSEKGKAYTNYFGRCNVAEHEKLILLAQLKPEKDSDEAVTYSLGKFGQRALDFYSIHVTKESTHPVKPLAQIAGNRYASTPVGKALSDACMGTIASFLSKYQDIIIEHQKVVKGNQKRLESLRELAGKENLEYPSVTLPPQPHTKEGVDAYNEVIARVRMWVNLNLWQKLKLSRDDAKPLLRLKGFPSFPLVERQANEVDWWDMVCNVKKLINEKKEDGKVFWQNLAGYKRQEALRPYLSSEEDRKKGKKFARYQLGDLLLHLEKKHGEDWGKVYDEAWERIDKKVEGLSKHIKLEEERRSEDAQSKAALTDWLRAKASFVIEGLKEADKDEFCRCELKLQKWYGDLRGKPFAIEAENSILDISGFSKQYNCAFIWQKDGVKKLNLYLIINYFKGGKLRFKKIKPEAFEANRFYTVINKKSGEIVPMEVNFNFDDPNLIILPLAFGKRQGREFIWNDLLSLETGSLKLANGRVIEKTLYNRRTRQDEPALFVALTFERREVLDSSNIKPMSNLIGVDRGENIPAVIALTDPEGCPLSRFKDSLGNPTHILRIGESYKEKQRTIQAKKEVEQRRAGGYSRKYASKAKNLADDMVRNTARDLLYYAVTQDAMLIFENLSRGFGRQGKRTFSAERQYTRMEDWLTAKLAYEGLPSKTYLSKTLAQYTSKTCSNCGFTITSADYDRVLEKLKKTATGWMTTINGKELKVEGQITYYNRYKRQNVVKDLSVELDRLSEESVNNDISSWTKGRSGEALSLLKKRFSHRPVQEKFVCLNCGFETHADEQAALNIARSWLFLRSQEYKKYQTNKTTGNTDKRAFVETWQSFYRKKLKEVWKPAV

SEQ ID NO: 37925 - protein, 979 aa, synthetic construct
  REGION 1..979: note = engineered CasX variant
QEIKRINKIRRRLVKDSNTKKAGKTGPMKTLLVRVMTPDLRERLENLRKKPENIPQPISNTSRANLNKLLTDYTEMKKAILHVYWEEFQKDPVGLMSRVAQPASKKIDQNKLKPEMDEKGNLTTAGFACSQCGQPLFVYKLEQVSEKGKAYTNYFGRCNVAEHEKLILLAQLKPEKDSDEAVTYSLGKFGQRALDFYSIHVTKESTHPVKPLAQIAGNRYASAPVGKALSDACMGTIASFLSKYQDIIIEHQKVVKGNQKRLESLRELAGKENLEYPSVTLPPQPHTKEGVDAYNEVIARVRMWVNLNLWQKLKLSRDDAKPLLRLKGFPSFPLVERQANEVDWWDMVCNVKKLINEKKEDGKVFWQNLAGYKRQEALRPYLSSEEDRKKGKKFARYQLGDLLLHLEKKHGEDWGKVYDEAWERIDKKVEGLSKHIKLEEERRSEDAQSKAALTDWLRAKASFVIEGLKEADKDEFCRCELKLQKWYGDLRGKPFAIEAENSILDISGFSKQYNCAFIWQKDGVKKLNLYLIINYFKGGKLRFKKIKPEAFEANRFYTVINKKSGEIVPMEVNFNFDDPNLIILPLAFGKRQGREFIWNDLLSLETGSLKLANGRVIEKTLYNRRTRQDEPALFVALTFERREVLDSSNIKPMSNLIGVDRGENIPAVIALTDPEGCPLSRFKDSLGNPTHILRIGESYKEKQRTIQAKKEVEQRRAGGYSRKYASKAKNLADDMVRNTARDLLYYAVTQDAMLIFENLSRGFGRQGKRTFSAERQYTRMEDWLTAKLAYEGLPSKTYLSKTLAQYTSKTCSNCGFTITSADYDRVLEKLKKTATGWMTTINGKELKVEGQITYYNRYKRQNVVKDLSVELDRLSEESVNNDISSWTKGRSGEALSLLKKRFSHRPVQEKFVCLNCGFETHADEQAALNIARSWLFLRSQEYKKYQTNKTTGNTDKRAFVETWQSFYRKKLKEVWKPAV

SEQ ID NO: 37926 - protein, 979 aa, synthetic construct
  REGION 1..979: note = engineered CasX variant
QEIKRINKIRRRLVKDSNTKKAGKTGPMKTLLVRVMTPDLRERLENLRKKPENIPQPISNTSRANLNKLLTDYTEMKKAILHVYWEEFQKDPVGLMSRVAQPASKKIDQNKLKPEMDEKGNLTTAGFACSQCGQPLFVYKLEQVSEKGKAYTNYFGRCNVAEHEKLILLAQLKPEKDSDEAVTYSLGKFGQRALDFYSIHVTKESTHPVKPLAQIAGNRYASVPVGKALSDACMGTIASFLSKYQDIIIEHQKVVKGNQKRLESLRELAGKENLEYPSVTLPPQPHTKEGVDAYNEVIARVRMWVNLNLWQKLKLSRDDAKPLLRLKGFPSFPLVERQANEVDWWDMVCNVKKLINEKKEDGKVFWQNLAGYKRQEALRPYLSSEEDRKKGKKFARYQLGDLLLHLEKKHGEDWGKVYDEAWERIDKKVEGLSKHIKLEEERRSEDAQSKAALTDWLRAKASFVIEGLKEADKDEFCRCELKLQKWYGDLRGKPFAIEAENSILDISGFSKQYNCAFIWQKDGVKKLNLYLIINYFKGGKLRFKKIKPEAFEANRFYTVINKKSGEIVPMEVNFNFDDPNLIILPLAFGKRQGREFIWNDLLSLETGSLKLANGRVIEKTLYNRRTRQDEPALFVALTFERREVLDSSNIKPMSNLIGVDRGENIPAVIALTDPEGCPLSRFKDSLGNPTHILRIGESYKEKQRTIQAKKEVEQRRAGGYSRKYASKAKNLADDMVRNTARDLLYYAVTQDAMLIFENLSRGFGRQGKRTFSAERQYTRMEDWLTAKLAYEGLPSKTYLSKTLAQYTSKTCSNCGFTITSADYDRVLEKLKKTATGWMTTINGKELKVEGQITYYNRYKRQNVVKDLSVELDRLSEESVNNDISSWTKGRSGEALSLLKKRFSHRPVQEKFVCLNCGFETHADEQAALNIARSWLFLRSQEYKKYQTNKTTGNTDKRAFVETWQSFYRKKLKEVWKPAV

SEQ ID NO: 37927 - protein, 979 aa, synthetic construct
  REGION 1..979: note = engineered CasX variant
QEIKRINKIRRRLVKDSNTKKAGKTGPMKTLLVRVMTPDLRERLENLRKKPENIPQPISNTSRANLNKLLTDYTEMKKAILHVYWEEFQKDPVGLMSRVAQPASKKIDQNKLKPEMDEKGNLTTAGFACSQCGQPLFVYKLEQVSEKGKAYTNYFGRCNVAEHEKLIKLAQLKPEKDSDEAVTYSLGKFGQRALDFYSIHVTKESTHPVKPLAQIAGNRYASGPVGKALSDACMGTIASFLSKYQDIIIEHQKVVKGNQKRLESLRELAGKENLEYPSVTLPPQPHTKEGVDAYNEVIARVRMWVNLNLWQKLKLSRDDAKPLLRLKGFPSFPLVERQANEVDWWDMVCNVKKLINEKKEDGKVFWQNLAGYKRQEALRPYLSSEEDRKKGKKFARYQLGDLLLHLEKKHGEDWGKVYDEAWERIDKKVEGLSKHIKLEEERRSEDAQSKAALTDWLRAKASFVIEGLKEADKDEFCRCELKLQKWYGDLRGKPFAIEAENSILDISGFSKQYNCAFIWQKDGVKKLNLYLIINYFKGGKLRFKKIKPEAFEANRFYTVINKKSGEIVPMEVNFNFDDPNLIILPLAFGKRQGREFIWNDLLSLETGSLKLANGRVIEKTLYNRRTRQDEPALFVALTFERREVLDSSNIKPMSNLIGVDRGENIPAVIALTDPEGCPLSRFKDSLGNPTHILRIGESYKEKQRTIQAKKEVEQRRAGGYSRKYASKAKNLADDMVRNTARDLLYYAVTQDAMLIFENLSRGFGRQGKRTFSAERQYTRMEDWLTAKLAYEGLPSKTYLSKTLAQYTSKTCSNCGFTITSADYDRVLEKLKKTATGWMTTINGKELKVEGQITYYNRYKRQNVVKDLSVELDRLSEESVNNDISSWTKGRSGEALSLLKKRFSHRPVQEKFVCLNCGFETHADEQAALNIARSWLFLRSQEYKKYQTNKTTGNTDKRAFVETWQSFYRKKLKEVWKPAV

SEQ ID NO: 37928 - protein, 978 aa, synthetic construct
  REGION 1..978: note = engineered CasX variant
QEIKRINKIRRRLVKDSNTKKAGKTGPMKTLLVRVMTPDLRERLENLRKKPENIPQPISNTSRANLNKLLTDYTEMKKAILHVYWEEFQKDPVGLMSRVAQPASKKIDQNKLKPEMDEKGNLTTAGFACSQCGQPLFVYKLEQVSEKGKAYTNYFGRCNVAEHEKLILLAQLKPEKDSDEAVTYSLGKFGQRALDFYSIHVTKESTHPVKPLAQIAGNRYASPVGKALSDACMGTIASFLSKYQDIIIEHQKVVKGNQKRLESLRELAGKENLEYPSVTLPPQPHTKEGVDAYNEVIARVRMWVNLNLWQKLKLSRDDAKPLLRLKGFPSFPLVERQANEVDWWDMVCNVKKLINEKKEDGKVFWQNLAGYKRQEALRPYLSSEEDRKKGKKFARYQLGDLLLHLEKKHGEDWGKVYDEAWERIDKKVEGLSKHIKLEEERRSEDAQSKAALTDWLRAKASFVIEGLKEADKDEFCRCELKLQKWYGDLRGKPFAIEAENSILDISGFSKQYNCAFIWQKDGVKKLNLYLIINYFKGGKLRFKKIKPEAFEANRFYTVINKKSGEIVPMEVNFNFDDPNLIILPLAFGKRQGREFIWNDLLSLETGSLKLANGRVIEKTLYNRRTRQDEPALFVALTFERREVLDSSNIKPMSNLIGVDRGENIPAVIALTDPEGCPLSRFKDSLGNPTHILRIGESYKEKQRTIQAKKEVEQRRAGGYSRKYASKAKNLADDMVRNTARDLLYYAVTQDAMLIFENLSRGFGRQGKRTFSAERQYTRMEDWLTAKLAYEGLPSKTYLSKTLAQYTSKTCSNCGFTITSADYDRVLEKLKKTATGWMTTINGKELKVEGQITYYNRYKRQNVVKDLSVELDRLSEESVNNDISSWTKGRSGEALSLLKKRFSHRPVQEKFVCLNCGFETHADEQAALNIARSWLFLRSQEYKKYQTNKTTGNTDKRAFVETWQSFYRKKLKEVWKPAV

SEQ ID NO: 37929 - protein, 979 aa, synthetic construct
  REGION 1..979: note = engineered CasX variant
QEIKRINKIRRRLVKDSNTKKAGKTGPMKTLLVRVMTPDLRERLENLRKKPENIPQPISNTSRANLNKLLTDYTEMKKAILHVYWEEFQKDPVGLMSRVAQPASKKIDQNKLKPEMDEKGNLTTAGFACSQCGQPLFVYKLEQVSEKGKAYTNYFGRCNVAEHEKLILLAQLKPEKDSDEAVTYSLGKFGQRALDFYSIHVTKESTHPVKPLAQIAGNRYASYPVGKALSDACMGTIASFLSKYQDIIIEHQKVVKGNQKRLESLRELAGKENLEYPSVTLPPQPHTKEGVDAYNEVIARVRMWVNLNLWQKLKLSRDDAKPLLRLKGFPSFPLVERQANEVDWWDMVCNVKKLINEKKEDGKVFWQNLAGYKRQEALRPYLSSEEDRKKGKKFARYQLGDLLLHLEKKHGEDWGKVYDEAWERIDKKVEGLSKHIKLEEERRSEDAQSKAALTDWLRAKASFVIEGLKEADKDEFCRCELKLQKWYGDLRGKPFAIEAENSILDISGFSKQYNCAFIWQKDGVKKLNLYLIINYFKGGKLRFKKIKPEAFEANRFYTVINKKSGEIVPMEVNFNFDDPNLIILPLAFGKRQGREFIWNDLLSLETGSLKLANGRVIEKTLYNRRTRQDEPALFVALTFERREVLDSSNIKPMSNLIGVDRGENIPAVIALTDPEGCPLSRFKDSLGNPTHILRIGESYKEKQRTIQAKKEVEQRRAGGYSRKYASKAKNLADDMVRNTARDLLYYAVTQDAMLIFENLSRGFGRQGKRTFMAERQYTRMEDWLTAKLAYEGLPSKTYLSKTLAQYTSKTCSNCGFTITSADYDRVLEKLKKTATGWMTTINGKELKVEGQITYYNRYKRQNVVKDLSVELDRLSEESVNNDISSWDKGRSGEALSLLKKRFSHRPVQEKFVCLNCGFETHADEQAALNIARSWLFLRSQEYKKYQTNKTTGNTDKRAFVETWQSFYRKKLKEVWKPAV

SEQ ID NO: 37930 - protein, 979 aa, synthetic construct
  REGION 1..979: note = engineered CasX variant
QEIKRINKIRRRLVKDSNTKKAGKTGPMKTLLVRVMTPDLRERLENLRKKPENIPQPISNTSRANLNKLLTDYTEMKKAILHVYWEEFQKDPVGLMSRVAQPASKKIDQNKLKPEMDEKGNLTTAGFACSQCGQPLFVYKLEQVSEKGKAYTNYFGRCNVAEHEKLILLAQLKPEKDSDEAVTYSLGKFGQRALDFYSIHVTKESTHPVKPLAQIAGNRYASHPVGKALSDACMGTIASFLSKYQDIIIEHQKVVKGNQKRLESLRELAGKENLEYPSVTLPPQPHTKEGVDAYNEVIARVRMWVNLNLWQKLKLSRDDAKPLLRLKGFPSFPLVERQANEVDWWDMVCNVKKLINEKKEDGKVFWQNLAGYKRQEALRPYLSSEEDRKKGKKFARYQLGDLLLHLEKKHGEDWGKVYDEAWERIDKKVEGLSKHIKLEEERRSEDAQSKAALTDWLRAKASFVIEGLKEADKDEFCRCELKLQKWYGDLRGKPFAIEAENSILDISGFSKQYNCAFIWQKDGVKKLNLYLIINYFKGGKLRFKKIKPEAFEANRFYTVINKKSGEIVPMEVNFNFDDPNLIILPLAFGKRQGREFIWNDLLSLETGSLKLANGRVIEKTLYNRRTRQDEPALFVALTFERREVLDSSNIKPMSNLIGVDRGENIPAVIALTDPEGCPLSRFKDSLGNPTHILRIGESYKEKQRTIQAKKEVEQRRAGGYSRKYASKAKNLADDMVRNTARDLLYYAVTQDAMLIFENLSRGFGRQGKRTFMAERQYTRMEDWLTAKLAYEGLPSKTYLSKTLAQYTSKTCSNCGFTITSADYDRVLEKLKKTATGWMTTINGKELKVEGQITYYNRYKRQNVVKDLSVELDRLSEESVNNDISSWDKGRSGEALSLLKKRFSHRPVQEKFVCLNCGFETHADEQAALNIARSWLFLRSQEYKKYQTNKTTGNTDKRAFVETWQSFYRKKLKEVWKPAV

SEQ ID NO: 37931 - protein, 979 aa, synthetic construct
  REGION 1..979: note = engineered CasX variant
QEIKRINKIRRRLVKDSNTKKAGKTGPMKTLLVRVMTPDLRERLENLRKKPENIPQPISNTSRANLNKLLTDYTEMKKAILHVYWEEFQKDPVGLMSRVAQPASKKIDQNKLKPEMDEKGNLTTAGFACSQCGQPLFVYKLEQVSEKGKAYTNYFGRCNVAEHEKLILLAQLKPEKDSDEAVTYSLGKFGQRALDFYSIHVTKESTHPVKPLAQIAGNRYASSPVGKALSDACMGTIASFLSKYQDIIIEHQKVVKGNQKRLESLRELAGKENLEYPSVTLPPQPHTKEGVDAYNEVIARVRMWVNLNLWQKLKLSRDDAKPLLRLKGFPSFPLVERQANEVDWWDMVCNVKKLINEKKEDGKVFWQNLAGYKRQEALRPYLSSEEDRKKGKKFARYQLGDLLLHLEKKHGEDWGKVYDEAWERIDKKVEGLSKHIKLEEERRSEDAQSKAALTDWLRAKASFVIEGLKEADKDEFCRCELKLQKWYGDLRGKPFAIEAENSILDISGFSKQYNCAFIWQKDGVKKLNLYLIINYFKGGKLRFKKIKPEAFEANRFYTVINKKSGEIVPMEVNFNFDDPNLIILPLAFGKRQGREFIWNDLLSLETGSLKLANGRVIEKTLYNRRTRQDEPALFVALTFERREVLDSSNIKPMSNLIGVDRGENIPAVIALTDPEGCPLSRFKDSLGNPTHILRIGESYKEKQRTIQAKKEVEQRRAGGYSRKYASKAKNLADDMVRNTARDLLYYAVTQDAMLIFENLSRGFGRQGKRTFMAERQYTRMEDWLTAKLAYEGLPSKTYLSKTLAQYTSKTCSNCGFTITSADYDRVLEKLKKTATGWMTTINGKELKVEGQITYYNRYKRQNVVKDLSVELDRLSEESVNNDISSWDKGRSGEALSLLKKRFSHRPVQEKFVCLNCGFETHADEQAALNIARSWLFLRSQEYKKYQTNKTTGNTDKRAFVETWQSFYRKKLKEVWKPAV

SEQ ID NO: 37932 - protein, 979 aa, synthetic construct
  REGION 1..979: note = engineered CasX variant
QEIKRINKIRRRLVKDSNTKKAGKTGPMKTLLVRVMTPDLRERLENLRKKPENIPQPISNTSRANLNKLLTDYTEMKKAILHVYWEEFQKDPVGLMSRVAQPASKKIDQNKLKPEMDEKGNLTTAGFACSQCGQPLFVYKLEQVSEKGKAYTNYFGRCNVAEHEKLILLAQLKPEKDSDEAVTYSLGKFGQRALDFYSIHVTKESTHPVKPLAQIAGNRYASTPVGKALSDACMGTIASFLSKYQDIIIEHQKVVKGNQKRLESLRELAGKENLEYPSVTLPPQPHTKEGVDAYNEVIARVRMWVNLNLWQKLKLSRDDAKPLLRLKGFPSFPLVERQANEVDWWDMVCNVKKLINEKKEDGKVFWQNLAGYKRQEALRPYLSSEEDRKKGKKFARYQLGDLLLHLEKKHGEDWGKVYDEAWERIDKKVEGLSKHIKLEEERRSEDAQSKAALTDWLRAKASFVIEGLKEADKDEFCRCELKLQKWYGDLRGKPFAIEAENSILDISGFSKQYNCAFIWQKDGVKKLNLYLIINYFKGGKLRFKKIKPEAFEANRFYTVINKKSGEIVPMEVNFNFDDPNLIILPLAFGKRQGREFIWNDLLSLETGSLKLANGRVIEKTLYNRRTRQDEPALFVALTFERREVLDSSNIKPMSNLIGVDRGENIPAVIALTDPEGCPLSRFKDSLGNPTHILRIGESYKEKQRTIQAKKEVEQRRAGGYSRKYASKAKNLADDMVRNTARDLLYYAVTQDAMLIFENLSRGFGRQGKRTFMAERQYTRMEDWLTAKLAYEGLPSKTYLSKTLAQYTSKTCSNCGFTITSADYDRVLEKLKKTATGWMTTINGKELKVEGQITYYNRYKRQNVVKDLSVELDRLSEESVNNDISSWDKGRSGEALSLLKKRFSHRPVQEKFVCLNCGFETHADEQAALNIARSWLFLRSQEYKKYQTNKTTGNTDKRAFVETWQSFYRKKLKEVWKPAV

SEQ ID NO: 37933 - protein, 979 aa, synthetic construct
  REGION 1..979: note = engineered CasX variant
QEIKRINKIRRRLVKDSNTKKAGKTGPMKTLLVRVMTPDLRERLENLRKKPENIPQPISNTSRANLNKLLTDYTEMKKAILHVYWEEFQKDPVGLMSRVAQPASKKIDQNKLKPEMDEKGNLTTAGFACSQCGQPLFVYKLEQVSEKGKAYTNYFGRCNVAEHEKLILLAQLKPEKDSDEAVTYSLGKFGQRALDFYSIHVTKESTHPVKPLAQIAGNRYASAPVGKALSDACMGTIASFLSKYQDIIIEHQKVVKGNQKRLESLRELAGKENLEYPSVTLPPQPHTKEGVDAYNEVIARVRMWVNLNLWQKLKLSRDDAKPLLRLKGFPSFPLVERQANEVDWWDMVCNVKKLINEKKEDGKVFWQNLAGYKRQEALRPYLSSEEDRKKGKKFARYQLGDLLLHLEKKHGEDWGKVYDEAWERIDKKVEGLSKHIKLEEERRSEDAQSKAALTDWLRAKASFVIEGLKEADKDEFCRCELKLQKWYGDLRGKPFAIEAENSILDISGFSKQYNCAFIWQKDGVKKLNLYLIINYFKGGKLRFKKIKPEAFEANRFYTVINKKSGEIVPMEVNFNFDDPNLIILPLAFGKRQGREFIWNDLLSLETGSLKLANGRVIEKTLYNRRTRQDEPALFVALTFERREVLDSSNIKPMSNLIGVDRGENIPAVIALTDPEGCPLSRFKDSLGNPTHILRIGESYKEKQRTIQAKKEVEQRRAGGYSRKYASKAKNLADDMVRNTARDLLYYAVTQDAMLIFENLSRGFGRQGKRTFMAERQYTRMEDWLTAKLAYEGLPSKTYLSKTLAQYTSKTCSNCGFTITSADYDRVLEKLKKTATGWMTTINGKELKVEGQITYYNRYKRQNVVKDLSVELDRLSEESVNNDISSWDKGRSGEALSLLKKRFSHRPVQEKFVCLNCGFETHADEQAALNIARSWLFLRSQEYKKYQTNKTTGNTDKRAFVETWQSFYRKKLKEVWKPAV

SEQ ID NO: 37934 - protein, 979 aa, synthetic construct
  REGION 1..979: note = engineered CasX variant
QEIKRINKIRRRLVKDSNTKKAGKTGPMKTLLVRVMTPDLRERLENLRKKPENIPQPISNTSRANLNKLLTDYTEMKKAILHVYWEEFQKDPVGLMSRVAQPASKKIDQNKLKPEMDEKGNLTTAGFACSQCGQPLFVYKLEQVSEKGKAYTNYFGRCNVAEHEKLILLAQLKPEKDSDEAVTYSLGKFGQRALDFYSIHVTKESTHPVKPLAQIAGNRYASVPVGKALSDACMGTIASFLSKYQDIIIEHQKVVKGNQKRLESLRELAGKENLEYPSVTLPPQPHTKEGVDAYNEVIARVRMWVNLNLWQKLKLSRDDAKPLLRLKGFPSFPLVERQANEVDWWDMVCNVKKLINEKKEDGKVFWQNLAGYKRQEALRPYLSSEEDRKKGKKFARYQLGDLLLHLEKKHGEDWGKVYDEAWERIDKKVEGLSKHIKLEEERRSEDAQSKAALTDWLRAKASFVIEGLKEADKDEFCRCELKLQKWYGDLRGKPFAIEAENSILDISGFSKQYNCAFIWQKDGVKKLNLYLIINYFKGGKLRFKKIKPEAFEANRFYTVINKKSGEIVPMEVNFNFDDPNLIILPLAFGKRQGREFIWNDLLSLETGSLKLANGRVIEKTLYNRRTRQDEPALFVALTFERREVLDSSNIKPMSNLIGVDRGENIPAVIALTDPEGCPLSRFKDSLGNPTHILRIGESYKEKQRTIQAKKEVEQRRAGGYSRKYASKAKNLADDMVRNTARDLLYYAVTQDAMLIFENLSRGFGRQGKRTFMAERQYTRMEDWLTAKLAYEGLPSKTYLSKTLAQYTSKTCSNCGFTITSADYDRVLEKLKKTATGWMTTINGKELKVEGQITYYNRYKRQNVVKDLSVELDRLSEESVNNDISSWDKGRSGEALSLLKKRFSHRPVQEKFVCLNCGFETHADEQAALNIARSWLFLRSQEYKKYQTNKTTGNTDKRAFVETWQSFYRKKLKEVWKPAV

SEQ ID NO: 37935 - protein, 979 aa, synthetic construct
  REGION 1..979: note = engineered CasX variant
QEIKRINKIRRRLVKDSNTKKAGKTGPMKTLLVRVMTPDLRERLENLRKKPENIPQPISNTSRANLNKLLTDYTEMKKAILHVYWEEFQKDPVGLMSRVAQPASKKIDQNKLKPEMDEKGNLTTAGFACSQCGQPLFVYKLEQVSEKGKAYTNYFGRCNVAEHEKLIKLAQLKPEKDSDEAVTYSLGKFGQRALDFYSIHVTKESTHPVKPLAQIAGNRYASGPVGKALSDACMGTIASFLSKYQDIIIEHQKVVKGNQKRLESLRELAGKENLEYPSVTLPPQPHTKEGVDAYNEVIARVRMWVNLNLWQKLKLSRDDAKPLLRLKGFPSFPLVERQANEVDWWDMVCNVKKLINEKKEDGKVFWQNLAGYKRQEALRPYLSSEEDRKKGKKFARYQLGDLLLHLEKKHGEDWGKVYDEAWERIDKKVEGLSKHIKLEEERRSEDAQSKAALTDWLRAKASFVIEGLKEADKDEFCRCELKLQKWYGDLRGKPFAIEAENSILDISGFSKQYNCAFIWQKDGVKKLNLYLIINYFKGGKLRFKKIKPEAFEANRFYTVINKKSGEIVPMEVNFNFDDPNLIILPLAFGKRQGREFIWNDLLSLETGSLKLANGRVIEKTLYNRRTRQDEPALFVALTFERREVLDSSNIKPMSNLIGVDRGENIPAVIALTDPEGCPLSRFKDSLGNPTHILRIGESYKEKQRTIQAKKEVEQRRAGGYSRKYASKAKNLADDMVRNTARDLLYYAVTQDAMLIFENLSRGFGRQGKRTFMAERQYTRMEDWLTAKLAYEGLPSKTYLSKTLAQYTSKTCSNCGFTITSADYDRVLEKLKKTATGWMTTINGKELKVEGQITYYNRYKRQNVVKDLSVELDRLSEESVNNDISSWDKGRSGEALSLLKKRFSHRPVQEKFVCLNCGFETHADEQAALNIARSWLFLRSQEYKKYQTNKTTGNTDKRAFVETWQSFYRKKLKEVWKPAV

SEQ ID NO: 37936 - protein, 978 aa, synthetic construct
  REGION 1..978: note = engineered CasX variant
QEIKRINKIRRRLVKDSNTKKAGKTGPMKTLLVRVMTPDLRERLENLRKKPENIPQPISNTSRANLNKLLTDYTEMKKAILHVYWEEFQKDPVGLMSRVAQPASKKIDQNKLKPEMDEKGNLTTAGFACSQCGQPLFVYKLEQVSEKGKAYTNYFGRCNVAEHEKLILLAQLKPEKDSDEAVTYSLGKFGQRALDFYSIHVTKESTHPVKPLAQIAGNRYASPVGKALSDACMGTIASFLSKYQDIIIEHQKVVKGNQKRLESLRELAGKENLEYPSVTLPPQPHTKEGVDAYNEVIARVRMWVNLNLWQKLKLSRDDAKPLLRLKGFPSFPLVERQANEVDWWDMVCNVKKLINEKKEDGKVFWQNLAGYKRQEALRPYLSSEEDRKKGKKFARYQLGDLLLHLEKKHGEDWGKVYDEAWERIDKKVEGLSKHIKLEEERRSEDAQSKAALTDWLRAKASFVIEGLKEADKDEFCRCELKLQKWYGDLRGKPFAIEAENSILDISGFSKQYNCAFIWQKDGVKKLNLYLIINYFKGGKLRFKKIKPEAFEANRFYTVINKKSGEIVPMEVNFNFDDPNLIILPLAFGKRQGREFIWNDLLSLETGSLKLANGRVIEKTLYNRRTRQDEPALFVALTFERREVLDSSNIKPMSNLIGVDRGENIPAVIALTDPEGCPLSRFKDSLGNPTHILRIGESYKEKQRTIQAKKEVEQRRAGGYSRKYASKAKNLADDMVRNTARDLLYYAVTQDAMLIFENLSRGFGRQGKRTFMAERQYTRMEDWLTAKLAYEGLPSKTYLSKTLAQYTSKTCSNCGFTITSADYDRVLEKLKKTATGWMTTINGKELKVEGQITYYNRYKRQNVVKDLSVELDRLSEESVNNDISSWDKGRSGEALSLLKKRFSHRPVQEKFVCLNCGFETHADEQAALNIARSWLFLRSQEYKKYQTNKTTGNTDKRAFVETWQSFYRKKLKEVWKPAV

SEQ ID NO: 37937 - protein, 979 aa, synthetic construct
  REGION 1..979: note = engineered CasX variant
QEIKRINKIRRRLVKDSNTKKAGKTGPMKTLLVRVMTPDLRERLENLRKKPENIPQPISNTSRANLNKLLTDYTEMKKAILHVYWEEFQVDPVGLMSRVAQPASKKIDQNKLKPEMDEKGNLTTAGFACSQCGQPLFVYKLEQVSEKGKAYTNYFGRCNVAEHEKLILLAQLKPEKDSDEAVTYSLGKFGQRALDFYSIHVTKESTHPVKPLAQIAGNRYASYPVGKALSDACMGTIASFLSKYQDIIIEHQKVVKGNQKRLESLRELAGKENLEYPSVTLPPQPHTKEGVDAYNEVIARVRMWVNLNLWQKLKLSRDDAKPLLRLKGFPSFPLVERQANEVDWWDMVCNVKKLINEKKEDGKVFWQNLAGYKRQEALRPYLSSEEDRKKGKKFARYQLGDLLLHLEKKHGEDWGKVYDEAWERIDKKVEGLSKHIKLEEERRSEDAQSKAALTDWLRAKASFVIEGLKEADKDEFCRCELKLQKWYGDLRGKPFAIEAENSILDISGFSKQYNCAFIWQKDGVKKLNLYLIINYFKGGKLRFKKIKPEAFEANRFYTVINKKSGEIVPMEVNFNFDDPNLIILPLAFGKRQGREFIWNDLLSLETGSLKLANGRVIEKTLYNRRTRQDEPALFVALTFERREVLDSSNIKPMSNLIGVDRGENIPAVIALTDPEGCPLSRFKDSLGNPTHILRIGESYKEKQRTIQAKKEVEQRRAGGYSRKYASKAKNLADDMVRNTARDLLYYAVTQDAMLIFENLSRGFGRQGKRTFMAERQYTRMEDWLTAKLAYEGLPSKTYLSKTLAQYTSKTCSNCGFTITSADYDRVLEKLKKTATGWMTTINGKELKVEGQITYYNRYKRQNVVKDLSVELDRLSEESVNNDISSWTKGRSGEALSLLKKRFSHRPVQEKFVCLNCGFETHADEQAALNIARSWLFLRSQEYKKYQTNKTTGNTDKRAFVETWQSFYRKKLKEVWKPAV

SEQ ID NO: 37938 - protein, 979 aa, synthetic construct
  REGION 1..979: note = engineered CasX variant
QEIKRINKIRRRLVKDSNTKKAGKTGPMKTLLVRVMTPDLRERLENLRKKPENIPQPISNTSRANLNKLLTDYTEMKKAILHVYWEEFQVDPVGLMSRVAQPASKKIDQNKLKPEMDEKGNLTTAGFACSQCGQPLFVYKLEQVSEKGKAYTNYFGRCNVAEHEKLILLAQLKPEKDSDEAVTYSLGKFGQRALDFYSIHVTKESTHPVKPLAQIAGNRYASHPVGKALSDACMGTIASFLSKYQDIIIEHQKVVKGNQKRLESLRELAGKENLEYPSVTLPPQPHTKEGVDAYNEVIARVRMWVNLNLWQKLKLSRDDAKPLLRLKGFPSFPLVERQANEVDWWDMVCNVKKLINEKKEDGKVFWQNLAGYKRQEALRPYLSSEEDRKKGKKFARYQLGDLLLHLEKKHGEDWGKVYDEAWERIDKKVEGLSKHIKLEEERRSEDAQSKAALTDWLRAKASFVIEGLKEADKDEFCRCELKLQKWYGDLRGKPFAIEAENSILDISGFSKQYNCAFIWQKDGVKKLNLYLIINYFKGGKLRFKKIKPEAFEANRFYTVINKKSGEIVPMEVNFNFDDPNLIILPLAFGKRQGREFIWNDLLSLETGSLKLANGRVIEKTLYNRRTRQDEPALFVALTFERREVLDSSNIKPMSNLIGVDRGENIPAVIALTDPEGCPLSRFKDSLGNPTHILRIGESYKEKQRTIQAKKEVEQRRAGGYSRKYASKAKNLADDMVRNTARDLLYYAVTQDAMLIFENLSRGFGRQGKRTFMAERQYTRMEDWLTAKLAYEGLPSKTYLSKTLAQYTSKTCSNCGFTITSADYDRVLEKLKKTATGWMTTINGKELKVEGQITYYNRYKRQNVVKDLSVELDRLSEESVNNDISSWTKGRSGEALSLLKKRFSHRPVQEKFVCLNCGFETHADEQAALNIARSWLFLRSQEYKKYQTNKTTGNTDKRAFVETWQSFYRKKLKEVWKPAV

SEQ ID NO: 37939 - protein, 979 aa, synthetic construct
  REGION 1..979: note = engineered CasX variant
QEIKRINKIRRRLVKDSNTKKAGKTGPMKTLLVRVMTPDLRERLENLRKKPENIPQPISNTSRANLNKLLTDYTEMKKAILHVYWEEFQVDPVGLMSRVAQPASKKIDQNKLKPEMDEKGNLTTAGFACSQCGQPLFVYKLEQVSEKGKAYTNYFGRCNVAEHEKLILLAQLKPEKDSDEAVTYSLGKFGQRALDFYSIHVTKESTHPVKPLAQIAGNRYASSPVGKALSDACMGTIASFLSKYQDIIIEHQKVVKGNQKRLESLRELAGKENLEYPSVTLPPQPHTKEGVDAYNEVIARVRMWVNLNLWQKLKLSRDDAKPLLRLKGFPSFPLVERQANEVDWWDMVCNVKKLINEKKEDGKVFWQNLAGYKRQEALRPYLSSEEDRKKGKKFARYQLGDLLLHLEKKHGEDWGKVYDEAWERIDKKVEGLSKHIKLEEERRSEDAQSKAALTDWLRAKASFVIEGLKEADKDEFCRCELKLQKWYGDLRGKPFAIEAENSILDISGFSKQYNCAFIWQKDGVKKLNLYLIINYFKGGKLRFKKIKPEAFEANRFYTVINKKSGEIVPMEVNFNFDDPNLIILPLAFGKRQGREFIWNDLLSLETGSLKLANGRVIEKTLYNRRTRQDEPALFVALTFERREVLDSSNIKPMSNLIGVDRGENIPAVIALTDPEGCPLSRFKDSLGNPTHILRIGESYKEKQRTIQAKKEVEQRRAGGYSRKYASKAKNLADDMVRNTARDLLYYAVTQDAMLIFENLSRGFGRQGKRTFMAERQYTRMEDWLTAKLAYEGLPSKTYLSKTLAQYTSKTCSNCGFTITSADYDRVLEKLKKTATGWMTTINGKELKVEGQITYYNRYKRQNVVKDLSVELDRLSEESVNNDISSWTKGRSGEALSLLKKRFSHRPVQEKFVCLNCGFETHADEQAALNIARSWLFLRSQEYKKYQTNKTTGNTDKRAFVETWQSFYRKKLKEVWKPAV

SEQ ID NO: 37940 - protein, 979 aa, synthetic construct
  REGION 1..979: note = engineered CasX variant
QEIKRINKIRRRLVKDSNTKKAGKTGPMKTLLVRVMTPDLRERLENLRKKPENIPQPISNTSRANLNKLLTDYTEMKKAILHVYWEEFQVDPVGLMSRVAQPASKKIDQNKLKPEMDEKGNLTTAGFACSQCGQPLFVYKLEQVSEKGKAYTNYFGRCNVAEHEKLILLAQLKPEKDSDEAVTYSLGKFGQRALDFYSIHVTKESTHPVKPLAQIAGNRYASTPVGKALSDACMGTIASFLSKYQDIIIEHQKVVKGNQKRLESLRELAGKENLEYPSVTLPPQPHTKEGVDAYNEVIARVRMWVNLNLWQKLKLSRDDAKPLLRLKGFPSFPLVERQANEVDWWDMVCNVKKLINEKKEDGKVFWQNLAGYKRQEALRPYLSSEEDRKKGKKFARYQLGDLLLHLEKKHGEDWGKVYDEAWERIDKKVEGLSKHIKLEEERRSEDAQSKAALTDWLRAKASFVIEGLKEADKDEFCRCELKLQKWYGDLRGKPFAIEAENSILDISGFSKQYNCAFIWQKDGVKKLNLYLIINYFKGGKLRFKKIKPEAFEANRFYTVINKKSGEIVPMEVNFNFDDPNLIILPLAFGKRQGREFIWNDLLSLETGSLKLANGRVIEKTLYNRRTRQDEPALFVALTFERREVLDSSNIKPMSNLIGVDRGENIPAVIALTDPEGCPLSRFKDSLGNPTHILRIGESYKEKQRTIQAKKEVEQRRAGGYSRKYASKAKNLADDMVRNTARDLLYYAVTQDAMLIFENLSRGFGRQGKRTFMAERQYTRMEDWLTAKLAYEGLPSKTYLSKTLAQYTSKTCSNCGFTITSADYDRVLEKLKKTATGWMTTINGKELKVEGQITYYNRYKRQNVVKDLSVELDRLSEESVNNDISSWTKGRSGEALSLLKKRFSHRPVQEKFVCLNCGFETHADEQAALNIARSWLFLRSQEYKKYQTNKTTGNTDKRAFVETWQSFYRKKLKEVWKPAV

SEQ ID NO: 37941 - protein, 979 aa, synthetic construct
  REGION 1..979: note = engineered CasX variant
QEIKRINKIRRRLVKDSNTKKAGKTGPMKTLLVRVMTPDLRERLENLRKKPENIPQPISNTSRANLNKLLTDYTEMKKAILHVYWEEFQVDPVGLMSRVAQPASKKIDQNKLKPEMDEKGNLTTAGFACSQCGQPLFVYKLEQVSEKGKAYTNYFGRCNVAEHEKLILLAQLKPEKDSDEAVTYSLGKFGQRALDFYSIHVTKESTHPVKPLAQIAGNRYASAPVGKALSDACMGTIASFLSKYQDIIIEHQKVVKGNQKRLESLRELAGKENLEYPSVTLPPQPHTKEGVDAYNEVIARVRMWVNLNLWQKLKLSRDDAKPLLRLKGFPSFPLVERQANEVDWWDMVCNVKKLINEKKEDGKVFWQNLAGYKRQEALRPYLSSEEDRKKGKKFARYQLGDLLLHLEKKHGEDWGKVYDEAWERIDKKVEGLSKHIKLEEERRSEDAQSKAALTDWLRAKASFVIEGLKEADKDEFCRCELKLQKWYGDLRGKPFAIEAENSILDISGFSKQYNCAFIWQKDGVKKLNLYLIINYFKGGKLRFKKIKPEAFEANRFYTVINKKSGEIVPMEVNFNFDDPNLIILPLAFGKRQGREFIWNDLLSLETGSLKLANGRVIEKTLYNRRTRQDEPALFVALTFERREVLDSSNIKPMSNLIGVDRGENIPAVIALTDPEGCPLSRFKDSLGNPTHILRIGESYKEKQRTIQAKKEVEQRRAGGYSRKYASKAKNLADDMVRNTARDLLYYAVTQDAMLIFENLSRGFGRQGKRTFMAERQYTRMEDWLTAKLAYEGLPSKTYLSKTLAQYTSKTCSNCGFTITSADYDRVLEKLKKTATGWMTTINGKELKVEGQITYYNRYKRQNVVKDLSVELDRLSEESVNNDISSWTKGRSGEALSLLKKRFSHRPVQEKFVCLNCGFETHADEQAALNIARSWLFLRSQEYKKYQTNKTTGNTDKRAFVETWQSFYRKKLKEVWKPAV

SEQ ID NO: 37942 - protein, 979 aa, synthetic construct
  REGION 1..979: note = engineered CasX variant
QEIKRINKIRRRLVKDSNTKKAGKTGPMKTLLVRVMTPDLRERLENLRKKPENIPQPISNTSRANLNKLLTDYTEMKKAILHVYWEEFQVDPVGLMSRVAQPASKKIDQNKLKPEMDEKGNLTTAGFACSQCGQPLFVYKLEQVSEKGKAYTNYFGRCNVAEHEKLILLAQLKPEKDSDEAVTYSLGKFGQRALDFYSIHVTKESTHPVKPLAQIAGNRYASVPVGKALSDACMGTIASFLSKYQDIIIEHQKVVKGNQKRLESLRELAGKENLEYPSVTLPPQPHTKEGVDAYNEVIARVRMWVNLNLWQKLKLSRDDAKPLLRLKGFPSFPLVERQANEVDWWDMVCNVKKLINEKKEDGKVFWQNLAGYKRQEALRPYLSSEEDRKKGKKFARYQLGDLLLHLEKKHGEDWGKVYDEAWERIDKKVEGLSKHIKLEEERRSEDAQSKAALTDWLRAKASFVIEGLKEADKDEFCRCELKLQKWYGDLRGKPFAIEAENSILDISGFSKQYNCAFIWQKDGVKKLNLYLIINYFKGGKLRFKKIKPEAFEANRFYTVINKKSGEIVPMEVNFNFDDPNLIILPLAFGKRQGREFIWNDLLSLETGSLKLANGRVIEKTLYNRRTRQDEPALFVALTFERREVLDSSNIKPMSNLIGVDRGENIPAVIALTDPEGCPLSRFKDSLGNPTHILRIGESYKEKQRTIQAKKEVEQRRAGGYSRKYASKAKNLADDMVRNTARDLLYYAVTQDAMLIFENLSRGFGRQGKRTFMAERQYTRMEDWLTAKLAYEGLPSKTYLSKTLAQYTSKTCSNCGFTITSADYDRVLEKLKKTATGWMTTINGKELKVEGQITYYNRYKRQNVVKDLSVELDRLSEESVNNDISSWTKGRSGEALSLLKKRFSHRPVQEKFVCLNCGFETHADEQAALNIARSWLFLRSQEYKKYQTNKTTGNTDKRAFVETWQSFYRKKLKEVWKPAV

SEQ ID NO: 37943 - protein, 979 aa, synthetic construct
  REGION 1..979: note = engineered CasX variant
QEIKRINKIRRRLVKDSNTKKAGKTGPMKTLLVRVMTPDLRERLENLRKKPENIPQPISNTSRANLNKLLTDYTEMKKAILHVYWEEFQVDPVGLMSRVAQPASKKIDQNKLKPEMDEKGNLTTAGFACSQCGQPLFVYKLEQVSEKGKAYTNYFGRCNVAEHEKLIKLAQLKPEKDSDEAVTYSLGKFGQRALDFYSIHVTKESTHPVKPLAQIAGNRYASGPVGKALSDACMGTIASFLSKYQDIIIEHQKVVKGNQKRLESLRELAGKENLEYPSVTLPPQPHTKEGVDAYNEVIARVRMWVNLNLWQKLKLSRDDAKPLLRLKGFPSFPLVERQANEVDWWDMVCNVKKLINEKKEDGKVFWQNLAGYKRQEALRPYLSSEEDRKKGKKFARYQLGDLLLHLEKKHGEDWGKVYDEAWERIDKKVEGLSKHIKLEEERRSEDAQSKAALTDWLRAKASFVIEGLKEADKDEFCRCELKLQKWYGDLRGKPFAIEAENSILDISGFSKQYNCAFIWQKDGVKKLNLYLIINYFKGGKLRFKKIKPEAFEANRFYTVINKKSGEIVPMEVNFNFDDPNLIILPLAFGKRQGREFIWNDLLSLETGSLKLANGRVIEKTLYNRRTRQDEPALFVALTFERREVLDSSNIKPMSNLIGVDRGENIPAVIALTDPEGCPLSRFKDSLGNPTHILRIGESYKEKQRTIQAKKEVEQRRAGGYSRKYASKAKNLADDMVRNTARDLLYYAVTQDAMLIFENLSRGFGRQGKRTFMAERQYTRMEDWLTAKLAYEGLPSKTYLSKTLAQYTSKTCSNCGFTITSADYDRVLEKLKKTATGWMTTINGKELKVEGQITYYNRYKRQNVVKDLSVELDRLSEESVNNDISSWTKGRSGEALSLLKKRFSHRPVQEKFVCLNCGFETHADEQAALNIARSWLFLRSQEYKKYQTNKTTGNTDKRAFVETWQSFYRKKLKEVWKPAV

SEQ ID NO: 37944 - protein, 978 aa, synthetic construct
  REGION 1..978: note = engineered CasX variant
QEIKRINKIRRRLVKDSNTKKAGKTGPMKTLLVRVMTPDLRERLENLRKKPENIPQPISNTSRANLNKLLTDYTEMKKAILHVYWEEFQVDPVGLMSRVAQPASKKIDQNKLKPEMDEKGNLTTAGFACSQCGQPLFVYKLEQVSEKGKAYTNYFGRCNVAEHEKLILLAQLKPEKDSDEAVTYSLGKFGQRALDFYSIHVTKESTHPVKPLAQIAGNRYASPVGKALSDACMGTIASFLSKYQDIIIEHQKVVKGNQKRLESLRELAGKENLEYPSVTLPPQPHTKEGVDAYNEVIARVRMWVNLNLWQKLKLSRDDAKPLLRLKGFPSFPLVERQANEVDWWDMVCNVKKLINEKKEDGKVFWQNLAGYKRQEALRPYLSSEEDRKKGKKFARYQLGDLLLHLEKKHGEDWGKVYDEAWERIDKKVEGLSKHIKLEEERRSEDAQSKAALTDWLRAKASFVIEGLKEADKDEFCRCELKLQKWYGDLRGKPFAIEAENSILDISGFSKQYNCAFIWQKDGVKKLNLYLIINYFKGGKLRFKKIKPEAFEANRFYTVINKKSGEIVPMEVNFNFDDPNLIILPLAFGKRQGREFIWNDLLSLETGSLKLANGRVIEKTLYNRRTRQDEPALFVALTFERREVLDSSNIKPMSNLIGVDRGENIPAVIALTDPEGCPLSRFKDSLGNPTHILRIGESYKEKQRTIQAKKEVEQRRAGGYSRKYASKAKNLADDMVRNTARDLLYYAVTQDAMLIFENLSRGFGRQGKRTFMAERQYTRMEDWLTAKLAYEGLPSKTYLSKTLAQYTSKTCSNCGFTITSADYDRVLEKLKKTATGWMTTINGKELKVEGQITYYNRYKRQNVVKDLSVELDRLSEESVNNDISSWTKGRSGEALSLLKKRFSHRPVQEKFVCLNCGFETHADEQAALNIARSWLFLRSQEYKKYQTNKTTGNTDKRAFVETWQSFYRKKLKEVWKPAV

SEQ ID NO: 37945 - protein, 979 aa, synthetic construct
  REGION 1..979: note = engineered CasX variant
QEIKRLNKIRRRLVKDSNTKKAGKTGPMKTLLVRVMTPDLRERLENLRKKPENIPQPISNTSRANLNKLLTDYTEMKKAILHVYWEEFQKDPVGLMSRVAQPASKKIDQNKLKPEMDEKGNLTTAGFACSQCGQPLFVYKLEQVSEKGKAYTNYFGRCNVAEHEKLILLAQLKPEKDSDEAVTYSLGKFGQRALDFYSIHVTKESTHPVKPLAQIAGNRYASYPVGKALSDACMGTIASFLSKYQDIIIEHQKVVKGNQKRLESLRELAGKENLEYPSVTLPPQPHTKEGVDAYNEVIARVRMWVNLNLWQKLKLSRDDAKPLLRLKGFPSFPLVERQANEVDWWDMVCNVKKLINEKKEDGKVFWQNLAGYKRQEALRPYLSSEEDRKKGKKFARYQLGDLLLHLEKKHGEDWGKVYDEAWERIDKKVEGLSKHIKLEEERRSEDAQSKAALTDWLRAKASFVIEGLKEADKDEFCRCELKLQKWYGDLRGKPFAIEAENSILDISGFSKQYNCAFIWQKDGVKKLNLYLIINYFKGGKLRFKKIKPEAFEANRFYTVINKKSGEIVPMEVNFNFDDPNLIILPLAFGKRQGREFIWNDLLSLETGSLKLANGRVIEKTLYNRRTRQDEPALFVALTFERREVLDSSNIKPMSNLIGVDRGENIPAVIALTDPEGCPLSRFKDSLGNPTHILRIGESYKEKQRTIQAKKEVEQRRAGGYSRKYASKAKNLADDMVRNTARDLLYYAVTQDAMLIFENLSRGFGRQGKRTFMAERQYTRMEDWLTAKLAYEGLPSKTYLSKTLAQYTSKTCSNCGFTITSADYDRVLEKLKKTATGWMTTINGKELKVEGQITYYNRYKRQNVVKDLSVELDRLSEESVNNDISSWTKGRSGEALSLLKKRFSHRPVQEKFVCLNCGFETHADEQAALNIARSWLFLRSQEYKKYQTNKTTGNTDKRAFVETWQSFYRKKLKEVWKPAV

SEQ ID NO: 37946 - protein, 979 aa, synthetic construct
  REGION 1..979: note = engineered CasX variant
QEIKRLNKIRRRLVKDSNTKKAGKTGPMKTLLVRVMTPDLRERLENLRKKPENIPQPISNTSRANLNKLLTDYTEMKKAILHVYWEEFQKDPVGLMSRVAQPASKKIDQNKLKPEMDEKGNLTTAGFACSQCGQPLFVYKLEQVSEKGKAYTNYFGRCNVAEHEKLILLAQLKPEKDSDEAVTYSLGKFGQRALDFYSIHVTKESTHPVKPLAQIAGNRYASHPVGKALSDACMGTIASFLSKYQDIIIEHQKVVKGNQKRLESLRELAGKENLEYPSVTLPPQPHTKEGVDAYNEVIARVRMWVNLNLWQKLKLSRDDAKPLLRLKGFPSFPLVERQANEVDWWDMVCNVKKLINEKKEDGKVFWQNLAGYKRQEALRPYLSSEEDRKKGKKFARYQLGDLLLHLEKKHGEDWGKVYDEAWERIDKKVEGLSKHIKLEEERRSEDAQSKAALTDWLRAKASFVIEGLKEADKDEFCRCELKLQKWYGDLRGKPFAIEAENSILDISGFSKQYNCAFIWQKDGVKKLNLYLIINYFKGGKLRFKKIKPEAFEANRFYTVINKKSGEIVPMEVNFNFDDPNLIILPLAFGKRQGREFIWNDLLSLETGSLKLANGRVIEKTLYNRRTRQDEPALFVALTFERREVLDSSNIKPMSNLIGVDRGENIPAVIALTDPEGCPLSRFKDSLGNPTHILRIGESYKEKQRTIQAKKEVEQRRAGGYSRKYASKAKNLADDMVRNTARDLLYYAVTQDAMLIFENLSRGFGRQGKRTFMAERQYTRMEDWLTAKLAYEGLPSKTYLSKTLAQYTSKTCSNCGFTITSADYDRVLEKLKKTATGWMTTINGKELKVEGQITYYNRYKRQNVVKDLSVELDRLSEESVNNDISSWTKGRSGEALSLLKKRFSHRPVQEKFVCLNCGFETHADEQAALNIARSWLFLRSQEYKKYQTNKTTGNTDKRAFVETWQSFYRKKLKEVWKPAV

SEQ ID NO: 37947 - protein, 979 aa, synthetic construct
  REGION 1..979: note = engineered CasX variant
QEIKRLNKIRRRLVKDSNTKKAGKTGPMKTLLVRVMTPDLRERLENLRKKPENIPQPISNTSRANLNKLLTDYTEMKKAILHVYWEEFQKDPVGLMSRVAQPASKKIDQNKLKPEMDEKGNLTTAGFACSQCGQPLFVYKLEQVSEKGKAYTNYFGRCNVAEHEKLILLAQLKPEKDSDEAVTYSLGKFGQRALDFYSIHVTKESTHPVKPLAQIAGNRYASSPVGKALSDACMGTIASFLSKYQDIIIEHQKVVKGNQKRLESLRELAGKENLEYPSVTLPPQPHTKEGVDAYNEVIARVRMWVNLNLWQKLKLSRDDAKPLLRLKGFPSFPLVERQANEVDWWDMVCNVKKLINEKKEDGKVFWQNLAGYKRQEALRPYLSSEEDRKKGKKFARYQLGDLLLHLEKKHGEDWGKVYDEAWERIDKKVEGLSKHIKLEEERRSEDAQSKAALTDWLRAKASFVIEGLKEADKDEFCRCELKLQKWYGDLRGKPFAIEAENSILDISGFSKQYNCAFIWQKDGVKKLNLYLIINYFKGGKLRFKKIKPEAFEANRFYTVINKKSGEIVPMEVNFNFDDPNLIILPLAFGKRQGREFIWNDLLSLETGSLKLANGRVIEKTLYNRRTRQDEPALFVALTFERREVLDSSNIKPMSNLIGVDRGENIPAVIALTDPEGCPLSRFKDSLGNPTHILRIGESYKEKQRTIQAKKEVEQRRAGGYSRKYASKAKNLADDMVRNTARDLLYYAVTQDAMLIFENLSRGFGRQGKRTFMAERQYTRMEDWLTAKLAYEGLPSKTYLSKTLAQYTSKTCSNCGFTITSADYDRVLEKLKKTATGWMTTINGKELKVEGQITYYNRYKRQNVVKDLSVELDRLSEESVNNDISSWTKGRSGEALSLLKKRFSHRPVQEKFVCLNCGFETHADEQAALNIARSWLFLRSQEYKKYQTNKTTGNTDKRAFVETWQSFYRKKLKEVWKPAV

SEQ ID NO: 37948 - protein, 979 aa, synthetic construct
  REGION 1..979: note = engineered CasX variant
QEIKRLNKIRRRLVKDSNTKKAGKTGPMKTLLVRVMTPDLRERLENLRKKPENIPQPISNTSRANLNKLLTDYTEMKKAILHVYWEEFQKDPVGLMSRVAQPASKKIDQNKLKPEMDEKGNLTTAGFACSQCGQPLFVYKLEQVSEKGKAYTNYFGRCNVAEHEKLILLAQLKPEKDSDEAVTYSLGKFGQRALDFYSIHVTKESTHPVKPLAQIAGNRYASTPVGKALSDACMGTIASFLSKYQDIIIEHQKVVKGNQKRLESLRELAGKENLEYPSVTLPPQPHTKEGVDAYNEVIARVRMWVNLNLWQKLKLSRDDAKPLLRLKGFPSFPLVERQANEVDWWDMVCNVKKLINEKKEDGKVFWQNLAGYKRQEALRPYLSSEEDRKKGKKFARYQLGDLLLHLEKKHGEDWGKVYDEAWERIDKKVEGLSKHIKLEEERRSEDAQSKAALTDWLRAKASFVIEGLKEADKDEFCRCELKLQKWYGDLRGKPFAIEAENSILDISGFSKQYNCAFIWQKDGVKKLNLYLIINYFKGGKLRFKKIKPEAFEANRFYTVINKKSGEIVPMEVNFNFDDPNLIILPLAFGKRQGREFIWNDLLSLETGSLKLANGRVIEKTLYNRRTRQDEPALFVALTFERREVLDSSNIKPMSNLIGVDRGENIPAVIALTDPEGCPLSRFKDSLGNPTHILRIGESYKEKQRTIQAKKEVEQRRAGGYSRKYASKAKNLADDMVRNTARDLLYYAVTQDAMLIFENLSRGFGRQGKRTFMAERQYTRMEDWLTAKLAYEGLPSKTYLSKTLAQYTSKTCSNCGFTITSADYDRVLEKLKKTATGWMTTINGKELKVEGQITYYNRYKRQNVVKDLSVELDRLSEESVNNDISSWTKGRSGEALSLLKKRFSHRPVQEKFVCLNCGFETHADEQAALNIARSWLFLRSQEYKKYQTNKTTGNTDKRAFVETWQSFYRKKLKEVWKPAV

SEQ ID NO: 37949 - protein, 979 aa, synthetic construct
  REGION 1..979: note = engineered CasX variant
QEIKRLNKIRRRLVKDSNTKKAGKTGPMKTLLVRVMTPDLRERLENLRKKPENIPQPISNTSRANLNKLLTDYTEMKKAILHVYWEEFQKDPVGLMSRVAQPASKKIDQNKLKPEMDEKGNLTTAGFACSQCGQPLFVYKLEQVSEKGKAYTNYFGRCNVAEHEKLILLAQLKPEKDSDEAVTYSLGKFGQRALDFYSIHVTKESTHPVKPLAQIAGNRYASAPVGKALSDACMGTIASFLSKYQDIIIEHQKVVKGNQKRLESLRELAGKENLEYPSVTLPPQPHTKEGVDAYNEVIARVRMWVNLNLWQKLKLSRDDAKPLLRLKGFPSFPLVERQANEVDWWDMVCNVKKLINEKKEDGKVFWQNLAGYKRQEALRPYLSSEEDRKKGKKFARYQLGDLLLHLEKKHGEDWGKVYDEAWERIDKKVEGLSKHIKLEEERRSEDAQSKAALTDWLRAKASFVIEGLKEADKDEFCRCELKLQKWYGDLRGKPFAIEAENSILDISGFSKQYNCAFIWQKDGVKKLNLYLIINYFKGGKLRFKKIKPEAFEANRFYTVINKKSGEIVPMEVNFNFDDPNLIILPLAFGKRQGREFIWNDLLSLETGSLKLANGRVIEKTLYNRRTRQDEPALFVALTFERREVLDSSNIKPMSNLIGVDRGENIPAVIALTDPEGCPLSRFKDSLGNPTHILRIGESYKEKQRTIQAKKEVEQRRAGGYSRKYASKAKNLADDMVRNTARDLLYYAVTQDAMLIFENLSRGFGRQGKRTFMAERQYTRMEDWLTAKLAYEGLPSKTYLSKTLAQYTSKTCSNCGFTITSADYDRVLEKLKKTATGWMTTINGKELKVEGQITYYNRYKRQNVVKDLSVELDRLSEESVNNDISSWTKGRSGEALSLLKKRFSHRPVQEKFVCLNCGFETHADEQAALNIARSWLFLRSQEYKKYQTNKTTGNTDKRAFVETWQSFYRKKLKEVWKPAV

SEQ ID NO: 37950 - protein, 979 aa, synthetic construct
  REGION 1..979: note = engineered CasX variant
QEIKRLNKIRRRLVKDSNTKKAGKTGPMKTLLVRVMTPDLRERLENLRKKPENIPQPISNTSRANLNKLLTDYTEMKKAILHVYWEEFQKDPVGLMSRVAQPASKKIDQNKLKPEMDEKGNLTTAGFACSQCGQPLFVYKLEQVSEKGKAYTNYFGRCNVAEHEKLILLAQLKPEKDSDEAVTYSLGKFGQRALDFYSIHVTKESTHPVKPLAQIAGNRYASVPVGKALSDACMGTIASFLSKYQDIIIEHQKVVKGNQKRLESLRELAGKENLEYPSVTLPPQPHTKEGVDAYNEVIARVRMWVNLNLWQKLKLSRDDAKPLLRLKGFPSFPLVERQANEVDWWDMVCNVKKLINEKKEDGKVFWQNLAGYKRQEALRPYLSSEEDRKKGKKFARYQLGDLLLHLEKKHGEDWGKVYDEAWERIDKKVEGLSKHIKLEEERRSEDAQSKAALTDWLRAKASFVIEGLKEADKDEFCRCELKLQKWYGDLRGKPFAIEAENSILDISGFSKQYNCAFIWQKDGVKKLNLYLIINYFKGGKLRFKKIKPEAFEANRFYTVINKKSGEIVPMEVNFNFDDPNLIILPLAFGKRQGREFIWNDLLSLETGSLKLANGRVIEKTLYNRRTRQDEPALFVALTFERREVLDSSNIKPMSNLIGVDRGENIPAVIALTDPEGCPLSRFKDSLGNPTHILRIGESYKEKQRTIQAKKEVEQRRAGGYSRKYASKAKNLADDMVRNTARDLLYYAVTQDAMLIFENLSRGFGRQGKRTFMAERQYTRMEDWLTAKLAYEGLPSKTYLSKTLAQYTSKTCSNCGFTITSADYDRVLEKLKKTATGWMTTINGKELKVEGQITYYNRYKRQNVVKDLSVELDRLSEESVNNDISSWTKGRSGEALSLLKKRFSHRPVQEKFVCLNCGFETHADEQAALNIARSWLFLRSQEYKKYQTNKTTGNTDKRAFVETWQSFYRKKLKEVWKPAV

SEQ ID NO: 37951 - protein, 979 aa, synthetic construct
  REGION 1..979: note = engineered CasX variant
QEIKRLNKIRRRLVKDSNTKKAGKTGPMKTLLVRVMTPDLRERLENLRKKPENIPQPISNTSRANLNKLLTDYTEMKKAILHVYWEEFQKDPVGLMSRVAQPASKKIDQNKLKPEMDEKGNLTTAGFACSQCGQPLFVYKLEQVSEKGKAYTNYFGRCNVAEHEKLIKLAQLKPEKDSDEAVTYSLGKFGQRALDFYSIHVTKESTHPVKPLAQIAGNRYASGPVGKALSDACMGTIASFLSKYQDIIIEHQKVVKGNQKRLESLRELAGKENLEYPSVTLPPQPHTKEGVDAYNEVIARVRMWVNLNLWQKLKLSRDDAKPLLRLKGFPSFPLVERQANEVDWWDMVCNVKKLINEKKEDGKVFWQNLAGYKRQEALRPYLSSEEDRKKGKKFARYQLGDLLLHLEKKHGEDWGKVYDEAWERIDKKVEGLSKHIKLEEERRSEDAQSKAALTDWLRAKASFVIEGLKEADKDEFCRCELKLQKWYGDLRGKPFAIEAENSILDISGFSKQYNCAFIWQKDGVKKLNLYLIINYFKGGKLRFKKIKPEAFEANRFYTVINKKSGEIVPMEVNFNFDDPNLIILPLAFGKRQGREFIWNDLLSLETGSLKLANGRVIEKTLYNRRTRQDEPALFVALTFERREVLDSSNIKPMSNLIGVDRGENIPAVIALTDPEGCPLSRFKDSLGNPTHILRIGESYKEKQRTIQAKKEVEQRRAGGYSRKYASKAKNLADDMVRNTARDLLYYAVTQDAMLIFENLSRGFGRQGKRTFMAERQYTRMEDWLTAKLAYEGLPSKTYLSKTLAQYTSKTCSNCGFTITSADYDRVLEKLKKTATGWMTTINGKELKVEGQITYYNRYKRQNVVKDLSVELDRLSEESVNNDISSWTKGRSGEALSLLKKRFSHRPVQEKFVCLNCGFETHADEQAALNIARSWLFLRSQEYKKYQTNKTTGNTDKRAFVETWQSFYRKKLKEVWKPAV

SEQ ID NO: 37952 - protein, 978 aa, synthetic construct
  REGION 1..978: note = engineered CasX variant
QEIKRLNKIRRRLVKDSNTKKAGKTGPMKTLLVRVMTPDLRERLENLRKKPENIPQPISNTSRANLNKLLTDYTEMKKAILHVYWEEFQKDPVGLMSRVAQPASKKIDQNKLKPEMDEKGNLTTAGFACSQCGQPLFVYKLEQVSEKGKAYTNYFGRCNVAEHEKLILLAQLKPEKDSDEAVTYSLGKFGQRALDFYSIHVTKESTHPVKPLAQIAGNRYASPVGKALSDACMGTIASFLSKYQDIIIEHQKVVKGNQKRLESLRELAGKENLEYPSVTLPPQPHTKEGVDAYNEVIARVRMWVNLNLWQKLKLSRDDAKPLLRLKGFPSFPLVERQANEVDWWDMVCNVKKLINEKKEDGKVFWQNLAGYKRQEALRPYLSSEEDRKKGKKFARYQLGDLLLHLEKKHGEDWGKVYDEAWERIDKKVEGLSKHIKLEEERRSEDAQSKAALTDWLRAKASFVIEGLKEADKDEFCRCELKLQKWYGDLRGKPFAIEAENSILDISGFSKQYNCAFIWQKDGVKKLNLYLIINYFKGGKLRFKKIKPEAFEANRFYTVINKKSGEIVPMEVNFNFDDPNLIILPLAFGKRQGREFIWNDLLSLETGSLKLANGRVIEKTLYNRRTRQDEPALFVALTFERREVLDSSNIKPMSNLIGVDRGENIPAVIALTDPEGCPLSRFKDSLGNPTHILRIGESYKEKQRTIQAKKEVEQRRAGGYSRKYASKAKNLADDMVRNTARDLLYYAVTQDAMLIFENLSRGFGRQGKRTFMAERQYTRMEDWLTAKLAYEGLPSKTYLSKTLAQYTSKTCSNCGFTITSADYDRVLEKLKKTATGWMTTINGKELKVEGQITYYNRYKRQNVVKDLSVELDRLSEESVNNDISSWTKGRSGEALSLLKKRFSHRPVQEKFVCLNCGFETHADEQAALNIARSWLFLRSQEYKKYQTNKTTGNTDKRAFVETWQSFYRKKLKEVWKPAV

SEQ ID NO: 37953 - protein, 979 aa, synthetic construct
  REGION 1..979: note = engineered CasX variant
QEIKRINKIRRRLVKDSNTKKAGKTGPMKTLLVRVMTPDLRERLENLRKKPENIPQPISNTSRANLNKLLTDYTEMKKAILHVYWEEFQKDPVGLMSRVAQPASKKIDQNKLKPEMDEKGNLTTAGFACSQCGQPLFVYKLEQVSEKGKAYTNYVGRCNVAEHEKLILLAQLKPEKDSDEAVTYSLGKFGQRALDFYSIHVTKESTHPVKPLAQIAGNRYASYPVGKALSDACMGTIASFLSKYQDIIIEHQKVVKGNQKRLESLRELAGKENLEYPSVTLPPQPHTKEGVDAYNEVIARVRMWVNLNLWQKLKLSRDDAKPLLRLKGFPSFPLVERQANEVDWWDMVCNVKKLINEKKEDGKVFWQNLAGYKRQEALRPYLSSEEDRKKGKKFARYQLGDLLLHLEKKHGEDWGKVYDEAWERIDKKVEGLSKHIKLEEERRSEDAQSKAALTDWLRAKASFVIEGLKEADKDEFCRCELKLQKWYGDLRGKPFAIEAENSILDISGFSKQYNCAFIWQKDGVKKLNLYLIINYFKGGKLRFKKIKPEAFEANRFYTVINKKSGEIVPMEVNFNFDDPNLIILPLAFGKRQGREFIWNDLLSLETGSLKLANGRVIEKTLYNRRTRQDEPALFVALTFERREVLDSSNIKPMSNLIGVDRGENIPAVIALTDPEGCPLSRFKDSLGNPTHILRIGESYKEKQRTIQAKKEVEQRRAGGYSRKYASKAKNLADDMVRNTARDLLYYAVTQDAMLIFENLSRGFGRQGKRTFMAERQYTRMEDWLTAKLAYEGLPSKTYLSKTLAQYTSKTCSNCGFTITSADYDRVLEKLKKTATGWMTTINGKELKVEGQITYYNRYKRQNVVKDLSVELDRLSEESVNNDISSWTKGRSGEALSLLKKRFSHRPVQEKFVCLNCGFETHADEQAALNIARSWLFLRSQEYKKYQTNKTTGNTDKRAFVETWQSFYRKKLKEVWKPAV

SEQ ID NO: 37954 - protein, 979 aa, synthetic construct
  REGION 1..979: note = engineered CasX variant
QEIKRINKIRRRLVKDSNTKKAGKTGPMKTLLVRVMTPDLRERLENLRKKPENIPQPISNTSRANLNKLLTDYTEMKKAILHVYWEEFQKDPVGLMSRVAQPASKKIDQNKLKPEMDEKGNLTTAGFACSQCGQPLFVYKLEQVSEKGKAYTNYVGRCNVAEHEKLILLAQLKPEKDSDEAVTYSLGKFGQRALDFYSIHVTKESTHPVKPLAQIAGNRYASHPVGKALSDACMGTIASFLSKYQDIIIEHQKVVKGNQKRLESLRELAGKENLEYPSVTLPPQPHTKEGVDAYNEVIARVRMWVNLNLWQKLKLSRDDAKPLLRLKGFPSFPLVERQANEVDWWDMVCNVKKLINEKKEDGKVFWQNLAGYKRQEALRPYLSSEEDRKKGKKFARYQLGDLLLHLEKKHGEDWGKVYDEAWERIDKKVEGLSKHIKLEEERRSEDAQSKAALTDWLRAKASFVIEGLKEADKDEFCRCELKLQKWYGDLRGKPFAIEAENSILDISGFSKQYNCAFIWQKDGVKKLNLYLIINYFKGGKLRFKKIKPEAFEANRFYTVINKKSGEIVPMEVNFNFDDPNLIILPLAFGKRQGREFIWNDLLSLETGSLKLANGRVIEKTLYNRRTRQDEPALFVALTFERREVLDSSNIKPMSNLIGVDRGENIPAVIALTDPEGCPLSRFKDSLGNPTHILRIGESYKEKQRTIQAKKEVEQRRAGGYSRKYASKAKNLADDMVRNTARDLLYYAVTQDAMLIFENLSRGFGRQGKRTFMAERQYTRMEDWLTAKLAYEGLPSKTYLSKTLAQYTSKTCSNCGFTITSADYDRVLEKLKKTATGWMTTINGKELKVEGQITYYNRYKRQNVVKDLSVELDRLSEESVNNDISSWTKGRSGEALSLLKKRFSHRPVQEKFVCLNCGFETHADEQAALNIARSWLFLRSQEYKKYQTNKTTGNTDKRAFVETWQSFYRKKLKEVWKPAV

SEQ ID NO: 37955 - protein, 979 aa, synthetic construct
  REGION 1..979: note = engineered CasX variant
QEIKRINKIRRRLVKDSNTKKAGKTGPMKTLLVRVMTPDLRERLENLRKKPENIPQPISNTSRANLNKLLTDYTEMKKAILHVYWEEFQKDPVGLMSRVAQPASKKIDQNKLKPEMDEKGNLTTAGFACSQCGQPLFVYKLEQVSEKGKAYTNYVGRCNVAEHEKLILLAQLKPEKDSDEAVTYSLGKFGQRALDFYSIHVTKESTHPVKPLAQIAGNRYASSPVGKALSDACMGTIASFLSKYQDIIIEHQKVVKGNQKRLESLRELAGKENLEYPSVTLPPQPHTKEGVDAYNEVIARVRMWVNLNLWQKLKLSRDDAKPLLRLKGFPSFPLVERQANEVDWWDMVCNVKKLINEKKEDGKVFWQNLAGYKRQEALRPYLSSEEDRKKGKKFARYQLGDLLLHLEKKHGEDWGKVYDEAWERIDKKVEGLSKHIKLEEERRSEDAQSKAALTDWLRAKASFVIEGLKEADKDEFCRCELKLQKWYGDLRGKPFAIEAENSILDISGFSKQYNCAFIWQKDGVKKLNLYLIINYFKGGKLRFKKIKPEAFEANRFYTVINKKSGEIVPMEVNFNFDDPNLIILPLAFGKRQGREFIWNDLLSLETGSLKLANGRVIEKTLYNRRTRQDEPALFVALTFERREVLDSSNIKPMSNLIGVDRGENIPAVIALTDPEGCPLSRFKDSLGNPTHILRIGESYKEKQRTIQAKKEVEQRRAGGYSRKYASKAKNLADDMVRNTARDLLYYAVTQDAMLIFENLSRGFGRQGKRTFMAERQYTRMEDWLTAKLAYEGLPSKTYLSKTLAQYTSKTCSNCGFTITSADYDRVLEKLKKTATGWMTTINGKELKVEGQITYYNRYKRQNVVKDLSVELDRLSEESVNNDISSWTKGRSGEALSLLKKRFSHRPVQEKFVCLNCGFETHADEQAALNIARSWLFLRSQEYKKYQTNKTTGNTDKRAFVETWQSFYRKKLKEVWKPAV

SEQ ID NO: 37956 - protein, 979 aa, synthetic construct
  REGION 1..979: note = engineered CasX variant
QEIKRINKIRRRLVKDSNTKKAGKTGPMKTLLVRVMTPDLRERLENLRKKPENIPQPISNTSRANLNKLLTDYTEMKKAILHVYWEEFQKDPVGLMSRVAQPASKKIDQNKLKPEMDEKGNLTTAGFACSQCGQPLFVYKLEQVSEKGKAYTNYVGRCNVAEHEKLILLAQLKPEKDSDEAVTYSLGKFGQRALDFYSIHVTKESTHPVKPLAQIAGNRYASTPVGKALSDACMGTIASFLSKYQDIIIEHQKVVKGNQKRLESLRELAGKENLEYPSVTLPPQPHTKEGVDAYNEVIARVRMWVNLNLWQKLKLSRDDAKPLLRLKGFPSFPLVERQANEVDWWDMVCNVKKLINEKKEDGKVFWQNLAGYKRQEALRPYLSSEEDRKKGKKFARYQLGDLLLHLEKKHGEDWGKVYDEAWERIDKKVEGLSKHIKLEEERRSEDAQSKAALTDWLRAKASFVIEGLKEADKDEFCRCELKLQKWYGDLRGKPFAIEAENSILDISGFSKQYNCAFIWQKDGVKKLNLYLIINYFKGGKLRFKKIKPEAFEANRFYTVINKKSGEIVPMEVNFNFDDPNLIILPLAFGKRQGREFIWNDLLSLETGSLKLANGRVIEKTLYNRRTRQDEPALFVALTFERREVLDSSNIKPMSNLIGVDRGENIPAVIALTDPEGCPLSRFKDSLGNPTHILRIGESYKEKQRTIQAKKEVEQRRAGGYSRKYASKAKNLADDMVRNTARDLLYYAVTQDAMLIFENLSRGFGRQGKRTFMAERQYTRMEDWLTAKLAYEGLPSKTYLSKTLAQYTSKTCSNCGFTITSADYDRVLEKLKKTATGWMTTINGKELKVEGQITYYNRYKRQNVVKDLSVELDRLSEESVNNDISSWTKGRSGEALSLLKKRFSHRPVQEKFVCLNCGFETHADEQAALNIARSWLFLRSQEYKKYQTNKTTGNTDKRAFVETWQSFYRKKLKEVWKPAV

SEQ ID NO: 37957 - protein, 979 aa, synthetic construct
  REGION 1..979: note = engineered CasX variant
QEIKRINKIRRRLVKDSNTKKAGKTGPMKTLLVRVMTPDLRERLENLRKKPENIPQPISNTSRANLNKLLTDYTEMKKAILHVYWEEFQKDPVGLMSRVAQPASKKIDQNKLKPEMDEKGNLTTAGFACSQCGQPLFVYKLEQVSEKGKAYTNYVGRCNVAEHEKLILLAQLKPEKDSDEAVTYSLGKFGQRALDFYSIHVTKESTHPVKPLAQIAGNRYASAPVGKALSDACMGTIASFLSKYQDIIIEHQKVVKGNQKRLESLRELAGKENLEYPSVTLPPQPHTKEGVDAYNEVIARVRMWVNLNLWQKLKLSRDDAKPLLRLKGFPSFPLVERQANEVDWWDMVCNVKKLINEKKEDGKVFWQNLAGYKRQEALRPYLSSEEDRKKGKKFARYQLGDLLLHLEKKHGEDWGKVYDEAWERIDKKVEGLSKHIKLEEERRSEDAQSKAALTDWLRAKASFVIEGLKEADKDEFCRCELKLQKWYGDLRGKPFAIEAENSILDISGFSKQYNCAFIWQKDGVKKLNLYLIINYFKGGKLRFKKIKPEAFEANRFYTVINKKSGEIVPMEVNFNFDDPNLIILPLAFGKRQGREFIWNDLLSLETGSLKLANGRVIEKTLYNRRTRQDEPALFVALTFERREVLDSSNIKPMSNLIGVDRGENIPAVIALTDPEGCPLSRFKDSLGNPTHILRIGESYKEKQRTIQAKKEVEQRRAGGYSRKYASKAKNLADDMVRNTARDLLYYAVTQDAMLIFENLSRGFGRQGKRTFMAERQYTRMEDWLTAKLAYEGLPSKTYLSKTLAQYTSKTCSNCGFTITSADYDRVLEKLKKTATGWMTTINGKELKVEGQITYYNRYKRQNVVKDLSVELDRLSEESVNNDISSWTKGRSGEALSLLKKRFSHRPVQEKFVCLNCGFETHADEQAALNIARSWLFLRSQEYKKYQTNKTTGNTDKRAFVETWQSFYRKKLKEVWKPAV

SEQ ID NO: 37958 - protein, 979 aa, synthetic construct
  REGION 1..979: note = engineered CasX variant
QEIKRINKIRRRLVKDSNTKKAGKTGPMKTLLVRVMTPDLRERLENLRKKPENIPQPISNTSRANLNKLLTDYTEMKKAILHVYWEEFQKDPVGLMSRVAQPASKKIDQNKLKPEMDEKGNLTTAGFACSQCGQPLFVYKLEQVSEKGKAYTNYVGRCNVAEHEKLILLAQLKPEKDSDEAVTYSLGKFGQRALDFYSIHVTKESTHPVKPLAQIAGNRYASVPVGKALSDACMGTIASFLSKYQDIIIEHQKVVKGNQKRLESLRELAGKENLEYPSVTLPPQPHTKEGVDAYNEVIARVRMWVNLNLWQKLKLSRDDAKPLLRLKGFPSFPLVERQANEVDWWDMVCNVKKLINEKKEDGKVFWQNLAGYKRQEALRPYLSSEEDRKKGKKFARYQLGDLLLHLEKKHGEDWGKVYDEAWERIDKKVEGLSKHIKLEEERRSEDAQSKAALTDWLRAKASFVIEGLKEADKDEFCRCELKLQKWYGDLRGKPFAIEAENSILDISGFSKQYNCAFIWQKDGVKKLNLYLIINYFKGGKLRFKKIKPEAFEANRFYTVINKKSGEIVPMEVNFNFDDPNLIILPLAFGKRQGREFIWNDLLSLETGSLKLANGRVIEKTLYNRRTRQDEPALFVALTFERREVLDSSNIKPMSNLIGVDRGENIPAVIALTDPEGCPLSRFKDSLGNPTHILRIGESYKEKQRTIQAKKEVEQRRAGGYSRKYASKAKNLADDMVRNTARDLLYYAVTQDAMLIFENLSRGFGRQGKRTFMAERQYTRMEDWLTAKLAYEGLPSKTYLSKTLAQYTSKTCSNCGFTITSADYDRVLEKLKKTATGWMTTINGKELKVEGQITYYNRYKRQNVVKDLSVELDRLSEESVNNDISSWTKGRSGEALSLLKKRFSHRPVQEKFVCLNCGFETHADEQAALNIARSWLFLRSQEYKKYQTNKTTGNTDKRAFVETWQSFYRKKLKEVWKPAV

SEQ ID NO: 37959 - protein, 979 aa, synthetic construct
  REGION 1..979: note = engineered CasX variant
QEIKRINKIRRRLVKDSNTKKAGKTGPMKTLLVRVMTPDLRERLENLRKKPENIPQPISNTSRANLNKLLTDYTEMKKAILHVYWEEFQKDPVGLMSRVAQPASKKIDQNKLKPEMDEKGNLTTAGFACSQCGQPLFVYKLEQVSEKGKAYTNYVGRCNVAEHEKLIKLAQLKPEKDSDEAVTYSLGKFGQRALDFYSIHVTKESTHPVKPLAQIAGNRYASGPVGKALSDACMGTIASFLSKYQDIIIEHQKVVKGNQKRLESLRELAGKENLEYPSVTLPPQPHTKEGVDAYNEVIARVRMWVNLNLWQKLKLSRDDAKPLLRLKGFPSFPLVERQANEVDWWDMVCNVKKLINEKKEDGKVFWQNLAGYKRQEALRPYLSSEEDRKKGKKFARYQLGDLLLHLEKKHGEDWGKVYDEAWERIDKKVEGLSKHIKLEEERRSEDAQSKAALTDWLRAKASFVIEGLKEADKDEFCRCELKLQKWYGDLRGKPFAIEAENSILDISGFSKQYNCAFIWQKDGVKKLNLYLIINYFKGGKLRFKKIKPEAFEANRFYTVINKKSGEIVPMEVNFNFDDPNLIILPLAFGKRQGREFIWNDLLSLETGSLKLANGRVIEKTLYNRRTRQDEPALFVALTFERREVLDSSNIKPMSNLIGVDRGENIPAVIALTDPEGCPLSRFKDSLGNPTHILRIGESYKEKQRTIQAKKEVEQRRAGGYSRKYASKAKNLADDMVRNTARDLLYYAVTQDAMLIFENLSRGFGRQGKRTFMAERQYTRMEDWLTAKLAYEGLPSKTYLSKTLAQYTSKTCSNCGFTITSADYDRVLEKLKKTATGWMTTINGKELKVEGQITYYNRYKRQNVVKDLSVELDRLSEESVNNDISSWTKGRSGEALSLLKKRFSHRPVQEKFVCLNCGFETHADEQAALNIARSWLFLRSQEYKKYQTNKTTGNTDKRAFVETWQSFYRKKLKEVWKPAV

SEQ ID NO: 37960 - protein, 978 aa, synthetic construct
  REGION 1..978: note = engineered CasX variant
QEIKRINKIRRRLVKDSNTKKAGKTGPMKTLLVRVMTPDLRERLENLRKKPENIPQPISNTSRANLNKLLTDYTEMKKAILHVYWEEFQKDPVGLMSRVAQPASKKIDQNKLKPEMDEKGNLTTAGFACSQCGQPLFVYKLEQVSEKGKAYTNYVGRCNVAEHEKLILLAQLKPEKDSDEAVTYSLGKFGQRALDFYSIHVTKESTHPVKPLAQIAGNRYASPVGKALSDACMGTIASFLSKYQDIIIEHQKVVKGNQKRLESLRELAGKENLEYPSVTLPPQPHTKEGVDAYNEVIARVRMWVNLNLWQKLKLSRDDAKPLLRLKGFPSFPLVERQANEVDWWDMVCNVKKLINEKKEDGKVFWQNLAGYKRQEALRPYLSSEEDRKKGKKFARYQLGDLLLHLEKKHGEDWGKVYDEAWERIDKKVEGLSKHIKLEEERRSEDAQSKAALTDWLRAKASFVIEGLKEADKDEFCRCELKLQKWYGDLRGKPFAIEAENSILDISGFSKQYNCAFIWQKDGVKKLNLYLIINYFKGGKLRFKKIKPEAFEANRFYTVINKKSGEIVPMEVNFNFDDPNLIILPLAFGKRQGREFIWNDLLSLETGSLKLANGRVIEKTLYNRRTRQDEPALFVALTFERREVLDSSNIKPMSNLIGVDRGENIPAVIALTDPEGCPLSRFKDSLGNPTHILRIGESYKEKQRTIQAKKEVEQRRAGGYSRKYASKAKNLADDMVRNTARDLLYYAVTQDAMLIFENLSRGFGRQGKRTFMAERQYTRMEDWLTAKLAYEGLPSKTYLSKTLAQYTSKTCSNCGFTITSADYDRVLEKLKKTATGWMTTINGKELKVEGQITYYNRYKRQNVVKDLSVELDRLSEESVNNDISSWTKGRSGEALSLLKKRFSHRPVQEKFVCLNCGFETHADEQAALNIARSWLFLRSQEYKKYQTNKTTGNTDKRAFVETWQSFYRKKLKEVWKPAV

SEQ ID NO: 37961 - protein, 979 aa, synthetic construct
  REGION 1..979: note = engineered CasX variant
QEIKRINKIRRRLVKDSNTKKAGKTGPMKTLLVRVMTPDLRERLENLRKKPENIPQPISNTSRANLNKLLTDYTEMKKAILHVYWEEFQKDPVGLMSRVAQPASKKIDQNKLKPEMDEKGNLTTAGFACSQCGQPLFVYKLEQVSEKGKAYTNYFGRCNVAEHEKLILLAQLKPEKDSDEAVTYSLGKFGQRALDFYSIHVTKESTHPVKPLAQIAGNRYASYPVGKALSDACMGTIASFLSKYQDIIIEHQKVVKGNQKRLESLRELAGKENLEYPSVTLPPQPHTKEGVDAYNEVIARVRMWVNLNLWQKLKLSRDDAKPLLRLKGFPSFPLVERQANEVDWWDMVCNVKKLINEKKEDGKVFWQNLAGYKRQEALRPYLSSEEDRKKGKKFARYQLGDLLLHLEKKHGEDWGKVYDEAWERIDKKVEGLSKHIKLEEERRSEDAQSKAALTDWLRAKASFVIEGLKEADKDEFCRCELKLQKWYGDLRGKPFAIEAENSILDISGFSKQYNCAFIWQKDGVKKLNLYLIINYFKGGKLRFKKIKPEAFEANRFYTVINKKSGEIVPMEVNFNFDDPNLIILPLAFGKRQGREFIWNDLLSLETGSLKLANGRVIEKTLYNRRTRQDEPALFVALTFERREVLDSSNIKPMSNLIGVDRGENIPAVIALTDPEGCPLSRFKDSLGNPTHILRIGESYKEKQRTIQAKKEVEQRRAGGYSRKYASKAKNLADDMVRNTARDLLYYAVTQDAMLIFENLSRGFGRQGKRTFMAERQYTRMEDWLTAKLAYEGLASKTYLSKTLAQYTSKTCSNCGFTITSADYDRVLEKLKKTATGWMTTINGKELKVEGQITYYNRYKRQNVVKDLSVELDRLSEESVNNDISSWTKGRSGEALSLLKKRFSHRPVQEKFVCLNCGFETHADEQAALNIARSWLFLRSQEYKKYQTNKTTGNTDKRAFVETWQSFYRKKLKEVWKPAV

SEQ ID NO: 37962 - protein, 979 aa, synthetic construct
  REGION 1..979: note = engineered CasX variant
QEIKRINKIRRRLVKDSNTKKAGKTGPMKTLLVRVMTPDLRERLENLRKKPENIPQPISNTSRANLNKLLTDYTEMKKAILHVYWEEFQKDPVGLMSRVAQPASKKIDQNKLKPEMDEKGNLTTAGFACSQCGQPLFVYKLEQVSEKGKAYTNYFGRCNVAEHEKLILLAQLKPEKDSDEAVTYSLGKFGQRALDFYSIHVTKESTHPVKPLAQIAGNRYASHPVGKALSDACMGTIASFLSKYQDIIIEHQKVVKGNQKRLESLRELAGKENLEYPSVTLPPQPHTKEGVDAYNEVIARVRMWVNLNLWQKLKLSRDDAKPLLRLKGFPSFPLVERQANEVDWWDMVCNVKKLINEKKEDGKVFWQNLAGYKRQEALRPYLSSEEDRKKGKKFARYQLGDLLLHLEKKHGEDWGKVYDEAWERIDKKVEGLSKHIKLEEERRSEDAQSKAALTDWLRAKASFVIEGLKEADKDEFCRCELKLQKWYGDLRGKPFAIEAENSILDISGFSKQYNCAFIWQKDGVKKLNLYLIINYFKGGKLRFKKIKPEAFEANRFYTVINKKSGEIVPMEVNFNFDDPNLIILPLAFGKRQGREFIWNDLLSLETGSLKLANGRVIEKTLYNRRTRQDEPALFVALTFERREVLDSSNIKPMSNLIGVDRGENIPAVIALTDPEGCPLSRFKDSLGNPTHILRIGESYKEKQRTIQAKKEVEQRRAGGYSRKYASKAKNLADDMVRNTARDLLYYAVTQDAMLIFENLSRGFGRQGKRTFMAERQYTRMEDWLTAKLAYEGLASKTYLSKTLAQYTSKTCSNCGFTITSADYDRVLEKLKKTATGWMTTINGKELKVEGQITYYNRYKRQNVVKDLSVELDRLSEESVNNDISSWTKGRSGEALSLLKKRFSHRPVQEKFVCLNCGFETHADEQAALNIARSWLFLRSQEYKKYQTNKTTGNTDKRAFVETWQSFYRKKLKEVWKPAV

SEQ ID NO: 37963 - protein, 979 aa, synthetic construct
  REGION 1..979: note = engineered CasX variant
QEIKRINKIRRRLVKDSNTKKAGKTGPMKTLLVRVMTPDLRERLENLRKKPENIPQPISNTSRANLNKLLTDYTEMKKAILHVYWEEFQKDPVGLMSRVAQPASKKIDQNKLKPEMDEKGNLTTAGFACSQCGQPLFVYKLEQVSEKGKAYTNYFGRCNVAEHEKLILLAQLKPEKDSDEAVTYSLGKFGQRALDFYSIHVTKESTHPVKPLAQIAGNRYASSPVGKALSDACMGTIASFLSKYQDIIIEHQKVVKGNQKRLESLRELAGKENLEYPSVTLPPQPHTKEGVDAYNEVIARVRMWVNLNLWQKLKLSRDDAKPLLRLKGFPSFPLVERQANEVDWWDMVCNVKKLINEKKEDGKVFWQNLAGYKRQEALRPYLSSEEDRKKGKKFARYQLGDLLLHLEKKHGEDWGKVYDEAWERIDKKVEGLSKHIKLEEERRSEDAQSKAALTDWLRAKASFVIEGLKEADKDEFCRCELKLQKWYGDLRGKPFAIEAENSILDISGFSKQYNCAFIWQKDGVKKLNLYLIINYFKGGKLRFKKIKPEAFEANRFYTVINKKSGEIVPMEVNFNFDDPNLIILPLAFGKRQGREFIWNDLLSLETGSLKLANGRVIEKTLYNRRTRQDEPALFVALTFERREVLDSSNIKPMSNLIGVDRGENIPAVIALTDPEGCPLSRFKDSLGNPTHILRIGESYKEKQRTIQAKKEVEQRRAGGYSRKYASKAKNLADDMVRNTARDLLYYAVTQDAMLIFENLSRGFGRQGKRTFMAERQYTRMEDWLTAKLAYEGLASKTYLSKTLAQYTSKTCSNCGFTITSADYDRVLEKLKKTATGWMTTINGKELKVEGQITYYNRYKRQNVVKDLSVELDRLSEESVNNDISSWTKGRSGEALSLLKKRFSHRPVQEKFVCLNCGFETHADEQAALNIARSWLFLRSQEYKKYQTNKTTGNTDKRAFVETWQSFYRKKLKEVWKPAV

SEQ ID NO: 37964 - protein, 979 aa, synthetic construct
  REGION 1..979: note = engineered CasX variant
QEIKRINKIRRRLVKDSNTKKAGKTGPMKTLLVRVMTPDLRERLENLRKKPENIPQPISNTSRANLNKLLTDYTEMKKAILHVYWEEFQKDPVGLMSRVAQPASKKIDQNKLKPEMDEKGNLTTAGFACSQCGQPLFVYKLEQVSEKGKAYTNYFGRCNVAEHEKLILLAQLKPEKDSDEAVTYSLGKFGQRALDFYSIHVTKESTHPVKPLAQIAGNRYASTPVGKALSDACMGTIASFLSKYQDIIIEHQKVVKGNQKRLESLRELAGKENLEYPSVTLPPQPHTKEGVDAYNEVIARVRMWVNLNLWQKLKLSRDDAKPLLRLKGFPSFPLVERQANEVDWWDMVCNVKKLINEKKEDGKVFWQNLAGYKRQEALRPYLSSEEDRKKGKKFARYQLGDLLLHLEKKHGEDWGKVYDEAWERIDKKVEGLSKHIKLEEERRSEDAQSKAALTDWLRAKASFVIEGLKEADKDEFCRCELKLQKWYGDLRGKPFAIEAENSILDISGFSKQYNCAFIWQKDGVKKLNLYLIINYFKGGKLRFKKIKPEAFEANRFYTVINKKSGEIVPMEVNFNFDDPNLIILPLAFGKRQGREFIWNDLLSLETGSLKLANGRVIEKTLYNRRTRQDEPALFVALTFERREVLDSSNIKPMSNLIGVDRGENIPAVIALTDPEGCPLSRFKDSLGNPTHILRIGESYKEKQRTIQAKKEVEQRRAGGYSRKYASKAKNLADDMVRNTARDLLYYAVTQDAMLIFENLSRGFGRQGKRTFMAERQYTRMEDWLTAKLAYEGLASKTYLSKTLAQYTSKTCSNCGFTITSADYDRVLEKLKKTATGWMTTINGKELKVEGQITYYNRYKRQNVVKDLSVELDRLSEESVNNDISSWTKGRSGEALSLLKKRFSHRPVQEKFVCLNCGFETHADEQAALNIARSWLFLRSQEYKKYQTNKTTGNTDKRAFVETWQSFYRKKLKEVWKPAV

SEQ ID NO: 37965 - protein, 979 aa, synthetic construct
  REGION 1..979: note = engineered CasX variant
QEIKRINKIRRRLVKDSNTKKAGKTGPMKTLLVRVMTPDLRERLENLRKKPENIPQPISNTSRANLNKLLTDYTEMKKAILHVYWEEFQKDPVGLMSRVAQPASKKIDQNKLKPEMDEKGNLTTAGFACSQCGQPLFVYKLEQVSEKGKAYTNYFGRCNVAEHEKLILLAQLKPEKDSDEAVTYSLGKFGQRALDFYSIHVTKESTHPVKPLAQIAGNRYASAPVGKALSDACMGTIASFLSKYQDIIIEHQKVVKGNQKRLESLRELAGKENLEYPSVTLPPQPHTKEGVDAYNEVIARVRMWVNLNLWQKLKLSRDDAKPLLRLKGFPSFPLVERQANEVDWWDMVCNVKKLINEKKEDGKVFWQNLAGYKRQEALRPYLSSEEDRKKGKKFARYQLGDLLLHLEKKHGEDWGKVYDEAWERIDKKVEGLSKHIKLEEERRSEDAQSKAALTDWLRAKASFVIEGLKEADKDEFCRCELKLQKWYGDLRGKPFAIEAENSILDISGFSKQYNCAFIWQKDGVKKLNLYLIINYFKGGKLRFKKIKPEAFEANRFYTVINKKSGEIVPMEVNFNFDDPNLIILPLAFGKRQGREFIWNDLLSLETGSLKLANGRVIEKTLYNRRTRQDEPALFVALTFERREVLDSSNIKPMSNLIGVDRGENIPAVIALTDPEGCPLSRFKDSLGNPTHILRIGESYKEKQRTIQAKKEVEQRRAGGYSRKYASKAKNLADDMVRNTARDLLYYAVTQDAMLIFENLSRGFGRQGKRTFMAERQYTRMEDWLTAKLAYEGLASKTYLSKTLAQYTSKTCSNCGFTITSADYDRVLEKLKKTATGWMTTINGKELKVEGQITYYNRYKRQNVVKDLSVELDRLSEESVNNDISSWTKGRSGEALSLLKKRFSHRPVQEKFVCLNCGFETHADEQAALNIARSWLFLRSQEYKKYQTNKTTGNTDKRAFVETWQSFYRKKLKEVWKPAV

SEQ ID NO: 37966 - protein, 979 aa, synthetic construct
  REGION 1..979: note = engineered CasX variant
QEIKRINKIRRRLVKDSNTKKAGKTGPMKTLLVRVMTPDLRERLENLRKKPENIPQPISNTSRANLNKLLTDYTEMKKAILHVYWEEFQKDPVGLMSRVAQPASKKIDQNKLKPEMDEKGNLTTAGFACSQCGQPLFVYKLEQVSEKGKAYTNYFGRCNVAEHEKLILLAQLKPEKDSDEAVTYSLGKFGQRALDFYSIHVTKESTHPVKPLAQIAGNRYASVPVGKALSDACMGTIASFLSKYQDIIIEHQKVVKGNQKRLESLRELAGKENLEYPSVTLPPQPHTKEGVDAYNEVIARVRMWVNLNLWQKLKLSRDDAKPLLRLKGFPSFPLVERQANEVDWWDMVCNVKKLINEKKEDGKVFWQNLAGYKRQEALRPYLSSEEDRKKGKKFARYQLGDLLLHLEKKHGEDWGKVYDEAWERIDKKVEGLSKHIKLEEERRSEDAQSKAALTDWLRAKASFVIEGLKEADKDEFCRCELKLQKWYGDLRGKPFAIEAENSILDISGFSKQYNCAFIWQKDGVKKLNLYLIINYFKGGKLRFKKIKPEAFEANRFYTVINKKSGEIVPMEVNFNFDDPNLIILPLAFGKRQGREFIWNDLLSLETGSLKLANGRVIEKTLYNRRTRQDEPALFVALTFERREVLDSSNIKPMSNLIGVDRGENIPAVIALTDPEGCPLSRFKDSLGNPTHILRIGESYKEKQRTIQAKKEVEQRRAGGYSRKYASKAKNLADDMVRNTARDLLYYAVTQDAMLIFENLSRGFGRQGKRTFMAERQYTRMEDWLTAKLAYEGLASKTYLSKTLAQYTSKTCSNCGFTITSADYDRVLEKLKKTATGWMTTINGKELKVEGQITYYNRYKRQNVVKDLSVELDRLSEESVNNDISSWTKGRSGEALSLLKKRFSHRPVQEKFVCLNCGFETHADEQAALNIARSWLFLRSQEYKKYQTNKTTGNTDKRAFVETWQSFYRKKLKEVWKPAV

SEQ ID NO: 37967 - protein, 979 aa, synthetic construct
  REGION 1..979: note = engineered CasX variant
QEIKRINKIRRRLVKDSNTKKAGKTGPMKTLLVRVMTPDLRERLENLRKKPENIPQPISNTSRANLNKLLTDYTEMKKAILHVYWEEFQKDPVGLMSRVAQPASKKIDQNKLKPEMDEKGNLTTAGFACSQCGQPLFVYKLEQVSEKGKAYTNYFGRCNVAEHEKLIKLAQLKPEKDSDEAVTYSLGKFGQRALDFYSIHVTKESTHPVKPLAQIAGNRYASGPVGKALSDACMGTIASFLSKYQDIIIEHQKVVKGNQKRLESLRELAGKENLEYPSVTLPPQPHTKEGVDAYNEVIARVRMWVNLNLWQKLKLSRDDAKPLLRLKGFPSFPLVERQANEVDWWDMVCNVKKLINEKKEDGKVFWQNLAGYKRQEALRPYLSSEEDRKKGKKFARYQLGDLLLHLEKKHGEDWGKVYDEAWERIDKKVEGLSKHIKLEEERRSEDAQSKAALTDWLRAKASFVIEGLKEADKDEFCRCELKLQKWYGDLRGKPFAIEAENSILDISGFSKQYNCAFIWQKDGVKKLNLYLIINYFKGGKLRFKKIKPEAFEANRFYTVINKKSGEIVPMEVNFNFDDPNLIILPLAFGKRQGREFIWNDLLSLETGSLKLANGRVIEKTLYNRRTRQDEPALFVALTFERREVLDSSNIKPMSNLIGVDRGENIPAVIALTDPEGCPLSRFKDSLGNPTHILRIGESYKEKQRTIQAKKEVEQRRAGGYSRKYASKAKNLADDMVRNTARDLLYYAVTQDAMLIFENLSRGFGRQGKRTFMAERQYTRMEDWLTAKLAYEGLASKTYLSKTLAQYTSKTCSNCGFTITSADYDRVLEKLKKTATGWMTTINGKELKVEGQITYYNRYKRQNVVKDLSVELDRLSEESVNNDISSWTKGRSGEALSLLKKRFSHRPVQEKFVCLNCGFETHADEQAALNIARSWLFLRSQEYKKYQTNKTTGNTDKRAFVETWQSFYRKKLKEVWKPAV

SEQ ID NO: 37968 - protein, 978 aa, synthetic construct
  REGION 1..978: note = engineered CasX variant
QEIKRINKIRRRLVKDSNTKKAGKTGPMKTLLVRVMTPDLRERLENLRKKPENIPQPISNTSRANLNKLLTDYTEMKKAILHVYWEEFQKDPVGLMSRVAQPASKKIDQNKLKPEMDEKGNLTTAGFACSQCGQPLFVYKLEQVSEKGKAYTNYFGRCNVAEHEKLILLAQLKPEKDSDEAVTYSLGKFGQRALDFYSIHVTKESTHPVKPLAQIAGNRYASPVGKALSDACMGTIASFLSKYQDIIIEHQKVVKGNQKRLESLRELAGKENLEYPSVTLPPQPHTKEGVDAYNEVIARVRMWVNLNLWQKLKLSRDDAKPLLRLKGFPSFPLVERQANEVDWWDMVCNVKKLINEKKEDGKVFWQNLAGYKRQEALRPYLSSEEDRKKGKKFARYQLGDLLLHLEKKHGEDWGKVYDEAWERIDKKVEGLSKHIKLEEERRSEDAQSKAALTDWLRAKASFVIEGLKEADKDEFCRCELKLQKWYGDLRGKPFAIEAENSILDISGFSKQYNCAFIWQKDGVKKLNLYLIINYFKGGKLRFKKIKPEAFEANRFYTVINKKSGEIVPMEVNFNFDDPNLIILPLAFGKRQGREFIWNDLLSLETGSLKLANGRVIEKTLYNRRTRQDEPALFVALTFERREVLDSSNIKPMSNLIGVDRGENIPAVIALTDPEGCPLSRFKDSLGNPTHILRIGESYKEKQRTIQAKKEVEQRRAGGYSRKYASKAKNLADDMVRNTARDLLYYAVTQDAMLIFENLSRGFGRQGKRTFMAERQYTRMEDWLTAKLAYEGLASKTYLSKTLAQYTSKTCSNCGFTITSADYDRVLEKLKKTATGWMTTINGKELKVEGQITYYNRYKRQNVVKDLSVELDRLSEESVNNDISSWTKGRSGEALSLLKKRFSHRPVQEKFVCLNCGFETHADEQAALNIARSWLFLRSQEYKKYQTNKTTGNTDKRAFVETWQSFYRKKLKEVWKPAV

SEQ ID NO: 37969 - protein, 979 aa, synthetic construct
  REGION 1..979: note = engineered CasX variant
QEIKRINKIRRRLVKDSNTKKAGKTGPMKTLLVRVMTPDLRERLENLRKKPENIPQPISNTSRANLNKLLTDYTEMKKAILHVYWEEFQKDPVGLMSRVAQPASKKIDQNKLKPEMDEKGNLTTAGFACSQCGQPLFVYKLEQVSEKGKAYTNYFGRCNVAEHEKLILLAQLKPEKDSDEAVTYSLGKFGQRALDFYSIHVTKESTHPVKPLAQIAGNRYASYPVGKALSDACMGTIASFLSKYQDIIIEHQKVVKGNQKRLESLRELAGKENLEYPSVTLPPQPHTKEGVDAYNEVIARVRMWVNLNLWQKLKLSRDDAKPLLRLKGFPSFPLVERQANEVDWWDMVCNVKKLINEKKEDGKVFWQNLAGYKRQEALRPYLSSEEDRKKGKKFARYQLGDLLLHLEKKHGEDWGKVYDEAWERIDKKVEGLSKHIKLEEERRSEDAQSKAALTDWLRAKASFVIEGLKEADKDEFCRCELKLQKWYGDLRGKPFAIEAENSILDISGFSKQYNCAFIWQKDGVKKLNLYLIINYFKGGKLRFKKIKPEAFEANRFYTVINKKSGEIVPMEVNFNFDDPNLIILPLAFGKRQGREFIWNDLLSLETGSLKLANGRVIEKTLYNRRTRQDEPALFVALTFERREVLDSSNIKPMSNLIGVDRGENIPAVIALTDPEGCPLSRFKDSLGNPTHILRIGESYKEKQRTIQAKKEVEQRRAGGYSRKYASKAKNLADDMVRNTARDLLYYAVTQDAMLIFENLSRGFGRQGKRTFMAERQYTRMEDWLTAKLAYEGLPSKVYLSKTLAQYTSKTCSNCGFTITSADYDRVLEKLKKTATGWMTTINGKELKVEGQITYYNRYKRQNVVKDLSVELDRLSEESVNNDISSWTKGRSGEALSLLKKRFSHRPVQEKFVCLNCGFETHADEQAALNIARSWLFLRSQEYKKYQTNKTTGNTDKRAFVETWQSFYRKKLKEVWKPAV

SEQ ID NO: 37970 - protein, 979 aa, synthetic construct
  REGION 1..979: note = engineered CasX variant
QEIKRINKIRRRLVKDSNTKKAGKTGPMKTLLVRVMTPDLRERLENLRKKPENIPQPISNTSRANLNKLLTDYTEMKKAILHVYWEEFQKDPVGLMSRVAQPASKKIDQNKLKPEMDEKGNLTTAGFACSQCGQPLFVYKLEQVSEKGKAYTNYFGRCNVAEHEKLILLAQLKPEKDSDEAVTYSLGKFGQRALDFYSIHVTKESTHPVKPLAQIAGNRYASHPVGKALSDACMGTIASFLSKYQDIIIEHQKVVKGNQKRLESLRELAGKENLEYPSVTLPPQPHTKEGVDAYNEVIARVRMWVNLNLWQKLKLSRDDAKPLLRLKGFPSFPLVERQANEVDWWDMVCNVKKLINEKKEDGKVFWQNLAGYKRQEALRPYLSSEEDRKKGKKFARYQLGDLLLHLEKKHGEDWGKVYDEAWERIDKKVEGLSKHIKLEEERRSEDAQSKAALTDWLRAKASFVIEGLKEADKDEFCRCELKLQKWYGDLRGKPFAIEAENSILDISGFSKQYNCAFIWQKDGVKKLNLYLIINYFKGGKLRFKKIKPEAFEANRFYTVINKKSGEIVPMEVNFNFDDPNLIILPLAFGKRQGREFIWNDLLSLETGSLKLANGRVIEKTLYNRRTRQDEPALFVALTFERREVLDSSNIKPMSNLIGVDRGENIPAVIALTDPEGCPLSRFKDSLGNPTHILRIGESYKEKQRTIQAKKEVEQRRAGGYSRKYASKAKNLADDMVRNTARDLLYYAVTQDAMLIFENLSRGFGRQGKRTFMAERQYTRMEDWLTAKLAYEGLPSKVYLSKTLAQYTSKTCSNCGFTITSADYDRVLEKLKKTATGWMTTINGKELKVEGQITYYNRYKRQNVVKDLSVELDRLSEESVNNDISSWTKGRSGEALSLLKKRFSHRPVQEKFVCLNCGFETHADEQAALNIARSWLFLRSQEYKKYQTNKTTGNTDKRAFVETWQSFYRKKLKEVWKPAV

SEQ ID NO: 37971 - protein, 979 aa, synthetic construct
  REGION 1..979: note = engineered CasX variant
QEIKRINKIRRRLVKDSNTKKAGKTGPMKTLLVRVMTPDLRERLENLRKKPENIPQPISNTSRANLNKLLTDYTEMKKAILHVYWEEFQKDPVGLMSRVAQPASKKIDQNKLKPEMDEKGNLTTAGFACSQCGQPLFVYKLEQVSEKGKAYTNYFGRCNVAEHEKLILLAQLKPEKDSDEAVTYSLGKFGQRALDFYSIHVTKESTHPVKPLAQIAGNRYASSPVGKALSDACMGTIASFLSKYQDIIIEHQKVVKGNQKRLESLRELAGKENLEYPSVTLPPQPHTKEGVDAYNEVIARVRMWVNLNLWQKLKLSRDDAKPLLRLKGFPSFPLVERQANEVDWWDMVCNVKKLINEKKEDGKVFWQNLAGYKRQEALRPYLSSEEDRKKGKKFARYQLGDLLLHLEKKHGEDWGKVYDEAWERIDKKVEGLSKHIKLEEERRSEDAQSKAALTDWLRAKASFVIEGLKEADKDEFCRCELKLQKWYGDLRGKPFAIEAENSILDISGFSKQYNCAFIWQKDGVKKLNLYLIINYFKGGKLRFKKIKPEAFEANRFYTVINKKSGEIVPMEVNFNFDDPNLIILPLAFGKRQGREFIWNDLLSLETGSLKLANGRVIEKTLYNRRTRQDEPALFVALTFERREVLDSSNIKPMSNLIGVDRGENIPAVIALTDPEGCPLSRFKDSLGNPTHILRIGESYKEKQRTIQAKKEVEQRRAGGYSRKYASKAKNLADDMVRNTARDLLYYAVTQDAMLIFENLSRGFGRQGKRTFMAERQYTRMEDWLTAKLAYEGLPSKVYLSKTLAQYTSKTCSNCGFTITSADYDRVLEKLKKTATGWMTTINGKELKVEGQITYYNRYKRQNVVKDLSVELDRLSEESVNNDISSWTKGRSGEALSLLKKRFSHRPVQEKFVCLNCGFETHADEQAALNIARSWLFLRSQEYKKYQTNKTTGNTDKRAFVETWQSFYRKKLKEVWKPAV

SEQ ID NO: 37972 - protein, 979 aa, synthetic construct
  REGION 1..979: note = engineered CasX variant
QEIKRINKIRRRLVKDSNTKKAGKTGPMKTLLVRVMTPDLRERLENLRKKPENIPQPISNTSRANLNKLLTDYTEMKKAILHVYWEEFQKDPVGLMSRVAQPASKKIDQNKLKPEMDEKGNLTTAGFACSQCGQPLFVYKLEQVSEKGKAYTNYFGRCNVAEHEKLILLAQLKPEKDSDEAVTYSLGKFGQRALDFYSIHVTKESTHPVKPLAQIAGNRYASTPVGKALSDACMGTIASFLSKYQDIIIEHQKVVKGNQKRLESLRELAGKENLEYPSVTLPPQPHTKEGVDAYNEVIARVRMWVNLNLWQKLKLSRDDAKPLLRLKGFPSFPLVERQANEVDWWDMVCNVKKLINEKKEDGKVFWQNLAGYKRQEALRPYLSSEEDRKKGKKFARYQLGDLLLHLEKKHGEDWGKVYDEAWERIDKKVEGLSKHIKLEEERRSEDAQSKAALTDWLRAKASFVIEGLKEADKDEFCRCELKLQKWYGDLRGKPFAIEAENSILDISGFSKQYNCAFIWQKDGVKKLNLYLIINYFKGGKLRFKKIKPEAFEANRFYTVINKKSGEIVPMEVNFNFDDPNLIILPLAFGKRQGREFIWNDLLSLETGSLKLANGRVIEKTLYNRRTRQDEPALFVALTFERREVLDSSNIKPMSNLIGVDRGENIPAVIALTDPEGCPLSRFKDSLGNPTHILRIGESYKEKQRTIQAKKEVEQRRAGGYSRKYASKAKNLADDMVRNTARDLLYYAVTQDAMLIFENLSRGFGRQGKRTFMAERQYTRMEDWLTAKLAYEGLPSKVYLSKTLAQYTSKTCSNCGFTITSADYDRVLEKLKKTATGWMTTINGKELKVEGQITYYNRYKRQNVVKDLSVELDRLSEESVNNDISSWTKGRSGEALSLLKKRFSHRPVQEKFVCLNCGFETHADEQAALNIARSWLFLRSQEYKKYQTNKTTGNTDKRAFVETWQSFYRKKLKEVWKPAV

SEQ ID NO: 37973 - protein, 979 aa, synthetic construct
  REGION 1..979: note = engineered CasX variant
QEIKRINKIRRRLVKDSNTKKAGKTGPMKTLLVRVMTPDLRERLENLRKKPENIPQPISNTSRANLNKLLTDYTEMKKAILHVYWEEFQKDPVGLMSRVAQPASKKIDQNKLKPEMDEKGNLTTAGFACSQCGQPLFVYKLEQVSEKGKAYTNYFGRCNVAEHEKLILLAQLKPEKDSDEAVTYSLGKFGQRALDFYSIHVTKESTHPVKPLAQIAGNRYASAPVGKALSDACMGTIASFLSKYQDIIIEHQKVVKGNQKRLESLRELAGKENLEYPSVTLPPQPHTKEGVDAYNEVIARVRMWVNLNLWQKLKLSRDDAKPLLRLKGFPSFPLVERQANEVDWWDMVCNVKKLINEKKEDGKVFWQNLAGYKRQEALRPYLSSEEDRKKGKKFARYQLGDLLLHLEKKHGEDWGKVYDEAWERIDKKVEGLSKHIKLEEERRSEDAQSKAALTDWLRAKASFVIEGLKEADKDEFCRCELKLQKWYGDLRGKPFAIEAENSILDISGFSKQYNCAFIWQKDGVKKLNLYLIINYFKGGKLRFKKIKPEAFEANRFYTVINKKSGEIVPMEVNFNFDDPNLIILPLAFGKRQGREFIWNDLLSLETGSLKLANGRVIEKTLYNRRTRQDEPALFVALTFERREVLDSSNIKPMSNLIGVDRGENIPAVIALTDPEGCPLSRFKDSLGNPTHILRIGESYKEKQRTIQAKKEVEQRRAGGYSRKYASKAKNLADDMVRNTARDLLYYAVTQDAMLIFENLSRGFGRQGKRTFMAERQYTRMEDWLTAKLAYEGLPSKVYLSKTLAQYTSKTCSNCGFTITSADYDRVLEKLKKTATGWMTTINGKELKVEGQITYYNRYKRQNVVKDLSVELDRLSEESVNNDISSWTKGRSGEALSLLKKRFSHRPVQEKFVCLNCGFETHADEQAALNIARSWLFLRSQEYKKYQTNKTTGNTDKRAFVETWQSFYRKKLKEVWKPAV

SEQ ID NO: 37974 - protein, 979 aa, synthetic construct
  REGION 1..979: note = engineered CasX variant
QEIKRINKIRRRLVKDSNTKKAGKTGPMKTLLVRVMTPDLRERLENLRKKPENIPQPISNTSRANLNKLLTDYTEMKKAILHVYWEEFQKDPVGLMSRVAQPASKKIDQNKLKPEMDEKGNLTTAGFACSQCGQPLFVYKLEQVSEKGKAYTNYFGRCNVAEHEKLILLAQLKPEKDSDEAVTYSLGKFGQRALDFYSIHVTKESTHPVKPLAQIAGNRYASVPVGKALSDACMGTIASFLSKYQDIIIEHQKVVKGNQKRLESLRELAGKENLEYPSVTLPPQPHTKEGVDAYNEVIARVRMWVNLNLWQKLKLSRDDAKPLLRLKGFPSFPLVERQANEVDWWDMVCNVKKLINEKKEDGKVFWQNLAGYKRQEALRPYLSSEEDRKKGKKFARYQLGDLLLHLEKKHGEDWGKVYDEAWERIDKKVEGLSKHIKLEEERRSEDAQSKAALTDWLRAKASFVIEGLKEADKDEFCRCELKLQKWYGDLRGKPFAIEAENSILDISGFSKQYNCAFIWQKDGVKKLNLYLIINYFKGGKLRFKKIKPEAFEANRFYTVINKKSGEIVPMEVNFNFDDPNLIILPLAFGKRQGREFIWNDLLSLETGSLKLANGRVIEKTLYNRRTRQDEPALFVALTFERREVLDSSNIKPMSNLIGVDRGENIPAVIALTDPEGCPLSRFKDSLGNPTHILRIGESYKEKQRTIQAKKEVEQRRAGGYSRKYASKAKNLADDMVRNTARDLLYYAVTQDAMLIFENLSRGFGRQGKRTFMAERQYTRMEDWLTAKLAYEGLPSKVYLSKTLAQYTSKTCSNCGFTITSADYDRVLEKLKKTATGWMTTINGKELKVEGQITYYNRYKRQNVVKDLSVELDRLSEESVNNDISSWTKGRSGEALSLLKKRFSHRPVQEKFVCLNCGFETHADEQAALNIARSWLFLRSQEYKKYQTNKTTGNTDKRAFVETWQSFYRKKLKEVWKPAV

SEQ ID NO: 37975 - protein, 979 aa, synthetic construct
  REGION 1..979: note = engineered CasX variant
QEIKRINKIRRRLVKDSNTKKAGKTGPMKTLLVRVMTPDLRERLENLRKKPENIPQPISNTSRANLNKLLTDYTEMKKAILHVYWEEFQKDPVGLMSRVAQPASKKIDQNKLKPEMDEKGNLTTAGFACSQCGQPLFVYKLEQVSEKGKAYTNYFGRCNVAEHEKLIKLAQLKPEKDSDEAVTYSLGKFGQRALDFYSIHVTKESTHPVKPLAQIAGNRYASGPVGKALSDACMGTIASFLSKYQDIIIEHQKVVKGNQKRLESLRELAGKENLEYPSVTLPPQPHTKEGVDAYNEVIARVRMWVNLNLWQKLKLSRDDAKPLLRLKGFPSFPLVERQANEVDWWDMVCNVKKLINEKKEDGKVFWQNLAGYKRQEALRPYLSSEEDRKKGKKFARYQLGDLLLHLEKKHGEDWGKVYDEAWERIDKKVEGLSKHIKLEEERRSEDAQSKAALTDWLRAKASFVIEGLKEADKDEFCRCELKLQKWYGDLRGKPFAIEAENSILDISGFSKQYNCAFIWQKDGVKKLNLYLIINYFKGGKLRFKKIKPEAFEANRFYTVINKKSGEIVPMEVNFNFDDPNLIILPLAFGKRQGREFIWNDLLSLETGSLKLANGRVIEKTLYNRRTRQDEPALFVALTFERREVLDSSNIKPMSNLIGVDRGENIPAVIALTDPEGCPLSRFKDSLGNPTHILRIGESYKEKQRTIQAKKEVEQRRAGGYSRKYASKAKNLADDMVRNTARDLLYYAVTQDAMLIFENLSRGFGRQGKRTFMAERQYTRMEDWLTAKLAYEGLPSKVYLSKTLAQYTSKTCSNCGFTITSADYDRVLEKLKKTATGWMTTINGKELKVEGQITYYNRYKRQNVVKDLSVELDRLSEESVNNDISSWTKGRSGEALSLLKKRFSHRPVQEKFVCLNCGFETHADEQAALNIARSWLFLRSQEYKKYQTNKTTGNTDKRAFVETWQSFYRKKLKEVWKPAV

SEQ ID NO: 37976 - protein, 978 aa, synthetic construct
  REGION 1..978: note = engineered CasX variant
QEIKRINKIRRRLVKDSNTKKAGKTGPMKTLLVRVMTPDLRERLENLRKKPENIPQPISNTSRANLNKLLTDYTEMKKAILHVYWEEFQKDPVGLMSRVAQPASKKIDQNKLKPEMDEKGNLTTAGFACSQCGQPLFVYKLEQVSEKGKAYTNYFGRCNVAEHEKLILLAQLKPEKDSDEAVTYSLGKFGQRALDFYSIHVTKESTHPVKPLAQIAGNRYASPVGKALSDACMGTIASFLSKYQDIIIEHQKVVKGNQKRLESLRELAGKENLEYPSVTLPPQPHTKEGVDAYNEVIARVRMWVNLNLWQKLKLSRDDAKPLLRLKGFPSFPLVERQANEVDWWDMVCNVKKLINEKKEDGKVFWQNLAGYKRQEALRPYLSSEEDRKKGKKFARYQLGDLLLHLEKKHGEDWGKVYDEAWERIDKKVEGLSKHIKLEEERRSEDAQSKAALTDWLRAKASFVIEGLKEADKDEFCRCELKLQKWYGDLRGKPFAIEAENSILDISGFSKQYNCAFIWQKDGVKKLNLYLIINYFKGGKLRFKKIKPEAFEANRFYTVINKKSGEIVPMEVNFNFDDPNLIILPLAFGKRQGREFIWNDLLSLETGSLKLANGRVIEKTLYNRRTRQDEPALFVALTFERREVLDSSNIKPMSNLIGVDRGENIPAVIALTDPEGCPLSRFKDSLGNPTHILRIGESYKEKQRTIQAKKEVEQRRAGGYSRKYASKAKNLADDMVRNTARDLLYYAVTQDAMLIFENLSRGFGRQGKRTFMAERQYTRMEDWLTAKLAYEGLPSKVYLSKTLAQYTSKTCSNCGFTITSADYDRVLEKLKKTATGWMTTINGKELKVEGQITYYNRYKRQNVVKDLSVELDRLSEESVNNDISSWTKGRSGEALSLLKKRFSHRPVQEKFVCLNCGFETHADEQAALNIARSWLFLRSQEYKKYQTNKTTGNTDKRAFVETWQSFYRKKLKEVWKPAV

SEQ ID NO: 37977 - protein, 980 aa, synthetic construct
  REGION 1..980: note = engineered CasX variant
QEIKRINKIRRRLVKDSNTKKAGKTGPMKTLLVRVMTPDLRERLENLRKKPENIPQPISNTSRANLNKLLTDYTEMKKAILHVYWEEFQKDPVGLMSRVAQPASKKIDQNKLKPEMDEKGNLTTAGFACSQCGQPLFVYKLEQVSEKGKAYTNYFGRCNVAEHEKLILLAQLKPEKDSDEAVTYSLGKFGQRALDFYSIHVTKESTHPVKPLAQIAGNRYASYPVGKALSDACMGTIASFLSKYQDIIIEHQKVVKGNQKRLESLRELAGKENLEYPSVTLPPQPHTKEGVDAYNEVIARVRMWVNLNLWQKLKLSRDDAKPLLRLKGFPSFPLVERQANEVDWWDMVCNVKKLINEKKEDGKVFWQNLAGYKRQEALRPYLSSEEDRKKGKKFARYQLGDLLLHLEKKHGEDWGKVYDEAWERIDKKVEGLSKHIKLEEERRSEDAQSKAALTDWLRAKASFVIEGLKEADKDEFCRCELKLQKWYGDLRGKPFAIEAENSILDISGFSKQYNCAFIWQKDGVKKLNLYLIINYFKGGKLRFKKIKPEAFEANRFYTVINKKSGEIVPMEVNFNFDDPNLIILPLAFGKRQGREFIWNDLLSLETGSLKLANGRVIEKTLYNRRTRQDEPALFVALTFERREVLDSSNIKPMSNLIGVDRGENIPAVIALTDPEGCPLSRFKDSLGNPTHILRIGESYKEKQRTIQAKKEVEQRRAGGYSRKYASKAKNLADDMVRNTARDLLYYAVTQDAMLIFENLSRGFGRQGKRTFMAERQYTRMEDWLTAKLAYEGPLPSKTYLSKTLAQYTSKTCSNCGFTITSADYDRVLEKLKKTATGWMTTINGKELKVEGQITYYNRYKRQNVVKDLSVELDRLSEESVNNDISSWTKGRSGEALSLLKKRFSHRPVQEKFVCLNCGFETHADEQAALNIARSWLFLRSQEYKKYQTNKTTGNTDKRAFVETWQSFYRKKLKEVWKPAV

SEQ ID NO: 37978 - protein, 980 aa, synthetic construct
  REGION 1..980: note = engineered CasX variant
QEIKRINKIRRRLVKDSNTKKAGKTGPMKTLLVRVMTPDLRERLENLRKKPENIPQPISNTSRANLNKLLTDYTEMKKAILHVYWEEFQKDPVGLMSRVAQPASKKIDQNKLKPEMDEKGNLTTAGFACSQCGQPLFVYKLEQVSEKGKAYTNYFGRCNVAEHEKLILLAQLKPEKDSDEAVTYSLGKFGQRALDFYSIHVTKESTHPVKPLAQIAGNRYASHPVGKALSDACMGTIASFLSKYQDIIIEHQKVVKGNQKRLESLRELAGKENLEYPSVTLPPQPHTKEGVDAYNEVIARVRMWVNLNLWQKLKLSRDDAKPLLRLKGFPSFPLVERQANEVDWWDMVCNVKKLINEKKEDGKVFWQNLAGYKRQEALRPYLSSEEDRKKGKKFARYQLGDLLLHLEKKHGEDWGKVYDEAWERIDKKVEGLSKHIKLEEERRSEDAQSKAALTDWLRAKASFVIEGLKEADKDEFCRCELKLQKWYGDLRGKPFAIEAENSILDISGFSKQYNCAFIWQKDGVKKLNLYLIINYFKGGKLRFKKIKPEAFEANRFYTVINKKSGEIVPMEVNFNFDDPNLIILPLAFGKRQGREFIWNDLLSLETGSLKLANGRVIEKTLYNRRTRQDEPALFVALTFERREVLDSSNIKPMSNLIGVDRGENIPAVIALTDPEGCPLSRFKDSLGNPTHILRIGESYKEKQRTIQAKKEVEQRRAGGYSRKYASKAKNLADDMVRNTARDLLYYAVTQDAMLIFENLSRGFGRQGKRTFMAERQYTRMEDWLTAKLAYEGPLPSKTYLSKTLAQYTSKTCSNCGFTITSADYDRVLEKLKKTATGWMTTINGKELKVEGQITYYNRYKRQNVVKDLSVELDRLSEESVNNDISSWTKGRSGEALSLLKKRFSHRPVQEKFVCLNCGFETHADEQAALNIARSWLFLRSQEYKKYQTNKTTGNTDKRAFVETWQSFYRKKLKEVWKPAV

SEQ ID NO: 37979 - protein, 980 aa, synthetic construct
  REGION 1..980: note = engineered CasX variant
QEIKRINKIRRRLVKDSNTKKAGKTGPMKTLLVRVMTPDLRERLENLRKKPENIPQPISNTSRANLNKLLTDYTEMKKAILHVYWEEFQKDPVGLMSRVAQPASKKIDQNKLKPEMDEKGNLTTAGFACSQCGQPLFVYKLEQVSEKGKAYTNYFGRCNVAEHEKLILLAQLKPEKDSDEAVTYSLGKFGQRALDFYSIHVTKESTHPVKPLAQIAGNRYASSPVGKALSDACMGTIASFLSKYQDIIIEHQKVVKGNQKRLESLRELAGKENLEYPSVTLPPQPHTKEGVDAYNEVIARVRMWVNLNLWQKLKLSRDDAKPLLRLKGFPSFPLVERQANEVDWWDMVCNVKKLINEKKEDGKVFWQNLAGYKRQEALRPYLSSEEDRKKGKKFARYQLGDLLLHLEKKHGEDWGKVYDEAWERIDKKVEGLSKHIKLEEERRSEDAQSKAALTDWLRAKASFVIEGLKEADKDEFCRCELKLQKWYGDLRGKPFAIEAENSILDISGFSKQYNCAFIWQKDGVKKLNLYLIINYFKGGKLRFKKIKPEAFEANRFYTVINKKSGEIVPMEVNFNFDDPNLIILPLAFGKRQGREFIWNDLLSLETGSLKLANGRVIEKTLYNRRTRQDEPALFVALTFERREVLDSSNIKPMSNLIGVDRGENIPAVIALTDPEGCPLSRFKDSLGNPTHILRIGESYKEKQRTIQAKKEVEQRRAGGYSRKYASKAKNLADDMVRNTARDLLYYAVTQDAMLIFENLSRGFGRQGKRTFMAERQYTRMEDWLTAKLAYEGPLPSKTYLSKTLAQYTSKTCSNCGFTITSADYDRVLEKLKKTATGWMTTINGKELKVEGQITYYNRYKRQNVVKDLSVELDRLSEESVNNDISSWTKGRSGEALSLLKKRFSHRPVQEKFVCLNCGFETHADEQAALNIARSWLFLRSQEYKKYQTNKTTGNTDKRAFVETWQSFYRKKLKEVWKPAV

SEQ ID NO: 37980 - protein, 980 aa, synthetic construct
  REGION 1..980: note = engineered CasX variant
QEIKRINKIRRRLVKDSNTKKAGKTGPMKTLLVRVMTPDLRERLENLRKKPENIPQPISNTSRANLNKLLTDYTEMKKAILHVYWEEFQKDPVGLMSRVAQPASKKIDQNKLKPEMDEKGNLTTAGFACSQCGQPLFVYKLEQVSEKGKAYTNYFGRCNVAEHEKLILLAQLKPEKDSDEAVTYSLGKFGQRALDFYSIHVTKESTHPVKPLAQIAGNRYASTPVGKALSDACMGTIASFLSKYQDIIIEHQKVVKGNQKRLESLRELAGKENLEYPSVTLPPQPHTKEGVDAYNEVIARVRMWVNLNLWQKLKLSRDDAKPLLRLKGFPSFPLVERQANEVDWWDMVCNVKKLINEKKEDGKVFWQNLAGYKRQEALRPYLSSEEDRKKGKKFARYQLGDLLLHLEKKHGEDWGKVYDEAWERIDKKVEGLSKHIKLEEERRSEDAQSKAALTDWLRAKASFVIEGLKEADKDEFCRCELKLQKWYGDLRGKPFAIEAENSILDISGFSKQYNCAFIWQKDGVKKLNLYLIINYFKGGKLRFKKIKPEAFEANRFYTVINKKSGEIVPMEVNFNFDDPNLIILPLAFGKRQGREFIWNDLLSLETGSLKLANGRVIEKTLYNRRTRQDEPALFVALTFERREVLDSSNIKPMSNLIGVDRGENIPAVIALTDPEGCPLSRFKDSLGNPTHILRIGESYKEKQRTIQAKKEVEQRRAGGYSRKYASKAKNLADDMVRNTARDLLYYAVTQDAMLIFENLSRGFGRQGKRTFMAERQYTRMEDWLTAKLAYEGPLPSKTYLSKTLAQYTSKTCSNCGFTITSADYDRVLEKLKKTATGWMTTINGKELKVEGQITYYNRYKRQNVVKDLSVELDRLSEESVNNDISSWTKGRSGEALSLLKKRFSHRPVQEKFVCLNCGFETHADEQAALNIARSWLFLRSQEYKKYQTNKTTGNTDKRAFVETWQSFYRKKLKEVWKPAV

SEQ ID NO: 37981 - protein, 980 aa, synthetic construct
  REGION 1..980: note = engineered CasX variant
QEIKRINKIRRRLVKDSNTKKAGKTGPMKTLLVRVMTPDLRERLENLRKKPENIPQPISNTSRANLNKLLTDYTEMKKAILHVYWEEFQKDPVGLMSRVAQPASKKIDQNKLKPEMDEKGNLTTAGFACSQCGQPLFVYKLEQVSEKGKAYTNYFGRCNVAEHEKLILLAQLKPEKDSDEAVTYSLGKFGQRALDFYSIHVTKESTHPVKPLAQIAGNRYASAPVGKALSDACMGTIASFLSKYQDIIIEHQKVVKGNQKRLESLRELAGKENLEYPSVTLPPQPHTKEGVDAYNEVIARVRMWVNLNLWQKLKLSRDDAKPLLRLKGFPSFPLVERQANEVDWWDMVCNVKKLINEKKEDGKVFWQNLAGYKRQEALRPYLSSEEDRKKGKKFARYQLGDLLLHLEKKHGEDWGKVYDEAWERIDKKVEGLSKHIKLEEERRSEDAQSKAALTDWLRAKASFVIEGLKEADKDEFCRCELKLQKWYGDLRGKPFAIEAENSILDISGFSKQYNCAFIWQKDGVKKLNLYLIINYFKGGKLRFKKIKPEAFEANRFYTVINKKSGEIVPMEVNFNFDDPNLIILPLAFGKRQGREFIWNDLLSLETGSLKLANGRVIEKTLYNRRTRQDEPALFVALTFERREVLDSSNIKPMSNLIGVDRGENIPAVIALTDPEGCPLSRFKDSLGNPTHILRIGESYKEKQRTIQAKKEVEQRRAGGYSRKYASKAKNLADDMVRNTARDLLYYAVTQDAMLIFENLSRGFGRQGKRTFMAERQYTRMEDWLTAKLAYEGPLPSKTYLSKTLAQYTSKTCSNCGFTITSADYDRVLEKLKKTATGWMTTINGKELKVEGQITYYNRYKRQNVVKDLSVELDRLSEESVNNDISSWTKGRSGEALSLLKKRFSHRPVQEKFVCLNCGFETHADEQAALNIARSWLFLRSQEYKKYQTNKTTGNTDKRAFVETWQSFYRKKLKEVWKPAV

SEQ ID NO: 37982 - protein, 980 aa, synthetic construct
  REGION 1..980: note = engineered CasX variant
QEIKRINKIRRRLVKDSNTKKAGKTGPMKTLLVRVMTPDLRERLENLRKKPENIPQPISNTSRANLNKLLTDYTEMKKAILHVYWEEFQKDPVGLMSRVAQPASKKIDQNKLKPEMDEKGNLTTAGFACSQCGQPLFVYKLEQVSEKGKAYTNYFGRCNVAEHEKLILLAQLKPEKDSDEAVTYSLGKFGQRALDFYSIHVTKESTHPVKPLAQIAGNRYASVPVGKALSDACMGTIASFLSKYQDIIIEHQKVVKGNQKRLESLRELAGKENLEYPSVTLPPQPHTKEGVDAYNEVIARVRMWVNLNLWQKLKLSRDDAKPLLRLKGFPSFPLVERQANEVDWWDMVCNVKKLINEKKEDGKVFWQNLAGYKRQEALRPYLSSEEDRKKGKKFARYQLGDLLLHLEKKHGEDWGKVYDEAWERIDKKVEGLSKHIKLEEERRSEDAQSKAALTDWLRAKASFVIEGLKEADKDEFCRCELKLQKWYGDLRGKPFAIEAENSILDISGFSKQYNCAFIWQKDGVKKLNLYLIINYFKGGKLRFKKIKPEAFEANRFYTVINKKSGEIVPMEVNFNFDDPNLIILPLAFGKRQGREFIWNDLLSLETGSLKLANGRVIEKTLYNRRTRQDEPALFVALTFERREVLDSSNIKPMSNLIGVDRGENIPAVIALTDPEGCPLSRFKDSLGNPTHILRIGESYKEKQRTIQAKKEVEQRRAGGYSRKYASKAKNLADDMVRNTARDLLYYAVTQDAMLIFENLSRGFGRQGKRTFMAERQYTRMEDWLTAKLAYEGPLPSKTYLSKTLAQYTSKTCSNCGFTITSADYDRVLEKLKKTATGWMTTINGKELKVEGQITYYNRYKRQNVVKDLSVELDRLSEESVNNDISSWTKGRSGEALSLLKKRFSHRPVQEKFVCLNCGFETHADEQAALNIARSWLFLRSQEYKKYQTNKTTGNTDKRAFVETWQSFYRKKLKEVWKPAV

SEQ ID NO: 37983 - protein, 980 aa, synthetic construct
  REGION 1..980: note = engineered CasX variant
QEIKRINKIRRRLVKDSNTKKAGKTGPMKTLLVRVMTPDLRERLENLRKKPENIPQPISNTSRANLNKLLTDYTEMKKAILHVYWEEFQKDPVGLMSRVAQPASKKIDQNKLKPEMDEKGNLTTAGFACSQCGQPLFVYKLEQVSEKGKAYTNYFGRCNVAEHEKLIKLAQLKPEKDSDEAVTYSLGKFGQRALDFYSIHVTKESTHPVKPLAQIAGNRYASGPVGKALSDACMGTIASFLSKYQDIIIEHQKVVKGNQKRLESLRELAGKENLEYPSVTLPPQPHTKEGVDAYNEVIARVRMWVNLNLWQKLKLSRDDAKPLLRLKGFPSFPLVERQANEVDWWDMVCNVKKLINEKKEDGKVFWQNLAGYKRQEALRPYLSSEEDRKKGKKFARYQLGDLLLHLEKKHGEDWGKVYDEAWERIDKKVEGLSKHIKLEEERRSEDAQSKAALTDWLRAKASFVIEGLKEADKDEFCRCELKLQKWYGDLRGKPFAIEAENSILDISGFSKQYNCAFIWQKDGVKKLNLYLIINYFKGGKLRFKKIKPEAFEANRFYTVINKKSGEIVPMEVNFNFDDPNLIILPLAFGKRQGREFIWNDLLSLETGSLKLANGRVIEKTLYNRRTRQDEPALFVALTFERREVLDSSNIKPMSNLIGVDRGENIPAVIALTDPEGCPLSRFKDSLGNPTHILRIGESYKEKQRTIQAKKEVEQRRAGGYSRKYASKAKNLADDMVRNTARDLLYYAVTQDAMLIFENLSRGFGRQGKRTFMAERQYTRMEDWLTAKLAYEGPLPSKTYLSKTLAQYTSKTCSNCGFTITSADYDRVLEKLKKTATGWMTTINGKELKVEGQITYYNRYKRQNVVKDLSVELDRLSEESVNNDISSWTKGRSGEALSLLKKRFSHRPVQEKFVCLNCGFETHADEQAALNIARSWLFLRSQEYKKYQTNKTTGNTDKRAFVETWQSFYRKKLKEVWKPAV

SEQ ID NO: 37984 - protein, 979 aa, synthetic construct
  REGION 1..979: note = engineered CasX variant
QEIKRINKIRRRLVKDSNTKKAGKTGPMKTLLVRVMTPDLRERLENLRKKPENIPQPISNTSRANLNKLLTDYTEMKKAILHVYWEEFQKDPVGLMSRVAQPASKKIDQNKLKPEMDEKGNLTTAGFACSQCGQPLFVYKLEQVSEKGKAYTNYFGRCNVAEHEKLILLAQLKPEKDSDEAVTYSLGKFGQRALDFYSIHVTKESTHPVKPLAQIAGNRYASPVGKALSDACMGTIASFLSKYQDIIIEHQKVVKGNQKRLESLRELAGKENLEYPSVTLPPQPHTKEGVDAYNEVIARVRMWVNLNLWQKLKLSRDDAKPLLRLKGFPSFPLVERQANEVDWWDMVCNVKKLINEKKEDGKVFWQNLAGYKRQEALRPYLSSEEDRKKGKKFARYQLGDLLLHLEKKHGEDWGKVYDEAWERIDKKVEGLSKHIKLEEERRSEDAQSKAALTDWLRAKASFVIEGLKEADKDEFCRCELKLQKWYGDLRGKPFAIEAENSILDISGFSKQYNCAFIWQKDGVKKLNLYLIINYFKGGKLRFKKIKPEAFEANRFYTVINKKSGEIVPMEVNFNFDDPNLIILPLAFGKRQGREFIWNDLLSLETGSLKLANGRVIEKTLYNRRTRQDEPALFVALTFERREVLDSSNIKPMSNLIGVDRGENIPAVIALTDPEGCPLSRFKDSLGNPTHILRIGESYKEKQRTIQAKKEVEQRRAGGYSRKYASKAKNLADDMVRNTARDLLYYAVTQDAMLIFENLSRGFGRQGKRTFMAERQYTRMEDWLTAKLAYEGPLPSKTYLSKTLAQYTSKTCSNCGFTITSADYDRVLEKLKKTATGWMTTINGKELKVEGQITYYNRYKRQNVVKDLSVELDRLSEESVNNDISSWTKGRSGEALSLLKKRFSHRPVQEKFVCLNCGFETHADEQAALNIARSWLFLRSQEYKKYQTNKTTGNTDKRAFVETWQSFYRKKLKEVWKPAV

SEQ ID NO: 37985 - protein, 980 aa, synthetic construct
  REGION 1..980: note = engineered CasX variant
QEIKRINKIRRRLVKDSNTKKAGKTGPMKTLLVRVMTPDLRERLENLRKKPENIPQPISNTSRANLNKLLTDYTEMKKAILHVYWEEFQKDPVGLMSRVAQPASKKIDQNKLKPEMDEKGNLTTAGFACSQCGQPLFVYKLEQVSEKGKAYTNYFGRCNVAEHEKLILLAQLKPEKDSDEAVTYSLGKFGQRALDFYSIHVTKESTHPVKPLAQIAGNRYASYPVGKALSDACMGTIASFLSKYQDIIIEHQKVVKGNQKRLESLRELAGKENLEYPSVTLPPQPHTKEGVDAYNEVIARVRMWVNLNLWQKLKLSRDDAKPLLRLKGFPSFPLVERQANEVDWWDMVCNVKKLINEKKEDGKVFWQNLAGYKRQEALRPYLSSEEDVRKKGKKFARYQLGDLLLHLEKKHGEDWGKVYDEAWERIDKKVEGLSKHIKLEEERRSEDAQSKAALTDWLRAKASFVIEGLKEADKDEFCRCELKLQKWYGDLRGKPFAIEAENSILDISGFSKQYNCAFIWQKDGVKKLNLYLIINYFKGGKLRFKKIKPEAFEANRFYTVINKKSGEIVPMEVNFNFDDPNLIILPLAFGKRQGREFIWNDLLSLETGSLKLANGRVIEKTLYNRRTRQDEPALFVALTFERREVLDSSNIKPMSNLIGVDRGENIPAVIALTDPEGCPLSRFKDSLGNPTHILRIGESYKEKQRTIQAKKEVEQRRAGGYSRKYASKAKNLADDMVRNTARDLLYYAVTQDAMLIFENLSRGFGRQGKRTFMAERQYTRMEDWLTAKLAYEGLPSKTYLSKTLAQYTSKTCSNCGFTITSADYDRVLEKLKKTATGWMTTINGKELKVEGQITYYNRYKRQNVVKDLSVELDRLSEESVNNDISSWTKGRSGEALSLLKKRFSHRPVQEKFVCLNCGFETHADEQAALNIARSWLFLRSQEYKKYQTNKTTGNTDKRAFVETWQSFYRKKLKEVWKPAV

SEQ ID NO: 37986 - protein, 980 aa, synthetic construct
  REGION 1..980: note = engineered CasX variant
QEIKRINKIRRRLVKDSNTKKAGKTGPMKTLLVRVMTPDLRERLENLRKKPENIPQPISNTSRANLNKLLTDYTEMKKAILHVYWEEFQKDPVGLMSRVAQPASKKIDQNKLKPEMDEKGNLTTAGFACSQCGQPLFVYKLEQVSEKGKAYTNYFGRCNVAEHEKLILLAQLKPEKDSDEAVTYSLGKFGQRALDFYSIHVTKESTHPVKPLAQIAGNRYASHPVGKALSDACMGTIASFLSKYQDIIIEHQKVVKGNQKRLESLRELAGKENLEYPSVTLPPQPHTKEGVDAYNEVIARVRMWVNLNLWQKLKLSRDDAKPLLRLKGFPSFPLVERQANEVDWWDMVCNVKKLINEKKEDGKVFWQNLAGYKRQEALRPYLSSEEDVRKKGKKFARYQLGDLLLHLEKKHGEDWGKVYDEAWERIDKKVEGLSKHIKLEEERRSEDAQSKAALTDWLRAKASFVIEGLKEADKDEFCRCELKLQKWYGDLRGKPFAIEAENSILDISGFSKQYNCAFIWQKDGVKKLNLYLIINYFKGGKLRFKKIKPEAFEANRFYTVINKKSGEIVPMEVNFNFDDPNLIILPLAFGKRQGREFIWNDLLSLETGSLKLANGRVIEKTLYNRRTRQDEPALFVALTFERREVLDSSNIKPMSNLIGVDRGENIPAVIALTDPEGCPLSRFKDSLGNPTHILRIGESYKEKQRTIQAKKEVEQRRAGGYSRKYASKAKNLADDMVRNTARDLLYYAVTQDAMLIFENLSRGFGRQGKRTFMAERQYTRMEDWLTAKLAYEGLPSKTYLSKTLAQYTSKTCSNCGFTITSADYDRVLEKLKKTATGWMTTINGKELKVEGQITYYNRYKRQNVVKDLSVELDRLSEESVNNDISSWTKGRSGEALSLLKKRFSHRPVQEKFVCLNCGFETHADEQAALNIARSWLFLRSQEYKKYQTNKTTGNTDKRAFVETWQSFYRKKLKEVWKPAV

SEQ ID NO: 37987 - protein, 980 aa, synthetic construct
  REGION 1..980: note = engineered CasX variant
QEIKRINKIRRRLVKDSNTKKAGKTGPMKTLLVRVMTPDLRERLENLRKKPENIPQPISNTSRANLNKLLTDYTEMKKAILHVYWEEFQKDPVGLMSRVAQPASKKIDQNKLKPEMDEKGNLTTAGFACSQCGQPLFVYKLEQVSEKGKAYTNYFGRCNVAEHEKLILLAQLKPEKDSDEAVTYSLGKFGQRALDFYSIHVTKESTHPVKPLAQIAGNRYASSPVGKALSDACMGTIASFLSKYQDIIIEHQKVVKGNQKRLESLRELAGKENLEYPSVTLPPQPHTKEGVDAYNEVIARVRMWVNLNLWQKLKLSRDDAKPLLRLKGFPSFPLVERQANEVDWWDMVCNVKKLINEKKEDGKVFWQNLAGYKRQEALRPYLSSEEDVRKKGKKFARYQLGDLLLHLEKKHGEDWGKVYDEAWERIDKKVEGLSKHIKLEEERRSEDAQSKAALTDWLRAKASFVIEGLKEADKDEFCRCELKLQKWYGDLRGKPFAIEAENSILDISGFSKQYNCAFIWQKDGVKKLNLYLIINYFKGGKLRFKKIKPEAFEANRFYTVINKKSGEIVPMEVNFNFDDPNLIILPLAFGKRQGREFIWNDLLSLETGSLKLANGRVIEKTLYNRRTRQDEPALFVALTFERREVLDSSNIKPMSNLIGVDRGENIPAVIALTDPEGCPLSRFKDSLGNPTHILRIGESYKEKQRTIQAKKEVEQRRAGGYSRKYASKAKNLADDMVRNTARDLLYYAVTQDAMLIFENLSRGFGRQGKRTFMAERQYTRMEDWLTAKLAYEGLPSKTYLSKTLAQYTSKTCSNCGFTITSADYDRVLEKLKKTATGWMTTINGKELKVEGQITYYNRYKRQNVVKDLSVELDRLSEESVNNDISSWTKGRSGEALSLLKKRFSHRPVQEKFVCLNCGFETHADEQAALNIARSWLFLRSQEYKKYQTNKTTGNTDKRAFVETWQSFYRKKLKEVWKPAV

SEQ ID NO: 37988 - protein, 980 aa, synthetic construct
  REGION 1..980: note = engineered CasX variant
QEIKRINKIRRRLVKDSNTKKAGKTGPMKTLLVRVMTPDLRERLENLRKKPENIPQPISNTSRANLNKLLTDYTEMKKAILHVYWEEFQKDPVGLMSRVAQPASKKIDQNKLKPEMDEKGNLTTAGFACSQCGQPLFVYKLEQVSEKGKAYTNYFGRCNVAEHEKLILLAQLKPEKDSDEAVTYSLGKFGQRALDFYSIHVTKESTHPVKPLAQIAGNRYASTPVGKALSDACMGTIASFLSKYQDIIIEHQKVVKGNQKRLESLRELAGKENLEYPSVTLPPQPHTKEGVDAYNEVIARVRMWVNLNLWQKLKLSRDDAKPLLRLKGFPSFPLVERQANEVDWWDMVCNVKKLINEKKEDGKVFWQNLAGYKRQEALRPYLSSEEDVRKKGKKFARYQLGDLLLHLEKKHGEDWGKVYDEAWERIDKKVEGLSKHIKLEEERRSEDAQSKAALTDWLRAKASFVIEGLKEADKDEFCRCELKLQKWYGDLRGKPFAIEAENSILDISGFSKQYNCAFIWQKDGVKKLNLYLIINYFKGGKLRFKKIKPEAFEANRFYTVINKKSGEIVPMEVNFNFDDPNLIILPLAFGKRQGREFIWNDLLSLETGSLKLANGRVIEKTLYNRRTRQDEPALFVALTFERREVLDSSNIKPMSNLIGVDRGENIPAVIALTDPEGCPLSRFKDSLGNPTHILRIGESYKEKQRTIQAKKEVEQRRAGGYSRKYASKAKNLADDMVRNTARDLLYYAVTQDAMLIFENLSRGFGRQGKRTFMAERQYTRMEDWLTAKLAYEGLPSKTYLSKTLAQYTSKTCSNCGFTITSADYDRVLEKLKKTATGWMTTINGKELKVEGQITYYNRYKRQNVVKDLSVELDRLSEESVNNDISSWTKGRSGEALSLLKKRFSHRPVQEKFVCLNCGFETHADEQAALNIARSWLFLRSQEYKKYQTNKTTGNTDKRAFVETWQSFYRKKLKEVWKPAV

SEQ ID NO: 37989 - protein, 980 aa, synthetic construct
  REGION 1..980: note = engineered CasX variant
QEIKRINKIRRRLVKDSNTKKAGKTGPMKTLLVRVMTPDLRERLENLRKKPENIPQPISNTSRANLNKLLTDYTEMKKAILHVYWEEFQKDPVGLMSRVAQPASKKIDQNKLKPEMDEKGNLTTAGFACSQCGQPLFVYKLEQVSEKGKAYTNYFGRCNVAEHEKLILLAQLKPEKDSDEAVTYSLGKFGQRALDFYSIHVTKESTHPVKPLAQIAGNRYASAPVGKALSDACMGTIASFLSKYQDIIIEHQKVVKGNQKRLESLRELAGKENLEYPSVTLPPQPHTKEGVDAYNEVIARVRMWVNLNLWQKLKLSRDDAKPLLRLKGFPSFPLVERQANEVDWWDMVCNVKKLINEKKEDGKVFWQNLAGYKRQEALRPYLSSEEDVRKKGKKFARYQLGDLLLHLEKKHGEDWGKVYDEAWERIDKKVEGLSKHIKLEEERRSEDAQSKAALTDWLRAKASFVIEGLKEADKDEFCRCELKLQKWYGDLRGKPFAIEAENSILDISGFSKQYNCAFIWQKDGVKKLNLYLIINYFKGGKLRFKKIKPEAFEANRFYTVINKKSGEIVPMEVNFNFDDPNLIILPLAFGKRQGREFIWNDLLSLETGSLKLANGRVIEKTLYNRRTRQDEPALFVALTFERREVLDSSNIKPMSNLIGVDRGENIPAVIALTDPEGCPLSRFKDSLGNPTHILRIGESYKEKQRTIQAKKEVEQRRAGGYSRKYASKAKNLADDMVRNTARDLLYYAVTQDAMLIFENLSRGFGRQGKRTFMAERQYTRMEDWLTAKLAYEGLPSKTYLSKTLAQYTSKTCSNCGFTITSADYDRVLEKLKKTATGWMTTINGKELKVEGQITYYNRYKRQNVVKDLSVELDRLSEESVNNDISSWTKGRSGEALSLLKKRFSHRPVQEKFVCLNCGFETHADEQAALNIARSWLFLRSQEYKKYQTNKTTGNTDKRAFVETWQSFYRKKLKEVWKPAV

SEQ ID NO: 37990 - protein, 980 aa, synthetic construct
  REGION 1..980: note = engineered CasX variant
QEIKRINKIRRRLVKDSNTKKAGKTGPMKTLLVRVMTPDLRERLENLRKKPENIPQPISNTSRANLNKLLTDYTEMKKAILHVYWEEFQKDPVGLMSRVAQPASKKIDQNKLKPEMDEKGNLTTAGFACSQCGQPLFVYKLEQVSEKGKAYTNYFGRCNVAEHEKLILLAQLKPEKDSDEAVTYSLGKFGQRALDFYSIHVTKESTHPVKPLAQIAGNRYASVPVGKALSDACMGTIASFLSKYQDIIIEHQKVVKGNQKRLESLRELAGKENLEYPSVTLPPQPHTKEGVDAYNEVIARVRMWVNLNLWQKLKLSRDDAKPLLRLKGFPSFPLVERQANEVDWWDMVCNVKKLINEKKEDGKVFWQNLAGYKRQEALRPYLSSEEDVRKKGKKFARYQLGDLLLHLEKKHGEDWGKVYDEAWERIDKKVEGLSKHIKLEEERRSEDAQSKAALTDWLRAKASFVIEGLKEADKDEFCRCELKLQKWYGDLRGKPFAIEAENSILDISGFSKQYNCAFIWQKDGVKKLNLYLIINYFKGGKLRFKKIKPEAFEANRFYTVINKKSGEIVPMEVNFNFDDPNLIILPLAFGKRQGREFIWNDLLSLETGSLKLANGRVIEKTLYNRRTRQDEPALFVALTFERREVLDSSNIKPMSNLIGVDRGENIPAVIALTDPEGCPLSRFKDSLGNPTHILRIGESYKEKQRTIQAKKEVEQRRAGGYSRKYASKAKNLADDMVRNTARDLLYYAVTQDAMLIFENLSRGFGRQGKRTFMAERQYTRMEDWLTAKLAYEGLPSKTYLSKTLAQYTSKTCSNCGFTITSADYDRVLEKLKKTATGWMTTINGKELKVEGQITYYNRYKRQNVVKDLSVELDRLSEESVNNDISSWTKGRSGEALSLLKKRFSHRPVQEKFVCLNCGFETHADEQAALNIARSWLFLRSQEYKKYQTNKTTGNTDKRAFVETWQSFYRKKLKEVWKPAV

SEQ ID NO: 37991 - protein, 980 aa, synthetic construct
  REGION 1..980: note = engineered CasX variant
QEIKRINKIRRRLVKDSNTKKAGKTGPMKTLLVRVMTPDLRERLENLRKKPENIPQPISNTSRANLNKLLTDYTEMKKAILHVYWEEFQKDPVGLMSRVAQPASKKIDQNKLKPEMDEKGNLTTAGFACSQCGQPLFVYKLEQVSEKGKAYTNYFGRCNVAEHEKLIKLAQLKPEKDSDEAVTYSLGKFGQRALDFYSIHVTKESTHPVKPLAQIAGNRYASGPVGKALSDACMGTIASFLSKYQDIIIEHQKVVKGNQKRLESLRELAGKENLEYPSVTLPPQPHTKEGVDAYNEVIARVRMWVNLNLWQKLKLSRDDAKPLLRLKGFPSFPLVERQANEVDWWDMVCNVKKLINEKKEDGKVFWQNLAGYKRQEALRPYLSSEEDVRKKGKKFARYQLGDLLLHLEKKHGEDWGKVYDEAWERIDKKVEGLSKHIKLEEERRSEDAQSKAALTDWLRAKASFVIEGLKEADKDEFCRCELKLQKWYGDLRGKPFAIEAENSILDISGFSKQYNCAFIWQKDGVKKLNLYLIINYFKGGKLRFKKIKPEAFEANRFYTVINKKSGEIVPMEVNFNFDDPNLIILPLAFGKRQGREFIWNDLLSLETGSLKLANGRVIEKTLYNRRTRQDEPALFVALTFERREVLDSSNIKPMSNLIGVDRGENIPAVIALTDPEGCPLSRFKDSLGNPTHILRIGESYKEKQRTIQAKKEVEQRRAGGYSRKYASKAKNLADDMVRNTARDLLYYAVTQDAMLIFENLSRGFGRQGKRTFMAERQYTRMEDWLTAKLAYEGLPSKTYLSKTLAQYTSKTCSNCGFTITSADYDRVLEKLKKTATGWMTTINGKELKVEGQITYYNRYKRQNVVKDLSVELDRLSEESVNNDISSWTKGRSGEALSLLKKRFSHRPVQEKFVCLNCGFETHADEQAALNIARSWLFLRSQEYKKYQTNKTTGNTDKRAFVETWQSFYRKKLKEVWKPAV

SEQ ID NO: 37992 - protein, 979 aa, synthetic construct
  REGION 1..979: note = engineered CasX variant
QEIKRINKIRRRLVKDSNTKKAGKTGPMKTLLVRVMTPDLRERLENLRKKPENIPQPISNTSRANLNKLLTDYTEMKKAILHVYWEEFQKDPVGLMSRVAQPASKKIDQNKLKPEMDEKGNLTTAGFACSQCGQPLFVYKLEQVSEKGKAYTNYFGRCNVAEHEKLILLAQLKPEKDSDEAVTYSLGKFGQRALDFYSIHVTKESTHPVKPLAQIAGNRYASPVGKALSDACMGTIASFLSKYQDIIIEHQKVVKGNQKRLESLRELAGKENLEYPSVTLPPQPHTKEGVDAYNEVIARVRMWVNLNLWQKLKLSRDDAKPLLRLKGFPSFPLVERQANEVDWWDMVCNVKKLINEKKEDGKVFWQNLAGYKRQEALRPYLSSEEDVRKKGKKFARYQLGDLLLHLEKKHGEDWGKVYDEAWERIDKKVEGLSKHIKLEEERRSEDAQSKAALTDWLRAKASFVIEGLKEADKDEFCRCELKLQKWYGDLRGKPFAIEAENSILDISGFSKQYNCAFIWQKDGVKKLNLYLIINYFKGGKLRFKKIKPEAFEANRFYTVINKKSGEIVPMEVNFNFDDPNLIILPLAFGKRQGREFIWNDLLSLETGSLKLANGRVIEKTLYNRRTRQDEPALFVALTFERREVLDSSNIKPMSNLIGVDRGENIPAVIALTDPEGCPLSRFKDSLGNPTHILRIGESYKEKQRTIQAKKEVEQRRAGGYSRKYASKAKNLADDMVRNTARDLLYYAVTQDAMLIFENLSRGFGRQGKRTFMAERQYTRMEDWLTAKLAYEGLPSKTYLSKTLAQYTSKTCSNCGFTITSADYDRVLEKLKKTATGWMTTINGKELKVEGQITYYNRYKRQNVVKDLSVELDRLSEESVNNDISSWTKGRSGEALSLLKKRFSHRPVQEKFVCLNCGFETHADEQAALNIARSWLFLRSQEYKKYQTNKTTGNTDKRAFVETWQSFYRKKLKEVWKPAV

SEQ ID NO: 37993 - protein, 979 aa, synthetic construct
  REGION 1..979: note = engineered CasX variant
QEIKRINKIRRRLVKDSNTKKAGKTGPMKTLLVRVMTPDLRERLENLRKKPENIPQPISNTSRANLNKLLTDYTEMKKAILHVYWEEFQKDPVGLMSRVAQPASKKIDQNKLKPEMDEKGNLTTAGFACSQCGQPLFVYKLEQVSEKGKAYTNYFGRCNVAEHEKLILLAQLKPEKDSDEAVTYSLGKFGQRALDFYSIHVTKESTHPVKPLAQIAGNRYASYPVGKALSDACMGTIASFLSKYQDIIIEHQKVVKGNQKRLESLRELAGKENLEYPSVTLPPQPHTKEGVDAYNEVIARVRMWVNLNLWQKLKLSRDDAKPLLRLKGFPSFPLVERQANEVDWWDMVCNVKKLINEKKEDGKVFWQNLAGYKRQEALRPYLSSEEDRKKGKKFARYQLGDLLLHLEKKHGEDWGKVYDEAWERIDKKVEGLSKHIKLEEERRSEDAQSKAALTDWLRAKASFVIEGLKEADKDEFCRCELKLQKWYGDLRGKPFAIEAENSILDISGFSKQYNCAFIWQKDGVKKLNLYLIINYFKGGKLRFKKIKPEAFEANRFYTVINKKSGEIVPMEVNFNFDDPNLIILPLAFGKRQGREFIWNDLLSLETGSLKLANGRVIEKTLYNRRTRQDEPALFVALTFERREVLDSSNIKPMSNLIGVDRGENIPAVIALTDPEGCPLSRFKDSLGNPTHILRIGESYKEKQRTIQAKKEVEQRRAGGYSRKYASKAKNLADDMVRNTARDLLYYAVTQDAMLIFENLSRGFGRQGKRTFMAERQYTRMEDWLTAKLAYEGLPSKTYLSKTLAQYTSKTCSNCGFTITSADYDRMLEKLKKTATGWMTTINGKELKVEGQITYYNRYKRQNVVKDLSVELDRLSEESVNNDISSWTKGRSGEALSLLKKRFSHRPVQEKFVCLNCGFETHADEQAALNIARSWLFLRSQEYKKYQTNKTTGNTDKRAFVETWQSFYRKKLKEVWKPAV

SEQ ID NO: 37994 - protein, 979 aa, synthetic construct
  REGION 1..979: note = engineered CasX variant
QEIKRINKIRRRLVKDSNTKKAGKTGPMKTLLVRVMTPDLRERLENLRKKPENIPQPISNTSRANLNKLLTDYTEMKKAILHVYWEEFQKDPVGLMSRVAQPASKKIDQNKLKPEMDEKGNLTTAGFACSQCGQPLFVYKLEQVSEKGKAYTNYFGRCNVAEHEKLILLAQLKPEKDSDEAVTYSLGKFGQRALDFYSIHVTKESTHPVKPLAQIAGNRYASHPVGKALSDACMGTIASFLSKYQDIIIEHQKVVKGNQKRLESLRELAGKENLEYPSVTLPPQPHTKEGVDAYNEVIARVRMWVNLNLWQKLKLSRDDAKPLLRLKGFPSFPLVERQANEVDWWDMVCNVKKLINEKKEDGKVFWQNLAGYKRQEALRPYLSSEEDRKKGKKFARYQLGDLLLHLEKKHGEDWGKVYDEAWERIDKKVEGLSKHIKLEEERRSEDAQSKAALTDWLRAKASFVIEGLKEADKDEFCRCELKLQKWYGDLRGKPFAIEAENSILDISGFSKQYNCAFIWQKDGVKKLNLYLIINYFKGGKLRFKKIKPEAFEANRFYTVINKKSGEIVPMEVNFNFDDPNLIILPLAFGKRQGREFIWNDLLSLETGSLKLANGRVIEKTLYNRRTRQDEPALFVALTFERREVLDSSNIKPMSNLIGVDRGENIPAVIALTDPEGCPLSRFKDSLGNPTHILRIGESYKEKQRTIQAKKEVEQRRAGGYSRKYASKAKNLADDMVRNTARDLLYYAVTQDAMLIFENLSRGFGRQGKRTFMAERQYTRMEDWLTAKLAYEGLPSKTYLSKTLAQYTSKTCSNCGFTITSADYDRMLEKLKKTATGWMTTINGKELKVEGQITYYNRYKRQNVVKDLSVELDRLSEESVNNDISSWTKGRSGEALSLLKKRFSHRPVQEKFVCLNCGFETHADEQAALNIARSWLFLRSQEYKKYQTNKTTGNTDKRAFVETWQSFYRKKLKEVWKPAV

SEQ ID NO: 37995 - protein, 979 aa, synthetic construct
  REGION 1..979: note = engineered CasX variant
QEIKRINKIRRRLVKDSNTKKAGKTGPMKTLLVRVMTPDLRERLENLRKKPENIPQPISNTSRANLNKLLTDYTEMKKAILHVYWEEFQKDPVGLMSRVAQPASKKIDQNKLKPEMDEKGNLTTAGFACSQCGQPLFVYKLEQVSEKGKAYTNYFGRCNVAEHEKLILLAQLKPEKDSDEAVTYSLGKFGQRALDFYSIHVTKESTHPVKPLAQIAGNRYASSPVGKALSDACMGTIASFLSKYQDIIIEHQKVVKGNQKRLESLRELAGKENLEYPSVTLPPQPHTKEGVDAYNEVIARVRMWVNLNLWQKLKLSRDDAKPLLRLKGFPSFPLVERQANEVDWWDMVCNVKKLINEKKEDGKVFWQNLAGYKRQEALRPYLSSEEDRKKGKKFARYQLGDLLLHLEKKHGEDWGKVYDEAWERIDKKVEGLSKHIKLEEERRSEDAQSKAALTDWLRAKASFVIEGLKEADKDEFCRCELKLQKWYGDLRGKPFAIEAENSILDISGFSKQYNCAFIWQKDGVKKLNLYLIINYFKGGKLRFKKIKPEAFEANRFYTVINKKSGEIVPMEVNFNFDDPNLIILPLAFGKRQGREFIWNDLLSLETGSLKLANGRVIEKTLYNRRTRQDEPALFVALTFERREVLDSSNIKPMSNLIGVDRGENIPAVIALTDPEGCPLSRFKDSLGNPTHILRIGESYKEKQRTIQAKKEVEQRRAGGYSRKYASKAKNLADDMVRNTARDLLYYAVTQDAMLIFENLSRGFGRQGKRTFMAERQYTRMEDWLTAKLAYEGLPSKTYLSKTLAQYTSKTCSNCGFTITSADYDRMLEKLKKTATGWMTTINGKELKVEGQITYYNRYKRQNVVKDLSVELDRLSEESVNNDISSWTKGRSGEALSLLKKRFSHRPVQEKFVCLNCGFETHADEQAALNIARSWLFLRSQEYKKYQTNKTTGNTDKRAFVETWQSFYRKKLKEVWKPAV

SEQ ID NO: 37996 - protein, 979 aa, synthetic construct
  REGION 1..979: note = engineered CasX variant
QEIKRINKIRRRLVKDSNTKKAGKTGPMKTLLVRVMTPDLRERLENLRKKPENIPQPISNTSRANLNKLLTDYTEMKKAILHVYWEEFQKDPVGLMSRVAQPASKKIDQNKLKPEMDEKGNLTTAGFACSQCGQPLFVYKLEQVSEKGKAYTNYFGRCNVAEHEKLILLAQLKPEKDSDEAVTYSLGKFGQRALDFYSIHVTKESTHPVKPLAQIAGNRYASTPVGKALSDACMGTIASFLSKYQDIIIEHQKVVKGNQKRLESLRELAGKENLEYPSVTLPPQPHTKEGVDAYNEVIARVRMWVNLNLWQKLKLSRDDAKPLLRLKGFPSFPLVERQANEVDWWDMVCNVKKLINEKKEDGKVFWQNLAGYKRQEALRPYLSSEEDRKKGKKFARYQLGDLLLHLEKKHGEDWGKVYDEAWERIDKKVEGLSKHIKLEEERRSEDAQSKAALTDWLRAKASFVIEGLKEADKDEFCRCELKLQKWYGDLRGKPFAIEAENSILDISGFSKQYNCAFIWQKDGVKKLNLYLIINYFKGGKLRFKKIKPEAFEANRFYTVINKKSGEIVPMEVNFNFDDPNLIILPLAFGKRQGREFIWNDLLSLETGSLKLANGRVIEKTLYNRRTRQDEPALFVALTFERREVLDSSNIKPMSNLIGVDRGENIPAVIALTDPEGCPLSRFKDSLGNPTHILRIGESYKEKQRTIQAKKEVEQRRAGGYSRKYASKAKNLADDMVRNTARDLLYYAVTQDAMLIFENLSRGFGRQGKRTFMAERQYTRMEDWLTAKLAYEGLPSKTYLSKTLAQYTSKTCSNCGFTITSADYDRMLEKLKKTATGWMTTINGKELKVEGQITYYNRYKRQNVVKDLSVELDRLSEESVNNDISSWTKGRSGEALSLLKKRFSHRPVQEKFVCLNCGFETHADEQAALNIARSWLFLRSQEYKKYQTNKTTGNTDKRAFVETWQSFYRKKLKEVWKPAV

SEQ ID NO: 37997 - protein, 979 aa, synthetic construct
  REGION 1..979: note = engineered CasX variant
QEIKRINKIRRRLVKDSNTKKAGKTGPMKTLLVRVMTPDLRERLENLRKKPENIPQPISNTSRANLNKLLTDYTEMKKAILHVYWEEFQKDPVGLMSRVAQPASKKIDQNKLKPEMDEKGNLTTAGFACSQCGQPLFVYKLEQVSEKGKAYTNYFGRCNVAEHEKLILLAQLKPEKDSDEAVTYSLGKFGQRALDFYSIHVTKESTHPVKPLAQIAGNRYASAPVGKALSDACMGTIASFLSKYQDIIIEHQKVVKGNQKRLESLRELAGKENLEYPSVTLPPQPHTKEGVDAYNEVIARVRMWVNLNLWQKLKLSRDDAKPLLRLKGFPSFPLVERQANEVDWWDMVCNVKKLINEKKEDGKVFWQNLAGYKRQEALRPYLSSEEDRKKGKKFARYQLGDLLLHLEKKHGEDWGKVYDEAWERIDKKVEGLSKHIKLEEERRSEDAQSKAALTDWLRAKASFVIEGLKEADKDEFCRCELKLQKWYGDLRGKPFAIEAENSILDISGFSKQYNCAFIWQKDGVKKLNLYLIINYFKGGKLRFKKIKPEAFEANRFYTVINKKSGEIVPMEVNFNFDDPNLIILPLAFGKRQGREFIWNDLLSLETGSLKLANGRVIEKTLYNRRTRQDEPALFVALTFERREVLDSSNIKPMSNLIGVDRGENIPAVIALTDPEGCPLSRFKDSLGNPTHILRIGESYKEKQRTIQAKKEVEQRRAGGYSRKYASKAKNLADDMVRNTARDLLYYAVTQDAMLIFENLSRGFGRQGKRTFMAERQYTRMEDWLTAKLAYEGLPSKTYLSKTLAQYTSKTCSNCGFTITSADYDRMLEKLKKTATGWMTTINGKELKVEGQITYYNRYKRQNVVKDLSVELDRLSEESVNNDISSWTKGRSGEALSLLKKRFSHRPVQEKFVCLNCGFETHADEQAALNIARSWLFLRSQEYKKYQTNKTTGNTDKRAFVETWQSFYRKKLKEVWKPAV

SEQ ID NO: 37998 - protein, 979 aa, synthetic construct
  REGION 1..979: note = engineered CasX variant
QEIKRINKIRRRLVKDSNTKKAGKTGPMKTLLVRVMTPDLRERLENLRKKPENIPQPISNTSRANLNKLLTDYTEMKKAILHVYWEEFQKDPVGLMSRVAQPASKKIDQNKLKPEMDEKGNLTTAGFACSQCGQPLFVYKLEQVSEKGKAYTNYFGRCNVAEHEKLILLAQLKPEKDSDEAVTYSLGKFGQRALDFYSIHVTKESTHPVKPLAQIAGNRYASVPVGKALSDACMGTIASFLSKYQDIIIEHQKVVKGNQKRLESLRELAGKENLEYPSVTLPPQPHTKEGVDAYNEVIARVRMWVNLNLWQKLKLSRDDAKPLLRLKGFPSFPLVERQANEVDWWDMVCNVKKLINEKKEDGKVFWQNLAGYKRQEALRPYLSSEEDRKKGKKFARYQLGDLLLHLEKKHGEDWGKVYDEAWERIDKKVEGLSKHIKLEEERRSEDAQSKAALTDWLRAKASFVIEGLKEADKDEFCRCELKLQKWYGDLRGKPFAIEAENSILDISGFSKQYNCAFIWQKDGVKKLNLYLIINYFKGGKLRFKKIKPEAFEANRFYTVINKKSGEIVPMEVNFNFDDPNLIILPLAFGKRQGREFIWNDLLSLETGSLKLANGRVIEKTLYNRRTRQDEPALFVALTFERREVLDSSNIKPMSNLIGVDRGENIPAVIALTDPEGCPLSRFKDSLGNPTHILRIGESYKEKQRTIQAKKEVEQRRAGGYSRKYASKAKNLADDMVRNTARDLLYYAVTQDAMLIFENLSRGFGRQGKRTFMAERQYTRMEDWLTAKLAYEGLPSKTYLSKTLAQYTSKTCSNCGFTITSADYDRMLEKLKKTATGWMTTINGKELKVEGQITYYNRYKRQNVVKDLSVELDRLSEESVNNDISSWTKGRSGEALSLLKKRFSHRPVQEKFVCLNCGFETHADEQAALNIARSWLFLRSQEYKKYQTNKTTGNTDKRAFVETWQSFYRKKLKEVWKPAV

SEQ ID NO: 37999 - protein, 979 aa, synthetic construct
  REGION 1..979: note = engineered CasX variant
QEIKRINKIRRRLVKDSNTKKAGKTGPMKTLLVRVMTPDLRERLENLRKKPENIPQPISNTSRANLNKLLTDYTEMKKAILHVYWEEFQKDPVGLMSRVAQPASKKIDQNKLKPEMDEKGNLTTAGFACSQCGQPLFVYKLEQVSEKGKAYTNYFGRCNVAEHEKLIKLAQLKPEKDSDEAVTYSLGKFGQRALDFYSIHVTKESTHPVKPLAQIAGNRYASGPVGKALSDACMGTIASFLSKYQDIIIEHQKVVKGNQKRLESLRELAGKENLEYPSVTLPPQPHTKEGVDAYNEVIARVRMWVNLNLWQKLKLSRDDAKPLLRLKGFPSFPLVERQANEVDWWDMVCNVKKLINEKKEDGKVFWQNLAGYKRQEALRPYLSSEEDRKKGKKFARYQLGDLLLHLEKKHGEDWGKVYDEAWERIDKKVEGLSKHIKLEEERRSEDAQSKAALTDWLRAKASFVIEGLKEADKDEFCRCELKLQKWYGDLRGKPFAIEAENSILDISGFSKQYNCAFIWQKDGVKKLNLYLIINYFKGGKLRFKKIKPEAFEANRFYTVINKKSGEIVPMEVNFNFDDPNLIILPLAFGKRQGREFIWNDLLSLETGSLKLANGRVIEKTLYNRRTRQDEPALFVALTFERREVLDSSNIKPMSNLIGVDRGENIPAVIALTDPEGCPLSRFKDSLGNPTHILRIGESYKEKQRTIQAKKEVEQRRAGGYSRKYASKAKNLADDMVRNTARDLLYYAVTQDAMLIFENLSRGFGRQGKRTFMAERQYTRMEDWLTAKLAYEGLPSKTYLSKTLAQYTSKTCSNCGFTITSADYDRMLEKLKKTATGWMTTINGKELKVEGQITYYNRYKRQNVVKDLSVELDRLSEESVNNDISSWTKGRSGEALSLLKKRFSHRPVQEKFVCLNCGFETHADEQAALNIARSWLFLRSQEYKKYQTNKTTGNTDKRAFVETWQSFYRKKLKEVWKPAV

SEQ ID NO: 38000 - protein, 978 aa, synthetic construct
  REGION 1..978: note = engineered CasX variant
QEIKRINKIRRRLVKDSNTKKAGKTGPMKTLLVRVMTPDLRERLENLRKKPENIPQPISNTSRANLNKLLTDYTEMKKAILHVYWEEFQKDPVGLMSRVAQPASKKIDQNKLKPEMDEKGNLTTAGFACSQCGQPLFVYKLEQVSEKGKAYTNYFGRCNVAEHEKLILLAQLKPEKDSDEAVTYSLGKFGQRALDFYSIHVTKESTHPVKPLAQIAGNRYASPVGKALSDACMGTIASFLSKYQDIIIEHQKVVKGNQKRLESLRELAGKENLEYPSVTLPPQPHTKEGVDAYNEVIARVRMWVNLNLWQKLKLSRDDAKPLLRLKGFPSFPLVERQANEVDWWDMVCNVKKLINEKKEDGKVFWQNLAGYKRQEALRPYLSSEEDRKKGKKFARYQLGDLLLHLEKKHGEDWGKVYDEAWERIDKKVEGLSKHIKLEEERRSEDAQSKAALTDWLRAKASFVIEGLKEADKDEFCRCELKLQKWYGDLRGKPFAIEAENSILDISGFSKQYNCAFIWQKDGVKKLNLYLIINYFKGGKLRFKKIKPEAFEANRFYTVINKKSGEIVPMEVNFNFDDPNLIILPLAFGKRQGREFIWNDLLSLETGSLKLANGRVIEKTLYNRRTRQDEPALFVALTFERREVLDSSNIKPMSNLIGVDRGENIPAVIALTDPEGCPLSRFKDSLGNPTHILRIGESYKEKQRTIQAKKEVEQRRAGGYSRKYASKAKNLADDMVRNTARDLLYYAVTQDAMLIFENLSRGFGRQGKRTFMAERQYTRMEDWLTAKLAYEGLPSKTYLSKTLAQYTSKTCSNCGFTITSADYDRMLEKLKKTATGWMTTINGKELKVEGQITYYNRYKRQNVVKDLSVELDRLSEESVNNDISSWTKGRSGEALSLLKKRFSHRPVQEKFVCLNCGFETHADEQAALNIARSWLFLRSQEYKKYQTNKTTGNTDKRAFVETWQSFYRKKLKEVWKPAV

SEQ ID NO: 38001 - protein, 979 aa, synthetic construct
  REGION 1..979: note = engineered CasX variant
QEIKRINKIRRRLVKDSNTKKAGKTGPMKTLLVRVMTPDLRERLENLRKKPENIPQPISNTSRANLNKLLTDYTEMKKAILHVYWEEFQKDPVGLMSRVAQPASKKIDQNKLKPEMDEKGNLTTAGFACSQCGQPLFVYKLEQVSEKGKAYTNYFGRCNVAEHEKLILLAQLKPEKDSDEAVTYSLGKFGQRALDFYSIHVTKESTHPVKPLAQIAGNRYASYPVGKALSDACMGTIASFLSKYQDIIIEHQKVVKGNQKRLESLRELAGKENLEYPSVTLPPQPHTKEGVDAYNEVIARVRMWVNLNLWQKLKLSRDDAKPLLRLKGFPSFPLVERQANEVDWWDMVCNVKKLINEKKEDGKVFWQNLAGYKRQEALRPYLSSEEDRKKGKKFARYQLGDLLLHLEKKHGEDWGKVYDEAWERIDKKVEGLSKHIKLEEERRSEDAQSKAALTDWLRAKASFVIEGLKEADKDEFCRCELKLQKWYGDLRGKPFAIEAENSILDISGFSKQYNCAFIWQKDGVKKLNLYLIINYFKGGKLRFKKIKPEAFEANRFYTVINKKSGEIVPMEVNFNFDDPNLIILPLAFGKRQGREFIWNDLLSLETGSLKLANGRVIEKTLYNRRTRQDEPALFVALTFERREVLDSSNIKPMSNLIGVDRGENIPAVIALTDPEGCPLSRFKDSLGNPTHILRIGESYKEKQRTIQAKKEVEQRRAGGYSRKYASKAKNLADDMVRNTARDLLYYAVTQDAMLIFENLSRGFGRQGKRTFMAERQYTRMEDWLTAKLAYEGLPSKTYLSKTLAQYTSKTCSNCGFTITSADYDRVLEKLKKTATGWMTTINGKELKVEGQITYYNRYKRQNVVKDLSVELDRLSEESVNNDISSWTKGRQGEALSLLKKRFSHRPVQEKFVCLNCGFETHADEQAALNIARSWLFLRSQEYKKYQTNKTTGNTDKRAFVETWQSFYRKKLKEVWKPAV

SEQ ID NO: 38002 - protein, 979 aa, synthetic construct
  REGION 1..979: note = engineered CasX variant
QEIKRINKIRRRLVKDSNTKKAGKTGPMKTLLVRVMTPDLRERLENLRKKPENIPQPISNTSRANLNKLLTDYTEMKKAILHVYWEEFQKDPVGLMSRVAQPASKKIDQNKLKPEMDEKGNLTTAGFACSQCGQPLFVYKLEQVSEKGKAYTNYFGRCNVAEHEKLILLAQLKPEKDSDEAVTYSLGKFGQRALDFYSIHVTKESTHPVKPLAQIAGNRYASHPVGKALSDACMGTIASFLSKYQDIIIEHQKVVKGNQKRLESLRELAGKENLEYPSVTLPPQPHTKEGVDAYNEVIARVRMWVNLNLWQKLKLSRDDAKPLLRLKGFPSFPLVERQANEVDWWDMVCNVKKLINEKKEDGKVFWQNLAGYKRQEALRPYLSSEEDRKKGKKFARYQLGDLLLHLEKKHGEDWGKVYDEAWERIDKKVEGLSKHIKLEEERRSEDAQSKAALTDWLRAKASFVIEGLKEADKDEFCRCELKLQKWYGDLRGKPFAIEAENSILDISGFSKQYNCAFIWQKDGVKKLNLYLIINYFKGGKLRFKKIKPEAFEANRFYTVINKKSGEIVPMEVNFNFDDPNLIILPLAFGKRQGREFIWNDLLSLETGSLKLANGRVIEKTLYNRRTRQDEPALFVALTFERREVLDSSNIKPMSNLIGVDRGENIPAVIALTDPEGCPLSRFKDSLGNPTHILRIGESYKEKQRTIQAKKEVEQRRAGGYSRKYASKAKNLADDMVRNTARDLLYYAVTQDAMLIFENLSRGFGRQGKRTFMAERQYTRMEDWLTAKLAYEGLPSKTYLSKTLAQYTSKTCSNCGFTITSADYDRVLEKLKKTATGWMTTINGKELKVEGQITYYNRYKRQNVVKDLSVELDRLSEESVNNDISSWTKGRQGEALSLLKKRFSHRPVQEKFVCLNCGFETHADEQAALNIARSWLFLRSQEYKKYQTNKTTGNTDKRAFVETWQSFYRKKLKEVWKPAV

SEQ ID NO: 38003 - protein, 979 aa, synthetic construct
  REGION 1..979: note = engineered CasX variant
QEIKRINKIRRRLVKDSNTKKAGKTGPMKTLLVRVMTPDLRERLENLRKKPENIPQPISNTSRANLNKLLTDYTEMKKAILHVYWEEFQKDPVGLMSRVAQPASKKIDQNKLKPEMDEKGNLTTAGFACSQCGQPLFVYKLEQVSEKGKAYTNYFGRCNVAEHEKLILLAQLKPEKDSDEAVTYSLGKFGQRALDFYSIHVTKESTHPVKPLAQIAGNRYASSPVGKALSDACMGTIASFLSKYQDIIIEHQKVVKGNQKRLESLRELAGKENLEYPSVTLPPQPHTKEGVDAYNEVIARVRMWVNLNLWQKLKLSRDDAKPLLRLKGFPSFPLVERQANEVDWWDMVCNVKKLINEKKEDGKVFWQNLAGYKRQEALRPYLSSEEDRKKGKKFARYQLGDLLLHLEKKHGEDWGKVYDEAWERIDKKVEGLSKHIKLEEERRSEDAQSKAALTDWLRAKASFVIEGLKEADKDEFCRCELKLQKWYGDLRGKPFAIEAENSILDISGFSKQYNCAFIWQKDGVKKLNLYLIINYFKGGKLRFKKIKPEAFEANRFYTVINKKSGEIVPMEVNFNFDDPNLIILPLAFGKRQGREFIWNDLLSLETGSLKLANGRVIEKTLYNRRTRQDEPALFVALTFERREVLDSSNIKPMSNLIGVDRGENIPAVIALTDPEGCPLSRFKDSLGNPTHILRIGESYKEKQRTIQAKKEVEQRRAGGYSRKYASKAKNLADDMVRNTARDLLYYAVTQDAMLIFENLSRGFGRQGKRTFMAERQYTRMEDWLTAKLAYEGLPSKTYLSKTLAQYTSKTCSNCGFTITSADYDRVLEKLKKTATGWMTTINGKELKVEGQITYYNRYKRQNVVKDLSVELDRLSEESVNNDISSWTKGRQGEALSLLKKRFSHRPVQEKFVCLNCGFETHADEQAALNIARSWLFLRSQEYKKYQTNKTTGNTDKRAFVETWQSFYRKKLKEVWKPAV

SEQ ID NO: 38004 - protein, 979 aa, synthetic construct
  REGION 1..979: note = engineered CasX variant
QEIKRINKIRRRLVKDSNTKKAGKTGPMKTLLVRVMTPDLRERLENLRKKPENIPQPISNTSRANLNKLLTDYTEMKKAILHVYWEEFQKDPVGLMSRVAQPASKKIDQNKLKPEMDEKGNLTTAGFACSQCGQPLFVYKLEQVSEKGKAYTNYFGRCNVAEHEKLILLAQLKPEKDSDEAVTYSLGKFGQRALDFYSIHVTKESTHPVKPLAQIAGNRYASTPVGKALSDACMGTIASFLSKYQDIIIEHQKVVKGNQKRLESLRELAGKENLEYPSVTLPPQPHTKEGVDAYNEVIARVRMWVNLNLWQKLKLSRDDAKPLLRLKGFPSFPLVERQANEVDWWDMVCNVKKLINEKKEDGKVFWQNLAGYKRQEALRPYLSSEEDRKKGKKFARYQLGDLLLHLEKKHGEDWGKVYDEAWERIDKKVEGLSKHIKLEEERRSEDAQSKAALTDWLRAKASFVIEGLKEADKDEFCRCELKLQKWYGDLRGKPFAIEAENSILDISGFSKQYNCAFIWQKDGVKKLNLYLIINYFKGGKLRFKKIKPEAFEANRFYTVINKKSGEIVPMEVNFNFDDPNLIILPLAFGKRQGREFIWNDLLSLETGSLKLANGRVIEKTLYNRRTRQDEPALFVALTFERREVLDSSNIKPMSNLIGVDRGENIPAVIALTDPEGCPLSRFKDSLGNPTHILRIGESYKEKQRTIQAKKEVEQRRAGGYSRKYASKAKNLADDMVRNTARDLLYYAVTQDAMLIFENLSRGFGRQGKRTFMAERQYTRMEDWLTAKLAYEGLPSKTYLSKTLAQYTSKTCSNCGFTITSADYDRVLEKLKKTATGWMTTINGKELKVEGQITYYNRYKRQNVVKDLSVELDRLSEESVNNDISSWTKGRQGEALSLLKKRFSHRPVQEKFVCLNCGFETHADEQAALNIARSWLFLRSQEYKKYQTNKTTGNTDKRAFVETWQSFYRKKLKEVWKPAV

SEQ ID NO: 38005 - protein, 979 aa, synthetic construct
  REGION 1..979: note = engineered CasX variant
QEIKRINKIRRRLVKDSNTKKAGKTGPMKTLLVRVMTPDLRERLENLRKKPENIPQPISNTSRANLNKLLTDYTEMKKAILHVYWEEFQKDPVGLMSRVAQPASKKIDQNKLKPEMDEKGNLTTAGFACSQCGQPLFVYKLEQVSEKGKAYTNYFGRCNVAEHEKLILLAQLKPEKDSDEAVTYSLGKFGQRALDFYSIHVTKESTHPVKPLAQIAGNRYASAPVGKALSDACMGTIASFLSKYQDIIIEHQKVVKGNQKRLESLRELAGKENLEYPSVTLPPQPHTKEGVDAYNEVIARVRMWVNLNLWQKLKLSRDDAKPLLRLKGFPSFPLVERQANEVDWWDMVCNVKKLINEKKEDGKVFWQNLAGYKRQEALRPYLSSEEDRKKGKKFARYQLGDLLLHLEKKHGEDWGKVYDEAWERIDKKVEGLSKHIKLEEERRSEDAQSKAALTDWLRAKASFVIEGLKEADKDEFCRCELKLQKWYGDLRGKPFAIEAENSILDISGFSKQYNCAFIWQKDGVKKLNLYLIINYFKGGKLRFKKIKPEAFEANRFYTVINKKSGEIVPMEVNFNFDDPNLIILPLAFGKRQGREFIWNDLLSLETGSLKLANGRVIEKTLYNRRTRQDEPALFVALTFERREVLDSSNIKPMSNLIGVDRGENIPAVIALTDPEGCPLSRFKDSLGNPTHILRIGESYKEKQRTIQAKKEVEQRRAGGYSRKYASKAKNLADDMVRNTARDLLYYAVTQDAMLIFENLSRGFGRQGKRTFMAERQYTRMEDWLTAKLAYEGLPSKTYLSKTLAQYTSKTCSNCGFTITSADYDRVLEKLKKTATGWMTTINGKELKVEGQITYYNRYKRQNVVKDLSVELDRLSEESVNNDISSWTKGRQGEALSLLKKRFSHRPVQEKFVCLNCGFETHADEQAALNIARSWLFLRSQEYKKYQTNKTTGNTDKRAFVETWQSFYRKKLKEVWKPAV

SEQ ID NO: 38006 - protein, 979 aa, synthetic construct
  REGION 1..979: note = engineered CasX variant
QEIKRINKIRRRLVKDSNTKKAGKTGPMKTLLVRVMTPDLRERLENLRKKPENIPQPISNTSRANLNKLLTDYTEMKKAILHVYWEEFQKDPVGLMSRVAQPASKKIDQNKLKPEMDEKGNLTTAGFACSQCGQPLFVYKLEQVSEKGKAYTNYFGRCNVAEHEKLILLAQLKPEKDSDEAVTYSLGKFGQRALDFYSIHVTKESTHPVKPLAQIAGNRYASVPVGKALSDACMGTIASFLSKYQDIIIEHQKVVKGNQKRLESLRELAGKENLEYPSVTLPPQPHTKEGVDAYNEVIARVRMWVNLNLWQKLKLSRDDAKPLLRLKGFPSFPLVERQANEVDWWDMVCNVKKLINEKKEDGKVFWQNLAGYKRQEALRPYLSSEEDRKKGKKFARYQLGDLLLHLEKKHGEDWGKVYDEAWERIDKKVEGLSKHIKLEEERRSEDAQSKAALTDWLRAKASFVIEGLKEADKDEFCRCELKLQKWYGDLRGKPFAIEAENSILDISGFSKQYNCAFIWQKDGVKKLNLYLIINYFKGGKLRFKKIKPEAFEANRFYTVINKKSGEIVPMEVNFNFDDPNLIILPLAFGKRQGREFIWNDLLSLETGSLKLANGRVIEKTLYNRRTRQDEPALFVALTFERREVLDSSNIKPMSNLIGVDRGENIPAVIALTDPEGCPLSRFKDSLGNPTHILRIGESYKEKQRTIQAKKEVEQRRAGGYSRKYASKAKNLADDMVRNTARDLLYYAVTQDAMLIFENLSRGFGRQGKRTFMAERQYTRMEDWLTAKLAYEGLPSKTYLSKTLAQYTSKTCSNCGFTITSADYDRVLEKLKKTATGWMTTINGKELKVEGQITYYNRYKRQNVVKDLSVELDRLSEESVNNDISSWTKGRQGEALSLLKKRFSHRPVQEKFVCLNCGFETHADEQAALNIARSWLFLRSQEYKKYQTNKTTGNTDKRAFVETWQSFYRKKLKEVWKPAV

SEQ ID NO: 38007 - protein, 979 aa, synthetic construct
  REGION 1..979: note = engineered CasX variant
QEIKRINKIRRRLVKDSNTKKAGKTGPMKTLLVRVMTPDLRERLENLRKKPENIPQPISNTSRANLNKLLTDYTEMKKAILHVYWEEFQKDPVGLMSRVAQPASKKIDQNKLKPEMDEKGNLTTAGFACSQCGQPLFVYKLEQVSEKGKAYTNYFGRCNVAEHEKLIKLAQLKPEKDSDEAVTYSLGKFGQRALDFYSIHVTKESTHPVKPLAQIAGNRYASGPVGKALSDACMGTIASFLSKYQDIIIEHQKVVKGNQKRLESLRELAGKENLEYPSVTLPPQPHTKEGVDAYNEVIARVRMWVNLNLWQKLKLSRDDAKPLLRLKGFPSFPLVERQANEVDWWDMVCNVKKLINEKKEDGKVFWQNLAGYKRQEALRPYLSSEEDRKKGKKFARYQLGDLLLHLEKKHGEDWGKVYDEAWERIDKKVEGLSKHIKLEEERRSEDAQSKAALTDWLRAKASFVIEGLKEADKDEFCRCELKLQKWYGDLRGKPFAIEAENSILDISGFSKQYNCAFIWQKDGVKKLNLYLIINYFKGGKLRFKKIKPEAFEANRFYTVINKKSGEIVPMEVNFNFDDPNLIILPLAFGKRQGREFIWNDLLSLETGSLKLANGRVIEKTLYNRRTRQDEPALFVALTFERREVLDSSNIKPMSNLIGVDRGENIPAVIALTDPEGCPLSRFKDSLGNPTHILRIGESYKEKQRTIQAKKEVEQRRAGGYSRKYASKAKNLADDMVRNTARDLLYYAVTQDAMLIFENLSRGFGRQGKRTFMAERQYTRMEDWLTAKLAYEGLPSKTYLSKTLAQYTSKTCSNCGFTITSADYDRVLEKLKKTATGWMTTINGKELKVEGQITYYNRYKRQNVVKDLSVELDRLSEESVNNDISSWTKGRQGEALSLLKKRFSHRPVQEKFVCLNCGFETHADEQAALNIARSWLFLRSQEYKKYQTNKTTGNTDKRAFVETWQSFYRKKLKEVWKPAV

SEQ ID NO: 38008 - protein, 978 aa, synthetic construct
  REGION 1..978: note = engineered CasX variant
QEIKRINKIRRRLVKDSNTKKAGKTGPMKTLLVRVMTPDLRERLENLRKKPENIPQPISNTSRANLNKLLTDYTEMKKAILHVYWEEFQKDPVGLMSRVAQPASKKIDQNKLKPEMDEKGNLTTAGFACSQCGQPLFVYKLEQVSEKGKAYTNYFGRCNVAEHEKLILLAQLKPEKDSDEAVTYSLGKFGQRALDFYSIHVTKESTHPVKPLAQIAGNRYASPVGKALSDACMGTIASFLSKYQDIIIEHQKVVKGNQKRLESLRELAGKENLEYPSVTLPPQPHTKEGVDAYNEVIARVRMWVNLNLWQKLKLSRDDAKPLLRLKGFPSFPLVERQANEVDWWDMVCNVKKLINEKKEDGKVFWQNLAGYKRQEALRPYLSSEEDRKKGKKFARYQLGDLLLHLEKKHGEDWGKVYDEAWERIDKKVEGLSKHIKLEEERRSEDAQSKAALTDWLRAKASFVIEGLKEADKDEFCRCELKLQKWYGDLRGKPFAIEAENSILDISGFSKQYNCAFIWQKDGVKKLNLYLIINYFKGGKLRFKKIKPEAFEANRFYTVINKKSGEIVPMEVNFNFDDPNLIILPLAFGKRQGREFIWNDLLSLETGSLKLANGRVIEKTLYNRRTRQDEPALFVALTFERREVLDSSNIKPMSNLIGVDRGENIPAVIALTDPEGCPLSRFKDSLGNPTHILRIGESYKEKQRTIQAKKEVEQRRAGGYSRKYASKAKNLADDMVRNTARDLLYYAVTQDAMLIFENLSRGFGRQGKRTFMAERQYTRMEDWLTAKLAYEGLPSKTYLSKTLAQYTSKTCSNCGFTITSADYDRVLEKLKKTATGWMTTINGKELKVEGQITYYNRYKRQNVVKDLSVELDRLSEESVNNDISSWTKGRQGEALSLLKKRFSHRPVQEKFVCLNCGFETHADEQAALNIARSWLFLRSQEYKKYQTNKTTGNTDKRAFVETWQSFYRKKLKEVWKPAV

SEQ ID NO: 38009 - protein, 979 aa, synthetic construct
  REGION 1..979: note = engineered CasX variant
QEIKRINKIRRRLVKDSNTKKAGKTGPMKTLLVRVMTPDLRERLENLRKKPENIPQPISNTSRANLNKLLTDYTEMKKAILHVYWEEFQKDPVGLMSRVAQPASKKIDQNKLKPEMDEKGNLTTAGFACSQCGQPLFVYKLEQVSEKGKAYTNYFGRCNVAEHEKLILLAQLKPEKDSDEAVTYSLGKFGQRALDFYSIHVTKESTHPVKPLAQIAGNRYASYPVGKALSDACMGTIASFLSKYQDIIIEHQKVVKGNQKRLESLRELAGKENLEYPSVTLPPQPHTKEGVDAYNEVIARVRMWVNLNLWQKLKLSRDDAKPLLRLKGFPSFPLVERQANEVDWWDMVCNVKKLINEKKEDGKVFWQNLAGYKRQEALRPYLSSEEDRKKGKKFARYQLGDLLLHLEKKHGEDWGKVYDEAWERIDKKVEGLSKHIKLEEERRSEDAQSKAALTDWLRAKASFVIEGLKEADKDEFCRCELKLQKWYGDLRGKPFAIEAENSILDISGFSKQYNCAFIWQKDGVKKLNLYLIINYFKGGKLRFKKIKPEAFEANRFYTVINKKSGEIVPMEVNFNFDDPNLIILPLAFGKRQGREFIWNDLLSLETGSLKLANGRVIEKTLYNRRTRQDEPALFVALTFERREVLDSSNIKPMSNLIGVDRGENIPAVIALTDPEGCPLSRFKDSLGNPTHILRIGESYKEKQRTIQAKKEVEQRRAGGYSRKYASKAKNLADDMVRNTARDLLYYAVTQDAMLIFENLSRGFGRQGKRTFMAERQYTRMEDWLTAKLAYEGLPSKTYLSKTLAQYTSKTCSNCGFTITSADYDRVLEKLKKTATGWMTTINGKELKVEGQITYYNRYKRQNVVKDLSVELDRLSEESVNNDISSWTKGRSGEALSLLKKRFSHRPVQEKFVCLNCEFETHADEQAALNIARSWLFLRSQEYKKYQTNKTTGNTDKRAFVETWQSFYRKKLKEVWKPAV

SEQ ID NO: 38010 - protein, 979 aa, synthetic construct
  REGION 1..979: note = engineered CasX variant
QEIKRINKIRRRLVKDSNTKKAGKTGPMKTLLVRVMTPDLRERLENLRKKPENIPQPISNTSRANLNKLLTDYTEMKKAILHVYWEEFQKDPVGLMSRVAQPASKKIDQNKLKPEMDEKGNLTTAGFACSQCGQPLFVYKLEQVSEKGKAYTNYFGRCNVAEHEKLILLAQLKPEKDSDEAVTYSLGKFGQRALDFYSIHVTKESTHPVKPLAQIAGNRYASHPVGKALSDACMGTIASFLSKYQDIIIEHQKVVKGNQKRLESLRELAGKENLEYPSVTLPPQPHTKEGVDAYNEVIARVRMWVNLNLWQKLKLSRDDAKPLLRLKGFPSFPLVERQANEVDWWDMVCNVKKLINEKKEDGKVFWQNLAGYKRQEALRPYLSSEEDRKKGKKFARYQLGDLLLHLEKKHGEDWGKVYDEAWERIDKKVEGLSKHIKLEEERRSEDAQSKAALTDWLRAKASFVIEGLKEADKDEFCRCELKLQKWYGDLRGKPFAIEAENSILDISGFSKQYNCAFIWQKDGVKKLNLYLIINYFKGGKLRFKKIKPEAFEANRFYTVINKKSGEIVPMEVNFNFDDPNLIILPLAFGKRQGREFIWNDLLSLETGSLKLANGRVIEKTLYNRRTRQDEPALFVALTFERREVLDSSNIKPMSNLIGVDRGENIPAVIALTDPEGCPLSRFKDSLGNPTHILRIGESYKEKQRTIQAKKEVEQRRAGGYSRKYASKAKNLADDMVRNTARDLLYYAVTQDAMLIFENLSRGFGRQGKRTFMAERQYTRMEDWLTAKLAYEGLPSKTYLSKTLAQYTSKTCSNCGFTITSADYDRVLEKLKKTATGWMTTINGKELKVEGQITYYNRYKRQNVVKDLSVELDRLSEESVNNDISSWTKGRSGEALSLLKKRFSHRPVQEKFVCLNCEFETHADEQAALNIARSWLFLRSQEYKKYQTNKTTGNTDKRAFVETWQSFYRKKLKEVWKPAV

SEQ ID NO: 38011 - protein, 979 aa, synthetic construct
  REGION 1..979: note = engineered CasX variant
QEIKRINKIRRRLVKDSNTKKAGKTGPMKTLLVRVMTPDLRERLENLRKKPENIPQPISNTSRANLNKLLTDYTEMKKAILHVYWEEFQKDPVGLMSRVAQPASKKIDQNKLKPEMDEKGNLTTAGFACSQCGQPLFVYKLEQVSEKGKAYTNYFGRCNVAEHEKLILLAQLKPEKDSDEAVTYSLGKFGQRALDFYSIHVTKESTHPVKPLAQIAGNRYASSPVGKALSDACMGTIASFLSKYQDIIIEHQKVVKGNQKRLESLRELAGKENLEYPSVTLPPQPHTKEGVDAYNEVIARVRMWVNLNLWQKLKLSRDDAKPLLRLKGFPSFPLVERQANEVDWWDMVCNVKKLINEKKEDGKVFWQNLAGYKRQEALRPYLSSEEDRKKGKKFARYQLGDLLLHLEKKHGEDWGKVYDEAWERIDKKVEGLSKHIKLEEERRSEDAQSKAALTDWLRAKASFVIEGLKEADKDEFCRCELKLQKWYGDLRGKPFAIEAENSILDISGFSKQYNCAFIWQKDGVKKLNLYLIINYFKGGKLRFKKIKPEAFEANRFYTVINKKSGEIVPMEVNFNFDDPNLIILPLAFGKRQGREFIWNDLLSLETGSLKLANGRVIEKTLYNRRTRQDEPALFVALTFERREVLDSSNIKPMSNLIGVDRGENIPAVIALTDPEGCPLSRFKDSLGNPTHILRIGESYKEKQRTIQAKKEVEQRRAGGYSRKYASKAKNLADDMVRNTARDLLYYAVTQDAMLIFENLSRGFGRQGKRTFMAERQYTRMEDWLTAKLAYEGLPSKTYLSKTLAQYTSKTCSNCGFTITSADYDRVLEKLKKTATGWMTTINGKELKVEGQITYYNRYKRQNVVKDLSVELDRLSEESVNNDISSWTKGRSGEALSLLKKRFSHRPVQEKFVCLNCEFETHADEQAALNIARSWLFLRSQEYKKYQTNKTTGNTDKRAFVETWQSFYRKKLKEVWKPAV

SEQ ID NO: 38012 - protein, 979 aa, synthetic construct
  REGION 1..979: note = engineered CasX variant
QEIKRINKIRRRLVKDSNTKKAGKTGPMKTLLVRVMTPDLRERLENLRKKPENIPQPISNTSRANLNKLLTDYTEMKKAILHVYWEEFQKDPVGLMSRVAQPASKKIDQNKLKPEMDEKGNLTTAGFACSQCGQPLFVYKLEQVSEKGKAYTNYFGRCNVAEHEKLILLAQLKPEKDSDEAVTYSLGKFGQRALDFYSIHVTKESTHPVKPLAQIAGNRYASTPVGKALSDACMGTIASFLSKYQDIIIEHQKVVKGNQKRLESLRELAGKENLEYPSVTLPPQPHTKEGVDAYNEVIARVRMWVNLNLWQKLKLSRDDAKPLLRLKGFPSFPLVERQANEVDWWDMVCNVKKLINEKKEDGKVFWQNLAGYKRQEALRPYLSSEEDRKKGKKFARYQLGDLLLHLEKKHGEDWGKVYDEAWERIDKKVEGLSKHIKLEEERRSEDAQSKAALTDWLRAKASFVIEGLKEADKDEFCRCELKLQKWYGDLRGKPFAIEAENSILDISGFSKQYNCAFIWQKDGVKKLNLYLIINYFKGGKLRFKKIKPEAFEANRFYTVINKKSGEIVPMEVNFNFDDPNLIILPLAFGKRQGREFIWNDLLSLETGSLKLANGRVIEKTLYNRRTRQDEPALFVALTFERREVLDSSNIKPMSNLIGVDRGENIPAVIALTDPEGCPLSRFKDSLGNPTHILRIGESYKEKQRTIQAKKEVEQRRAGGYSRKYASKAKNLADDMVRNTARDLLYYAVTQDAMLIFENLSRGFGRQGKRTFMAERQYTRMEDWLTAKLAYEGLPSKTYLSKTLAQYTSKTCSNCGFTITSADYDRVLEKLKKTATGWMTTINGKELKVEGQITYYNRYKRQNVVKDLSVELDRLSEESVNNDISSWTKGRSGEALSLLKKRFSHRPVQEKFVCLNCEFETHADEQAALNIARSWLFLRSQEYKKYQTNKTTGNTDKRAFVETWQSFYRKKLKEVWKPAV

SEQ ID NO: 38013 - protein, 979 aa, synthetic construct
  REGION 1..979: note = engineered CasX variant
QEIKRINKIRRRLVKDSNTKKAGKTGPMKTLLVRVMTPDLRERLENLRKKPENIPQPISNTSRANLNKLLTDYTEMKKAILHVYWEEFQKDPVGLMSRVAQPASKKIDQNKLKPEMDEKGNLTTAGFACSQCGQPLFVYKLEQVSEKGKAYTNYFGRCNVAEHEKLILLAQLKPEKDSDEAVTYSLGKFGQRALDFYSIHVTKESTHPVKPLAQIAGNRYASAPVGKALSDACMGTIASFLSKYQDIIIEHQKVVKGNQKRLESLRELAGKENLEYPSVTLPPQPHTKEGVDAYNEVIARVRMWVNLNLWQKLKLSRDDAKPLLRLKGFPSFPLVERQANEVDWWDMVCNVKKLINEKKEDGKVFWQNLAGYKRQEALRPYLSSEEDRKKGKKFARYQLGDLLLHLEKKHGEDWGKVYDEAWERIDKKVEGLSKHIKLEEERRSEDAQSKAALTDWLRAKASFVIEGLKEADKDEFCRCELKLQKWYGDLRGKPFAIEAENSILDISGFSKQYNCAFIWQKDGVKKLNLYLIINYFKGGKLRFKKIKPEAFEANRFYTVINKKSGEIVPMEVNFNFDDPNLIILPLAFGKRQGREFIWNDLLSLETGSLKLANGRVIEKTLYNRRTRQDEPALFVALTFERREVLDSSNIKPMSNLIGVDRGENIPAVIALTDPEGCPLSRFKDSLGNPTHILRIGESYKEKQRTIQAKKEVEQRRAGGYSRKYASKAKNLADDMVRNTARDLLYYAVTQDAMLIFENLSRGFGRQGKRTFMAERQYTRMEDWLTAKLAYEGLPSKTYLSKTLAQYTSKTCSNCGFTITSADYDRVLEKLKKTATGWMTTINGKELKVEGQITYYNRYKRQNVVKDLSVELDRLSEESVNNDISSWTKGRSGEALSLLKKRFSHRPVQEKFVCLNCEFETHADEQAALNIARSWLFLRSQEYKKYQTNKTTGNTDKRAFVETWQSFYRKKLKEVWKPAV

SEQ ID NO: 38014 - protein, 979 aa, synthetic construct
  REGION 1..979: note = engineered CasX variant
QEIKRINKIRRRLVKDSNTKKAGKTGPMKTLLVRVMTPDLRERLENLRKKPENIPQPISNTSRANLNKLLTDYTEMKKAILHVYWEEFQKDPVGLMSRVAQPASKKIDQNKLKPEMDEKGNLTTAGFACSQCGQPLFVYKLEQVSEKGKAYTNYFGRCNVAEHEKLILLAQLKPEKDSDEAVTYSLGKFGQRALDFYSIHVTKESTHPVKPLAQIAGNRYASVPVGKALSDACMGTIASFLSKYQDIIIEHQKVVKGNQKRLESLRELAGKENLEYPSVTLPPQPHTKEGVDAYNEVIARVRMWVNLNLWQKLKLSRDDAKPLLRLKGFPSFPLVERQANEVDWWDMVCNVKKLINEKKEDGKVFWQNLAGYKRQEALRPYLSSEEDRKKGKKFARYQLGDLLLHLEKKHGEDWGKVYDEAWERIDKKVEGLSKHIKLEEERRSEDAQSKAALTDWLRAKASFVIEGLKEADKDEFCRCELKLQKWYGDLRGKPFAIEAENSILDISGFSKQYNCAFIWQKDGVKKLNLYLIINYFKGGKLRFKKIKPEAFEANRFYTVINKKSGEIVPMEVNFNFDDPNLIILPLAFGKRQGREFIWNDLLSLETGSLKLANGRVIEKTLYNRRTRQDEPALFVALTFERREVLDSSNIKPMSNLIGVDRGENIPAVIALTDPEGCPLSRFKDSLGNPTHILRIGESYKEKQRTIQAKKEVEQRRAGGYSRKYASKAKNLADDMVRNTARDLLYYAVTQDAMLIFENLSRGFGRQGKRTFMAERQYTRMEDWLTAKLAYEGLPSKTYLSKTLAQYTSKTCSNCGFTITSADYDRVLEKLKKTATGWMTTINGKELKVEGQITYYNRYKRQNVVKDLSVELDRLSEESVNNDISSWTKGRSGEALSLLKKRFSHRPVQEKFVCLNCEFETHADEQAALNIARSWLFLRSQEYKKYQTNKTTGNTDKRAFVETWQSFYRKKLKEVWKPAV

SEQ ID NO: 38015 - protein, 979 aa, synthetic construct
  REGION 1..979: note = engineered CasX variant
QEIKRINKIRRRLVKDSNTKKAGKTGPMKTLLVRVMTPDLRERLENLRKKPENIPQPISNTSRANLNKLLTDYTEMKKAILHVYWEEFQKDPVGLMSRVAQPASKKIDQNKLKPEMDEKGNLTTAGFACSQCGQPLFVYKLEQVSEKGKAYTNYFGRCNVAEHEKLIKLAQLKPEKDSDEAVTYSLGKFGQRALDFYSIHVTKESTHPVKPLAQIAGNRYASGPVGKALSDACMGTIASFLSKYQDIIIEHQKVVKGNQKRLESLRELAGKENLEYPSVTLPPQPHTKEGVDAYNEVIARVRMWVNLNLWQKLKLSRDDAKPLLRLKGFPSFPLVERQANEVDWWDMVCNVKKLINEKKEDGKVFWQNLAGYKRQEALRPYLSSEEDRKKGKKFARYQLGDLLLHLEKKHGEDWGKVYDEAWERIDKKVEGLSKHIKLEEERRSEDAQSKAALTDWLRAKASFVIEGLKEADKDEFCRCELKLQKWYGDLRGKPFAIEAENSILDISGFSKQYNCAFIWQKDGVKKLNLYLIINYFKGGKLRFKKIKPEAFEANRFYTVINKKSGEIVPMEVNFNFDDPNLIILPLAFGKRQGREFIWNDLLSLETGSLKLANGRVIEKTLYNRRTRQDEPALFVALTFERREVLDSSNIKPMSNLIGVDRGENIPAVIALTDPEGCPLSRFKDSLGNPTHILRIGESYKEKQRTIQAKKEVEQRRAGGYSRKYASKAKNLADDMVRNTARDLLYYAVTQDAMLIFENLSRGFGRQGKRTFMAERQYTRMEDWLTAKLAYEGLPSKTYLSKTLAQYTSKTCSNCGFTITSADYDRVLEKLKKTATGWMTTINGKELKVEGQITYYNRYKRQNVVKDLSVELDRLSEESVNNDISSWTKGRSGEALSLLKKRFSHRPVQEKFVCLNCEFETHADEQAALNIARSWLFLRSQEYKKYQTNKTTGNTDKRAFVETWQSFYRKKLKEVWKPAV

SEQ ID NO: 38016 - protein, 978 aa, synthetic construct
  REGION 1..978: note = engineered CasX variant
QEIKRINKIRRRLVKDSNTKKAGKTGPMKTLLVRVMTPDLRERLENLRKKPENIPQPISNTSRANLNKLLTDYTEMKKAILHVYWEEFQKDPVGLMSRVAQPASKKIDQNKLKPEMDEKGNLTTAGFACSQCGQPLFVYKLEQVSEKGKAYTNYFGRCNVAEHEKLILLAQLKPEKDSDEAVTYSLGKFGQRALDFYSIHVTKESTHPVKPLAQIAGNRYASPVGKALSDACMGTIASFLSKYQDIIIEHQKVVKGNQKRLESLRELAGKENLEYPSVTLPPQPHTKEGVDAYNEVIARVRMWVNLNLWQKLKLSRDDAKPLLRLKGFPSFPLVERQANEVDWWDMVCNVKKLINEKKEDGKVFWQNLAGYKRQEALRPYLSSEEDRKKGKKFARYQLGDLLLHLEKKHGEDWGKVYDEAWERIDKKVEGLSKHIKLEEERRSEDAQSKAALTDWLRAKASFVIEGLKEADKDEFCRCELKLQKWYGDLRGKPFAIEAENSILDISGFSKQYNCAFIWQKDGVKKLNLYLIINYFKGGKLRFKKIKPEAFEANRFYTVINKKSGEIVPMEVNFNFDDPNLIILPLAFGKRQGREFIWNDLLSLETGSLKLANGRVIEKTLYNRRTRQDEPALFVALTFERREVLDSSNIKPMSNLIGVDRGENIPAVIALTDPEGCPLSRFKDSLGNPTHILRIGESYKEKQRTIQAKKEVEQRRAGGYSRKYASKAKNLADDMVRNTARDLLYYAVTQDAMLIFENLSRGFGRQGKRTFMAERQYTRMEDWLTAKLAYEGLPSKTYLSKTLAQYTSKTCSNCGFTITSADYDRVLEKLKKTATGWMTTINGKELKVEGQITYYNRYKRQNVVKDLSVELDRLSEESVNNDISSWTKGRSGEALSLLKKRFSHRPVQEKFVCLNCEFETHADEQAALNIARSWLFLRSQEYKKYQTNKTTGNTDKRAFVETWQSFYRKKLKEVWKPAV

SEQ ID NO: 38017 - protein, 980 aa, synthetic construct
  REGION 1..980: note = engineered CasX variant
QEIKRINKIRRRLVKDSNTKKAGKTGPMKTLLVRVMTPDLRERLENLRKKPENIPQPISNTSRANLNKLLTDYTEMKKAILHVYWEEFQKDPVGLMSRVAQPASKKIDQNKLKPEMDEKGNLTTAGFACSQCGQPLFVYKLEQVSEKGKAYTNYFGRCNVAEHEKLILLAQLKPEKDSDEAVTYSLGKFGQRALDFYSIHVTKESTHPVKPLAQIAGNRYASYPVGKALSDACMGTIASFLSKYQDIIIEHQKVVKGNQKRLESLRELAGKENLEYPSVTLPPQPHTKEGVDAYNEVIARVRMWVNLNLWQKLKLSRDDAKPLLRLKGFPSFPLVERQANEVDWWDMVCNVKKLINEKKEDGKVFWQNLAGYKRQEALRPYLSSEEDRKKGKKFARYQLGDLLLHLEKKHGEDWGKVYDEAWERIDKKVEGLSKHIKLEEERRSEDAQSKAALTDWLRAKASFVIEGLKEADKDEFCRCELKLQKWYGDLRGKPFAIEAENSILDISGFSKQYNCAFIWQKDGVKKLNLYLIINYFKGGKLRFKKIKPEAFEANRFYTVINKKSGEIVPMEVNFNFDDPNLIILPLAFGKRQGREFIWNDLLSLETGSLKLANGRVIEKTLYNRRTRQDEPALFVALTFERREVLDSSNIKPMSNLIGVDRGENIPAVIALTDPEGCPLSRFKDSLGNPTHILRIGESYKEKQRTIQAKKEVEQRRAGGYSRKYASKAKNLADDMVRNTARDLLYYAVTQDAMLIFENLSRGFGRQGKRTFMAERQYTRMEDWLTAKLAYEGLPSKTYLSKTLAQYTSKTCSNCGFTITSADYDRVLEKLKKTATGWMTTINGKELKVEGQITYYNRYKRQNVVKDLSVELDRLSEESVNNDISSWTKGRSGEALSLLKKRFSHRPVQEKFVCLNCGFETHADEQAALNIARSWLFLRSQEYKKYQTNKTSTGNTDKRAFVETWQSFYRKKLKEVWKPAV

SEQ ID NO: 38018 - protein, 980 aa, synthetic construct
  REGION 1..980: note = engineered CasX variant
QEIKRINKIRRRLVKDSNTKKAGKTGPMKTLLVRVMTPDLRERLENLRKKPENIPQPISNTSRANLNKLLTDYTEMKKAILHVYWEEFQKDPVGLMSRVAQPASKKIDQNKLKPEMDEKGNLTTAGFACSQCGQPLFVYKLEQVSEKGKAYTNYFGRCNVAEHEKLILLAQLKPEKDSDEAVTYSLGKFGQRALDFYSIHVTKESTHPVKPLAQIAGNRYASHPVGKALSDACMGTIASFLSKYQDIIIEHQKVVKGNQKRLESLRELAGKENLEYPSVTLPPQPHTKEGVDAYNEVIARVRMWVNLNLWQKLKLSRDDAKPLLRLKGFPSFPLVERQANEVDWWDMVCNVKKLINEKKEDGKVFWQNLAGYKRQEALRPYLSSEEDRKKGKKFARYQLGDLLLHLEKKHGEDWGKVYDEAWERIDKKVEGLSKHIKLEEERRSEDAQSKAALTDWLRAKASFVIEGLKEADKDEFCRCELKLQKWYGDLRGKPFAIEAENSILDISGFSKQYNCAFIWQKDGVKKLNLYLIINYFKGGKLRFKKIKPEAFEANRFYTVINKKSGEIVPMEVNFNFDDPNLIILPLAFGKRQGREFIWNDLLSLETGSLKLANGRVIEKTLYNRRTRQDEPALFVALTFERREVLDSSNIKPMSNLIGVDRGENIPAVIALTDPEGCPLSRFKDSLGNPTHILRIGESYKEKQRTIQAKKEVEQRRAGGYSRKYASKAKNLADDMVRNTARDLLYYAVTQDAMLIFENLSRGFGRQGKRTFMAERQYTRMEDWLTAKLAYEGLPSKTYLSKTLAQYTSKTCSNCGFTITSADYDRVLEKLKKTATGWMTTINGKELKVEGQITYYNRYKRQNVVKDLSVELDRLSEESVNNDISSWTKGRSGEALSLLKKRFSHRPVQEKFVCLNCGFETHADEQAALNIARSWLFLRSQEYKKYQTNKTSTGNTDKRAFVETWQSFYRKKLKEVWKPAV

SEQ ID NO: 38019 - protein, 980 aa, synthetic construct
  REGION 1..980: note = engineered CasX variant
QEIKRINKIRRRLVKDSNTKKAGKTGPMKTLLVRVMTPDLRERLENLRKKPENIPQPISNTSRANLNKLLTDYTEMKKAILHVYWEEFQKDPVGLMSRVAQPASKKIDQNKLKPEMDEKGNLTTAGFACSQCGQPLFVYKLEQVSEKGKAYTNYFGRCNVAEHEKLILLAQLKPEKDSDEAVTYSLGKFGQRALDFYSIHVTKESTHPVKPLAQIAGNRYASSPVGKALSDACMGTIASFLSKYQDIIIEHQKVVKGNQKRLESLRELAGKENLEYPSVTLPPQPHTKEGVDAYNEVIARVRMWVNLNLWQKLKLSRDDAKPLLRLKGFPSFPLVERQANEVDWWDMVCNVKKLINEKKEDGKVFWQNLAGYKRQEALRPYLSSEEDRKKGKKFARYQLGDLLLHLEKKHGEDWGKVYDEAWERIDKKVEGLSKHIKLEEERRSEDAQSKAALTDWLRAKASFVIEGLKEADKDEFCRCELKLQKWYGDLRGKPFAIEAENSILDISGFSKQYNCAFIWQKDGVKKLNLYLIINYFKGGKLRFKKIKPEAFEANRFYTVINKKSGEIVPMEVNFNFDDPNLIILPLAFGKRQGREFIWNDLLSLETGSLKLANGRVIEKTLYNRRTRQDEPALFVALTFERREVLDSSNIKPMSNLIGVDRGENIPAVIALTDPEGCPLSRFKDSLGNPTHILRIGESYKEKQRTIQAKKEVEQRRAGGYSRKYASKAKNLADDMVRNTARDLLYYAVTQDAMLIFENLSRGFGRQGKRTFMAERQYTRMEDWLTAKLAYEGLPSKTYLSKTLAQYTSKTCSNCGFTITSADYDRVLEKLKKTATGWMTTINGKELKVEGQITYYNRYKRQNVVKDLSVELDRLSEESVNNDISSWTKGRSGEALSLLKKRFSHRPVQEKFVCLNCGFETHADEQAALNIARSWLFLRSQEYKKYQTNKTSTGNTDKRAFVETWQSFYRKKLKEVWKPAV

SEQ ID NO: 38020 - protein, 980 aa, synthetic construct
  REGION 1..980: note = engineered CasX variant
QEIKRINKIRRRLVKDSNTKKAGKTGPMKTLLVRVMTPDLRERLENLRKKPENIPQPISNTSRANLNKLLTDYTEMKKAILHVYWEEFQKDPVGLMSRVAQPASKKIDQNKLKPEMDEKGNLTTAGFACSQCGQPLFVYKLEQVSEKGKAYTNYFGRCNVAEHEKLILLAQLKPEKDSDEAVTYSLGKFGQRALDFYSIHVTKESTHPVKPLAQIAGNRYASTPVGKALSDACMGTIASFLSKYQDIIIEHQKVVKGNQKRLESLRELAGKENLEYPSVTLPPQPHTKEGVDAYNEVIARVRMWVNLNLWQKLKLSRDDAKPLLRLKGFPSFPLVERQANEVDWWDMVCNVKKLINEKKEDGKVFWQNLAGYKRQEALRPYLSSEEDRKKGKKFARYQLGDLLLHLEKKHGEDWGKVYDEAWERIDKKVEGLSKHIKLEEERRSEDAQSKAALTDWLRAKASFVIEGLKEADKDEFCRCELKLQKWYGDLRGKPFAIEAENSILDISGFSKQYNCAFIWQKDGVKKLNLYLIINYFKGGKLRFKKIKPEAFEANRFYTVINKKSGEIVPMEVNFNFDDPNLIILPLAFGKRQGREFIWNDLLSLETGSLKLANGRVIEKTLYNRRTRQDEPALFVALTFERREVLDSSNIKPMSNLIGVDRGENIPAVIALTDPEGCPLSRFKDSLGNPTHILRIGESYKEKQRTIQAKKEVEQRRAGGYSRKYASKAKNLADDMVRNTARDLLYYAVTQDAMLIFENLSRGFGRQGKRTFMAERQYTRMEDWLTAKLAYEGLPSKTYLSKTLAQYTSKTCSNCGFTITSADYDRVLEKLKKTATGWMTTINGKELKVEGQITYYNRYKRQNVVKDLSVELDRLSEESVNNDISSWTKGRSGEALSLLKKRFSHRPVQEKFVCLNCGFETHADEQAALNIARSWLFLRSQEYKKYQTNKTSTGNTDKRAFVETWQSFYRKKLKEVWKPAV

SEQ ID NO: 38021 - protein, 980 aa, synthetic construct
  REGION 1..980: note = engineered CasX variant
QEIKRINKIRRRLVKDSNTKKAGKTGPMKTLLVRVMTPDLRERLENLRKKPENIPQPISNTSRANLNKLLTDYTEMKKAILHVYWEEFQKDPVGLMSRVAQPASKKIDQNKLKPEMDEKGNLTTAGFACSQCGQPLFVYKLEQVSEKGKAYTNYFGRCNVAEHEKLILLAQLKPEKDSDEAVTYSLGKFGQRALDFYSIHVTKESTHPVKPLAQIAGNRYASAPVGKALSDACMGTIASFLSKYQDIIIEHQKVVKGNQKRLESLRELAGKENLEYPSVTLPPQPHTKEGVDAYNEVIARVRMWVNLNLWQKLKLSRDDAKPLLRLKGFPSFPLVERQANEVDWWDMVCNVKKLINEKKEDGKVFWQNLAGYKRQEALRPYLSSEEDRKKGKKFARYQLGDLLLHLEKKHGEDWGKVYDEAWERIDKKVEGLSKHIKLEEERRSEDAQSKAALTDWLRAKASFVIEGLKEADKDEFCRCELKLQKWYGDLRGKPFAIEAENSILDISGFSKQYNCAFIWQKDGVKKLNLYLIINYFKGGKLRFKKIKPEAFEANRFYTVINKKSGEIVPMEVNFNFDDPNLIILPLAFGKRQGREFIWNDLLSLETGSLKLANGRVIEKTLYNRRTRQDEPALFVALTFERREVLDSSNIKPMSNLIGVDRGENIPAVIALTDPEGCPLSRFKDSLGNPTHILRIGESYKEKQRTIQAKKEVEQRRAGGYSRKYASKAKNLADDMVRNTARDLLYYAVTQDAMLIFENLSRGFGRQGKRTFMAERQYTRMEDWLTAKLAYEGLPSKTYLSKTLAQYTSKTCSNCGFTITSADYDRVLEKLKKTATGWMTTINGKELKVEGQITYYNRYKRQNVVKDLSVELDRLSEESVNNDISSWTKGRSGEALSLLKKRFSHRPVQEKFVCLNCGFETHADEQAALNIARSWLFLRSQEYKKYQTNKTSTGNTDKRAFVETWQSFYRKKLKEVWKPAV

SEQ ID NO: 38022 - protein, 980 aa, synthetic construct
  REGION 1..980: note = engineered CasX variant
QEIKRINKIRRRLVKDSNTKKAGKTGPMKTLLVRVMTPDLRERLENLRKKPENIPQPISNTSRANLNKLLTDYTEMKKAILHVYWEEFQKDPVGLMSRVAQPASKKIDQNKLKPEMDEKGNLTTAGFACSQCGQPLFVYKLEQVSEKGKAYTNYFGRCNVAEHEKLILLAQLKPEKDSDEAVTYSLGKFGQRALDFYSIHVTKESTHPVKPLAQIAGNRYASVPVGKALSDACMGTIASFLSKYQDIIIEHQKVVKGNQKRLESLRELAGKENLEYPSVTLPPQPHTKEGVDAYNEVIARVRMWVNLNLWQKLKLSRDDAKPLLRLKGFPSFPLVERQANEVDWWDMVCNVKKLINEKKEDGKVFWQNLAGYKRQEALRPYLSSEEDRKKGKKFARYQLGDLLLHLEKKHGEDWGKVYDEAWERIDKKVEGLSKHIKLEEERRSEDAQSKAALTDWLRAKASFVIEGLKEADKDEFCRCELKLQKWYGDLRGKPFAIEAENSILDISGFSKQYNCAFIWQKDGVKKLNLYLIINYFKGGKLRFKKIKPEAFEANRFYTVINKKSGEIVPMEVNFNFDDPNLIILPLAFGKRQGREFIWNDLLSLETGSLKLANGRVIEKTLYNRRTRQDEPALFVALTFERREVLDSSNIKPMSNLIGVDRGENIPAVIALTDPEGCPLSRFKDSLGNPTHILRIGESYKEKQRTIQAKKEVEQRRAGGYSRKYASKAKNLADDMVRNTARDLLYYAVTQDAMLIFENLSRGFGRQGKRTFMAERQYTRMEDWLTAKLAYEGLPSKTYLSKTLAQYTSKTCSNCGFTITSADYDRVLEKLKKTATGWMTTINGKELKVEGQITYYNRYKRQNVVKDLSVELDRLSEESVNNDISSWTKGRSGEALSLLKKRFSHRPVQEKFVCLNCGFETHADEQAALNIARSWLFLRSQEYKKYQTNKTSTGNTDKRAFVETWQSFYRKKLKEVWKPAV

SEQ ID NO: 38023 - protein, 980 aa, synthetic construct
  REGION 1..980: note = engineered CasX variant
QEIKRINKIRRRLVKDSNTKKAGKTGPMKTLLVRVMTPDLRERLENLRKKPENIPQPISNTSRANLNKLLTDYTEMKKAILHVYWEEFQKDPVGLMSRVAQPASKKIDQNKLKPEMDEKGNLTTAGFACSQCGQPLFVYKLEQVSEKGKAYTNYFGRCNVAEHEKLIKLAQLKPEKDSDEAVTYSLGKFGQRALDFYSIHVTKESTHPVKPLAQIAGNRYASGPVGKALSDACMGTIASFLSKYQDIIIEHQKVVKGNQKRLESLRELAGKENLEYPSVTLPPQPHTKEGVDAYNEVIARVRMWVNLNLWQKLKLSRDDAKPLLRLKGFPSFPLVERQANEVDWWDMVCNVKKLINEKKEDGKVFWQNLAGYKRQEALRPYLSSEEDRKKGKKFARYQLGDLLLHLEKKHGEDWGKVYDEAWERIDKKVEGLSKHIKLEEERRSEDAQSKAALTDWLRAKASFVIEGLKEADKDEFCRCELKLQKWYGDLRGKPFAIEAENSILDISGFSKQYNCAFIWQKDGVKKLNLYLIINYFKGGKLRFKKIKPEAFEANRFYTVINKKSGEIVPMEVNFNFDDPNLIILPLAFGKRQGREFIWNDLLSLETGSLKLANGRVIEKTLYNRRTRQDEPALFVALTFERREVLDSSNIKPMSNLIGVDRGENIPAVIALTDPEGCPLSRFKDSLGNPTHILRIGESYKEKQRTIQAKKEVEQRRAGGYSRKYASKAKNLADDMVRNTARDLLYYAVTQDAMLIFENLSRGFGRQGKRTFMAERQYTRMEDWLTAKLAYEGLPSKTYLSKTLAQYTSKTCSNCGFTITSADYDRVLEKLKKTATGWMTTINGKELKVEGQITYYNRYKRQNVVKDLSVELDRLSEESVNNDISSWTKGRSGEALSLLKKRFSHRPVQEKFVCLNCGFETHADEQAALNIARSWLFLRSQEYKKYQTNKTSTGNTDKRAFVETWQSFYRKKLKEVWKPAV

SEQ ID NO: 38024 - protein, 979 aa, synthetic construct
  REGION 1..979: note = engineered CasX variant
QEIKRINKIRRRLVKDSNTKKAGKTGPMKTLLVRVMTPDLRERLENLRKKPENIPQPISNTSRANLNKLLTDYTEMKKAILHVYWEEFQKDPVGLMSRVAQPASKKIDQNKLKPEMDEKGNLTTAGFACSQCGQPLFVYKLEQVSEKGKAYTNYFGRCNVAEHEKLILLAQLKPEKDSDEAVTYSLGKFGQRALDFYSIHVTKESTHPVKPLAQIAGNRYASPVGKALSDACMGTIASFLSKYQDIIIEHQKVVKGNQKRLESLRELAGKENLEYPSVTLPPQPHTKEGVDAYNEVIARVRMWVNLNLWQKLKLSRDDAKPLLRLKGFPSFPLVERQANEVDWWDMVCNVKKLINEKKEDGKVFWQNLAGYKRQEALRPYLSSEEDRKKGKKFARYQLGDLLLHLEKKHGEDWGKVYDEAWERIDKKVEGLSKHIKLEEERRSEDAQSKAALTDWLRAKASFVIEGLKEADKDEFCRCELKLQKWYGDLRGKPFAIEAENSILDISGFSKQYNCAFIWQKDGVKKLNLYLIINYFKGGKLRFKKIKPEAFEANRFYTVINKKSGEIVPMEVNFNFDDPNLIILPLAFGKRQGREFIWNDLLSLETGSLKLANGRVIEKTLYNRRTRQDEPALFVALTFERREVLDSSNIKPMSNLIGVDRGENIPAVIALTDPEGCPLSRFKDSLGNPTHILRIGESYKEKQRTIQAKKEVEQRRAGGYSRKYASKAKNLADDMVRNTARDLLYYAVTQDAMLIFENLSRGFGRQGKRTFMAERQYTRMEDWLTAKLAYEGLPSKTYLSKTLAQYTSKTCSNCGFTITSADYDRVLEKLKKTATGWMTTINGKELKVEGQITYYNRYKRQNVVKDLSVELDRLSEESVNNDISSWTKGRSGEALSLLKKRFSHRPVQEKFVCLNCGFETHADEQAALNIARSWLFLRSQEYKKYQTNKTSTGNTDKRAFVETWQSFYRKKLKEVWKPAV

SEQ ID NO: 38025 - protein, 980 aa, synthetic construct
  REGION 1..980: note = engineered CasX variant
QEIKRINKIRRRLVKDSNTKKAGKTGPMKTLLVRVMTPDLRERLENLRKKPENIPQPISNTSRANLNKLLTDYTEMKKAILHVYWEEFQKDPVGLMSRVAQPASKKIDQNKLKPEMDEKGNLTTAGFACSQCGQPLFVYKLEQVSEKGKAYTNYFGRCNVAEHEKLILLAQLKPEKDSDEAVTYSLGKFGQRALDFYSIHVTKESTHPVKPLAQIAGNRYASYPVGKALSDACMGTIASFLSKYQDIIIEHQKVVKGNQKRLESLRELAGKENLEYPSVTLPPQPHTKEGVDAYNEVIARVRMWVNLNLWQKLKLSRDDAKPLLRLKGFPSFPLVERQANEVDWWDMVCNVKKLINEKKEDGKVFWQNLAGYKRQEALRPYLSSEEDRKKGKKFARYQLGDLLLHLEKKHGEDWGKVYDEAWERIDKKVEGLSKHIKLEEERRSEDAQSKAALTDWLRAKASFVIEGLKEADKDEFCRCELKLQKWYGDLRGKPFAIEAENSILDISGFSKQYNCAFIWQKDGVKKLNLYLIINYFKGGKLRFKKIKPEAFEANRFYTVINKKSGEIVPMEVNFNFDDPNLIILPLAFGKRQGREFIWNDLLSLETGSLKLANGRVIEKTLYNRRTRQDEPALFVALTFERREVLDSSNIKPMSNLIGVDRGENIPAVIALTDPEGCPLSRFKDSLGNPTHILRIGESYKEKQRTIQAKKEVEQRRAGGYSRKYASKAKNLADDMVRNTARDLLYYAVTQDAMLIFENLSRGFGRQGKRTFMAERQYTRMEDWLTAKLAYEGLPSKTYLSKTLAQYTSKTCSNCGFTITSADYDRVLEKLKKTATGWMTTINGKELKVEGQITYYNRYKRQNVVKDLSVELDRLSEESVNNDISSWTKGRSGEALSLLKKRFSHRPVQEKFVCLNCGFETHADEQAALNIARSWLFLRSQEYKKYQTNKTTGKNTDKRAFVETWQSFYRKKLKEVWKPAV

SEQ ID NO: 38026 - protein, 980 aa, synthetic construct
  REGION 1..980: note = engineered CasX variant
QEIKRINKIRRRLVKDSNTKKAGKTGPMKTLLVRVMTPDLRERLENLRKKPENIPQPISNTSRANLNKLLTDYTEMKKAILHVYWEEFQKDPVGLMSRVAQPASKKIDQNKLKPEMDEKGNLTTAGFACSQCGQPLFVYKLEQVSEKGKAYTNYFGRCNVAEHEKLILLAQLKPEKDSDEAVTYSLGKFGQRALDFYSIHVTKESTHPVKPLAQIAGNRYASHPVGKALSDACMGTIASFLSKYQDIIIEHQKVVKGNQKRLESLRELAGKENLEYPSVTLPPQPHTKEGVDAYNEVIARVRMWVNLNLWQKLKLSRDDAKPLLRLKGFPSFPLVERQANEVDWWDMVCNVKKLINEKKEDGKVFWQNLAGYKRQEALRPYLSSEEDRKKGKKFARYQLGDLLLHLEKKHGEDWGKVYDEAWERIDKKVEGLSKHIKLEEERRSEDAQSKAALTDWLRAKASFVIEGLKEADKDEFCRCELKLQKWYGDLRGKPFAIEAENSILDISGFSKQYNCAFIWQKDGVKKLNLYLIINYFKGGKLRFKKIKPEAFEANRFYTVINKKSGEIVPMEVNFNFDDPNLIILPLAFGKRQGREFIWNDLLSLETGSLKLANGRVIEKTLYNRRTRQDEPALFVALTFERREVLDSSNIKPMSNLIGVDRGENIPAVIALTDPEGCPLSRFKDSLGNPTHILRIGESYKEKQRTIQAKKEVEQRRAGGYSRKYASKAKNLADDMVRNTARDLLYYAVTQDAMLIFENLSRGFGRQGKRTFMAERQYTRMEDWLTAKLAYEGLPSKTYLSKTLAQYTSKTCSNCGFTITSADYDRVLEKLKKTATGWMTTINGKELKVEGQITYYNRYKRQNVVKDLSVELDRLSEESVNNDISSWTKGRSGEALSLLKKRFSHRPVQEKFVCLNCGFETHADEQAALNIARSWLFLRSQEYKKYQTNKTTGKNTDKRAFVETWQSFYRKKLKEVWKPAV

SEQ ID NO: 38027 - protein, 980 aa, synthetic construct
  REGION 1..980: note = engineered CasX variant
QEIKRINKIRRRLVKDSNTKKAGKTGPMKTLLVRVMTPDLRERLENLRKKPENIPQPISNTSRANLNKLLTDYTEMKKAILHVYWEEFQKDPVGLMSRVAQPASKKIDQNKLKPEMDEKGNLTTAGFACSQCGQPLFVYKLEQVSEKGKAYTNYFGRCNVAEHEKLILLAQLKPEKDSDEAVTYSLGKFGQRALDFYSIHVTKESTHPVKPLAQIAGNRYASSPVGKALSDACMGTIASFLSKYQDIIIEHQKVVKGNQKRLESLRELAGKENLEYPSVTLPPQPHTKEGVDAYNEVIARVRMWVNLNLWQKLKLSRDDAKPLLRLKGFPSFPLVERQANEVDWWDMVCNVKKLINEKKEDGKVFWQNLAGYKRQEALRPYLSSEEDRKKGKKFARYQLGDLLLHLEKKHGEDWGKVYDEAWERIDKKVEGLSKHIKLEEERRSEDAQSKAALTDWLRAKASFVIEGLKEADKDEFCRCELKLQKWYGDLRGKPFAIEAENSILDISGFSKQYNCAFIWQKDGVKKLNLYLIINYFKGGKLRFKKIKPEAFEANRFYTVINKKSGEIVPMEVNFNFDDPNLIILPLAFGKRQGREFIWNDLLSLETGSLKLANGRVIEKTLYNRRTRQDEPALFVALTFERREVLDSSNIKPMSNLIGVDRGENIPAVIALTDPEGCPLSRFKDSLGNPTHILRIGESYKEKQRTIQAKKEVEQRRAGGYSRKYASKAKNLADDMVRNTARDLLYYAVTQDAMLIFENLSRGFGRQGKRTFMAERQYTRMEDWLTAKLAYEGLPSKTYLSKTLAQYTSKTCSNCGFTITSADYDRVLEKLKKTATGWMTTINGKELKVEGQITYYNRYKRQNVVKDLSVELDRLSEESVNNDISSWTKGRSGEALSLLKKRFSHRPVQEKFVCLNCGFETHADEQAALNIARSWLFLRSQEYKKYQTNKTTGKNTDKRAFVETWQSFYRKKLKEVWKPAV

SEQ ID NO: 38028 - protein, 980 aa, synthetic construct
  REGION 1..980: note = engineered CasX variant
QEIKRINKIRRRLVKDSNTKKAGKTGPMKTLLVRVMTPDLRERLENLRKKPENIPQPISNTSRANLNKLLTDYTEMKKAILHVYWEEFQKDPVGLMSRVAQPASKKIDQNKLKPEMDEKGNLTTAGFACSQCGQPLFVYKLEQVSEKGKAYTNYFGRCNVAEHEKLILLAQLKPEKDSDEAVTYSLGKFGQRALDFYSIHVTKESTHPVKPLAQIAGNRYASTPVGKALSDACMGTIASFLSKYQDIIIEHQKVVKGNQKRLESLRELAGKENLEYPSVTLPPQPHTKEGVDAYNEVIARVRMWVNLNLWQKLKLSRDDAKPLLRLKGFPSFPLVERQANEVDWWDMVCNVKKLINEKKEDGKVFWQNLAGYKRQEALRPYLSSEEDRKKGKKFARYQLGDLLLHLEKKHGEDWGKVYDEAWERIDKKVEGLSKHIKLEEERRSEDAQSKAALTDWLRAKASFVIEGLKEADKDEFCRCELKLQKWYGDLRGKPFAIEAENSILDISGFSKQYNCAFIWQKDGVKKLNLYLIINYFKGGKLRFKKIKPEAFEANRFYTVINKKSGEIVPMEVNFNFDDPNLIILPLAFGKRQGREFIWNDLLSLETGSLKLANGRVIEKTLYNRRTRQDEPALFVALTFERREVLDSSNIKPMSNLIGVDRGENIPAVIALTDPEGCPLSRFKDSLGNPTHILRIGESYKEKQRTIQAKKEVEQRRAGGYSRKYASKAKNLADDMVRNTARDLLYYAVTQDAMLIFENLSRGFGRQGKRTFMAERQYTRMEDWLTAKLAYEGLPSKTYLSKTLAQYTSKTCSNCGFTITSADYDRVLEKLKKTATGWMTTINGKELKVEGQITYYNRYKRQNVVKDLSVELDRLSEESVNNDISSWTKGRSGEALSLLKKRFSHRPVQEKFVCLNCGFETHADEQAALNIARSWLFLRSQEYKKYQTNKTTGKNTDKRAFVETWQSFYRKKLKEVWKPAV

SEQ ID NO: 38029 - protein, 980 aa, synthetic construct
  REGION 1..980: note = engineered CasX variant
QEIKRINKIRRRLVKDSNTKKAGKTGPMKTLLVRVMTPDLRERLENLRKKPENIPQPISNTSRANLNKLLTDYTEMKKAILHVYWEEFQKDPVGLMSRVAQPASKKIDQNKLKPEMDEKGNLTTAGFACSQCGQPLFVYKLEQVSEKGKAYTNYFGRCNVAEHEKLILLAQLKPEKDSDEAVTYSLGKFGQRALDFYSIHVTKESTHPVKPLAQIAGNRYASAPVGKALSDACMGTIASFLSKYQDIIIEHQKVVKGNQKRLESLRELAGKENLEYPSVTLPPQPHTKEGVDAYNEVIARVRMWVNLNLWQKLKLSRDDAKPLLRLKGFPSFPLVERQANEVDWWDMVCNVKKLINEKKEDGKVFWQNLAGYKRQEALRPYLSSEEDRKKGKKFARYQLGDLLLHLEKKHGEDWGKVYDEAWERIDKKVEGLSKHIKLEEERRSEDAQSKAALTDWLRAKASFVIEGLKEADKDEFCRCELKLQKWYGDLRGKPFAIEAENSILDISGFSKQYNCAFIWQKDGVKKLNLYLIINYFKGGKLRFKKIKPEAFEANRFYTVINKKSGEIVPMEVNFNFDDPNLIILPLAFGKRQGREFIWNDLLSLETGSLKLANGRVIEKTLYNRRTRQDEPALFVALTFERREVLDSSNIKPMSNLIGVDRGENIPAVIALTDPEGCPLSRFKDSLGNPTHILRIGESYKEKQRTIQAKKEVEQRRAGGYSRKYASKAKNLADDMVRNTARDLLYYAVTQDAMLIFENLSRGFGRQGKRTFMAERQYTRMEDWLTAKLAYEGLPSKTYLSKTLAQYTSKTCSNCGFTITSADYDRVLEKLKKTATGWMTTINGKELKVEGQITYYNRYKRQNVVKDLSVELDRLSEESVNNDISSWTKGRSGEALSLLKKRFSHRPVQEKFVCLNCGFETHADEQAALNIARSWLFLRSQEYKKYQTNKTTGKNTDKRAFVETWQSFYRKKLKEVWKPAV

SEQ ID NO: 38030 - protein, 980 aa, synthetic construct
  REGION 1..980: note = engineered CasX variant
QEIKRINKIRRRLVKDSNTKKAGKTGPMKTLLVRVMTPDLRERLENLRKKPENIPQPISNTSRANLNKLLTDYTEMKKAILHVYWEEFQKDPVGLMSRVAQPASKKIDQNKLKPEMDEKGNLTTAGFACSQCGQPLFVYKLEQVSEKGKAYTNYFGRCNVAEHEKLILLAQLKPEKDSDEAVTYSLGKFGQRALDFYSIHVTKESTHPVKPLAQIAGNRYASVPVGKALSDACMGTIASFLSKYQDIIIEHQKVVKGNQKRLESLRELAGKENLEYPSVTLPPQPHTKEGVDAYNEVIARVRMWVNLNLWQKLKLSRDDAKPLLRLKGFPSFPLVERQANEVDWWDMVCNVKKLINEKKEDGKVFWQNLAGYKRQEALRPYLSSEEDRKKGKKFARYQLGDLLLHLEKKHGEDWGKVYDEAWERIDKKVEGLSKHIKLEEERRSEDAQSKAALTDWLRAKASFVIEGLKEADKDEFCRCELKLQKWYGDLRGKPFAIEAENSILDISGFSKQYNCAFIWQKDGVKKLNLYLIINYFKGGKLRFKKIKPEAFEANRFYTVINKKSGEIVPMEVNFNFDDPNLIILPLAFGKRQGREFIWNDLLSLETGSLKLANGRVIEKTLYNRRTRQDEPALFVALTFERREVLDSSNIKPMSNLIGVDRGENIPAVIALTDPEGCPLSRFKDSLGNPTHILRIGESYKEKQRTIQAKKEVEQRRAGGYSRKYASKAKNLADDMVRNTARDLLYYAVTQDAMLIFENLSRGFGRQGKRTFMAERQYTRMEDWLTAKLAYEGLPSKTYLSKTLAQYTSKTCSNCGFTITSADYDRVLEKLKKTATGWMTTINGKELKVEGQITYYNRYKRQNVVKDLSVELDRLSEESVNNDISSWTKGRSGEALSLLKKRFSHRPVQEKFVCLNCGFETHADEQAALNIARSWLFLRSQEYKKYQTNKTTGKNTDKRAFVETWQSFYRKKLKEVWKPAV

SEQ ID NO: 38031 - protein, 980 aa, synthetic construct
  REGION 1..980: note = engineered CasX variant
QEIKRINKIRRRLVKDSNTKKAGKTGPMKTLLVRVMTPDLRERLENLRKKPENIPQPISNTSRANLNKLLTDYTEMKKAILHVYWEEFQKDPVGLMSRVAQPASKKIDQNKLKPEMDEKGNLTTAGFACSQCGQPLFVYKLEQVSEKGKAYTNYFGRCNVAEHEKLIKLAQLKPEKDSDEAVTYSLGKFGQRALDFYSIHVTKESTHPVKPLAQIAGNRYASGPVGKALSDACMGTIASFLSKYQDIIIEHQKVVKGNQKRLESLRELAGKENLEYPSVTLPPQPHTKEGVDAYNEVIARVRMWVNLNLWQKLKLSRDDAKPLLRLKGFPSFPLVERQANEVDWWDMVCNVKKLINEKKEDGKVFWQNLAGYKRQEALRPYLSSEEDRKKGKKFARYQLGDLLLHLEKKHGEDWGKVYDEAWERIDKKVEGLSKHIKLEEERRSEDAQSKAALTDWLRAKASFVIEGLKEADKDEFCRCELKLQKWYGDLRGKPFAIEAENSILDISGFSKQYNCAFIWQKDGVKKLNLYLIINYFKGGKLRFKKIKPEAFEANRFYTVINKKSGEIVPMEVNFNFDDPNLIILPLAFGKRQGREFIWNDLLSLETGSLKLANGRVIEKTLYNRRTRQDEPALFVALTFERREVLDSSNIKPMSNLIGVDRGENIPAVIALTDPEGCPLSRFKDSLGNPTHILRIGESYKEKQRTIQAKKEVEQRRAGGYSRKYASKAKNLADDMVRNTARDLLYYAVTQDAMLIFENLSRGFGRQGKRTFMAERQYTRMEDWLTAKLAYEGLPSKTYLSKTLAQYTSKTCSNCGFTITSADYDRVLEKLKKTATGWMTTINGKELKVEGQITYYNRYKRQNVVKDLSVELDRLSEESVNNDISSWTKGRSGEALSLLKKRFSHRPVQEKFVCLNCGFETHADEQAALNIARSWLFLRSQEYKKYQTNKTTGKNTDKRAFVETWQSFYRKKLKEVWKPAV

SEQ ID NO: 38032 - protein, 979 aa, synthetic construct
  REGION 1..979: note = engineered CasX variant
QEIKRINKIRRRLVKDSNTKKAGKTGPMKTLLVRVMTPDLRERLENLRKKPENIPQPISNTSRANLNKLLTDYTEMKKAILHVYWEEFQKDPVGLMSRVAQPASKKIDQNKLKPEMDEKGNLTTAGFACSQCGQPLFVYKLEQVSEKGKAYTNYFGRCNVAEHEKLILLAQLKPEKDSDEAVTYSLGKFGQRALDFYSIHVTKESTHPVKPLAQIAGNRYASPVGKALSDACMGTIASFLSKYQDIIIEHQKVVKGNQKRLESLRELAGKENLEYPSVTLPPQPHTKEGVDAYNEVIARVRMWVNLNLWQKLKLSRDDAKPLLRLKGFPSFPLVERQANEVDWWDMVCNVKKLINEKKEDGKVFWQNLAGYKRQEALRPYLSSEEDRKKGKKFARYQLGDLLLHLEKKHGEDWGKVYDEAWERIDKKVEGLSKHIKLEEERRSEDAQSKAALTDWLRAKASFVIEGLKEADKDEFCRCELKLQKWYGDLRGKPFAIEAENSILDISGFSKQYNCAFIWQKDGVKKLNLYLIINYFKGGKLRFKKIKPEAFEANRFYTVINKKSGEIVPMEVNFNFDDPNLIILPLAFGKRQGREFIWNDLLSLETGSLKLANGRVIEKTLYNRRTRQDEPALFVALTFERREVLDSSNIKPMSNLIGVDRGENIPAVIALTDPEGCPLSRFKDSLGNPTHILRIGESYKEKQRTIQAKKEVEQRRAGGYSRKYASKAKNLADDMVRNTARDLLYYAVTQDAMLIFENLSRGFGRQGKRTFMAERQYTRMEDWLTAKLAYEGLPSKTYLSKTLAQYTSKTCSNCGFTITSADYDRVLEKLKKTATGWMTTINGKELKVEGQITYYNRYKRQNVVKDLSVELDRLSEESVNNDISSWTKGRSGEALSLLKKRFSHRPVQEKFVCLNCGFETHADEQAALNIARSWLFLRSQEYKKYQTNKTTGKNTDKRAFVETWQSFYRKKLKEVWKPAV

SEQ ID NO: 38033 - protein, 979 aa, synthetic construct
  REGION 1..979: note = engineered CasX variant
QEIKRINKIRRRLVKDSNTKKAGKTGPMKTLLVRVMTPDLRERLENLRKKPENIPQPISNTSRANLNKLLTDYTEMKKAILHVYWEEFQKDPVGLMSRVAQPASKKIDQNKLKPEMDEKGNLTTAGFACSQCGQPLFVYKLEQVSEKGKAYTNYFGRCNVAEHEKLILLAQLKPEKDSDEAVTYSLGKFGQRALDFYSIHVTKESTHPVKPLAQIAGNRYASYPVGKALSDACMGTIASFLSKYQDIIIEHQKVVKGNQKRLESLRELAGKENLEYPSVTLPPQPHTKEGVDAYNEVIARVRMWVNLNLWQKLKLSRDDAKPLLRLKKFPSFPLVERQANEVDWWDMVCNVKKLINEKKEDGKVFWQNLAGYKRQEALRPYLSSEEDRKKGKKFARYQLGDLLLHLEKKHGEDWGKVYDEAWERIDKKVEGLSKHIKLEEERRSEDAQSKAALTDWLRAKASFVIEGLKEADKDEFCRCELKLQKWYGDLRGKPFAIEAENSILDISGFSKQYNCAFIWQKDGVKKLNLYLIINYFKGGKLRFKKIKPEAFEANRFYTVINKKSGEIVPMEVNFNFDDPNLIILPLAFGKRQGREFIWNDLLSLETGSLKLANGRVIEKTLYNRRTRQDEPALFVALTFERREVLDSSNIKPMSNLIGVDRGENIPAVIALTDPEGCPLSRFKDSLGNPTHILRIGESYKEKQRTIQAKKEVEQRRAGGYSRKYASKAKNLADDMVRNTARDLLYYAVTQDAMLIFENLSRGFGRQGKRTFMAERQYTRMEDWLTAKLAYEGLPSKTYLSKTLAQYTSKTCSNCGFTITSADYDRVLEKLKKTATGWMTTINGKELKVEGQITYYNRYKRQNVVKDLSVELDRLSEESVNNDISSWTKGRSGEALSLLKKRFSHRPVQEKFVCLNCGFETHADEQAALNIARSWLFLRSQEYKKYQTNKTTGNTDKRAFVETWQSFYRKKLKEVWKPAV

SEQ ID NO: 38034 - protein, 979 aa, synthetic construct
  REGION 1..979: note = engineered CasX variant
QEIKRINKIRRRLVKDSNTKKAGKTGPMKTLLVRVMTPDLRERLENLRKKPENIPQPISNTSRANLNKLLTDYTEMKKAILHVYWEEFQKDPVGLMSRVAQPASKKIDQNKLKPEMDEKGNLTTAGFACSQCGQPLFVYKLEQVSEKGKAYTNYFGRCNVAEHEKLILLAQLKPEKDSDEAVTYSLGKFGQRALDFYSIHVTKESTHPVKPLAQIAGNRYASHPVGKALSDACMGTIASFLSKYQDIIIEHQKVVKGNQKRLESLRELAGKENLEYPSVTLPPQPHTKEGVDAYNEVIARVRMWVNLNLWQKLKLSRDDAKPLLRLKKFPSFPLVERQANEVDWWDMVCNVKKLINEKKEDGKVFWQNLAGYKRQEALRPYLSSEEDRKKGKKFARYQLGDLLLHLEKKHGEDWGKVYDEAWERIDKKVEGLSKHIKLEEERRSEDAQSKAALTDWLRAKASFVIEGLKEADKDEFCRCELKLQKWYGDLRGKPFAIEAENSILDISGFSKQYNCAFIWQKDGVKKLNLYLIINYFKGGKLRFKKIKPEAFEANRFYTVINKKSGEIVPMEVNFNFDDPNLIILPLAFGKRQGREFIWNDLLSLETGSLKLANGRVIEKTLYNRRTRQDEPALFVALTFERREVLDSSNIKPMSNLIGVDRGENIPAVIALTDPEGCPLSRFKDSLGNPTHILRIGESYKEKQRTIQAKKEVEQRRAGGYSRKYASKAKNLADDMVRNTARDLLYYAVTQDAMLIFENLSRGFGRQGKRTFMAERQYTRMEDWLTAKLAYEGLPSKTYLSKTLAQYTSKTCSNCGFTITSADYDRVLEKLKKTATGWMTTINGKELKVEGQITYYNRYKRQNVVKDLSVELDRLSEESVNNDISSWTKGRSGEALSLLKKRFSHRPVQEKFVCLNCGFETHADEQAALNIARSWLFLRSQEYKKYQTNKTTGNTDKRAFVETWQSFYRKKLKEVWKPAV

SEQ ID NO: 38035 - protein, 979 aa, synthetic construct
  REGION 1..979: note = engineered CasX variant
QEIKRINKIRRRLVKDSNTKKAGKTGPMKTLLVRVMTPDLRERLENLRKKPENIPQPISNTSRANLNKLLTDYTEMKKAILHVYWEEFQKDPVGLMSRVAQPASKKIDQNKLKPEMDEKGNLTTAGFACSQCGQPLFVYKLEQVSEKGKAYTNYFGRCNVAEHEKLILLAQLKPEKDSDEAVTYSLGKFGQRALDFYSIHVTKESTHPVKPLAQIAGNRYASSPVGKALSDACMGTIASFLSKYQDIIIEHQKVVKGNQKRLESLRELAGKENLEYPSVTLPPQPHTKEGVDAYNEVIARVRMWVNLNLWQKLKLSRDDAKPLLRLKKFPSFPLVERQANEVDWWDMVCNVKKLINEKKEDGKVFWQNLAGYKRQEALRPYLSSEEDRKKGKKFARYQLGDLLLHLEKKHGEDWGKVYDEAWERIDKKVEGLSKHIKLEEERRSEDAQSKAALTDWLRAKASFVIEGLKEADKDEFCRCELKLQKWYGDLRGKPFAIEAENSILDISGFSKQYNCAFIWQKDGVKKLNLYLIINYFKGGKLRFKKIKPEAFEANRFYTVINKKSGEIVPMEVNFNFDDPNLIILPLAFGKRQGREFIWNDLLSLETGSLKLANGRVIEKTLYNRRTRQDEPALFVALTFERREVLDSSNIKPMSNLIGVDRGENIPAVIALTDPEGCPLSRFKDSLGNPTHILRIGESYKEKQRTIQAKKEVEQRRAGGYSRKYASKAKNLADDMVRNTARDLLYYAVTQDAMLIFENLSRGFGRQGKRTFMAERQYTRMEDWLTAKLAYEGLPSKTYLSKTLAQYTSKTCSNCGFTITSADYDRVLEKLKKTATGWMTTINGKELKVEGQITYYNRYKRQNVVKDLSVELDRLSEESVNNDISSWTKGRSGEALSLLKKRFSHRPVQEKFVCLNCGFETHADEQAALNIARSWLFLRSQEYKKYQTNKTTGNTDKRAFVETWQSFYRKKLKEVWKPAV

SEQ ID NO: 38036 - protein, 979 aa, synthetic construct
  REGION 1..979: note = engineered CasX variant
QEIKRINKIRRRLVKDSNTKKAGKTGPMKTLLVRVMTPDLRERLENLRKKPENIPQPISNTSRANLNKLLTDYTEMKKAILHVYWEEFQKDPVGLMSRVAQPASKKIDQNKLKPEMDEKGNLTTAGFACSQCGQPLFVYKLEQVSEKGKAYTNYFGRCNVAEHEKLILLAQLKPEKDSDEAVTYSLGKFGQRALDFYSIHVTKESTHPVKPLAQIAGNRYASTPVGKALSDACMGTIASFLSKYQDIIIEHQKVVKGNQKRLESLRELAGKENLEYPSVTLPPQPHTKEGVDAYNEVIARVRMWVNLNLWQKLKLSRDDAKPLLRLKKFPSFPLVERQANEVDWWDMVCNVKKLINEKKEDGKVFWQNLAGYKRQEALRPYLSSEEDRKKGKKFARYQLGDLLLHLEKKHGEDWGKVYDEAWERIDKKVEGLSKHIKLEEERRSEDAQSKAALTDWLRAKASFVIEGLKEADKDEFCRCELKLQKWYGDLRGKPFAIEAENSILDISGFSKQYNCAFIWQKDGVKKLNLYLIINYFKGGKLRFKKIKPEAFEANRFYTVINKKSGEIVPMEVNFNFDDPNLIILPLAFGKRQGREFIWNDLLSLETGSLKLANGRVIEKTLYNRRTRQDEPALFVALTFERREVLDSSNIKPMSNLIGVDRGENIPAVIALTDPEGCPLSRFKDSLGNPTHILRIGESYKEKQRTIQAKKEVEQRRAGGYSRKYASKAKNLADDMVRNTARDLLYYAVTQDAMLIFENLSRGFGRQGKRTFMAERQYTRMEDWLTAKLAYEGLPSKTYLSKTLAQYTSKTCSNCGFTITSADYDRVLEKLKKTATGWMTTINGKELKVEGQITYYNRYKRQNVVKDLSVELDRLSEESVNNDISSWTKGRSGEALSLLKKRFSHRPVQEKFVCLNCGFETHADEQAALNIARSWLFLRSQEYKKYQTNKTTGNTDKRAFVETWQSFYRKKLKEVWKPAV

SEQ ID NO: 38037 - protein, 979 aa, synthetic construct
  REGION 1..979: note = engineered CasX variant
QEIKRINKIRRRLVKDSNTKKAGKTGPMKTLLVRVMTPDLRERLENLRKKPENIPQPISNTSRANLNKLLTDYTEMKKAILHVYWEEFQKDPVGLMSRVAQPASKKIDQNKLKPEMDEKGNLTTAGFACSQCGQPLFVYKLEQVSEKGKAYTNYFGRCNVAEHEKLILLAQLKPEKDSDEAVTYSLGKFGQRALDFYSIHVTKESTHPVKPLAQIAGNRYASAPVGKALSDACMGTIASFLSKYQDIIIEHQKVVKGNQKRLESLRELAGKENLEYPSVTLPPQPHTKEGVDAYNEVIARVRMWVNLNLWQKLKLSRDDAKPLLRLKKFPSFPLVERQANEVDWWDMVCNVKKLINEKKEDGKVFWQNLAGYKRQEALRPYLSSEEDRKKGKKFARYQLGDLLLHLEKKHGEDWGKVYDEAWERIDKKVEGLSKHIKLEEERRSEDAQSKAALTDWLRAKASFVIEGLKEADKDEFCRCELKLQKWYGDLRGKPFAIEAENSILDISGFSKQYNCAFIWQKDGVKKLNLYLIINYFKGGKLRFKKIKPEAFEANRFYTVINKKSGEIVPMEVNFNFDDPNLIILPLAFGKRQGREFIWNDLLSLETGSLKLANGRVIEKTLYNRRTRQDEPALFVALTFERREVLDSSNIKPMSNLIGVDRGENIPAVIALTDPEGCPLSRFKDSLGNPTHILRIGESYKEKQRTIQAKKEVEQRRAGGYSRKYASKAKNLADDMVRNTARDLLYYAVTQDAMLIFENLSRGFGRQGKRTFMAERQYTRMEDWLTAKLAYEGLPSKTYLSKTLAQYTSKTCSNCGFTITSADYDRVLEKLKKTATGWMTTINGKELKVEGQITYYNRYKRQNVVKDLSVELDRLSEESVNNDISSWTKGRSGEALSLLKKRFSHRPVQEKFVCLNCGFETHADEQAALNIARSWLFLRSQEYKKYQTNKTTGNTDKRAFVETWQSFYRKKLKEVWKPAV

SEQ ID NO: 38038 - protein, 979 aa, synthetic construct
  REGION 1..979: note = engineered CasX variant
QEIKRINKIRRRLVKDSNTKKAGKTGPMKTLLVRVMTPDLRERLENLRKKPENIPQPISNTSRANLNKLLTDYTEMKKAILHVYWEEFQKDPVGLMSRVAQPASKKIDQNKLKPEMDEKGNLTTAGFACSQCGQPLFVYKLEQVSEKGKAYTNYFGRCNVAEHEKLILLAQLKPEKDSDEAVTYSLGKFGQRALDFYSIHVTKESTHPVKPLAQIAGNRYASVPVGKALSDACMGTIASFLSKYQDIIIEHQKVVKGNQKRLESLRELAGKENLEYPSVTLPPQPHTKEGVDAYNEVIARVRMWVNLNLWQKLKLSRDDAKPLLRLKKFPSFPLVERQANEVDWWDMVCNVKKLINEKKEDGKVFWQNLAGYKRQEALRPYLSSEEDRKKGKKFARYQLGDLLLHLEKKHGEDWGKVYDEAWERIDKKVEGLSKHIKLEEERRSEDAQSKAALTDWLRAKASFVIEGLKEADKDEFCRCELKLQKWYGDLRGKPFAIEAENSILDISGFSKQYNCAFIWQKDGVKKLNLYLIINYFKGGKLRFKKIKPEAFEANRFYTVINKKSGEIVPMEVNFNFDDPNLIILPLAFGKRQGREFIWNDLLSLETGSLKLANGRVIEKTLYNRRTRQDEPALFVALTFERREVLDSSNIKPMSNLIGVDRGENIPAVIALTDPEGCPLSRFKDSLGNPTHILRIGESYKEKQRTIQAKKEVEQRRAGGYSRKYASKAKNLADDMVRNTARDLLYYAVTQDAMLIFENLSRGFGRQGKRTFMAERQYTRMEDWLTAKLAYEGLPSKTYLSKTLAQYTSKTCSNCGFTITSADYDRVLEKLKKTATGWMTTINGKELKVEGQITYYNRYKRQNVVKDLSVELDRLSEESVNNDISSWTKGRSGEALSLLKKRFSHRPVQEKFVCLNCGFETHADEQAALNIARSWLFLRSQEYKKYQTNKTTGNTDKRAFVETWQSFYRKKLKEVWKPAV

SEQ ID NO: 38039 - protein, 979 aa, synthetic construct
  REGION 1..979: note = engineered CasX variant
QEIKRINKIRRRLVKDSNTKKAGKTGPMKTLLVRVMTPDLRERLENLRKKPENIPQPISNTSRANLNKLLTDYTEMKKAILHVYWEEFQKDPVGLMSRVAQPASKKIDQNKLKPEMDEKGNLTTAGFACSQCGQPLFVYKLEQVSEKGKAYTNYFGRCNVAEHEKLIKLAQLKPEKDSDEAVTYSLGKFGQRALDFYSIHVTKESTHPVKPLAQIAGNRYASGPVGKALSDACMGTIASFLSKYQDIIIEHQKVVKGNQKRLESLRELAGKENLEYPSVTLPPQPHTKEGVDAYNEVIARVRMWVNLNLWQKLKLSRDDAKPLLRLKKFPSFPLVERQANEVDWWDMVCNVKKLINEKKEDGKVFWQNLAGYKRQEALRPYLSSEEDRKKGKKFARYQLGDLLLHLEKKHGEDWGKVYDEAWERIDKKVEGLSKHIKLEEERRSEDAQSKAALTDWLRAKASFVIEGLKEADKDEFCRCELKLQKWYGDLRGKPFAIEAENSILDISGFSKQYNCAFIWQKDGVKKLNLYLIINYFKGGKLRFKKIKPEAFEANRFYTVINKKSGEIVPMEVNFNFDDPNLIILPLAFGKRQGREFIWNDLLSLETGSLKLANGRVIEKTLYNRRTRQDEPALFVALTFERREVLDSSNIKPMSNLIGVDRGENIPAVIALTDPEGCPLSRFKDSLGNPTHILRIGESYKEKQRTIQAKKEVEQRRAGGYSRKYASKAKNLADDMVRNTARDLLYYAVTQDAMLIFENLSRGFGRQGKRTFMAERQYTRMEDWLTAKLAYEGLPSKTYLSKTLAQYTSKTCSNCGFTITSADYDRVLEKLKKTATGWMTTINGKELKVEGQITYYNRYKRQNVVKDLSVELDRLSEESVNNDISSWTKGRSGEALSLLKKRFSHRPVQEKFVCLNCGFETHADEQAALNIARSWLFLRSQEYKKYQTNKTTGNTDKRAFVETWQSFYRKKLKEVWKPAV

SEQ ID NO: 38040 - protein, 978 aa, synthetic construct
  REGION 1..978: note = engineered CasX variant
QEIKRINKIRRRLVKDSNTKKAGKTGPMKTLLVRVMTPDLRERLENLRKKPENIPQPISNTSRANLNKLLTDYTEMKKAILHVYWEEFQKDPVGLMSRVAQPASKKIDQNKLKPEMDEKGNLTTAGFACSQCGQPLFVYKLEQVSEKGKAYTNYFGRCNVAEHEKLILLAQLKPEKDSDEAVTYSLGKFGQRALDFYSIHVTKESTHPVKPLAQIAGNRYASPVGKALSDACMGTIASFLSKYQDIIIEHQKVVKGNQKRLESLRELAGKENLEYPSVTLPPQPHTKEGVDAYNEVIARVRMWVNLNLWQKLKLSRDDAKPLLRLKKFPSFPLVERQANEVDWWDMVCNVKKLINEKKEDGKVFWQNLAGYKRQEALRPYLSSEEDRKKGKKFARYQLGDLLLHLEKKHGEDWGKVYDEAWERIDKKVEGLSKHIKLEEERRSEDAQSKAALTDWLRAKASFVIEGLKEADKDEFCRCELKLQKWYGDLRGKPFAIEAENSILDISGFSKQYNCAFIWQKDGVKKLNLYLIINYFKGGKLRFKKIKPEAFEANRFYTVINKKSGEIVPMEVNFNFDDPNLIILPLAFGKRQGREFIWNDLLSLETGSLKLANGRVIEKTLYNRRTRQDEPALFVALTFERREVLDSSNIKPMSNLIGVDRGENIPAVIALTDPEGCPLSRFKDSLGNPTHILRIGESYKEKQRTIQAKKEVEQRRAGGYSRKYASKAKNLADDMVRNTARDLLYYAVTQDAMLIFENLSRGFGRQGKRTFMAERQYTRMEDWLTAKLAYEGLPSKTYLSKTLAQYTSKTCSNCGFTITSADYDRVLEKLKKTATGWMTTINGKELKVEGQITYYNRYKRQNVVKDLSVELDRLSEESVNNDISSWTKGRSGEALSLLKKRFSHRPVQEKFVCLNCGFETHADEQAALNIARSWLFLRSQEYKKYQTNKTTGNTDKRAFVETWQSFYRKKLKEVWKPAV

SEQ ID NO: 38041 - protein, 979 aa, synthetic construct
  REGION 1..979: note = engineered CasX variant
QEIKRINKIRRRLVKDSNTKKAGKTGPMKTLLVRVMTPDLRERLENLRKKPENIPQPISNTSRANLNKLLTDYTEMKKAILHVYWEEFQKDPVGLMSRVAQPASKKIDQNKLKPEMDEKGNLTTAGFACSQCGQPLFVYKLEQVSEKGKAYTNYFGRCNVAEHEKLILLAQLKPEKDSDEAVTYSLGKFGQRALDFYSIHVTKESTHPVKPLAQIAGNRYASYPVGKALSDACMGTIASFLSKYQDIIIEHQKVVKGNQKRLESLRELAGKENLEYPSVTLPPQPHTKEGVDAYNEVIARVRMWVNLNLWQKLKLSRDDAKPLLRLKGFPSFPLVERQANEVDWWDMVCNVKKLINEKKEDGKVFWQNLAGYKRQEALRPYLSSEEDRKKGKKFARYQLGDLLLHLEKKHGEDWGKVYDEAWERIDKKVEGLSKHIKLEEERRSEDAQSKAALTDWLRAKASFVIEGLKEADKDEFCRCELKLQKWYGDLRGKPFAIEAENSILDISGFSKQYNCAFIWQKDGVKKLNLYLIINYFKGGKLRFKKIKPEAFEANRFYTVINKKSGEIVPMEVNFNFDDPNLIILPLAFGKRQGREFIWNDLLSLETGSLKLANGRVIEKTLYNRRTRQDEPALFVALTFERREVLDSSNIKPMSNLIGVDRGENIPAVIALTDPEGCPLSRFKDSLGNPTHILRIGERYKEKQRTIQAKKEVEQRRAGGYSRKYASKAKNLADDMVRNTARDLLYYAVTQDAMLIFENLSRGFGRQGKRTFMAERQYTRMEDWLTAKLAYEGLPSKTYLSKTLAQYTSKTCSNCGFTITSADYDRVLEKLKKTATGWMTTINGKELKVEGQITYYNRYKRQNVVKDLSVELDRLSEESVNNDISSWTKGRSGEALSLLKKRFSHRPVQEKFVCLNCGFETHADEQAALNIARSWLFLRSQEYKKYQTNKTTGNTDKRAFVETWQSFYRKKLKEVWKPAV

SEQ ID NO: 38042 - protein, 979 aa, synthetic construct
  REGION 1..979: note = engineered CasX variant
QEIKRINKIRRRLVKDSNTKKAGKTGPMKTLLVRVMTPDLRERLENLRKKPENIPQPISNTSRANLNKLLTDYTEMKKAILHVYWEEFQKDPVGLMSRVAQPASKKIDQNKLKPEMDEKGNLTTAGFACSQCGQPLFVYKLEQVSEKGKAYTNYFGRCNVAEHEKLILLAQLKPEKDSDEAVTYSLGKFGQRALDFYSIHVTKESTHPVKPLAQIAGNRYASHPVGKALSDACMGTIASFLSKYQDIIIEHQKVVKGNQKRLESLRELAGKENLEYPSVTLPPQPHTKEGVDAYNEVIARVRMWVNLNLWQKLKLSRDDAKPLLRLKGFPSFPLVERQANEVDWWDMVCNVKKLINEKKEDGKVFWQNLAGYKRQEALRPYLSSEEDRKKGKKFARYQLGDLLLHLEKKHGEDWGKVYDEAWERIDKKVEGLSKHIKLEEERRSEDAQSKAALTDWLRAKASFVIEGLKEADKDEFCRCELKLQKWYGDLRGKPFAIEAENSILDISGFSKQYNCAFIWQKDGVKKLNLYLIINYFKGGKLRFKKIKPEAFEANRFYTVINKKSGEIVPMEVNFNFDDPNLIILPLAFGKRQGREFIWNDLLSLETGSLKLANGRVIEKTLYNRRTRQDEPALFVALTFERREVLDSSNIKPMSNLIGVDRGENIPAVIALTDPEGCPLSRFKDSLGNPTHILRIGERYKEKQRTIQAKKEVEQRRAGGYSRKYASKAKNLADDMVRNTARDLLYYAVTQDAMLIFENLSRGFGRQGKRTFMAERQYTRMEDWLTAKLAYEGLPSKTYLSKTLAQYTSKTCSNCGFTITSADYDRVLEKLKKTATGWMTTINGKELKVEGQITYYNRYKRQNVVKDLSVELDRLSEESVNNDISSWTKGRSGEALSLLKKRFSHRPVQEKFVCLNCGFETHADEQAALNIARSWLFLRSQEYKKYQTNKTTGNTDKRAFVETWQSFYRKKLKEVWKPAV

SEQ ID NO: 38043 - protein, 979 aa, synthetic construct
  REGION 1..979: note = engineered CasX variant
QEIKRINKIRRRLVKDSNTKKAGKTGPMKTLLVRVMTPDLRERLENLRKKPENIPQPISNTSRANLNKLLTDYTEMKKAILHVYWEEFQKDPVGLMSRVAQPASKKIDQNKLKPEMDEKGNLTTAGFACSQCGQPLFVYKLEQVSEKGKAYTNYFGRCNVAEHEKLILLAQLKPEKDSDEAVTYSLGKFGQRALDFYSIHVTKESTHPVKPLAQIAGNRYASSPVGKALSDACMGTIASFLSKYQDIIIEHQKVVKGNQKRLESLRELAGKENLEYPSVTLPPQPHTKEGVDAYNEVIARVRMWVNLNLWQKLKLSRDDAKPLLRLKGFPSFPLVERQANEVDWWDMVCNVKKLINEKKEDGKVFWQNLAGYKRQEALRPYLSSEEDRKKGKKFARYQLGDLLLHLEKKHGEDWGKVYDEAWERIDKKVEGLSKHIKLEEERRSEDAQSKAALTDWLRAKASFVIEGLKEADKDEFCRCELKLQKWYGDLRGKPFAIEAENSILDISGFSKQYNCAFIWQKDGVKKLNLYLIINYFKGGKLRFKKIKPEAFEANRFYTVINKKSGEIVPMEVNFNFDDPNLIILPLAFGKRQGREFIWNDLLSLETGSLKLANGRVIEKTLYNRRTRQDEPALFVALTFERREVLDSSNIKPMSNLIGVDRGENIPAVIALTDPEGCPLSRFKDSLGNPTHILRIGERYKEKQRTIQAKKEVEQRRAGGYSRKYASKAKNLADDMVRNTARDLLYYAVTQDAMLIFENLSRGFGRQGKRTFMAERQYTRMEDWLTAKLAYEGLPSKTYLSKTLAQYTSKTCSNCGFTITSADYDRVLEKLKKTATGWMTTINGKELKVEGQITYYNRYKRQNVVKDLSVELDRLSEESVNNDISSWTKGRSGEALSLLKKRFSHRPVQEKFVCLNCGFETHADEQAALNIARSWLFLRSQEYKKYQTNKTTGNTDKRAFVETWQSFYRKKLKEVWKPAV

SEQ ID NO: 38044 - protein, 979 aa, synthetic construct
  REGION 1..979: note = engineered CasX variant
QEIKRINKIRRRLVKDSNTKKAGKTGPMKTLLVRVMTPDLRERLENLRKKPENIPQPISNTSRANLNKLLTDYTEMKKAILHVYWEEFQKDPVGLMSRVAQPASKKIDQNKLKPEMDEKGNLTTAGFACSQCGQPLFVYKLEQVSEKGKAYTNYFGRCNVAEHEKLILLAQLKPEKDSDEAVTYSLGKFGQRALDFYSIHVTKESTHPVKPLAQIAGNRYASTPVGKALSDACMGTIASFLSKYQDIIIEHQKVVKGNQKRLESLRELAGKENLEYPSVTLPPQPHTKEGVDAYNEVIARVRMWVNLNLWQKLKLSRDDAKPLLRLKGFPSFPLVERQANEVDWWDMVCNVKKLINEKKEDGKVFWQNLAGYKRQEALRPYLSSEEDRKKGKKFARYQLGDLLLHLEKKHGEDWGKVYDEAWERIDKKVEGLSKHIKLEEERRSEDAQSKAALTDWLRAKASFVIEGLKEADKDEFCRCELKLQKWYGDLRGKPFAIEAENSILDISGFSKQYNCAFIWQKDGVKKLNLYLIINYFKGGKLRFKKIKPEAFEANRFYTVINKKSGEIVPMEVNFNFDDPNLIILPLAFGKRQGREFIWNDLLSLETGSLKLANGRVIEKTLYNRRTRQDEPALFVALTFERREVLDSSNIKPMSNLIGVDRGENIPAVIALTDPEGCPLSRFKDSLGNPTHILRIGERYKEKQRTIQAKKEVEQRRAGGYSRKYASKAKNLADDMVRNTARDLLYYAVTQDAMLIFENLSRGFGRQGKRTFMAERQYTRMEDWLTAKLAYEGLPSKTYLSKTLAQYTSKTCSNCGFTITSADYDRVLEKLKKTATGWMTTINGKELKVEGQITYYNRYKRQNVVKDLSVELDRLSEESVNNDISSWTKGRSGEALSLLKKRFSHRPVQEKFVCLNCGFETHADEQAALNIARSWLFLRSQEYKKYQTNKTTGNTDKRAFVETWQSFYRKKLKEVWKPAV

SEQ ID NO: 38045 - protein, 979 aa, synthetic construct
  REGION 1..979: note = engineered CasX variant
QEIKRINKIRRRLVKDSNTKKAGKTGPMKTLLVRVMTPDLRERLENLRKKPENIPQPISNTSRANLNKLLTDYTEMKKAILHVYWEEFQKDPVGLMSRVAQPASKKIDQNKLKPEMDEKGNLTTAGFACSQCGQPLFVYKLEQVSEKGKAYTNYFGRCNVAEHEKLILLAQLKPEKDSDEAVTYSLGKFGQRALDFYSIHVTKESTHPVKPLAQIAGNRYASAPVGKALSDACMGTIASFLSKYQDIIIEHQKVVKGNQKRLESLRELAGKENLEYPSVTLPPQPHTKEGVDAYNEVIARVRMWVNLNLWQKLKLSRDDAKPLLRLKGFPSFPLVERQANEVDWWDMVCNVKKLINEKKEDGKVFWQNLAGYKRQEALRPYLSSEEDRKKGKKFARYQLGDLLLHLEKKHGEDWGKVYDEAWERIDKKVEGLSKHIKLEEERRSEDAQSKAALTDWLRAKASFVIEGLKEADKDEFCRCELKLQKWYGDLRGKPFAIEAENSILDISGFSKQYNCAFIWQKDGVKKLNLYLIINYFKGGKLRFKKIKPEAFEANRFYTVINKKSGEIVPMEVNFNFDDPNLIILPLAFGKRQGREFIWNDLLSLETGSLKLANGRVIEKTLYNRRTRQDEPALFVALTFERREVLDSSNIKPMSNLIGVDRGENIPAVIALTDPEGCPLSRFKDSLGNPTHILRIGERYKEKQRTIQAKKEVEQRRAGGYSRKYASKAKNLADDMVRNTARDLLYYAVTQDAMLIFENLSRGFGRQGKRTFMAERQYTRMEDWLTAKLAYEGLPSKTYLSKTLAQYTSKTCSNCGFTITSADYDRVLEKLKKTATGWMTTINGKELKVEGQITYYNRYKRQNVVKDLSVELDRLSEESVNNDISSWTKGRSGEALSLLKKRFSHRPVQEKFVCLNCGFETHADEQAALNIARSWLFLRSQEYKKYQTNKTTGNTDKRAFVETWQSFYRKKLKEVWKPAV

SEQ ID NO: 38046 - protein, 979 aa, synthetic construct
  REGION 1..979: note = engineered CasX variant
QEIKRINKIRRRLVKDSNTKKAGKTGPMKTLLVRVMTPDLRERLENLRKKPENIPQPISNTSRANLNKLLTDYTEMKKAILHVYWEEFQKDPVGLMSRVAQPASKKIDQNKLKPEMDEKGNLTTAGFACSQCGQPLFVYKLEQVSEKGKAYTNYFGRCNVAEHEKLILLAQLKPEKDSDEAVTYSLGKFGQRALDFYSIHVTKESTHPVKPLAQIAGNRYASVPVGKALSDACMGTIASFLSKYQDIIIEHQKVVKGNQKRLESLRELAGKENLEYPSVTLPPQPHTKEGVDAYNEVIARVRMWVNLNLWQKLKLSRDDAKPLLRLKGFPSFPLVERQANEVDWWDMVCNVKKLINEKKEDGKVFWQNLAGYKRQEALRPYLSSEEDRKKGKKFARYQLGDLLLHLEKKHGEDWGKVYDEAWERIDKKVEGLSKHIKLEEERRSEDAQSKAALTDWLRAKASFVIEGLKEADKDEFCRCELKLQKWYGDLRGKPFAIEAENSILDISGFSKQYNCAFIWQKDGVKKLNLYLIINYFKGGKLRFKKIKPEAFEANRFYTVINKKSGEIVPMEVNFNFDDPNLIILPLAFGKRQGREFIWNDLLSLETGSLKLANGRVIEKTLYNRRTRQDEPALFVALTFERREVLDSSNIKPMSNLIGVDRGENIPAVIALTDPEGCPLSRFKDSLGNPTHILRIGERYKEKQRTIQAKKEVEQRRAGGYSRKYASKAKNLADDMVRNTARDLLYYAVTQDAMLIFENLSRGFGRQGKRTFMAERQYTRMEDWLTAKLAYEGLPSKTYLSKTLAQYTSKTCSNCGFTITSADYDRVLEKLKKTATGWMTTINGKELKVEGQITYYNRYKRQNVVKDLSVELDRLSEESVNNDISSWTKGRSGEALSLLKKRFSHRPVQEKFVCLNCGFETHADEQAALNIARSWLFLRSQEYKKYQTNKTTGNTDKRAFVETWQSFYRKKLKEVWKPAV

SEQ ID NO: 38047 - protein, 979 aa, synthetic construct
  REGION 1..979: note = engineered CasX variant
QEIKRINKIRRRLVKDSNTKKAGKTGPMKTLLVRVMTPDLRERLENLRKKPENIPQPISNTSRANLNKLLTDYTEMKKAILHVYWEEFQKDPVGLMSRVAQPASKKIDQNKLKPEMDEKGNLTTAGFACSQCGQPLFVYKLEQVSEKGKAYTNYFGRCNVAEHEKLIKLAQLKPEKDSDEAVTYSLGKFGQRALDFYSIHVTKESTHPVKPLAQIAGNRYASGPVGKALSDACMGTIASFLSKYQDIIIEHQKVVKGNQKRLESLRELAGKENLEYPSVTLPPQPHTKEGVDAYNEVIARVRMWVNLNLWQKLKLSRDDAKPLLRLKGFPSFPLVERQANEVDWWDMVCNVKKLINEKKEDGKVFWQNLAGYKRQEALRPYLSSEEDRKKGKKFARYQLGDLLLHLEKKHGEDWGKVYDEAWERIDKKVEGLSKHIKLEEERRSEDAQSKAALTDWLRAKASFVIEGLKEADKDEFCRCELKLQKWYGDLRGKPFAIEAENSILDISGFSKQYNCAFIWQKDGVKKLNLYLIINYFKGGKLRFKKIKPEAFEANRFYTVINKKSGEIVPMEVNFNFDDPNLIILPLAFGKRQGREFIWNDLLSLETGSLKLANGRVIEKTLYNRRTRQDEPALFVALTFERREVLDSSNIKPMSNLIGVDRGENIPAVIALTDPEGCPLSRFKDSLGNPTHILRIGERYKEKQRTIQAKKEVEQRRAGGYSRKYASKAKNLADDMVRNTARDLLYYAVTQDAMLIFENLSRGFGRQGKRTFMAERQYTRMEDWLTAKLAYEGLPSKTYLSKTLAQYTSKTCSNCGFTITSADYDRVLEKLKKTATGWMTTINGKELKVEGQITYYNRYKRQNVVKDLSVELDRLSEESVNNDISSWTKGRSGEALSLLKKRFSHRPVQEKFVCLNCGFETHADEQAALNIARSWLFLRSQEYKKYQTNKTTGNTDKRAFVETWQSFYRKKLKEVWKPAV

SEQ ID NO: 38048 - protein, 978 aa, synthetic construct
  REGION 1..978: note = engineered CasX variant
QEIKRINKIRRRLVKDSNTKKAGKTGPMKTLLVRVMTPDLRERLENLRKKPENIPQPISNTSRANLNKLLTDYTEMKKAILHVYWEEFQKDPVGLMSRVAQPASKKIDQNKLKPEMDEKGNLTTAGFACSQCGQPLFVYKLEQVSEKGKAYTNYFGRCNVAEHEKLILLAQLKPEKDSDEAVTYSLGKFGQRALDFYSIHVTKESTHPVKPLAQIAGNRYASPVGKALSDACMGTIASFLSKYQDIIIEHQKVVKGNQKRLESLRELAGKENLEYPSVTLPPQPHTKEGVDAYNEVIARVRMWVNLNLWQKLKLSRDDAKPLLRLKGFPSFPLVERQANEVDWWDMVCNVKKLINEKKEDGKVFWQNLAGYKRQEALRPYLSSEEDRKKGKKFARYQLGDLLLHLEKKHGEDWGKVYDEAWERIDKKVEGLSKHIKLEEERRSEDAQSKAALTDWLRAKASFVIEGLKEADKDEFCRCELKLQKWYGDLRGKPFAIEAENSILDISGFSKQYNCAFIWQKDGVKKLNLYLIINYFKGGKLRFKKIKPEAFEANRFYTVINKKSGEIVPMEVNFNFDDPNLIILPLAFGKRQGREFIWNDLLSLETGSLKLANGRVIEKTLYNRRTRQDEPALFVALTFERREVLDSSNIKPMSNLIGVDRGENIPAVIALTDPEGCPLSRFKDSLGNPTHILRIGERYKEKQRTIQAKKEVEQRRAGGYSRKYASKAKNLADDMVRNTARDLLYYAVTQDAMLIFENLSRGFGRQGKRTFMAERQYTRMEDWLTAKLAYEGLPSKTYLSKTLAQYTSKTCSNCGFTITSADYDRVLEKLKKTATGWMTTINGKELKVEGQITYYNRYKRQNVVKDLSVELDRLSEESVNNDISSWTKGRSGEALSLLKKRFSHRPVQEKFVCLNCGFETHADEQAALNIARSWLFLRSQEYKKYQTNKTTGNTDKRAFVETWQSFYRKKLKEVWKPAV

SEQ ID NO: 38049 - protein, 979 aa, synthetic construct
  REGION 1..979: note = engineered CasX variant
QEIKRINKIRRRLVKDSNTKKAGKTGPMKTLLVRVMTPDLRERLENLRKKPENIPQPISNTSRANLNKLLTDYTEMKKAILHVYWEEFQKDPVGLMSRVAQPASKKIDQNKLKPEMDEKGNLTTAGFACSQCGQPLFVYKLEQVSEKGKAYTNYFGRCNVAEHEKLILLAQLKPEKDSDEAVTYSLGKFGQRALDFYSIHVTKESTHPVKPLAQIAGNRYASYPVGKALSDACMGTIASFLSKYQDIIIEHQKVVKGNQKRLESLRELAGKENLEYPSVTLPPQPHTKEGVDAYNEVIARVRMWVNLNLWQKLKLSRDDAKPLLRLKGFPSFPLVERQANEVDWWDMVCNVKKLINEKKEDGKVFWQNLAGYKRQEALRPYLSSEEDRKKGKKFARYQLGDLLLHLEKKHGEDWGKVYDEAWERIDKKVEGLSKHIKLEEERRSEDAQSKAALTDWLRAKASFVIEGLKEADKDEFCRCELKLQKWYGDLRGKPFAIEAENSILDISGFSKQYNCAFIWQKDGVKKLNLYLIINYFKGGKLRFKKIKPEAFEANRFYTVINKKSGEIVPMEVNFNFDDPNLIILPLAFGKRQGREFIWNDLLSLETGSLQLANGRVIEKTLYNRRTRQDEPALFVALTFERREVLDSSNIKPMSNLIGVDRGENIPAVIALTDPEGCPLSRFKDSLGNPTHILRIGESYKEKQRTIQAKKEVEQRRAGGYSRKYASKAKNLADDMVRNTARDLLYYAVTQDAMLIFENLSRGFGRQGKRTFMAERQYTRMEDWLTAKLAYEGLPSKTYLSKTLAQYTSKTCSNCGFTITSADYDRVLEKLKKTATGWMTTINGKELKVEGQITYYNRYKRQNVVKDLSVELDRLSEESVNNDISSWTKGRSGEALSLLKKRFSHRPVQEKFVCLNCGFETHADEQAALNIARSWLFLRSQEYKKYQTNKTTGNTDKRAFVETWQSFYRKKLKEVWKPAV

SEQ ID NO: 38050 - protein, 979 aa, synthetic construct
  REGION 1..979: note = engineered CasX variant
QEIKRINKIRRRLVKDSNTKKAGKTGPMKTLLVRVMTPDLRERLENLRKKPENIPQPISNTSRANLNKLLTDYTEMKKAILHVYWEEFQKDPVGLMSRVAQPASKKIDQNKLKPEMDEKGNLTTAGFACSQCGQPLFVYKLEQVSEKGKAYTNYFGRCNVAEHEKLILLAQLKPEKDSDEAVTYSLGKFGQRALDFYSIHVTKESTHPVKPLAQIAGNRYASHPVGKALSDACMGTIASFLSKYQDIIIEHQKVVKGNQKRLESLRELAGKENLEYPSVTLPPQPHTKEGVDAYNEVIARVRMWVNLNLWQKLKLSRDDAKPLLRLKGFPSFPLVERQANEVDWWDMVCNVKKLINEKKEDGKVFWQNLAGYKRQEALRPYLSSEEDRKKGKKFARYQLGDLLLHLEKKHGEDWGKVYDEAWERIDKKVEGLSKHIKLEEERRSEDAQSKAALTDWLRAKASFVIEGLKEADKDEFCRCELKLQKWYGDLRGKPFAIEAENSILDISGFSKQYNCAFIWQKDGVKKLNLYLIINYFKGGKLRFKKIKPEAFEANRFYTVINKKSGEIVPMEVNFNFDDPNLIILPLAFGKRQGREFIWNDLLSLETGSLQLANGRVIEKTLYNRRTRQDEPALFVALTFERREVLDSSNIKPMSNLIGVDRGENIPAVIALTDPEGCPLSRFKDSLGNPTHILRIGESYKEKQRTIQAKKEVEQRRAGGYSRKYASKAKNLADDMVRNTARDLLYYAVTQDAMLIFENLSRGFGRQGKRTFMAERQYTRMEDWLTAKLAYEGLPSKTYLSKTLAQYTSKTCSNCGFTITSADYDRVLEKLKKTATGWMTTINGKELKVEGQITYYNRYKRQNVVKDLSVELDRLSEESVNNDISSWTKGRSGEALSLLKKRFSHRPVQEKFVCLNCGFETHADEQAALNIARSWLFLRSQEYKKYQTNKTTGNTDKRAFVETWQSFYRKKLKEVWKPAV

SEQ ID NO: 38051 - protein, 979 aa, synthetic construct
  REGION 1..979: note = engineered CasX variant
QEIKRINKIRRRLVKDSNTKKAGKTGPMKTLLVRVMTPDLRERLENLRKKPENIPQPISNTSRANLNKLLTDYTEMKKAILHVYWEEFQKDPVGLMSRVAQPASKKIDQNKLKPEMDEKGNLTTAGFACSQCGQPLFVYKLEQVSEKGKAYTNYFGRCNVAEHEKLILLAQLKPEKDSDEAVTYSLGKFGQRALDFYSIHVTKESTHPVKPLAQIAGNRYASSPVGKALSDACMGTIASFLSKYQDIIIEHQKVVKGNQKRLESLRELAGKENLEYPSVTLPPQPHTKEGVDAYNEVIARVRMWVNLNLWQKLKLSRDDAKPLLRLKGFPSFPLVERQANEVDWWDMVCNVKKLINEKKEDGKVFWQNLAGYKRQEALRPYLSSEEDRKKGKKFARYQLGDLLLHLEKKHGEDWGKVYDEAWERIDKKVEGLSKHIKLEEERRSEDAQSKAALTDWLRAKASFVIEGLKEADKDEFCRCELKLQKWYGDLRGKPFAIEAENSILDISGFSKQYNCAFIWQKDGVKKLNLYLIINYFKGGKLRFKKIKPEAFEANRFYTVINKKSGEIVPMEVNFNFDDPNLIILPLAFGKRQGREFIWNDLLSLETGSLQLANGRVIEKTLYNRRTRQDEPALFVALTFERREVLDSSNIKPMSNLIGVDRGENIPAVIALTDPEGCPLSRFKDSLGNPTHILRIGESYKEKQRTIQAKKEVEQRRAGGYSRKYASKAKNLADDMVRNTARDLLYYAVTQDAMLIFENLSRGFGRQGKRTFMAERQYTRMEDWLTAKLAYEGLPSKTYLSKTLAQYTSKTCSNCGFTITSADYDRVLEKLKKTATGWMTTINGKELKVEGQITYYNRYKRQNVVKDLSVELDRLSEESVNNDISSWTKGRSGEALSLLKKRFSHRPVQEKFVCLNCGFETHADEQAALNIARSWLFLRSQEYKKYQTNKTTGNTDKRAFVETWQSFYRKKLKEVWKPAV

SEQ ID NO: 38052 - protein, 979 aa, synthetic construct
  REGION 1..979: note = engineered CasX variant
QEIKRINKIRRRLVKDSNTKKAGKTGPMKTLLVRVMTPDLRERLENLRKKPENIPQPISNTSRANLNKLLTDYTEMKKAILHVYWEEFQKDPVGLMSRVAQPASKKIDQNKLKPEMDEKGNLTTAGFACSQCGQPLFVYKLEQVSEKGKAYTNYFGRCNVAEHEKLILLAQLKPEKDSDEAVTYSLGKFGQRALDFYSIHVTKESTHPVKPLAQIAGNRYASTPVGKALSDACMGTIASFLSKYQDIIIEHQKVVKGNQKRLESLRELAGKENLEYPSVTLPPQPHTKEGVDAYNEVIARVRMWVNLNLWQKLKLSRDDAKPLLRLKGFPSFPLVERQANEVDWWDMVCNVKKLINEKKEDGKVFWQNLAGYKRQEALRPYLSSEEDRKKGKKFARYQLGDLLLHLEKKHGEDWGKVYDEAWERIDKKVEGLSKHIKLEEERRSEDAQSKAALTDWLRAKASFVIEGLKEADKDEFCRCELKLQKWYGDLRGKPFAIEAENSILDISGFSKQYNCAFIWQKDGVKKLNLYLIINYFKGGKLRFKKIKPEAFEANRFYTVINKKSGEIVPMEVNFNFDDPNLIILPLAFGKRQGREFIWNDLLSLETGSLQLANGRVIEKTLYNRRTRQDEPALFVALTFERREVLDSSNIKPMSNLIGVDRGENIPAVIALTDPEGCPLSRFKDSLGNPTHILRIGESYKEKQRTIQAKKEVEQRRAGGYSRKYASKAKNLADDMVRNTARDLLYYAVTQDAMLIFENLSRGFGRQGKRTFMAERQYTRMEDWLTAKLAYEGLPSKTYLSKTLAQYTSKTCSNCGFTITSADYDRVLEKLKKTATGWMTTINGKELKVEGQITYYNRYKRQNVVKDLSVELDRLSEESVNNDISSWTKGRSGEALSLLKKRFSHRPVQEKFVCLNCGFETHADEQAALNIARSWLFLRSQEYKKYQTNKTTGNTDKRAFVETWQSFYRKKLKEVWKPAV

SEQ ID NO: 38053 - protein, 979 aa, synthetic construct
  REGION 1..979: note = engineered CasX variant
QEIKRINKIRRRLVKDSNTKKAGKTGPMKTLLVRVMTPDLRERLENLRKKPENIPQPISNTSRANLNKLLTDYTEMKKAILHVYWEEFQKDPVGLMSRVAQPASKKIDQNKLKPEMDEKGNLTTAGFACSQCGQPLFVYKLEQVSEKGKAYTNYFGRCNVAEHEKLILLAQLKPEKDSDEAVTYSLGKFGQRALDFYSIHVTKESTHPVKPLAQIAGNRYASAPVGKALSDACMGTIASFLSKYQDIIIEHQKVVKGNQKRLESLRELAGKENLEYPSVTLPPQPHTKEGVDAYNEVIARVRMWVNLNLWQKLKLSRDDAKPLLRLKGFPSFPLVERQANEVDWWDMVCNVKKLINEKKEDGKVFWQNLAGYKRQEALRPYLSSEEDRKKGKKFARYQLGDLLLHLEKKHGEDWGKVYDEAWERIDKKVEGLSKHIKLEEERRSEDAQSKAALTDWLRAKASFVIEGLKEADKDEFCRCELKLQKWYGDLRGKPFAIEAENSILDISGFSKQYNCAFIWQKDGVKKLNLYLIINYFKGGKLRFKKIKPEAFEANRFYTVINKKSGEIVPMEVNFNFDDPNLIILPLAFGKRQGREFIWNDLLSLETGSLQLANGRVIEKTLYNRRTRQDEPALFVALTFERREVLDSSNIKPMSNLIGVDRGENIPAVIALTDPEGCPLSRFKDSLGNPTHILRIGESYKEKQRTIQAKKEVEQRRAGGYSRKYASKAKNLADDMVRNTARDLLYYAVTQDAMLIFENLSRGFGRQGKRTFMAERQYTRMEDWLTAKLAYEGLPSKTYLSKTLAQYTSKTCSNCGFTITSADYDRVLEKLKKTATGWMTTINGKELKVEGQITYYNRYKRQNVVKDLSVELDRLSEESVNNDISSWTKGRSGEALSLLKKRFSHRPVQEKFVCLNCGFETHADEQAALNIARSWLFLRSQEYKKYQTNKTTGNTDKRAFVETWQSFYRKKLKEVWKPAV

SEQ ID NO: 38054 - protein, 979 aa, synthetic construct
  REGION 1..979: note = engineered CasX variant
QEIKRINKIRRRLVKDSNTKKAGKTGPMKTLLVRVMTPDLRERLENLRKKPENIPQPISNTSRANLNKLLTDYTEMKKAILHVYWEEFQKDPVGLMSRVAQPASKKIDQNKLKPEMDEKGNLTTAGFACSQCGQPLFVYKLEQVSEKGKAYTNYFGRCNVAEHEKLILLAQLKPEKDSDEAVTYSLGKFGQRALDFYSIHVTKESTHPVKPLAQIAGNRYASVPVGKALSDACMGTIASFLSKYQDIIIEHQKVVKGNQKRLESLRELAGKENLEYPSVTLPPQPHTKEGVDAYNEVIARVRMWVNLNLWQKLKLSRDDAKPLLRLKGFPSFPLVERQANEVDWWDMVCNVKKLINEKKEDGKVFWQNLAGYKRQEALRPYLSSEEDRKKGKKFARYQLGDLLLHLEKKHGEDWGKVYDEAWERIDKKVEGLSKHIKLEEERRSEDAQSKAALTDWLRAKASFVIEGLKEADKDEFCRCELKLQKWYGDLRGKPFAIEAENSILDISGFSKQYNCAFIWQKDGVKKLNLYLIINYFKGGKLRFKKIKPEAFEANRFYTVINKKSGEIVPMEVNFNFDDPNLIILPLAFGKRQGREFIWNDLLSLETGSLQLANGRVIEKTLYNRRTRQDEPALFVALTFERREVLDSSNIKPMSNLIGVDRGENIPAVIALTDPEGCPLSRFKDSLGNPTHILRIGESYKEKQRTIQAKKEVEQRRAGGYSRKYASKAKNLADDMVRNTARDLLYYAVTQDAMLIFENLSRGFGRQGKRTFMAERQYTRMEDWLTAKLAYEGLPSKTYLSKTLAQYTSKTCSNCGFTITSADYDRVLEKLKKTATGWMTTINGKELKVEGQITYYNRYKRQNVVKDLSVELDRLSEESVNNDISSWTKGRSGEALSLLKKRFSHRPVQEKFVCLNCGFETHADEQAALNIARSWLFLRSQEYKKYQTNKTTGNTDKRAFVETWQSFYRKKLKEVWKPAV

SEQ ID NO: 38055 - protein, 979 aa, synthetic construct
  REGION 1..979: note = engineered CasX variant
QEIKRINKIRRRLVKDSNTKKAGKTGPMKTLLVRVMTPDLRERLENLRKKPENIPQPISNTSRANLNKLLTDYTEMKKAILHVYWEEFQKDPVGLMSRVAQPASKKIDQNKLKPEMDEKGNLTTAGFACSQCGQPLFVYKLEQVSEKGKAYTNYFGRCNVAEHEKLIKLAQLKPEKDSDEAVTYSLGKFGQRALDFYSIHVTKESTHPVKPLAQIAGNRYASGPVGKALSDACMGTIASFLSKYQDIIIEHQKVVKGNQKRLESLRELAGKENLEYPSVTLPPQPHTKEGVDAYNEVIARVRMWVNLNLWQKLKLSRDDAKPLLRLKGFPSFPLVERQANEVDWWDMVCNVKKLINEKKEDGKVFWQNLAGYKRQEALRPYLSSEEDRKKGKKFARYQLGDLLLHLEKKHGEDWGKVYDEAWERIDKKVEGLSKHIKLEEERRSEDAQSKAALTDWLRAKASFVIEGLKEADKDEFCRCELKLQKWYGDLRGKPFAIEAENSILDISGFSKQYNCAFIWQKDGVKKLNLYLIINYFKGGKLRFKKIKPEAFEANRFYTVINKKSGEIVPMEVNFNFDDPNLIILPLAFGKRQGREFIWNDLLSLETGSLQLANGRVIEKTLYNRRTRQDEPALFVALTFERREVLDSSNIKPMSNLIGVDRGENIPAVIALTDPEGCPLSRFKDSLGNPTHILRIGESYKEKQRTIQAKKEVEQRRAGGYSRKYASKAKNLADDMVRNTARDLLYYAVTQDAMLIFENLSRGFGRQGKRTFMAERQYTRMEDWLTAKLAYEGLPSKTYLSKTLAQYTSKTCSNCGFTITSADYDRVLEKLKKTATGWMTTINGKELKVEGQITYYNRYKRQNVVKDLSVELDRLSEESVNNDISSWTKGRSGEALSLLKKRFSHRPVQEKFVCLNCGFETHADEQAALNIARSWLFLRSQEYKKYQTNKTTGNTDKRAFVETWQSFYRKKLKEVWKPAV

SEQ ID NO: 38056 - protein, 978 aa, synthetic construct
  REGION 1..978: note = engineered CasX variant
QEIKRINKIRRRLVKDSNTKKAGKTGPMKTLLVRVMTPDLRERLENLRKKPENIPQPISNTSRANLNKLLTDYTEMKKAILHVYWEEFQKDPVGLMSRVAQPASKKIDQNKLKPEMDEKGNLTTAGFACSQCGQPLFVYKLEQVSEKGKAYTNYFGRCNVAEHEKLILLAQLKPEKDSDEAVTYSLGKFGQRALDFYSIHVTKESTHPVKPLAQIAGNRYASPVGKALSDACMGTIASFLSKYQDIIIEHQKVVKGNQKRLESLRELAGKENLEYPSVTLPPQPHTKEGVDAYNEVIARVRMWVNLNLWQKLKLSRDDAKPLLRLKGFPSFPLVERQANEVDWWDMVCNVKKLINEKKEDGKVFWQNLAGYKRQEALRPYLSSEEDRKKGKKFARYQLGDLLLHLEKKHGEDWGKVYDEAWERIDKKVEGLSKHIKLEEERRSEDAQSKAALTDWLRAKASFVIEGLKEADKDEFCRCELKLQKWYGDLRGKPFAIEAENSILDISGFSKQYNCAFIWQKDGVKKLNLYLIINYFKGGKLRFKKIKPEAFEANRFYTVINKKSGEIVPMEVNFNFDDPNLIILPLAFGKRQGREFIWNDLLSLETGSLQLANGRVIEKTLYNRRTRQDEPALFVALTFERREVLDSSNIKPMSNLIGVDRGENIPAVIALTDPEGCPLSRFKDSLGNPTHILRIGESYKEKQRTIQAKKEVEQRRAGGYSRKYASKAKNLADDMVRNTARDLLYYAVTQDAMLIFENLSRGFGRQGKRTFMAERQYTRMEDWLTAKLAYEGLPSKTYLSKTLAQYTSKTCSNCGFTITSADYDRVLEKLKKTATGWMTTINGKELKVEGQITYYNRYKRQNVVKDLSVELDRLSEESVNNDISSWTKGRSGEALSLLKKRFSHRPVQEKFVCLNCGFETHADEQAALNIARSWLFLRSQEYKKYQTNKTTGNTDKRAFVETWQSFYRKKLKEVWKPAV

SEQ ID NO: 38057 - protein, 978 aa, synthetic construct
  REGION 1..978: note = engineered CasX variant
QEIKRINKIRRRLVKDSNTKKAGKTGPMKTLLVRVMTPDLRERLENLRKKPENIPQPISNTSRANLNKLLTDYTEMKKAILHVYWEEFQKDPVGLMSRVAQPASKKIDQNKLKPEMDEKGNLTTAGFACSQCGQPLFVYKLEQVSEKGKAYTNYFGRCNVAEHEKLILLAQLKPEKDSDEAVTYSLGKFGQRALDFYSIHVTKESTHPVKPLAQIAGNRYASYPVGKALSDACMGTIASFLSKYQDIIIEHQKVVKGNQKRLESLRELAGKENLEYPSVTLPPQPHTKEGVDAYNEVIARVRMWVNLNLWQKLKLSRDDAKPLLRLKGFPSFPLVERQANEVDWWDMVCNVKKLINEKKEDGKVFWQNLAGYKRQEALRPYLSSEEDRKKGKKFARYQLGDLLLHLEKKHGEDWGKVYDEAWERIDKKVEGLSKHIKLEEERRSEDAQSKAALTDWLRAKASFVIEGLKEADKDEFCRCELKLQKWYGDLRGKPFAIEAENSILDISGFSKQYNCAFIWQKDGVKKLNLYLIINYFKGGKLRFKKIKPEAFEANRFYTVINKKSGEIVPMEVNFNFDDPNLIILPLAFGKRQGREFIWNDLLSLETGSLKLANGRVIEKTLYNRRTRQDEPALFVALTFERREVLDSSNIKPMNLIGVDRGENIPAVIALTDPEGCPLSRFKDSLGNPTHILRIRESYKEKQRTIQAKKEVEQRRAGGYSRKYASKAKNLADDMVRNTARDLLYYAVTQDAMLIFENLSRGFGRQGKRTFSAERQYTRMEDWLTAKLAYEGLPSKTYLSKTLAQYTSKTCSNCGFTITSADYDRVLEKLKKTATGWMTTINGKELKVEGQITYYNRYKRQNVVKDLSVELDRLSEESVNNDISSWTKGRSGEALSLLKKRFSHRPVQEKFVCLNCGFETHADEQAALNIARSWLFLRSQEYKKYQTNKTTGNTDKRAFVETWQSFYRKKLKEVWKPAV

SEQ ID NO: 38058 - protein, 978 aa, synthetic construct
  REGION 1..978: note = engineered CasX variant
QEIKRINKIRRRLVKDSNTKKAGKTGPMKTLLVRVMTPDLRERLENLRKKPENIPQPISNTSRANLNKLLTDYTEMKKAILHVYWEEFQKDPVGLMSRVAQPASKKIDQNKLKPEMDEKGNLTTAGFACSQCGQPLFVYKLEQVSEKGKAYTNYFGRCNVAEHEKLILLAQLKPEKDSDEAVTYSLGKFGQRALDFYSIHVTKESTHPVKPLAQIAGNRYASHPVGKALSDACMGTIASFLSKYQDIIIEHQKVVKGNQKRLESLRELAGKENLEYPSVTLPPQPHTKEGVDAYNEVIARVRMWVNLNLWQKLKLSRDDAKPLLRLKGFPSFPLVERQANEVDWWDMVCNVKKLINEKKEDGKVFWQNLAGYKRQEALRPYLSSEEDRKKGKKFARYQLGDLLLHLEKKHGEDWGKVYDEAWERIDKKVEGLSKHIKLEEERRSEDAQSKAALTDWLRAKASFVIEGLKEADKDEFCRCELKLQKWYGDLRGKPFAIEAENSILDISGFSKQYNCAFIWQKDGVKKLNLYLIINYFKGGKLRFKKIKPEAFEANRFYTVINKKSGEIVPMEVNFNFDDPNLIILPLAFGKRQGREFIWNDLLSLETGSLKLANGRVIEKTLYNRRTRQDEPALFVALTFERREVLDSSNIKPMNLIGVDRGENIPAVIALTDPEGCPLSRFKDSLGNPTHILRIRESYKEKQRTIQAKKEVEQRRAGGYSRKYASKAKNLADDMVRNTARDLLYYAVTQDAMLIFENLSRGFGRQGKRTFSAERQYTRMEDWLTAKLAYEGLPSKTYLSKTLAQYTSKTCSNCGFTITSADYDRVLEKLKKTATGWMTTINGKELKVEGQITYYNRYKRQNVVKDLSVELDRLSEESVNNDISSWTKGRSGEALSLLKKRFSHRPVQEKFVCLNCGFETHADEQAALNIARSWLFLRSQEYKKYQTNKTTGNTDKRAFVETWQSFYRKKLKEVWKPAV

SEQ ID NO: 38059 - protein, 978 aa, synthetic construct
  REGION 1..978: note = engineered CasX variant
QEIKRINKIRRRLVKDSNTKKAGKTGPMKTLLVRVMTPDLRERLENLRKKPENIPQPISNTSRANLNKLLTDYTEMKKAILHVYWEEFQKDPVGLMSRVAQPASKKIDQNKLKPEMDEKGNLTTAGFACSQCGQPLFVYKLEQVSEKGKAYTNYFGRCNVAEHEKLILLAQLKPEKDSDEAVTYSLGKFGQRALDFYSIHVTKESTHPVKPLAQIAGNRYASSPVGKALSDACMGTIASFLSKYQDIIIEHQKVVKGNQKRLESLRELAGKENLEYPSVTLPPQPHTKEGVDAYNEVIARVRMWVNLNLWQKLKLSRDDAKPLLRLKGFPSFPLVERQANEVDWWDMVCNVKKLINEKKEDGKVFWQNLAGYKRQEALRPYLSSEEDRKKGKKFARYQLGDLLLHLEKKHGEDWGKVYDEAWERIDKKVEGLSKHIKLEEERRSEDAQSKAALTDWLRAKASFVIEGLKEADKDEFCRCELKLQKWYGDLRGKPFAIEAENSILDISGFSKQYNCAFIWQKDGVKKLNLYLIINYFKGGKLRFKKIKPEAFEANRFYTVINKKSGEIVPMEVNFNFDDPNLIILPLAFGKRQGREFIWNDLLSLETGSLKLANGRVIEKTLYNRRTRQDEPALFVALTFERREVLDSSNIKPMNLIGVDRGENIPAVIALTDPEGCPLSRFKDSLGNPTHILRIRESYKEKQRTIQAKKEVEQRRAGGYSRKYASKAKNLADDMVRNTARDLLYYAVTQDAMLIFENLSRGFGRQGKRTFSAERQYTRMEDWLTAKLAYEGLPSKTYLSKTLAQYTSKTCSNCGFTITSADYDRVLEKLKKTATGWMTTINGKELKVEGQITYYNRYKRQNVVKDLSVELDRLSEESVNNDISSWTKGRSGEALSLLKKRFSHRPVQEKFVCLNCGFETHADEQAALNIARSWLFLRSQEYKKYQTNKTTGNTDKRAFVETWQSFYRKKLKEVWKPAV

SEQ ID NO: 38060 - protein, 978 aa, synthetic construct
  REGION 1..978: note = engineered CasX variant
QEIKRINKIRRRLVKDSNTKKAGKTGPMKTLLVRVMTPDLRERLENLRKKPENIPQPISNTSRANLNKLLTDYTEMKKAILHVYWEEFQKDPVGLMSRVAQPASKKIDQNKLKPEMDEKGNLTTAGFACSQCGQPLFVYKLEQVSEKGKAYTNYFGRCNVAEHEKLILLAQLKPEKDSDEAVTYSLGKFGQRALDFYSIHVTKESTHPVKPLAQIAGNRYASTPVGKALSDACMGTIASFLSKYQDIIIEHQKVVKGNQKRLESLRELAGKENLEYPSVTLPPQPHTKEGVDAYNEVIARVRMWVNLNLWQKLKLSRDDAKPLLRLKGFPSFPLVERQANEVDWWDMVCNVKKLINEKKEDGKVFWQNLAGYKRQEALRPYLSSEEDRKKGKKFARYQLGDLLLHLEKKHGEDWGKVYDEAWERIDKKVEGLSKHIKLEEERRSEDAQSKAALTDWLRAKASFVIEGLKEADKDEFCRCELKLQKWYGDLRGKPFAIEAENSILDISGFSKQYNCAFIWQKDGVKKLNLYLIINYFKGGKLRFKKIKPEAFEANRFYTVINKKSGEIVPMEVNFNFDDPNLIILPLAFGKRQGREFIWNDLLSLETGSLKLANGRVIEKTLYNRRTRQDEPALFVALTFERREVLDSSNIKPMNLIGVDRGENIPAVIALTDPEGCPLSRFKDSLGNPTHILRIRESYKEKQRTIQAKKEVEQRRAGGYSRKYASKAKNLADDMVRNTARDLLYYAVTQDAMLIFENLSRGFGRQGKRTFSAERQYTRMEDWLTAKLAYEGLPSKTYLSKTLAQYTSKTCSNCGFTITSADYDRVLEKLKKTATGWMTTINGKELKVEGQITYYNRYKRQNVVKDLSVELDRLSEESVNNDISSWTKGRSGEALSLLKKRFSHRPVQEKFVCLNCGFETHADEQAALNIARSWLFLRSQEYKKYQTNKTTGNTDKRAFVETWQSFYRKKLKEVWKPAV

SEQ ID NO: 38061 - protein, 978 aa, synthetic construct
  REGION 1..978: note = engineered CasX variant
QEIKRINKIRRRLVKDSNTKKAGKTGPMKTLLVRVMTPDLRERLENLRKKPENIPQPISNTSRANLNKLLTDYTEMKKAILHVYWEEFQKDPVGLMSRVAQPASKKIDQNKLKPEMDEKGNLTTAGFACSQCGQPLFVYKLEQVSEKGKAYTNYFGRCNVAEHEKLILLAQLKPEKDSDEAVTYSLGKFGQRALDFYSIHVTKESTHPVKPLAQIAGNRYASAPVGKALSDACMGTIASFLSKYQDIIIEHQKVVKGNQKRLESLRELAGKENLEYPSVTLPPQPHTKEGVDAYNEVIARVRMWVNLNLWQKLKLSRDDAKPLLRLKGFPSFPLVERQANEVDWWDMVCNVKKLINEKKEDGKVFWQNLAGYKRQEALRPYLSSEEDRKKGKKFARYQLGDLLLHLEKKHGEDWGKVYDEAWERIDKKVEGLSKHIKLEEERRSEDAQSKAALTDWLRAKASFVIEGLKEADKDEFCRCELKLQKWYGDLRGKPFAIEAENSILDISGFSKQYNCAFIWQKDGVKKLNLYLIINYFKGGKLRFKKIKPEAFEANRFYTVINKKSGEIVPMEVNFNFDDPNLIILPLAFGKRQGREFIWNDLLSLETGSLKLANGRVIEKTLYNRRTRQDEPALFVALTFERREVLDSSNIKPMNLIGVDRGENIPAVIALTDPEGCPLSRFKDSLGNPTHILRIRESYKEKQRTIQAKKEVEQRRAGGYSRKYASKAKNLADDMVRNTARDLLYYAVTQDAMLIFENLSRGFGRQGKRTFSAERQYTRMEDWLTAKLAYEGLPSKTYLSKTLAQYTSKTCSNCGFTITSADYDRVLEKLKKTATGWMTTINGKELKVEGQITYYNRYKRQNVVKDLSVELDRLSEESVNNDISSWTKGRSGEALSLLKKRFSHRPVQEKFVCLNCGFETHADEQAALNIARSWLFLRSQEYKKYQTNKTTGNTDKRAFVETWQSFYRKKLKEVWKPAV

SEQ ID NO: 38062 - protein, 978 aa, synthetic construct
  REGION 1..978: note = engineered CasX variant
QEIKRINKIRRRLVKDSNTKKAGKTGPMKTLLVRVMTPDLRERLENLRKKPENIPQPISNTSRANLNKLLTDYTEMKKAILHVYWEEFQKDPVGLMSRVAQPASKKIDQNKLKPEMDEKGNLTTAGFACSQCGQPLFVYKLEQVSEKGKAYTNYFGRCNVAEHEKLILLAQLKPEKDSDEAVTYSLGKFGQRALDFYSIHVTKESTHPVKPLAQIAGNRYASVPVGKALSDACMGTIASFLSKYQDIIIEHQKVVKGNQKRLESLRELAGKENLEYPSVTLPPQPHTKEGVDAYNEVIARVRMWVNLNLWQKLKLSRDDAKPLLRLKGFPSFPLVERQANEVDWWDMVCNVKKLINEKKEDGKVFWQNLAGYKRQEALRPYLSSEEDRKKGKKFARYQLGDLLLHLEKKHGEDWGKVYDEAWERIDKKVEGLSKHIKLEEERRSEDAQSKAALTDWLRAKASFVIEGLKEADKDEFCRCELKLQKWYGDLRGKPFAIEAENSILDISGFSKQYNCAFIWQKDGVKKLNLYLIINYFKGGKLRFKKIKPEAFEANRFYTVINKKSGEIVPMEVNFNFDDPNLIILPLAFGKRQGREFIWNDLLSLETGSLKLANGRVIEKTLYNRRTRQDEPALFVALTFERREVLDSSNIKPMNLIGVDRGENIPAVIALTDPEGCPLSRFKDSLGNPTHILRIRESYKEKQRTIQAKKEVEQRRAGGYSRKYASKAKNLADDMVRNTARDLLYYAVTQDAMLIFENLSRGFGRQGKRTFSAERQYTRMEDWLTAKLAYEGLPSKTYLSKTLAQYTSKTCSNCGFTITSADYDRVLEKLKKTATGWMTTINGKELKVEGQITYYNRYKRQNVVKDLSVELDRLSEESVNNDISSWTKGRSGEALSLLKKRFSHRPVQEKFVCLNCGFETHADEQAALNIARSWLFLRSQEYKKYQTNKTTGNTDKRAFVETWQSFYRKKLKEVWKPAV

SEQ ID NO: 38063 - protein, 978 aa, synthetic construct
  REGION 1..978: note = engineered CasX variant
QEIKRINKIRRRLVKDSNTKKAGKTGPMKTLLVRVMTPDLRERLENLRKKPENIPQPISNTSRANLNKLLTDYTEMKKAILHVYWEEFQKDPVGLMSRVAQPASKKIDQNKLKPEMDEKGNLTTAGFACSQCGQPLFVYKLEQVSEKGKAYTNYFGRCNVAEHEKLIKLAQLKPEKDSDEAVTYSLGKFGQRALDFYSIHVTKESTHPVKPLAQIAGNRYASGPVGKALSDACMGTIASFLSKYQDIIIEHQKVVKGNQKRLESLRELAGKENLEYPSVTLPPQPHTKEGVDAYNEVIARVRMWVNLNLWQKLKLSRDDAKPLLRLKGFPSFPLVERQANEVDWWDMVCNVKKLINEKKEDGKVFWQNLAGYKRQEALRPYLSSEEDRKKGKKFARYQLGDLLLHLEKKHGEDWGKVYDEAWERIDKKVEGLSKHIKLEEERRSEDAQSKAALTDWLRAKASFVIEGLKEADKDEFCRCELKLQKWYGDLRGKPFAIEAENSILDISGFSKQYNCAFIWQKDGVKKLNLYLIINYFKGGKLRFKKIKPEAFEANRFYTVINKKSGEIVPMEVNFNFDDPNLIILPLAFGKRQGREFIWNDLLSLETGSLKLANGRVIEKTLYNRRTRQDEPALFVALTFERREVLDSSNIKPMNLIGVDRGENIPAVIALTDPEGCPLSRFKDSLGNPTHILRIRESYKEKQRTIQAKKEVEQRRAGGYSRKYASKAKNLADDMVRNTARDLLYYAVTQDAMLIFENLSRGFGRQGKRTFSAERQYTRMEDWLTAKLAYEGLPSKTYLSKTLAQYTSKTCSNCGFTITSADYDRVLEKLKKTATGWMTTINGKELKVEGQITYYNRYKRQNVVKDLSVELDRLSEESVNNDISSWTKGRSGEALSLLKKRFSHRPVQEKFVCLNCGFETHADEQAALNIARSWLFLRSQEYKKYQTNKTTGNTDKRAFVETWQSFYRKKLKEVWKPAV

SEQ ID NO: 38064 - protein, 977 aa, synthetic construct
  REGION 1..977: note = engineered CasX variant
QEIKRINKIRRRLVKDSNTKKAGKTGPMKTLLVRVMTPDLRERLENLRKKPENIPQPISNTSRANLNKLLTDYTEMKKAILHVYWEEFQKDPVGLMSRVAQPASKKIDQNKLKPEMDEKGNLTTAGFACSQCGQPLFVYKLEQVSEKGKAYTNYFGRCNVAEHEKLILLAQLKPEKDSDEAVTYSLGKFGQRALDFYSIHVTKESTHPVKPLAQIAGNRYASPVGKALSDACMGTIASFLSKYQDIIIEHQKVVKGNQKRLESLRELAGKENLEYPSVTLPPQPHTKEGVDAYNEVIARVRMWVNLNLWQKLKLSRDDAKPLLRLKGFPSFPLVERQANEVDWWDMVCNVKKLINEKKEDGKVFWQNLAGYKRQEALRPYLSSEEDRKKGKKFARYQLGDLLLHLEKKHGEDWGKVYDEAWERIDKKVEGLSKHIKLEEERRSEDAQSKAALTDWLRAKASFVIEGLKEADKDEFCRCELKLQKWYGDLRGKPFAIEAENSILDISGFSKQYNCAFIWQKDGVKKLNLYLIINYFKGGKLRFKKIKPEAFEANRFYTVINKKSGEIVPMEVNFNFDDPNLIILPLAFGKRQGREFIWNDLLSLETGSLKLANGRVIEKTLYNRRTRQDEPALFVALTFERREVLDSSNIKPMNLIGVDRGENIPAVIALTDPEGCPLSRFKDSLGNPTHILRIRESYKEKQRTIQAKKEVEQRRAGGYSRKYASKAKNLADDMVRNTARDLLYYAVTQDAMLIFENLSRGFGRQGKRTFSAERQYTRMEDWLTAKLAYEGLPSKTYLSKTLAQYTSKTCSNCGFTITSADYDRVLEKLKKTATGWMTTINGKELKVEGQITYYNRYKRQNVVKDLSVELDRLSEESVNNDISSWTKGRSGEALSLLKKRFSHRPVQEKFVCLNCGFETHADEQAALNIARSWLFLRSQEYKKYQTNKTTGNTDKRAFVETWQSFYRKKLKEVWKPAV

SEQ ID NO: 38065 - protein, 978 aa, synthetic construct
  REGION 1..978: note = engineered CasX variant
QEIKRINKIRRRLVKDSNTKKAGKTGPMKTLLVRVMTPDLRERLENLRKKPENIPQPISNTSRANLNKLLTDYTEMKKAILHVYWEEFQKDPVGLMSRVAQPASKKIDQNKLKPEMDEKGNLTTAGFACSQCGQPLFVYKLEQVSEKGKAYTNYFGRCNVAEHEKLILLAQLKPEKDSDEAVTYSLGKFGQRALDFYSIHVTKESTHPVKPLAQIAGNRYASYPVGKALSDACMGTIASFLSKYQDIIIEHQKVVKGNQKRLESLRELAGKENLEYPSVTLPPQPHTKEGVDAYNEVIARVRMWVNLNLWQKLKLSRDDAKPLLRLKGFPSFPLVERQANEVDWWDMVCNVKKLINEKKEDGKVFWQNLAGYKRQEALRPYLSSEEDRKKGKKFARYQLGDLLLHLEKKHGEDWGKVYDEAWERIDKKVEGLSKHIKLEEERRSEDAQSKAALTDWLRAKASFVIEGLKEADKDEFCRCELKLQKWYGDLRGKPFAIEAENSILDISGFSKQYNCAFIWQKDGVKKLNLYLIINYFKGGKLRFKKIKPEAFEANRFYTVINKKSGEIVPMEVNFNFDDPNLIILPLAFGKRQGREFIWNDLLSLETGSLKLANGRVIEKTLYNRRTRQDEPALFVALTFERREVLDSSNIKPMNLIGVDRGENIPAVIALTDPEGCPLSRFKDSLGNPTHILRIRESYKEKQRTIQAKKEVEQRRAGGYSRKYASKAKNLADDMVRNTARDLLYYAVTQDAMLIFENLSRGFGRQGKRTFMAERQYTRMEDWLTAKLAYEGLPSKTYLSKTLAQYTSKTCSNCGFTITSADYDRVLEKLKKTATGWMTTINGKELKVEGQITYYNRYKRQNVVKDLSVELDRLSEESVNNDISSWDKGRSGEALSLLKKRFSHRPVQEKFVCLNCGFETHADEQAALNIARSWLFLRSQEYKKYQTNKTTGNTDKRAFVETWQSFYRKKLKEVWKPAV

SEQ ID NO: 38066 - protein, 978 aa, synthetic construct
  REGION 1..978: note = engineered CasX variant
QEIKRINKIRRRLVKDSNTKKAGKTGPMKTLLVRVMTPDLRERLENLRKKPENIPQPISNTSRANLNKLLTDYTEMKKAILHVYWEEFQKDPVGLMSRVAQPASKKIDQNKLKPEMDEKGNLTTAGFACSQCGQPLFVYKLEQVSEKGKAYTNYFGRCNVAEHEKLILLAQLKPEKDSDEAVTYSLGKFGQRALDFYSIHVTKESTHPVKPLAQIAGNRYASHPVGKALSDACMGTIASFLSKYQDIIIEHQKVVKGNQKRLESLRELAGKENLEYPSVTLPPQPHTKEGVDAYNEVIARVRMWVNLNLWQKLKLSRDDAKPLLRLKGFPSFPLVERQANEVDWWDMVCNVKKLINEKKEDGKVFWQNLAGYKRQEALRPYLSSEEDRKKGKKFARYQLGDLLLHLEKKHGEDWGKVYDEAWERIDKKVEGLSKHIKLEEERRSEDAQSKAALTDWLRAKASFVIEGLKEADKDEFCRCELKLQKWYGDLRGKPFAIEAENSILDISGFSKQYNCAFIWQKDGVKKLNLYLIINYFKGGKLRFKKIKPEAFEANRFYTVINKKSGEIVPMEVNFNFDDPNLIILPLAFGKRQGREFIWNDLLSLETGSLKLANGRVIEKTLYNRRTRQDEPALFVALTFERREVLDSSNIKPMNLIGVDRGENIPAVIALTDPEGCPLSRFKDSLGNPTHILRIRESYKEKQRTIQAKKEVEQRRAGGYSRKYASKAKNLADDMVRNTARDLLYYAVTQDAMLIFENLSRGFGRQGKRTFMAERQYTRMEDWLTAKLAYEGLPSKTYLSKTLAQYTSKTCSNCGFTITSADYDRVLEKLKKTATGWMTTINGKELKVEGQITYYNRYKRQNVVKDLSVELDRLSEESVNNDISSWDKGRSGEALSLLKKRFSHRPVQEKFVCLNCGFETHADEQAALNIARSWLFLRSQEYKKYQTNKTTGNTDKRAFVETWQSFYRKKLKEVWKPAV

SEQ ID NO: 38067 - protein, 978 aa, synthetic construct
  REGION 1..978: note = engineered CasX variant
QEIKRINKIRRRLVKDSNTKKAGKTGPMKTLLVRVMTPDLRERLENLRKKPENIPQPISNTSRANLNKLLTDYTEMKKAILHVYWEEFQKDPVGLMSRVAQPASKKIDQNKLKPEMDEKGNLTTAGFACSQCGQPLFVYKLEQVSEKGKAYTNYFGRCNVAEHEKLILLAQLKPEKDSDEAVTYSLGKFGQRALDFYSIHVTKESTHPVKPLAQIAGNRYASSPVGKALSDACMGTIASFLSKYQDIIIEHQKVVKGNQKRLESLRELAGKENLEYPSVTLPPQPHTKEGVDAYNEVIARVRMWVNLNLWQKLKLSRDDAKPLLRLKGFPSFPLVERQANEVDWWDMVCNVKKLINEKKEDGKVFWQNLAGYKRQEALRPYLSSEEDRKKGKKFARYQLGDLLLHLEKKHGEDWGKVYDEAWERIDKKVEGLSKHIKLEEERRSEDAQSKAALTDWLRAKASFVIEGLKEADKDEFCRCELKLQKWYGDLRGKPFAIEAENSILDISGFSKQYNCAFIWQKDGVKKLNLYLIINYFKGGKLRFKKIKPEAFEANRFYTVINKKSGEIVPMEVNFNFDDPNLIILPLAFGKRQGREFIWNDLLSLETGSLKLANGRVIEKTLYNRRTRQDEPALFVALTFERREVLDSSNIKPMNLIGVDRGENIPAVIALTDPEGCPLSRFKDSLGNPTHILRIRESYKEKQRTIQAKKEVEQRRAGGYSRKYASKAKNLADDMVRNTARDLLYYAVTQDAMLIFENLSRGFGRQGKRTFMAERQYTRMEDWLTAKLAYEGLPSKTYLSKTLAQYTSKTCSNCGFTITSADYDRVLEKLKKTATGWMTTINGKELKVEGQITYYNRYKRQNVVKDLSVELDRLSEESVNNDISSWDKGRSGEALSLLKKRFSHRPVQEKFVCLNCGFETHADEQAALNIARSWLFLRSQEYKKYQTNKTTGNTDKRAFVETWQSFYRKKLKEVWKPAV

SEQ ID NO: 38068 - protein, 978 aa, synthetic construct
  REGION 1..978: note = engineered CasX variant
QEIKRINKIRRRLVKDSNTKKAGKTGPMKTLLVRVMTPDLRERLENLRKKPENIPQPISNTSRANLNKLLTDYTEMKKAILHVYWEEFQKDPVGLMSRVAQPASKKIDQNKLKPEMDEKGNLTTAGFACSQCGQPLFVYKLEQVSEKGKAYTNYFGRCNVAEHEKLILLAQLKPEKDSDEAVTYSLGKFGQRALDFYSIHVTKESTHPVKPLAQIAGNRYASTPVGKALSDACMGTIASFLSKYQDIIIEHQKVVKGNQKRLESLRELAGKENLEYPSVTLPPQPHTKEGVDAYNEVIARVRMWVNLNLWQKLKLSRDDAKPLLRLKGFPSFPLVERQANEVDWWDMVCNVKKLINEKKEDGKVFWQNLAGYKRQEALRPYLSSEEDRKKGKKFARYQLGDLLLHLEKKHGEDWGKVYDEAWERIDKKVEGLSKHIKLEEERRSEDAQSKAALTDWLRAKASFVIEGLKEADKDEFCRCELKLQKWYGDLRGKPFAIEAENSILDISGFSKQYNCAFIWQKDGVKKLNLYLIINYFKGGKLRFKKIKPEAFEANRFYTVINKKSGEIVPMEVNFNFDDPNLIILPLAFGKRQGREFIWNDLLSLETGSLKLANGRVIEKTLYNRRTRQDEPALFVALTFERREVLDSSNIKPMNLIGVDRGENIPAVIALTDPEGCPLSRFKDSLGNPTHILRIRESYKEKQRTIQAKKEVEQRRAGGYSRKYASKAKNLADDMVRNTARDLLYYAVTQDAMLIFENLSRGFGRQGKRTFMAERQYTRMEDWLTAKLAYEGLPSKTYLSKTLAQYTSKTCSNCGFTITSADYDRVLEKLKKTATGWMTTINGKELKVEGQITYYNRYKRQNVVKDLSVELDRLSEESVNNDISSWDKGRSGEALSLLKKRFSHRPVQEKFVCLNCGFETHADEQAALNIARSWLFLRSQEYKKYQTNKTTGNTDKRAFVETWQSFYRKKLKEVWKPAV

SEQ ID NO: 38069 - protein, 978 aa, synthetic construct
  REGION 1..978: note = engineered CasX variant
QEIKRINKIRRRLVKDSNTKKAGKTGPMKTLLVRVMTPDLRERLENLRKKPENIPQPISNTSRANLNKLLTDYTEMKKAILHVYWEEFQKDPVGLMSRVAQPASKKIDQNKLKPEMDEKGNLTTAGFACSQCGQPLFVYKLEQVSEKGKAYTNYFGRCNVAEHEKLILLAQLKPEKDSDEAVTYSLGKFGQRALDFYSIHVTKESTHPVKPLAQIAGNRYASAPVGKALSDACMGTIASFLSKYQDIIIEHQKVVKGNQKRLESLRELAGKENLEYPSVTLPPQPHTKEGVDAYNEVIARVRMWVNLNLWQKLKLSRDDAKPLLRLKGFPSFPLVERQANEVDWWDMVCNVKKLINEKKEDGKVFWQNLAGYKRQEALRPYLSSEEDRKKGKKFARYQLGDLLLHLEKKHGEDWGKVYDEAWERIDKKVEGLSKHIKLEEERRSEDAQSKAALTDWLRAKASFVIEGLKEADKDEFCRCELKLQKWYGDLRGKPFAIEAENSILDISGFSKQYNCAFIWQKDGVKKLNLYLIINYFKGGKLRFKKIKPEAFEANRFYTVINKKSGEIVPMEVNFNFDDPNLIILPLAFGKRQGREFIWNDLLSLETGSLKLANGRVIEKTLYNRRTRQDEPALFVALTFERREVLDSSNIKPMNLIGVDRGENIPAVIALTDPEGCPLSRFKDSLGNPTHILRIRESYKEKQRTIQAKKEVEQRRAGGYSRKYASKAKNLADDMVRNTARDLLYYAVTQDAMLIFENLSRGFGRQGKRTFMAERQYTRMEDWLTAKLAYEGLPSKTYLSKTLAQYTSKTCSNCGFTITSADYDRVLEKLKKTATGWMTTINGKELKVEGQITYYNRYKRQNVVKDLSVELDRLSEESVNNDISSWDKGRSGEALSLLKKRFSHRPVQEKFVCLNCGFETHADEQAALNIARSWLFLRSQEYKKYQTNKTTGNTDKRAFVETWQSFYRKKLKEVWKPAV

SEQ ID NO: 38070 - protein, 978 aa, synthetic construct
  REGION 1..978: note = engineered CasX variant
QEIKRINKIRRRLVKDSNTKKAGKTGPMKTLLVRVMTPDLRERLENLRKKPENIPQPISNTSRANLNKLLTDYTEMKKAILHVYWEEFQKDPVGLMSRVAQPASKKIDQNKLKPEMDEKGNLTTAGFACSQCGQPLFVYKLEQVSEKGKAYTNYFGRCNVAEHEKLILLAQLKPEKDSDEAVTYSLGKFGQRALDFYSIHVTKESTHPVKPLAQIAGNRYASVPVGKALSDACMGTIASFLSKYQDIIIEHQKVVKGNQKRLESLRELAGKENLEYPSVTLPPQPHTKEGVDAYNEVIARVRMWVNLNLWQKLKLSRDDAKPLLRLKGFPSFPLVERQANEVDWWDMVCNVKKLINEKKEDGKVFWQNLAGYKRQEALRPYLSSEEDRKKGKKFARYQLGDLLLHLEKKHGEDWGKVYDEAWERIDKKVEGLSKHIKLEEERRSEDAQSKAALTDWLRAKASFVIEGLKEADKDEFCRCELKLQKWYGDLRGKPFAIEAENSILDISGFSKQYNCAFIWQKDGVKKLNLYLIINYFKGGKLRFKKIKPEAFEANRFYTVINKKSGEIVPMEVNFNFDDPNLIILPLAFGKRQGREFIWNDLLSLETGSLKLANGRVIEKTLYNRRTRQDEPALFVALTFERREVLDSSNIKPMNLIGVDRGENIPAVIALTDPEGCPLSRFKDSLGNPTHILRIRESYKEKQRTIQAKKEVEQRRAGGYSRKYASKAKNLADDMVRNTARDLLYYAVTQDAMLIFENLSRGFGRQGKRTFMAERQYTRMEDWLTAKLAYEGLPSKTYLSKTLAQYTSKTCSNCGFTITSADYDRVLEKLKKTATGWMTTINGKELKVEGQITYYNRYKRQNVVKDLSVELDRLSEESVNNDISSWDKGRSGEALSLLKKRFSHRPVQEKFVCLNCGFETHADEQAALNIARSWLFLRSQEYKKYQTNKTTGNTDKRAFVETWQSFYRKKLKEVWKPAV

SEQ ID NO: 38071 - protein, 978 aa, synthetic construct
  REGION 1..978: note = engineered CasX variant
QEIKRINKIRRRLVKDSNTKKAGKTGPMKTLLVRVMTPDLRERLENLRKKPENIPQPISNTSRANLNKLLTDYTEMKKAILHVYWEEFQKDPVGLMSRVAQPASKKIDQNKLKPEMDEKGNLTTAGFACSQCGQPLFVYKLEQVSEKGKAYTNYFGRCNVAEHEKLIKLAQLKPEKDSDEAVTYSLGKFGQRALDFYSIHVTKESTHPVKPLAQIAGNRYASGPVGKALSDACMGTIASFLSKYQDIIIEHQKVVKGNQKRLESLRELAGKENLEYPSVTLPPQPHTKEGVDAYNEVIARVRMWVNLNLWQKLKLSRDDAKPLLRLKGFPSFPLVERQANEVDWWDMVCNVKKLINEKKEDGKVFWQNLAGYKRQEALRPYLSSEEDRKKGKKFARYQLGDLLLHLEKKHGEDWGKVYDEAWERIDKKVEGLSKHIKLEEERRSEDAQSKAALTDWLRAKASFVIEGLKEADKDEFCRCELKLQKWYGDLRGKPFAIEAENSILDISGFSKQYNCAFIWQKDGVKKLNLYLIINYFKGGKLRFKKIKPEAFEANRFYTVINKKSGEIVPMEVNFNFDDPNLIILPLAFGKRQGREFIWNDLLSLETGSLKLANGRVIEKTLYNRRTRQDEPALFVALTFERREVLDSSNIKPMNLIGVDRGENIPAVIALTDPEGCPLSRFKDSLGNPTHILRIRESYKEKQRTIQAKKEVEQRRAGGYSRKYASKAKNLADDMVRNTARDLLYYAVTQDAMLIFENLSRGFGRQGKRTFMAERQYTRMEDWLTAKLAYEGLPSKTYLSKTLAQYTSKTCSNCGFTITSADYDRVLEKLKKTATGWMTTINGKELKVEGQITYYNRYKRQNVVKDLSVELDRLSEESVNNDISSWDKGRSGEALSLLKKRFSHRPVQEKFVCLNCGFETHADEQAALNIARSWLFLRSQEYKKYQTNKTTGNTDKRAFVETWQSFYRKKLKEVWKPAV

SEQ ID NO: 38072 - protein, 977 aa, synthetic construct
  REGION 1..977: note = engineered CasX variant
QEIKRINKIRRRLVKDSNTKKAGKTGPMKTLLVRVMTPDLRERLENLRKKPENIPQPISNTSRANLNKLLTDYTEMKKAILHVYWEEFQKDPVGLMSRVAQPASKKIDQNKLKPEMDEKGNLTTAGFACSQCGQPLFVYKLEQVSEKGKAYTNYFGRCNVAEHEKLILLAQLKPEKDSDEAVTYSLGKFGQRALDFYSIHVTKESTHPVKPLAQIAGNRYASPVGKALSDACMGTIASFLSKYQDIIIEHQKVVKGNQKRLESLRELAGKENLEYPSVTLPPQPHTKEGVDAYNEVIARVRMWVNLNLWQKLKLSRDDAKPLLRLKGFPSFPLVERQANEVDWWDMVCNVKKLINEKKEDGKVFWQNLAGYKRQEALRPYLSSEEDRKKGKKFARYQLGDLLLHLEKKHGEDWGKVYDEAWERIDKKVEGLSKHIKLEEERRSEDAQSKAALTDWLRAKASFVIEGLKEADKDEFCRCELKLQKWYGDLRGKPFAIEAENSILDISGFSKQYNCAFIWQKDGVKKLNLYLIINYFKGGKLRFKKIKPEAFEANRFYTVINKKSGEIVPMEVNFNFDDPNLIILPLAFGKRQGREFIWNDLLSLETGSLKLANGRVIEKTLYNRRTRQDEPALFVALTFERREVLDSSNIKPMNLIGVDRGENIPAVIALTDPEGCPLSRFKDSLGNPTHILRIRESYKEKQRTIQAKKEVEQRRAGGYSRKYASKAKNLADDMVRNTARDLLYYAVTQDAMLIFENLSRGFGRQGKRTFMAERQYTRMEDWLTAKLAYEGLPSKTYLSKTLAQYTSKTCSNCGFTITSADYDRVLEKLKKTATGWMTTINGKELKVEGQITYYNRYKRQNVVKDLSVELDRLSEESVNNDISSWDKGRSGEALSLLKKRFSHRPVQEKFVCLNCGFETHADEQAALNIARSWLFLRSQEYKKYQTNKTTGNTDKRAFVETWQSFYRKKLKEVWKPAV

SEQ ID NO: 38073 - protein, 978 aa, synthetic construct
  REGION 1..978: note = engineered CasX variant
QEIKRINKIRRRLVKDSNTKKAGKTGPMKTLLVRVMTPDLRERLENLRKKPENIPQPISNTSRANLNKLLTDYTEMKKAILHVYWEEFQVDPVGLMSRVAQPASKKIDQNKLKPEMDEKGNLTTAGFACSQCGQPLFVYKLEQVSEKGKAYTNYFGRCNVAEHEKLILLAQLKPEKDSDEAVTYSLGKFGQRALDFYSIHVTKESTHPVKPLAQIAGNRYASYPVGKALSDACMGTIASFLSKYQDIIIEHQKVVKGNQKRLESLRELAGKENLEYPSVTLPPQPHTKEGVDAYNEVIARVRMWVNLNLWQKLKLSRDDAKPLLRLKGFPSFPLVERQANEVDWWDMVCNVKKLINEKKEDGKVFWQNLAGYKRQEALRPYLSSEEDRKKGKKFARYQLGDLLLHLEKKHGEDWGKVYDEAWERIDKKVEGLSKHIKLEEERRSEDAQSKAALTDWLRAKASFVIEGLKEADKDEFCRCELKLQKWYGDLRGKPFAIEAENSILDISGFSKQYNCAFIWQKDGVKKLNLYLIINYFKGGKLRFKKIKPEAFEANRFYTVINKKSGEIVPMEVNFNFDDPNLIILPLAFGKRQGREFIWNDLLSLETGSLKLANGRVIEKTLYNRRTRQDEPALFVALTFERREVLDSSNIKPMNLIGVDRGENIPAVIALTDPEGCPLSRFKDSLGNPTHILRIRESYKEKQRTIQAKKEVEQRRAGGYSRKYASKAKNLADDMVRNTARDLLYYAVTQDAMLIFENLSRGFGRQGKRTFMAERQYTRMEDWLTAKLAYEGLPSKTYLSKTLAQYTSKTCSNCGFTITSADYDRVLEKLKKTATGWMTTINGKELKVEGQITYYNRYKRQNVVKDLSVELDRLSEESVNNDISSWTKGRSGEALSLLKKRFSHRPVQEKFVCLNCGFETHADEQAALNIARSWLFLRSQEYKKYQTNKTTGNTDKRAFVETWQSFYRKKLKEVWKPAV

SEQ ID NO: 38074 - protein, 978 aa, synthetic construct
  REGION 1..978: note = engineered CasX variant
QEIKRINKIRRRLVKDSNTKKAGKTGPMKTLLVRVMTPDLRERLENLRKKPENIPQPISNTSRANLNKLLTDYTEMKKAILHVYWEEFQVDPVGLMSRVAQPASKKIDQNKLKPEMDEKGNLTTAGFACSQCGQPLFVYKLEQVSEKGKAYTNYFGRCNVAEHEKLILLAQLKPEKDSDEAVTYSLGKFGQRALDFYSIHVTKESTHPVKPLAQIAGNRYASHPVGKALSDACMGTIASFLSKYQDIIIEHQKVVKGNQKRLESLRELAGKENLEYPSVTLPPQPHTKEGVDAYNEVIARVRMWVNLNLWQKLKLSRDDAKPLLRLKGFPSFPLVERQANEVDWWDMVCNVKKLINEKKEDGKVFWQNLAGYKRQEALRPYLSSEEDRKKGKKFARYQLGDLLLHLEKKHGEDWGKVYDEAWERIDKKVEGLSKHIKLEEERRSEDAQSKAALTDWLRAKASFVIEGLKEADKDEFCRCELKLQKWYGDLRGKPFAIEAENSILDISGFSKQYNCAFIWQKDGVKKLNLYLIINYFKGGKLRFKKIKPEAFEANRFYTVINKKSGEIVPMEVNFNFDDPNLIILPLAFGKRQGREFIWNDLLSLETGSLKLANGRVIEKTLYNRRTRQDEPALFVALTFERREVLDSSNIKPMNLIGVDRGENIPAVIALTDPEGCPLSRFKDSLGNPTHILRIRESYKEKQRTIQAKKEVEQRRAGGYSRKYASKAKNLADDMVRNTARDLLYYAVTQDAMLIFENLSRGFGRQGKRTFMAERQYTRMEDWLTAKLAYEGLPSKTYLSKTLAQYTSKTCSNCGFTITSADYDRVLEKLKKTATGWMTTINGKELKVEGQITYYNRYKRQNVVKDLSVELDRLSEESVNNDISSWTKGRSGEALSLLKKRFSHRPVQEKFVCLNCGFETHADEQAALNIARSWLFLRSQEYKKYQTNKTTGNTDKRAFVETWQSFYRKKLKEVWKPAV

SEQ ID NO: 38075 - protein, 978 aa, synthetic construct
  REGION 1..978: note = engineered CasX variant
QEIKRINKIRRRLVKDSNTKKAGKTGPMKTLLVRVMTPDLRERLENLRKKPENIPQPISNTSRANLNKLLTDYTEMKKAILHVYWEEFQVDPVGLMSRVAQPASKKIDQNKLKPEMDEKGNLTTAGFACSQCGQPLFVYKLEQVSEKGKAYTNYFGRCNVAEHEKLILLAQLKPEKDSDEAVTYSLGKFGQRALDFYSIHVTKESTHPVKPLAQIAGNRYASSPVGKALSDACMGTIASFLSKYQDIIIEHQKVVKGNQKRLESLRELAGKENLEYPSVTLPPQPHTKEGVDAYNEVIARVRMWVNLNLWQKLKLSRDDAKPLLRLKGFPSFPLVERQANEVDWWDMVCNVKKLINEKKEDGKVFWQNLAGYKRQEALRPYLSSEEDRKKGKKFARYQLGDLLLHLEKKHGEDWGKVYDEAWERIDKKVEGLSKHIKLEEERRSEDAQSKAALTDWLRAKASFVIEGLKEADKDEFCRCELKLQKWYGDLRGKPFAIEAENSILDISGFSKQYNCAFIWQKDGVKKLNLYLIINYFKGGKLRFKKIKPEAFEANRFYTVINKKSGEIVPMEVNFNFDDPNLIILPLAFGKRQGREFIWNDLLSLETGSLKLANGRVIEKTLYNRRTRQDEPALFVALTFERREVLDSSNIKPMNLIGVDRGENIPAVIALTDPEGCPLSRFKDSLGNPTHILRIRESYKEKQRTIQAKKEVEQRRAGGYSRKYASKAKNLADDMVRNTARDLLYYAVTQDAMLIFENLSRGFGRQGKRTFMAERQYTRMEDWLTAKLAYEGLPSKTYLSKTLAQYTSKTCSNCGFTITSADYDRVLEKLKKTATGWMTTINGKELKVEGQITYYNRYKRQNVVKDLSVELDRLSEESVNNDISSWTKGRSGEALSLLKKRFSHRPVQEKFVCLNCGFETHADEQAALNIARSWLFLRSQEYKKYQTNKTTGNTDKRAFVETWQSFYRKKLKEVWKPAV

SEQ ID NO: 38076 - protein, 978 aa, synthetic construct
  REGION 1..978: note = engineered CasX variant
QEIKRINKIRRRLVKDSNTKKAGKTGPMKTLLVRVMTPDLRERLENLRKKPENIPQPISNTSRANLNKLLTDYTEMKKAILHVYWEEFQVDPVGLMSRVAQPASKKIDQNKLKPEMDEKGNLTTAGFACSQCGQPLFVYKLEQVSEKGKAYTNYFGRCNVAEHEKLILLAQLKPEKDSDEAVTYSLGKFGQRALDFYSIHVTKESTHPVKPLAQIAGNRYASTPVGKALSDACMGTIASFLSKYQDIIIEHQKVVKGNQKRLESLRELAGKENLEYPSVTLPPQPHTKEGVDAYNEVIARVRMWVNLNLWQKLKLSRDDAKPLLRLKGFPSFPLVERQANEVDWWDMVCNVKKLINEKKEDGKVFWQNLAGYKRQEALRPYLSSEEDRKKGKKFARYQLGDLLLHLEKKHGEDWGKVYDEAWERIDKKVEGLSKHIKLEEERRSEDAQSKAALTDWLRAKASFVIEGLKEADKDEFCRCELKLQKWYGDLRGKPFAIEAENSILDISGFSKQYNCAFIWQKDGVKKLNLYLIINYFKGGKLRFKKIKPEAFEANRFYTVINKKSGEIVPMEVNFNFDDPNLIILPLAFGKRQGREFIWNDLLSLETGSLKLANGRVIEKTLYNRRTRQDEPALFVALTFERREVLDSSNIKPMNLIGVDRGENIPAVIALTDPEGCPLSRFKDSLGNPTHILRIRESYKEKQRTIQAKKEVEQRRAGGYSRKYASKAKNLADDMVRNTARDLLYYAVTQDAMLIFENLSRGFGRQGKRTFMAERQYTRMEDWLTAKLAYEGLPSKTYLSKTLAQYTSKTCSNCGFTITSADYDRVLEKLKKTATGWMTTINGKELKVEGQITYYNRYKRQNVVKDLSVELDRLSEESVNNDISSWTKGRSGEALSLLKKRFSHRPVQEKFVCLNCGFETHADEQAALNIARSWLFLRSQEYKKYQTNKTTGNTDKRAFVETWQSFYRKKLKEVWKPAV

SEQ ID NO: 38077 - protein, 978 aa, synthetic construct
  REGION 1..978: note = engineered CasX variant
QEIKRINKIRRRLVKDSNTKKAGKTGPMKTLLVRVMTPDLRERLENLRKKPENIPQPISNTSRANLNKLLTDYTEMKKAILHVYWEEFQVDPVGLMSRVAQPASKKIDQNKLKPEMDEKGNLTTAGFACSQCGQPLFVYKLEQVSEKGKAYTNYFGRCNVAEHEKLILLAQLKPEKDSDEAVTYSLGKFGQRALDFYSIHVTKESTHPVKPLAQIAGNRYASAPVGKALSDACMGTIASFLSKYQDIIIEHQKVVKGNQKRLESLRELAGKENLEYPSVTLPPQPHTKEGVDAYNEVIARVRMWVNLNLWQKLKLSRDDAKPLLRLKGFPSFPLVERQANEVDWWDMVCNVKKLINEKKEDGKVFWQNLAGYKRQEALRPYLSSEEDRKKGKKFARYQLGDLLLHLEKKHGEDWGKVYDEAWERIDKKVEGLSKHIKLEEERRSEDAQSKAALTDWLRAKASFVIEGLKEADKDEFCRCELKLQKWYGDLRGKPFAIEAENSILDISGFSKQYNCAFIWQKDGVKKLNLYLIINYFKGGKLRFKKIKPEAFEANRFYTVINKKSGEIVPMEVNFNFDDPNLIILPLAFGKRQGREFIWNDLLSLETGSLKLANGRVIEKTLYNRRTRQDEPALFVALTFERREVLDSSNIKPMNLIGVDRGENIPAVIALTDPEGCPLSRFKDSLGNPTHILRIRESYKEKQRTIQAKKEVEQRRAGGYSRKYASKAKNLADDMVRNTARDLLYYAVTQDAMLIFENLSRGFGRQGKRTFMAERQYTRMEDWLTAKLAYEGLPSKTYLSKTLAQYTSKTCSNCGFTITSADYDRVLEKLKKTATGWMTTINGKELKVEGQITYYNRYKRQNVVKDLSVELDRLSEESVNNDISSWTKGRSGEALSLLKKRFSHRPVQEKFVCLNCGFETHADEQAALNIARSWLFLRSQEYKKYQTNKTTGNTDKRAFVETWQSFYRKKLKEVWKPAV

SEQ ID NO: 38078 - protein, 978 aa, synthetic construct
  REGION 1..978: note = engineered CasX variant
QEIKRINKIRRRLVKDSNTKKAGKTGPMKTLLVRVMTPDLRERLENLRKKPENIPQPISNTSRANLNKLLTDYTEMKKAILHVYWEEFQVDPVGLMSRVAQPASKKIDQNKLKPEMDEKGNLTTAGFACSQCGQPLFVYKLEQVSEKGKAYTNYFGRCNVAEHEKLILLAQLKPEKDSDEAVTYSLGKFGQRALDFYSIHVTKESTHPVKPLAQIAGNRYASVPVGKALSDACMGTIASFLSKYQDIIIEHQKVVKGNQKRLESLRELAGKENLEYPSVTLPPQPHTKEGVDAYNEVIARVRMWVNLNLWQKLKLSRDDAKPLLRLKGFPSFPLVERQANEVDWWDMVCNVKKLINEKKEDGKVFWQNLAGYKRQEALRPYLSSEEDRKKGKKFARYQLGDLLLHLEKKHGEDWGKVYDEAWERIDKKVEGLSKHIKLEEERRSEDAQSKAALTDWLRAKASFVIEGLKEADKDEFCRCELKLQKWYGDLRGKPFAIEAENSILDISGFSKQYNCAFIWQKDGVKKLNLYLIINYFKGGKLRFKKIKPEAFEANRFYTVINKKSGEIVPMEVNFNFDDPNLIILPLAFGKRQGREFIWNDLLSLETGSLKLANGRVIEKTLYNRRTRQDEPALFVALTFERREVLDSSNIKPMNLIGVDRGENIPAVIALTDPEGCPLSRFKDSLGNPTHILRIRESYKEKQRTIQAKKEVEQRRAGGYSRKYASKAKNLADDMVRNTARDLLYYAVTQDAMLIFENLSRGFGRQGKRTFMAERQYTRMEDWLTAKLAYEGLPSKTYLSKTLAQYTSKTCSNCGFTITSADYDRVLEKLKKTATGWMTTINGKELKVEGQITYYNRYKRQNVVKDLSVELDRLSEESVNNDISSWTKGRSGEALSLLKKRFSHRPVQEKFVCLNCGFETHADEQAALNIARSWLFLRSQEYKKYQTNKTTGNTDKRAFVETWQSFYRKKLKEVWKPAV

SEQ ID NO: 38079 - protein, 978 aa, synthetic construct
  REGION 1..978: note = engineered CasX variant
QEIKRINKIRRRLVKDSNTKKAGKTGPMKTLLVRVMTPDLRERLENLRKKPENIPQPISNTSRANLNKLLTDYTEMKKAILHVYWEEFQVDPVGLMSRVAQPASKKIDQNKLKPEMDEKGNLTTAGFACSQCGQPLFVYKLEQVSEKGKAYTNYFGRCNVAEHEKLIKLAQLKPEKDSDEAVTYSLGKFGQRALDFYSIHVTKESTHPVKPLAQIAGNRYASGPVGKALSDACMGTIASFLSKYQDIIIEHQKVVKGNQKRLESLRELAGKENLEYPSVTLPPQPHTKEGVDAYNEVIARVRMWVNLNLWQKLKLSRDDAKPLLRLKGFPSFPLVERQANEVDWWDMVCNVKKLINEKKEDGKVFWQNLAGYKRQEALRPYLSSEEDRKKGKKFARYQLGDLLLHLEKKHGEDWGKVYDEAWERIDKKVEGLSKHIKLEEERRSEDAQSKAALTDWLRAKASFVIEGLKEADKDEFCRCELKLQKWYGDLRGKPFAIEAENSILDISGFSKQYNCAFIWQKDGVKKLNLYLIINYFKGGKLRFKKIKPEAFEANRFYTVINKKSGEIVPMEVNFNFDDPNLIILPLAFGKRQGREFIWNDLLSLETGSLKLANGRVIEKTLYNRRTRQDEPALFVALTFERREVLDSSNIKPMNLIGVDRGENIPAVIALTDPEGCPLSRFKDSLGNPTHILRIRESYKEKQRTIQAKKEVEQRRAGGYSRKYASKAKNLADDMVRNTARDLLYYAVTQDAMLIFENLSRGFGRQGKRTFMAERQYTRMEDWLTAKLAYEGLPSKTYLSKTLAQYTSKTCSNCGFTITSADYDRVLEKLKKTATGWMTTINGKELKVEGQITYYNRYKRQNVVKDLSVELDRLSEESVNNDISSWTKGRSGEALSLLKKRFSHRPVQEKFVCLNCGFETHADEQAALNIARSWLFLRSQEYKKYQTNKTTGNTDKRAFVETWQSFYRKKLKEVWKPAV

SEQ ID NO: 38080 - protein, 977 aa, synthetic construct
  REGION 1..977: note = engineered CasX variant
QEIKRINKIRRRLVKDSNTKKAGKTGPMKTLLVRVMTPDLRERLENLRKKPENIPQPISNTSRANLNKLLTDYTEMKKAILHVYWEEFQVDPVGLMSRVAQPASKKIDQNKLKPEMDEKGNLTTAGFACSQCGQPLFVYKLEQVSEKGKAYTNYFGRCNVAEHEKLILLAQLKPEKDSDEAVTYSLGKFGQRALDFYSIHVTKESTHPVKPLAQIAGNRYASPVGKALSDACMGTIASFLSKYQDIIIEHQKVVKGNQKRLESLRELAGKENLEYPSVTLPPQPHTKEGVDAYNEVIARVRMWVNLNLWQKLKLSRDDAKPLLRLKGFPSFPLVERQANEVDWWDMVCNVKKLINEKKEDGKVFWQNLAGYKRQEALRPYLSSEEDRKKGKKFARYQLGDLLLHLEKKHGEDWGKVYDEAWERIDKKVEGLSKHIKLEEERRSEDAQSKAALTDWLRAKASFVIEGLKEADKDEFCRCELKLQKWYGDLRGKPFAIEAENSILDISGFSKQYNCAFIWQKDGVKKLNLYLIINYFKGGKLRFKKIKPEAFEANRFYTVINKKSGEIVPMEVNFNFDDPNLIILPLAFGKRQGREFIWNDLLSLETGSLKLANGRVIEKTLYNRRTRQDEPALFVALTFERREVLDSSNIKPMNLIGVDRGENIPAVIALTDPEGCPLSRFKDSLGNPTHILRIRESYKEKQRTIQAKKEVEQRRAGGYSRKYASKAKNLADDMVRNTARDLLYYAVTQDAMLIFENLSRGFGRQGKRTFMAERQYTRMEDWLTAKLAYEGLPSKTYLSKTLAQYTSKTCSNCGFTITSADYDRVLEKLKKTATGWMTTINGKELKVEGQITYYNRYKRQNVVKDLSVELDRLSEESVNNDISSWTKGRSGEALSLLKKRFSHRPVQEKFVCLNCGFETHADEQAALNIARSWLFLRSQEYKKYQTNKTTGNTDKRAFVETWQSFYRKKLKEVWKPAV

SEQ ID NO: 38081 - protein, 978 aa, synthetic construct
  REGION 1..978: note = engineered CasX variant
QEIKRLNKIRRRLVKDSNTKKAGKTGPMKTLLVRVMTPDLRERLENLRKKPENIPQPISNTSRANLNKLLTDYTEMKKAILHVYWEEFQKDPVGLMSRVAQPASKKIDQNKLKPEMDEKGNLTTAGFACSQCGQPLFVYKLEQVSEKGKAYTNYFGRCNVAEHEKLILLAQLKPEKDSDEAVTYSLGKFGQRALDFYSIHVTKESTHPVKPLAQIAGNRYASYPVGKALSDACMGTIASFLSKYQDIIIEHQKVVKGNQKRLESLRELAGKENLEYPSVTLPPQPHTKEGVDAYNEVIARVRMWVNLNLWQKLKLSRDDAKPLLRLKGFPSFPLVERQANEVDWWDMVCNVKKLINEKKEDGKVFWQNLAGYKRQEALRPYLSSEEDRKKGKKFARYQLGDLLLHLEKKHGEDWGKVYDEAWERIDKKVEGLSKHIKLEEERRSEDAQSKAALTDWLRAKASFVIEGLKEADKDEFCRCELKLQKWYGDLRGKPFAIEAENSILDISGFSKQYNCAFIWQKDGVKKLNLYLIINYFKGGKLRFKKIKPEAFEANRFYTVINKKSGEIVPMEVNFNFDDPNLIILPLAFGKRQGREFIWNDLLSLETGSLKLANGRVIEKTLYNRRTRQDEPALFVALTFERREVLDSSNIKPMNLIGVDRGENIPAVIALTDPEGCPLSRFKDSLGNPTHILRIRESYKEKQRTIQAKKEVEQRRAGGYSRKYASKAKNLADDMVRNTARDLLYYAVTQDAMLIFENLSRGFGRQGKRTFMAERQYTRMEDWLTAKLAYEGLPSKTYLSKTLAQYTSKTCSNCGFTITSADYDRVLEKLKKTATGWMTTINGKELKVEGQITYYNRYKRQNVVKDLSVELDRLSEESVNNDISSWTKGRSGEALSLLKKRFSHRPVQEKFVCLNCGFETHADEQAALNIARSWLFLRSQEYKKYQTNKTTGNTDKRAFVETWQSFYRKKLKEVWKPAV

SEQ ID NO: 38082 - protein, 978 aa, synthetic construct
  REGION 1..978: note = engineered CasX variant
QEIKRLNKIRRRLVKDSNTKKAGKTGPMKTLLVRVMTPDLRERLENLRKKPENIPQPISNTSRANLNKLLTDYTEMKKAILHVYWEEFQKDPVGLMSRVAQPASKKIDQNKLKPEMDEKGNLTTAGFACSQCGQPLFVYKLEQVSEKGKAYTNYFGRCNVAEHEKLILLAQLKPEKDSDEAVTYSLGKFGQRALDFYSIHVTKESTHPVKPLAQIAGNRYASHPVGKALSDACMGTIASFLSKYQDIIIEHQKVVKGNQKRLESLRELAGKENLEYPSVTLPPQPHTKEGVDAYNEVIARVRMWVNLNLWQKLKLSRDDAKPLLRLKGFPSFPLVERQANEVDWWDMVCNVKKLINEKKEDGKVFWQNLAGYKRQEALRPYLSSEEDRKKGKKFARYQLGDLLLHLEKKHGEDWGKVYDEAWERIDKKVEGLSKHIKLEEERRSEDAQSKAALTDWLRAKASFVIEGLKEADKDEFCRCELKLQKWYGDLRGKPFAIEAENSILDISGFSKQYNCAFIWQKDGVKKLNLYLIINYFKGGKLRFKKIKPEAFEANRFYTVINKKSGEIVPMEVNFNFDDPNLIILPLAFGKRQGREFIWNDLLSLETGSLKLANGRVIEKTLYNRRTRQDEPALFVALTFERREVLDSSNIKPMNLIGVDRGENIPAVIALTDPEGCPLSRFKDSLGNPTHILRIRESYKEKQRTIQAKKEVEQRRAGGYSRKYASKAKNLADDMVRNTARDLLYYAVTQDAMLIFENLSRGFGRQGKRTFMAERQYTRMEDWLTAKLAYEGLPSKTYLSKTLAQYTSKTCSNCGFTITSADYDRVLEKLKKTATGWMTTINGKELKVEGQITYYNRYKRQNVVKDLSVELDRLSEESVNNDISSWTKGRSGEALSLLKKRFSHRPVQEKFVCLNCGFETHADEQAALNIARSWLFLRSQEYKKYQTNKTTGNTDKRAFVETWQSFYRKKLKEVWKPAV

SEQ ID NO: 38083 - protein, 978 aa, synthetic construct
  REGION 1..978: note = engineered CasX variant
QEIKRLNKIRRRLVKDSNTKKAGKTGPMKTLLVRVMTPDLRERLENLRKKPENIPQPISNTSRANLNKLLTDYTEMKKAILHVYWEEFQKDPVGLMSRVAQPASKKIDQNKLKPEMDEKGNLTTAGFACSQCGQPLFVYKLEQVSEKGKAYTNYFGRCNVAEHEKLILLAQLKPEKDSDEAVTYSLGKFGQRALDFYSIHVTKESTHPVKPLAQIAGNRYASSPVGKALSDACMGTIASFLSKYQDIIIEHQKVVKGNQKRLESLRELAGKENLEYPSVTLPPQPHTKEGVDAYNEVIARVRMWVNLNLWQKLKLSRDDAKPLLRLKGFPSFPLVERQANEVDWWDMVCNVKKLINEKKEDGKVFWQNLAGYKRQEALRPYLSSEEDRKKGKKFARYQLGDLLLHLEKKHGEDWGKVYDEAWERIDKKVEGLSKHIKLEEERRSEDAQSKAALTDWLRAKASFVIEGLKEADKDEFCRCELKLQKWYGDLRGKPFAIEAENSILDISGFSKQYNCAFIWQKDGVKKLNLYLIINYFKGGKLRFKKIKPEAFEANRFYTVINKKSGEIVPMEVNFNFDDPNLIILPLAFGKRQGREFIWNDLLSLETGSLKLANGRVIEKTLYNRRTRQDEPALFVALTFERREVLDSSNIKPMNLIGVDRGENIPAVIALTDPEGCPLSRFKDSLGNPTHILRIRESYKEKQRTIQAKKEVEQRRAGGYSRKYASKAKNLADDMVRNTARDLLYYAVTQDAMLIFENLSRGFGRQGKRTFMAERQYTRMEDWLTAKLAYEGLPSKTYLSKTLAQYTSKTCSNCGFTITSADYDRVLEKLKKTATGWMTTINGKELKVEGQITYYNRYKRQNVVKDLSVELDRLSEESVNNDISSWTKGRSGEALSLLKKRFSHRPVQEKFVCLNCGFETHADEQAALNIARSWLFLRSQEYKKYQTNKTTGNTDKRAFVETWQSFYRKKLKEVWKPAV

SEQ ID NO: 38084 - protein, 978 aa, synthetic construct
  REGION 1..978: note = engineered CasX variant
QEIKRLNKIRRRLVKDSNTKKAGKTGPMKTLLVRVMTPDLRERLENLRKKPENIPQPISNTSRANLNKLLTDYTEMKKAILHVYWEEFQKDPVGLMSRVAQPASKKIDQNKLKPEMDEKGNLTTAGFACSQCGQPLFVYKLEQVSEKGKAYTNYFGRCNVAEHEKLILLAQLKPEKDSDEAVTYSLGKFGQRALDFYSIHVTKESTHPVKPLAQIAGNRYASTPVGKALSDACMGTIASFLSKYQDIIIEHQKVVKGNQKRLESLRELAGKENLEYPSVTLPPQPHTKEGVDAYNEVIARVRMWVNLNLWQKLKLSRDDAKPLLRLKGFPSFPLVERQANEVDWWDMVCNVKKLINEKKEDGKVFWQNLAGYKRQEALRPYLSSEEDRKKGKKFARYQLGDLLLHLEKKHGEDWGKVYDEAWERIDKKVEGLSKHIKLEEERRSEDAQSKAALTDWLRAKASFVIEGLKEADKDEFCRCELKLQKWYGDLRGKPFAIEAENSILDISGFSKQYNCAFIWQKDGVKKLNLYLIINYFKGGKLRFKKIKPEAFEANRFYTVINKKSGEIVPMEVNFNFDDPNLIILPLAFGKRQGREFIWNDLLSLETGSLKLANGRVIEKTLYNRRTRQDEPALFVALTFERREVLDSSNIKPMNLIGVDRGENIPAVIALTDPEGCPLSRFKDSLGNPTHILRIRESYKEKQRTIQAKKEVEQRRAGGYSRKYASKAKNLADDMVRNTARDLLYYAVTQDAMLIFENLSRGFGRQGKRTFMAERQYTRMEDWLTAKLAYEGLPSKTYLSKTLAQYTSKTCSNCGFTITSADYDRVLEKLKKTATGWMTTINGKELKVEGQITYYNRYKRQNVVKDLSVELDRLSEESVNNDISSWTKGRSGEALSLLKKRFSHRPVQEKFVCLNCGFETHADEQAALNIARSWLFLRSQEYKKYQTNKTTGNTDKRAFVETWQSFYRKKLKEVWKPAV

SEQ ID NO: 38085 - protein, 978 aa, synthetic construct
  REGION 1..978: note = engineered CasX variant
QEIKRLNKIRRRLVKDSNTKKAGKTGPMKTLLVRVMTPDLRERLENLRKKPENIPQPISNTSRANLNKLLTDYTEMKKAILHVYWEEFQKDPVGLMSRVAQPASKKIDQNKLKPEMDEKGNLTTAGFACSQCGQPLFVYKLEQVSEKGKAYTNYFGRCNVAEHEKLILLAQLKPEKDSDEAVTYSLGKFGQRALDFYSIHVTKESTHPVKPLAQIAGNRYASAPVGKALSDACMGTIASFLSKYQDIIIEHQKVVKGNQKRLESLRELAGKENLEYPSVTLPPQPHTKEGVDAYNEVIARVRMWVNLNLWQKLKLSRDDAKPLLRLKGFPSFPLVERQANEVDWWDMVCNVKKLINEKKEDGKVFWQNLAGYKRQEALRPYLSSEEDRKKGKKFARYQLGDLLLHLEKKHGEDWGKVYDEAWERIDKKVEGLSKHIKLEEERRSEDAQSKAALTDWLRAKASFVIEGLKEADKDEFCRCELKLQKWYGDLRGKPFAIEAENSILDISGFSKQYNCAFIWQKDGVKKLNLYLIINYFKGGKLRFKKIKPEAFEANRFYTVINKKSGEIVPMEVNFNFDDPNLIILPLAFGKRQGREFIWNDLLSLETGSLKLANGRVIEKTLYNRRTRQDEPALFVALTFERREVLDSSNIKPMNLIGVDRGENIPAVIALTDPEGCPLSRFKDSLGNPTHILRIRESYKEKQRTIQAKKEVEQRRAGGYSRKYASKAKNLADDMVRNTARDLLYYAVTQDAMLIFENLSRGFGRQGKRTFMAERQYTRMEDWLTAKLAYEGLPSKTYLSKTLAQYTSKTCSNCGFTITSADYDRVLEKLKKTATGWMTTINGKELKVEGQITYYNRYKRQNVVKDLSVELDRLSEESVNNDISSWTKGRSGEALSLLKKRFSHRPVQEKFVCLNCGFETHADEQAALNIARSWLFLRSQEYKKYQTNKTTGNTDKRAFVETWQSFYRKKLKEVWKPAV

SEQ ID NO: 38086 - protein, 978 aa, synthetic construct
  REGION 1..978: note = engineered CasX variant
QEIKRLNKIRRRLVKDSNTKKAGKTGPMKTLLVRVMTPDLRERLENLRKKPENIPQPISNTSRANLNKLLTDYTEMKKAILHVYWEEFQKDPVGLMSRVAQPASKKIDQNKLKPEMDEKGNLTTAGFACSQCGQPLFVYKLEQVSEKGKAYTNYFGRCNVAEHEKLILLAQLKPEKDSDEAVTYSLGKFGQRALDFYSIHVTKESTHPVKPLAQIAGNRYASVPVGKALSDACMGTIASFLSKYQDIIIEHQKVVKGNQKRLESLRELAGKENLEYPSVTLPPQPHTKEGVDAYNEVIARVRMWVNLNLWQKLKLSRDDAKPLLRLKGFPSFPLVERQANEVDWWDMVCNVKKLINEKKEDGKVFWQNLAGYKRQEALRPYLSSEEDRKKGKKFARYQLGDLLLHLEKKHGEDWGKVYDEAWERIDKKVEGLSKHIKLEEERRSEDAQSKAALTDWLRAKASFVIEGLKEADKDEFCRCELKLQKWYGDLRGKPFAIEAENSILDISGFSKQYNCAFIWQKDGVKKLNLYLIINYFKGGKLRFKKIKPEAFEANRFYTVINKKSGEIVPMEVNFNFDDPNLIILPLAFGKRQGREFIWNDLLSLETGSLKLANGRVIEKTLYNRRTRQDEPALFVALTFERREVLDSSNIKPMNLIGVDRGENIPAVIALTDPEGCPLSRFKDSLGNPTHILRIRESYKEKQRTIQAKKEVEQRRAGGYSRKYASKAKNLADDMVRNTARDLLYYAVTQDAMLIFENLSRGFGRQGKRTFMAERQYTRMEDWLTAKLAYEGLPSKTYLSKTLAQYTSKTCSNCGFTITSADYDRVLEKLKKTATGWMTTINGKELKVEGQITYYNRYKRQNVVKDLSVELDRLSEESVNNDISSWTKGRSGEALSLLKKRFSHRPVQEKFVCLNCGFETHADEQAALNIARSWLFLRSQEYKKYQTNKTTGNTDKRAFVETWQSFYRKKLKEVWKPAV

SEQ ID NO: 38087 - protein, 978 aa, synthetic construct
  REGION 1..978: note = engineered CasX variant
QEIKRLNKIRRRLVKDSNTKKAGKTGPMKTLLVRVMTPDLRERLENLRKKPENIPQPISNTSRANLNKLLTDYTEMKKAILHVYWEEFQKDPVGLMSRVAQPASKKIDQNKLKPEMDEKGNLTTAGFACSQCGQPLFVYKLEQVSEKGKAYTNYFGRCNVAEHEKLIKLAQLKPEKDSDEAVTYSLGKFGQRALDFYSIHVTKESTHPVKPLAQIAGNRYASGPVGKALSDACMGTIASFLSKYQDIIIEHQKVVKGNQKRLESLRELAGKENLEYPSVTLPPQPHTKEGVDAYNEVIARVRMWVNLNLWQKLKLSRDDAKPLLRLKGFPSFPLVERQANEVDWWDMVCNVKKLINEKKEDGKVFWQNLAGYKRQEALRPYLSSEEDRKKGKKFARYQLGDLLLHLEKKHGEDWGKVYDEAWERIDKKVEGLSKHIKLEEERRSEDAQSKAALTDWLRAKASFVIEGLKEADKDEFCRCELKLQKWYGDLRGKPFAIEAENSILDISGFSKQYNCAFIWQKDGVKKLNLYLIINYFKGGKLRFKKIKPEAFEANRFYTVINKKSGEIVPMEVNFNFDDPNLIILPLAFGKRQGREFIWNDLLSLETGSLKLANGRVIEKTLYNRRTRQDEPALFVALTFERREVLDSSNIKPMNLIGVDRGENIPAVIALTDPEGCPLSRFKDSLGNPTHILRIRESYKEKQRTIQAKKEVEQRRAGGYSRKYASKAKNLADDMVRNTARDLLYYAVTQDAMLIFENLSRGFGRQGKRTFMAERQYTRMEDWLTAKLAYEGLPSKTYLSKTLAQYTSKTCSNCGFTITSADYDRVLEKLKKTATGWMTTINGKELKVEGQITYYNRYKRQNVVKDLSVELDRLSEESVNNDISSWTKGRSGEALSLLKKRFSHRPVQEKFVCLNCGFETHADEQAALNIARSWLFLRSQEYKKYQTNKTTGNTDKRAFVETWQSFYRKKLKEVWKPAV

SEQ ID NO: 38088 - protein, 977 aa, synthetic construct
  REGION 1..977: note = engineered CasX variant
QEIKRLNKIRRRLVKDSNTKKAGKTGPMKTLLVRVMTPDLRERLENLRKKPENIPQPISNTSRANLNKLLTDYTEMKKAILHVYWEEFQKDPVGLMSRVAQPASKKIDQNKLKPEMDEKGNLTTAGFACSQCGQPLFVYKLEQVSEKGKAYTNYFGRCNVAEHEKLILLAQLKPEKDSDEAVTYSLGKFGQRALDFYSIHVTKESTHPVKPLAQIAGNRYASPVGKALSDACMGTIASFLSKYQDIIIEHQKVVKGNQKRLESLRELAGKENLEYPSVTLPPQPHTKEGVDAYNEVIARVRMWVNLNLWQKLKLSRDDAKPLLRLKGFPSFPLVERQANEVDWWDMVCNVKKLINEKKEDGKVFWQNLAGYKRQEALRPYLSSEEDRKKGKKFARYQLGDLLLHLEKKHGEDWGKVYDEAWERIDKKVEGLSKHIKLEEERRSEDAQSKAALTDWLRAKASFVIEGLKEADKDEFCRCELKLQKWYGDLRGKPFAIEAENSILDISGFSKQYNCAFIWQKDGVKKLNLYLIINYFKGGKLRFKKIKPEAFEANRFYTVINKKSGEIVPMEVNFNFDDPNLIILPLAFGKRQGREFIWNDLLSLETGSLKLANGRVIEKTLYNRRTRQDEPALFVALTFERREVLDSSNIKPMNLIGVDRGENIPAVIALTDPEGCPLSRFKDSLGNPTHILRIRESYKEKQRTIQAKKEVEQRRAGGYSRKYASKAKNLADDMVRNTARDLLYYAVTQDAMLIFENLSRGFGRQGKRTFMAERQYTRMEDWLTAKLAYEGLPSKTYLSKTLAQYTSKTCSNCGFTITSADYDRVLEKLKKTATGWMTTINGKELKVEGQITYYNRYKRQNVVKDLSVELDRLSEESVNNDISSWTKGRSGEALSLLKKRFSHRPVQEKFVCLNCGFETHADEQAALNIARSWLFLRSQEYKKYQTNKTTGNTDKRAFVETWQSFYRKKLKEVWKPAV

SEQ ID NO: 38089 - protein, 978 aa, synthetic construct
  REGION 1..978: note = engineered CasX variant
QEIKRINKIRRRLVKDSNTKKAGKTGPMKTLLVRVMTPDLRERLENLRKKPENIPQPISNTSRANLNKLLTDYTEMKKAILHVYWEEFQKDPVGLMSRVAQPASKKIDQNKLKPEMDEKGNLTTAGFACSQCGQPLFVYKLEQVSEKGKAYTNYVGRCNVAEHEKLILLAQLKPEKDSDEAVTYSLGKFGQRALDFYSIHVTKESTHPVKPLAQIAGNRYASYPVGKALSDACMGTIASFLSKYQDIIIEHQKVVKGNQKRLESLRELAGKENLEYPSVTLPPQPHTKEGVDAYNEVIARVRMWVNLNLWQKLKLSRDDAKPLLRLKGFPSFPLVERQANEVDWWDMVCNVKKLINEKKEDGKVFWQNLAGYKRQEALRPYLSSEEDRKKGKKFARYQLGDLLLHLEKKHGEDWGKVYDEAWERIDKKVEGLSKHIKLEEERRSEDAQSKAALTDWLRAKASFVIEGLKEADKDEFCRCELKLQKWYGDLRGKPFAIEAENSILDISGFSKQYNCAFIWQKDGVKKLNLYLIINYFKGGKLRFKKIKPEAFEANRFYTVINKKSGEIVPMEVNFNFDDPNLIILPLAFGKRQGREFIWNDLLSLETGSLKLANGRVIEKTLYNRRTRQDEPALFVALTFERREVLDSSNIKPMNLIGVDRGENIPAVIALTDPEGCPLSRFKDSLGNPTHILRIRESYKEKQRTIQAKKEVEQRRAGGYSRKYASKAKNLADDMVRNTARDLLYYAVTQDAMLIFENLSRGFGRQGKRTFMAERQYTRMEDWLTAKLAYEGLPSKTYLSKTLAQYTSKTCSNCGFTITSADYDRVLEKLKKTATGWMTTINGKELKVEGQITYYNRYKRQNVVKDLSVELDRLSEESVNNDISSWTKGRSGEALSLLKKRFSHRPVQEKFVCLNCGFETHADEQAALNIARSWLFLRSQEYKKYQTNKTTGNTDKRAFVETWQSFYRKKLKEVWKPAV

SEQ ID NO: 38090 - protein, 978 aa, synthetic construct
  REGION 1..978: note = engineered CasX variant
QEIKRINKIRRRLVKDSNTKKAGKTGPMKTLLVRVMTPDLRERLENLRKKPENIPQPISNTSRANLNKLLTDYTEMKKAILHVYWEEFQKDPVGLMSRVAQPASKKIDQNKLKPEMDEKGNLTTAGFACSQCGQPLFVYKLEQVSEKGKAYTNYVGRCNVAEHEKLILLAQLKPEKDSDEAVTYSLGKFGQRALDFYSIHVTKESTHPVKPLAQIAGNRYASHPVGKALSDACMGTIASFLSKYQDIIIEHQKVVKGNQKRLESLRELAGKENLEYPSVTLPPQPHTKEGVDAYNEVIARVRMWVNLNLWQKLKLSRDDAKPLLRLKGFPSFPLVERQANEVDWWDMVCNVKKLINEKKEDGKVFWQNLAGYKRQEALRPYLSSEEDRKKGKKFARYQLGDLLLHLEKKHGEDWGKVYDEAWERIDKKVEGLSKHIKLEEERRSEDAQSKAALTDWLRAKASFVIEGLKEADKDEFCRCELKLQKWYGDLRGKPFAIEAENSILDISGFSKQYNCAFIWQKDGVKKLNLYLIINYFKGGKLRFKKIKPEAFEANRFYTVINKKSGEIVPMEVNFNFDDPNLIILPLAFGKRQGREFIWNDLLSLETGSLKLANGRVIEKTLYNRRTRQDEPALFVALTFERREVLDSSNIKPMNLIGVDRGENIPAVIALTDPEGCPLSRFKDSLGNPTHILRIRESYKEKQRTIQAKKEVEQRRAGGYSRKYASKAKNLADDMVRNTARDLLYYAVTQDAMLIFENLSRGFGRQGKRTFMAERQYTRMEDWLTAKLAYEGLPSKTYLSKTLAQYTSKTCSNCGFTITSADYDRVLEKLKKTATGWMTTINGKELKVEGQITYYNRYKRQNVVKDLSVELDRLSEESVNNDISSWTKGRSGEALSLLKKRFSHRPVQEKFVCLNCGFETHADEQAALNIARSWLFLRSQEYKKYQTNKTTGNTDKRAFVETWQSFYRKKLKEVWKPAV

SEQ ID NO: 38091 - protein, 978 aa, synthetic construct
  REGION 1..978: note = engineered CasX variant
QEIKRINKIRRRLVKDSNTKKAGKTGPMKTLLVRVMTPDLRERLENLRKKPENIPQPISNTSRANLNKLLTDYTEMKKAILHVYWEEFQKDPVGLMSRVAQPASKKIDQNKLKPEMDEKGNLTTAGFACSQCGQPLFVYKLEQVSEKGKAYTNYVGRCNVAEHEKLILLAQLKPEKDSDEAVTYSLGKFGQRALDFYSIHVTKESTHPVKPLAQIAGNRYASSPVGKALSDACMGTIASFLSKYQDIIIEHQKVVKGNQKRLESLRELAGKENLEYPSVTLPPQPHTKEGVDAYNEVIARVRMWVNLNLWQKLKLSRDDAKPLLRLKGFPSFPLVERQANEVDWWDMVCNVKKLINEKKEDGKVFWQNLAGYKRQEALRPYLSSEEDRKKGKKFARYQLGDLLLHLEKKHGEDWGKVYDEAWERIDKKVEGLSKHIKLEEERRSEDAQSKAALTDWLRAKASFVIEGLKEADKDEFCRCELKLQKWYGDLRGKPFAIEAENSILDISGFSKQYNCAFIWQKDGVKKLNLYLIINYFKGGKLRFKKIKPEAFEANRFYTVINKKSGEIVPMEVNFNFDDPNLIILPLAFGKRQGREFIWNDLLSLETGSLKLANGRVIEKTLYNRRTRQDEPALFVALTFERREVLDSSNIKPMNLIGVDRGENIPAVIALTDPEGCPLSRFKDSLGNPTHILRIRESYKEKQRTIQAKKEVEQRRAGGYSRKYASKAKNLADDMVRNTARDLLYYAVTQDAMLIFENLSRGFGRQGKRTFMAERQYTRMEDWLTAKLAYEGLPSKTYLSKTLAQYTSKTCSNCGFTITSADYDRVLEKLKKTATGWMTTINGKELKVEGQITYYNRYKRQNVVKDLSVELDRLSEESVNNDISSWTKGRSGEALSLLKKRFSHRPVQEKFVCLNCGFETHADEQAALNIARSWLFLRSQEYKKYQTNKTTGNTDKRAFVETWQSFYRKKLKEVWKPAV

SEQ ID NO: 38092 - protein, 978 aa, synthetic construct
  REGION 1..978: note = engineered CasX variant
QEIKRINKIRRRLVKDSNTKKAGKTGPMKTLLVRVMTPDLRERLENLRKKPENIPQPISNTSRANLNKLLTDYTEMKKAILHVYWEEFQKDPVGLMSRVAQPASKKIDQNKLKPEMDEKGNLTTAGFACSQCGQPLFVYKLEQVSEKGKAYTNYVGRCNVAEHEKLILLAQLKPEKDSDEAVTYSLGKFGQRALDFYSIHVTKESTHPVKPLAQIAGNRYASTPVGKALSDACMGTIASFLSKYQDIIIEHQKVVKGNQKRLESLRELAGKENLEYPSVTLPPQPHTKEGVDAYNEVIARVRMWVNLNLWQKLKLSRDDAKPLLRLKGFPSFPLVERQANEVDWWDMVCNVKKLINEKKEDGKVFWQNLAGYKRQEALRPYLSSEEDRKKGKKFARYQLGDLLLHLEKKHGEDWGKVYDEAWERIDKKVEGLSKHIKLEEERRSEDAQSKAALTDWLRAKASFVIEGLKEADKDEFCRCELKLQKWYGDLRGKPFAIEAENSILDISGFSKQYNCAFIWQKDGVKKLNLYLIINYFKGGKLRFKKIKPEAFEANRFYTVINKKSGEIVPMEVNFNFDDPNLIILPLAFGKRQGREFIWNDLLSLETGSLKLANGRVIEKTLYNRRTRQDEPALFVALTFERREVLDSSNIKPMNLIGVDRGENIPAVIALTDPEGCPLSRFKDSLGNPTHILRIRESYKEKQRTIQAKKEVEQRRAGGYSRKYASKAKNLADDMVRNTARDLLYYAVTQDAMLIFENLSRGFGRQGKRTFMAERQYTRMEDWLTAKLAYEGLPSKTYLSKTLAQYTSKTCSNCGFTITSADYDRVLEKLKKTATGWMTTINGKELKVEGQITYYNRYKRQNVVKDLSVELDRLSEESVNNDISSWTKGRSGEALSLLKKRFSHRPVQEKFVCLNCGFETHADEQAALNIARSWLFLRSQEYKKYQTNKTTGNTDKRAFVETWQSFYRKKLKEVWKPAV

SEQ ID NO: 38093 - protein, 978 aa, synthetic construct
  REGION 1..978: note = engineered CasX variant
QEIKRINKIRRRLVKDSNTKKAGKTGPMKTLLVRVMTPDLRERLENLRKKPENIPQPISNTSRANLNKLLTDYTEMKKAILHVYWEEFQKDPVGLMSRVAQPASKKIDQNKLKPEMDEKGNLTTAGFACSQCGQPLFVYKLEQVSEKGKAYTNYVGRCNVAEHEKLILLAQLKPEKDSDEAVTYSLGKFGQRALDFYSIHVTKESTHPVKPLAQIAGNRYASAPVGKALSDACMGTIASFLSKYQDIIIEHQKVVKGNQKRLESLRELAGKENLEYPSVTLPPQPHTKEGVDAYNEVIARVRMWVNLNLWQKLKLSRDDAKPLLRLKGFPSFPLVERQANEVDWWDMVCNVKKLINEKKEDGKVFWQNLAGYKRQEALRPYLSSEEDRKKGKKFARYQLGDLLLHLEKKHGEDWGKVYDEAWERIDKKVEGLSKHIKLEEERRSEDAQSKAALTDWLRAKASFVIEGLKEADKDEFCRCELKLQKWYGDLRGKPFAIEAENSILDISGFSKQYNCAFIWQKDGVKKLNLYLIINYFKGGKLRFKKIKPEAFEANRFYTVINKKSGEIVPMEVNFNFDDPNLIILPLAFGKRQGREFIWNDLLSLETGSLKLANGRVIEKTLYNRRTRQDEPALFVALTFERREVLDSSNIKPMNLIGVDRGENIPAVIALTDPEGCPLSRFKDSLGNPTHILRIRESYKEKQRTIQAKKEVEQRRAGGYSRKYASKAKNLADDMVRNTARDLLYYAVTQDAMLIFENLSRGFGRQGKRTFMAERQYTRMEDWLTAKLAYEGLPSKTYLSKTLAQYTSKTCSNCGFTITSADYDRVLEKLKKTATGWMTTINGKELKVEGQITYYNRYKRQNVVKDLSVELDRLSEESVNNDISSWTKGRSGEALSLLKKRFSHRPVQEKFVCLNCGFETHADEQAALNIARSWLFLRSQEYKKYQTNKTTGNTDKRAFVETWQSFYRKKLKEVWKPAV

SEQ ID NO: 38094 - protein, 978 aa, synthetic construct
  REGION 1..978: note = engineered CasX variant
QEIKRINKIRRRLVKDSNTKKAGKTGPMKTLLVRVMTPDLRERLENLRKKPENIPQPISNTSRANLNKLLTDYTEMKKAILHVYWEEFQKDPVGLMSRVAQPASKKIDQNKLKPEMDEKGNLTTAGFACSQCGQPLFVYKLEQVSEKGKAYTNYVGRCNVAEHEKLILLAQLKPEKDSDEAVTYSLGKFGQRALDFYSIHVTKESTHPVKPLAQIAGNRYASVPVGKALSDACMGTIASFLSKYQDIIIEHQKVVKGNQKRLESLRELAGKENLEYPSVTLPPQPHTKEGVDAYNEVIARVRMWVNLNLWQKLKLSRDDAKPLLRLKGFPSFPLVERQANEVDWWDMVCNVKKLINEKKEDGKVFWQNLAGYKRQEALRPYLSSEEDRKKGKKFARYQLGDLLLHLEKKHGEDWGKVYDEAWERIDKKVEGLSKHIKLEEERRSEDAQSKAALTDWLRAKASFVIEGLKEADKDEFCRCELKLQKWYGDLRGKPFAIEAENSILDISGFSKQYNCAFIWQKDGVKKLNLYLIINYFKGGKLRFKKIKPEAFEANRFYTVINKKSGEIVPMEVNFNFDDPNLIILPLAFGKRQGREFIWNDLLSLETGSLKLANGRVIEKTLYNRRTRQDEPALFVALTFERREVLDSSNIKPMNLIGVDRGENIPAVIALTDPEGCPLSRFKDSLGNPTHILRIRESYKEKQRTIQAKKEVEQRRAGGYSRKYASKAKNLADDMVRNTARDLLYYAVTQDAMLIFENLSRGFGRQGKRTFMAERQYTRMEDWLTAKLAYEGLPSKTYLSKTLAQYTSKTCSNCGFTITSADYDRVLEKLKKTATGWMTTINGKELKVEGQITYYNRYKRQNVVKDLSVELDRLSEESVNNDISSWTKGRSGEALSLLKKRFSHRPVQEKFVCLNCGFETHADEQAALNIARSWLFLRSQEYKKYQTNKTTGNTDKRAFVETWQSFYRKKLKEVWKPAV

SEQ ID NO: 38095 - protein, 978 aa, synthetic construct
  REGION 1..978: note = engineered CasX variant
QEIKRINKIRRRLVKDSNTKKAGKTGPMKTLLVRVMTPDLRERLENLRKKPENIPQPISNTSRANLNKLLTDYTEMKKAILHVYWEEFQKDPVGLMSRVAQPASKKIDQNKLKPEMDEKGNLTTAGFACSQCGQPLFVYKLEQVSEKGKAYTNYVGRCNVAEHEKLIKLAQLKPEKDSDEAVTYSLGKFGQRALDFYSIHVTKESTHPVKPLAQIAGNRYASGPVGKALSDACMGTIASFLSKYQDIIIEHQKVVKGNQKRLESLRELAGKENLEYPSVTLPPQPHTKEGVDAYNEVIARVRMWVNLNLWQKLKLSRDDAKPLLRLKGFPSFPLVERQANEVDWWDMVCNVKKLINEKKEDGKVFWQNLAGYKRQEALRPYLSSEEDRKKGKKFARYQLGDLLLHLEKKHGEDWGKVYDEAWERIDKKVEGLSKHIKLEEERRSEDAQSKAALTDWLRAKASFVIEGLKEADKDEFCRCELKLQKWYGDLRGKPFAIEAENSILDISGFSKQYNCAFIWQKDGVKKLNLYLIINYFKGGKLRFKKIKPEAFEANRFYTVINKKSGEIVPMEVNFNFDDPNLIILPLAFGKRQGREFIWNDLLSLETGSLKLANGRVIEKTLYNRRTRQDEPALFVALTFERREVLDSSNIKPMNLIGVDRGENIPAVIALTDPEGCPLSRFKDSLGNPTHILRIRESYKEKQRTIQAKKEVEQRRAGGYSRKYASKAKNLADDMVRNTARDLLYYAVTQDAMLIFENLSRGFGRQGKRTFMAERQYTRMEDWLTAKLAYEGLPSKTYLSKTLAQYTSKTCSNCGFTITSADYDRVLEKLKKTATGWMTTINGKELKVEGQITYYNRYKRQNVVKDLSVELDRLSEESVNNDISSWTKGRSGEALSLLKKRFSHRPVQEKFVCLNCGFETHADEQAALNIARSWLFLRSQEYKKYQTNKTTGNTDKRAFVETWQSFYRKKLKEVWKPAV

SEQ ID NO: 38096 - protein, 977 aa, synthetic construct
  REGION 1..977: note = engineered CasX variant
QEIKRINKIRRRLVKDSNTKKAGKTGPMKTLLVRVMTPDLRERLENLRKKPENIPQPISNTSRANLNKLLTDYTEMKKAILHVYWEEFQKDPVGLMSRVAQPASKKIDQNKLKPEMDEKGNLTTAGFACSQCGQPLFVYKLEQVSEKGKAYTNYVGRCNVAEHEKLILLAQLKPEKDSDEAVTYSLGKFGQRALDFYSIHVTKESTHPVKPLAQIAGNRYASPVGKALSDACMGTIASFLSKYQDIIIEHQKVVKGNQKRLESLRELAGKENLEYPSVTLPPQPHTKEGVDAYNEVIARVRMWVNLNLWQKLKLSRDDAKPLLRLKGFPSFPLVERQANEVDWWDMVCNVKKLINEKKEDGKVFWQNLAGYKRQEALRPYLSSEEDRKKGKKFARYQLGDLLLHLEKKHGEDWGKVYDEAWERIDKKVEGLSKHIKLEEERRSEDAQSKAALTDWLRAKASFVIEGLKEADKDEFCRCELKLQKWYGDLRGKPFAIEAENSILDISGFSKQYNCAFIWQKDGVKKLNLYLIINYFKGGKLRFKKIKPEAFEANRFYTVINKKSGEIVPMEVNFNFDDPNLIILPLAFGKRQGREFIWNDLLSLETGSLKLANGRVIEKTLYNRRTRQDEPALFVALTFERREVLDSSNIKPMNLIGVDRGENIPAVIALTDPEGCPLSRFKDSLGNPTHILRIRESYKEKQRTIQAKKEVEQRRAGGYSRKYASKAKNLADDMVRNTARDLLYYAVTQDAMLIFENLSRGFGRQGKRTFMAERQYTRMEDWLTAKLAYEGLPSKTYLSKTLAQYTSKTCSNCGFTITSADYDRVLEKLKKTATGWMTTINGKELKVEGQITYYNRYKRQNVVKDLSVELDRLSEESVNNDISSWTKGRSGEALSLLKKRFSHRPVQEKFVCLNCGFETHADEQAALNIARSWLFLRSQEYKKYQTNKTTGNTDKRAFVETWQSFYRKKLKEVWKPAV

SEQ ID NO: 38097 - protein, 978 aa, synthetic construct
  REGION 1..978: note = engineered CasX variant
QEIKRINKIRRRLVKDSNTKKAGKTGPMKTLLVRVMTPDLRERLENLRKKPENIPQPISNTSRANLNKLLTDYTEMKKAILHVYWEEFQKDPVGLMSRVAQPASKKIDQNKLKPEMDEKGNLTTAGFACSQCGQPLFVYKLEQVSEKGKAYTNYFGRCNVAEHEKLILLAQLKPEKDSDEAVTYSLGKFGQRALDFYSIHVTKESTHPVKPLAQIAGNRYASYPVGKALSDACMGTIASFLSKYQDIIIEHQKVVKGNQKRLESLRELAGKENLEYPSVTLPPQPHTKEGVDAYNEVIARVRMWVNLNLWQKLKLSRDDAKPLLRLKGFPSFPLVERQANEVDWWDMVCNVKKLINEKKEDGKVFWQNLAGYKRQEALRPYLSSEEDRKKGKKFARYQLGDLLLHLEKKHGEDWGKVYDEAWERIDKKVEGLSKHIKLEEERRSEDAQSKAALTDWLRAKASFVIEGLKEADKDEFCRCELKLQKWYGDLRGKPFAIEAENSILDISGFSKQYNCAFIWQKDGVKKLNLYLIINYFKGGKLRFKKIKPEAFEANRFYTVINKKSGEIVPMEVNFNFDDPNLIILPLAFGKRQGREFIWNDLLSLETGSLKLANGRVIEKTLYNRRTRQDEPALFVALTFERREVLDSSNIKPMNLIGVDRGENIPAVIALTDPEGCPLSRFKDSLGNPTHILRIRESYKEKQRTIQAKKEVEQRRAGGYSRKYASKAKNLADDMVRNTARDLLYYAVTQDAMLIFENLSRGFGRQGKRTFMAERQYTRMEDWLTAKLAYEGLASKTYLSKTLAQYTSKTCSNCGFTITSADYDRVLEKLKKTATGWMTTINGKELKVEGQITYYNRYKRQNVVKDLSVELDRLSEESVNNDISSWTKGRSGEALSLLKKRFSHRPVQEKFVCLNCGFETHADEQAALNIARSWLFLRSQEYKKYQTNKTTGNTDKRAFVETWQSFYRKKLKEVWKPAV

SEQ ID NO: 38098 - protein, 978 aa, synthetic construct
  REGION 1..978: note = engineered CasX variant
QEIKRINKIRRRLVKDSNTKKAGKTGPMKTLLVRVMTPDLRERLENLRKKPENIPQPISNTSRANLNKLLTDYTEMKKAILHVYWEEFQKDPVGLMSRVAQPASKKIDQNKLKPEMDEKGNLTTAGFACSQCGQPLFVYKLEQVSEKGKAYTNYFGRCNVAEHEKLILLAQLKPEKDSDEAVTYSLGKFGQRALDFYSIHVTKESTHPVKPLAQIAGNRYASHPVGKALSDACMGTIASFLSKYQDIIIEHQKVVKGNQKRLESLRELAGKENLEYPSVTLPPQPHTKEGVDAYNEVIARVRMWVNLNLWQKLKLSRDDAKPLLRLKGFPSFPLVERQANEVDWWDMVCNVKKLINEKKEDGKVFWQNLAGYKRQEALRPYLSSEEDRKKGKKFARYQLGDLLLHLEKKHGEDWGKVYDEAWERIDKKVEGLSKHIKLEEERRSEDAQSKAALTDWLRAKASFVIEGLKEADKDEFCRCELKLQKWYGDLRGKPFAIEAENSILDISGFSKQYNCAFIWQKDGVKKLNLYLIINYFKGGKLRFKKIKPEAFEANRFYTVINKKSGEIVPMEVNFNFDDPNLIILPLAFGKRQGREFIWNDLLSLETGSLKLANGRVIEKTLYNRRTRQDEPALFVALTFERREVLDSSNIKPMNLIGVDRGENIPAVIALTDPEGCPLSRFKDSLGNPTHILRIRESYKEKQRTIQAKKEVEQRRAGGYSRKYASKAKNLADDMVRNTARDLLYYAVTQDAMLIFENLSRGFGRQGKRTFMAERQYTRMEDWLTAKLAYEGLASKTYLSKTLAQYTSKTCSNCGFTITSADYDRVLEKLKKTATGWMTTINGKELKVEGQITYYNRYKRQNVVKDLSVELDRLSEESVNNDISSWTKGRSGEALSLLKKRFSHRPVQEKFVCLNCGFETHADEQAALNIARSWLFLRSQEYKKYQTNKTTGNTDKRAFVETWQSFYRKKLKEVWKPAV

SEQ ID NO: 38099 - protein, 978 aa, synthetic construct
  REGION 1..978: note = engineered CasX variant
QEIKRINKIRRRLVKDSNTKKAGKTGPMKTLLVRVMTPDLRERLENLRKKPENIPQPISNTSRANLNKLLTDYTEMKKAILHVYWEEFQKDPVGLMSRVAQPASKKIDQNKLKPEMDEKGNLTTAGFACSQCGQPLFVYKLEQVSEKGKAYTNYFGRCNVAEHEKLILLAQLKPEKDSDEAVTYSLGKFGQRALDFYSIHVTKESTHPVKPLAQIAGNRYASSPVGKALSDACMGTIASFLSKYQDIIIEHQKVVKGNQKRLESLRELAGKENLEYPSVTLPPQPHTKEGVDAYNEVIARVRMWVNLNLWQKLKLSRDDAKPLLRLKGFPSFPLVERQANEVDWWDMVCNVKKLINEKKEDGKVFWQNLAGYKRQEALRPYLSSEEDRKKGKKFARYQLGDLLLHLEKKHGEDWGKVYDEAWERIDKKVEGLSKHIKLEEERRSEDAQSKAALTDWLRAKASFVIEGLKEADKDEFCRCELKLQKWYGDLRGKPFAIEAENSILDISGFSKQYNCAFIWQKDGVKKLNLYLIINYFKGGKLRFKKIKPEAFEANRFYTVINKKSGEIVPMEVNFNFDDPNLIILPLAFGKRQGREFIWNDLLSLETGSLKLANGRVIEKTLYNRRTRQDEPALFVALTFERREVLDSSNIKPMNLIGVDRGENIPAVIALTDPEGCPLSRFKDSLGNPTHILRIRESYKEKQRTIQAKKEVEQRRAGGYSRKYASKAKNLADDMVRNTARDLLYYAVTQDAMLIFENLSRGFGRQGKRTFMAERQYTRMEDWLTAKLAYEGLASKTYLSKTLAQYTSKTCSNCGFTITSADYDRVLEKLKKTATGWMTTINGKELKVEGQITYYNRYKRQNVVKDLSVELDRLSEESVNNDISSWTKGRSGEALSLLKKRFSHRPVQEKFVCLNCGFETHADEQAALNIARSWLFLRSQEYKKYQTNKTTGNTDKRAFVETWQSFYRKKLKEVWKPAV

SEQ ID NO: 38100 - protein, 978 aa, synthetic construct
  REGION 1..978: note = engineered CasX variant
QEIKRINKIRRRLVKDSNTKKAGKTGPMKTLLVRVMTPDLRERLENLRKKPENIPQPISNTSRANLNKLLTDYTEMKKAILHVYWEEFQKDPVGLMSRVAQPASKKIDQNKLKPEMDEKGNLTTAGFACSQCGQPLFVYKLEQVSEKGKAYTNYFGRCNVAEHEKLILLAQLKPEKDSDEAVTYSLGKFGQRALDFYSIHVTKESTHPVKPLAQIAGNRYASTPVGKALSDACMGTIASFLSKYQDIIIEHQKVVKGNQKRLESLRELAGKENLEYPSVTLPPQPHTKEGVDAYNEVIARVRMWVNLNLWQKLKLSRDDAKPLLRLKGFPSFPLVERQANEVDWWDMVCNVKKLINEKKEDGKVFWQNLAGYKRQEALRPYLSSEEDRKKGKKFARYQLGDLLLHLEKKHGEDWGKVYDEAWERIDKKVEGLSKHIKLEEERRSEDAQSKAALTDWLRAKASFVIEGLKEADKDEFCRCELKLQKWYGDLRGKPFAIEAENSILDISGFSKQYNCAFIWQKDGVKKLNLYLIINYFKGGKLRFKKIKPEAFEANRFYTVINKKSGEIVPMEVNFNFDDPNLIILPLAFGKRQGREFIWNDLLSLETGSLKLANGRVIEKTLYNRRTRQDEPALFVALTFERREVLDSSNIKPMNLIGVDRGENIPAVIALTDPEGCPLSRFKDSLGNPTHILRIRESYKEKQRTIQAKKEVEQRRAGGYSRKYASKAKNLADDMVRNTARDLLYYAVTQDAMLIFENLSRGFGRQGKRTFMAERQYTRMEDWLTAKLAYEGLASKTYLSKTLAQYTSKTCSNCGFTITSADYDRVLEKLKKTATGWMTTINGKELKVEGQITYYNRYKRQNVVKDLSVELDRLSEESVNNDISSWTKGRSGEALSLLKKRFSHRPVQEKFVCLNCGFETHADEQAALNIARSWLFLRSQEYKKYQTNKTTGNTDKRAFVETWQSFYRKKLKEVWKPAV

SEQ ID NO: 38101 - protein, 978 aa, synthetic construct
  REGION 1..978: note = engineered CasX variant
QEIKRINKIRRRLVKDSNTKKAGKTGPMKTLLVRVMTPDLRERLENLRKKPENIPQPISNTSRANLNKLLTDYTEMKKAILHVYWEEFQKDPVGLMSRVAQPASKKIDQNKLKPEMDEKGNLTTAGFACSQCGQPLFVYKLEQVSEKGKAYTNYFGRCNVAEHEKLILLAQLKPEKDSDEAVTYSLGKFGQRALDFYSIHVTKESTHPVKPLAQIAGNRYASAPVGKALSDACMGTIASFLSKYQDIIIEHQKVVKGNQKRLESLRELAGKENLEYPSVTLPPQPHTKEGVDAYNEVIARVRMWVNLNLWQKLKLSRDDAKPLLRLKGFPSFPLVERQANEVDWWDMVCNVKKLINEKKEDGKVFWQNLAGYKRQEALRPYLSSEEDRKKGKKFARYQLGDLLLHLEKKHGEDWGKVYDEAWERIDKKVEGLSKHIKLEEERRSEDAQSKAALTDWLRAKASFVIEGLKEADKDEFCRCELKLQKWYGDLRGKPFAIEAENSILDISGFSKQYNCAFIWQKDGVKKLNLYLIINYFKGGKLRFKKIKPEAFEANRFYTVINKKSGEIVPMEVNFNFDDPNLIILPLAFGKRQGREFIWNDLLSLETGSLKLANGRVIEKTLYNRRTRQDEPALFVALTFERREVLDSSNIKPMNLIGVDRGENIPAVIALTDPEGCPLSRFKDSLGNPTHILRIRESYKEKQRTIQAKKEVEQRRAGGYSRKYASKAKNLADDMVRNTARDLLYYAVTQDAMLIFENLSRGFGRQGKRTFMAERQYTRMEDWLTAKLAYEGLASKTYLSKTLAQYTSKTCSNCGFTITSADYDRVLEKLKKTATGWMTTINGKELKVEGQITYYNRYKRQNVVKDLSVELDRLSEESVNNDISSWTKGRSGEALSLLKKRFSHRPVQEKFVCLNCGFETHADEQAALNIARSWLFLRSQEYKKYQTNKTTGNTDKRAFVETWQSFYRKKLKEVWKPAV

SEQ ID NO: 38102 - protein, 978 aa, synthetic construct
  REGION 1..978: note = engineered CasX variant
QEIKRINKIRRRLVKDSNTKKAGKTGPMKTLLVRVMTPDLRERLENLRKKPENIPQPISNTSRANLNKLLTDYTEMKKAILHVYWEEFQKDPVGLMSRVAQPASKKIDQNKLKPEMDEKGNLTTAGFACSQCGQPLFVYKLEQVSEKGKAYTNYFGRCNVAEHEKLILLAQLKPEKDSDEAVTYSLGKFGQRALDFYSIHVTKESTHPVKPLAQIAGNRYASVPVGKALSDACMGTIASFLSKYQDIIIEHQKVVKGNQKRLESLRELAGKENLEYPSVTLPPQPHTKEGVDAYNEVIARVRMWVNLNLWQKLKLSRDDAKPLLRLKGFPSFPLVERQANEVDWWDMVCNVKKLINEKKEDGKVFWQNLAGYKRQEALRPYLSSEEDRKKGKKFARYQLGDLLLHLEKKHGEDWGKVYDEAWERIDKKVEGLSKHIKLEEERRSEDAQSKAALTDWLRAKASFVIEGLKEADKDEFCRCELKLQKWYGDLRGKPFAIEAENSILDISGFSKQYNCAFIWQKDGVKKLNLYLIINYFKGGKLRFKKIKPEAFEANRFYTVINKKSGEIVPMEVNFNFDDPNLIILPLAFGKRQGREFIWNDLLSLETGSLKLANGRVIEKTLYNRRTRQDEPALFVALTFERREVLDSSNIKPMNLIGVDRGENIPAVIALTDPEGCPLSRFKDSLGNPTHILRIRESYKEKQRTIQAKKEVEQRRAGGYSRKYASKAKNLADDMVRNTARDLLYYAVTQDAMLIFENLSRGFGRQGKRTFMAERQYTRMEDWLTAKLAYEGLASKTYLSKTLAQYTSKTCSNCGFTITSADYDRVLEKLKKTATGWMTTINGKELKVEGQITYYNRYKRQNVVKDLSVELDRLSEESVNNDISSWTKGRSGEALSLLKKRFSHRPVQEKFVCLNCGFETHADEQAALNIARSWLFLRSQEYKKYQTNKTTGNTDKRAFVETWQSFYRKKLKEVWKPAV

SEQ ID NO: 38103 - protein, 978 aa, synthetic construct
  REGION 1..978: note = engineered CasX variant
QEIKRINKIRRRLVKDSNTKKAGKTGPMKTLLVRVMTPDLRERLENLRKKPENIPQPISNTSRANLNKLLTDYTEMKKAILHVYWEEFQKDPVGLMSRVAQPASKKIDQNKLKPEMDEKGNLTTAGFACSQCGQPLFVYKLEQVSEKGKAYTNYFGRCNVAEHEKLIKLAQLKPEKDSDEAVTYSLGKFGQRALDFYSIHVTKESTHPVKPLAQIAGNRYASGPVGKALSDACMGTIASFLSKYQDIIIEHQKVVKGNQKRLESLRELAGKENLEYPSVTLPPQPHTKEGVDAYNEVIARVRMWVNLNLWQKLKLSRDDAKPLLRLKGFPSFPLVERQANEVDWWDMVCNVKKLINEKKEDGKVFWQNLAGYKRQEALRPYLSSEEDRKKGKKFARYQLGDLLLHLEKKHGEDWGKVYDEAWERIDKKVEGLSKHIKLEEERRSEDAQSKAALTDWLRAKASFVIEGLKEADKDEFCRCELKLQKWYGDLRGKPFAIEAENSILDISGFSKQYNCAFIWQKDGVKKLNLYLIINYFKGGKLRFKKIKPEAFEANRFYTVINKKSGEIVPMEVNFNFDDPNLIILPLAFGKRQGREFIWNDLLSLETGSLKLANGRVIEKTLYNRRTRQDEPALFVALTFERREVLDSSNIKPMNLIGVDRGENIPAVIALTDPEGCPLSRFKDSLGNPTHILRIRESYKEKQRTIQAKKEVEQRRAGGYSRKYASKAKNLADDMVRNTARDLLYYAVTQDAMLIFENLSRGFGRQGKRTFMAERQYTRMEDWLTAKLAYEGLASKTYLSKTLAQYTSKTCSNCGFTITSADYDRVLEKLKKTATGWMTTINGKELKVEGQITYYNRYKRQNVVKDLSVELDRLSEESVNNDISSWTKGRSGEALSLLKKRFSHRPVQEKFVCLNCGFETHADEQAALNIARSWLFLRSQEYKKYQTNKTTGNTDKRAFVETWQSFYRKKLKEVWKPAV

SEQ ID NO: 38104 - protein, 977 aa, synthetic construct
  REGION 1..977: note = engineered CasX variant
QEIKRINKIRRRLVKDSNTKKAGKTGPMKTLLVRVMTPDLRERLENLRKKPENIPQPISNTSRANLNKLLTDYTEMKKAILHVYWEEFQKDPVGLMSRVAQPASKKIDQNKLKPEMDEKGNLTTAGFACSQCGQPLFVYKLEQVSEKGKAYTNYFGRCNVAEHEKLILLAQLKPEKDSDEAVTYSLGKFGQRALDFYSIHVTKESTHPVKPLAQIAGNRYASPVGKALSDACMGTIASFLSKYQDIIIEHQKVVKGNQKRLESLRELAGKENLEYPSVTLPPQPHTKEGVDAYNEVIARVRMWVNLNLWQKLKLSRDDAKPLLRLKGFPSFPLVERQANEVDWWDMVCNVKKLINEKKEDGKVFWQNLAGYKRQEALRPYLSSEEDRKKGKKFARYQLGDLLLHLEKKHGEDWGKVYDEAWERIDKKVEGLSKHIKLEEERRSEDAQSKAALTDWLRAKASFVIEGLKEADKDEFCRCELKLQKWYGDLRGKPFAIEAENSILDISGFSKQYNCAFIWQKDGVKKLNLYLIINYFKGGKLRFKKIKPEAFEANRFYTVINKKSGEIVPMEVNFNFDDPNLIILPLAFGKRQGREFIWNDLLSLETGSLKLANGRVIEKTLYNRRTRQDEPALFVALTFERREVLDSSNIKPMNLIGVDRGENIPAVIALTDPEGCPLSRFKDSLGNPTHILRIRESYKEKQRTIQAKKEVEQRRAGGYSRKYASKAKNLADDMVRNTARDLLYYAVTQDAMLIFENLSRGFGRQGKRTFMAERQYTRMEDWLTAKLAYEGLASKTYLSKTLAQYTSKTCSNCGFTITSADYDRVLEKLKKTATGWMTTINGKELKVEGQITYYNRYKRQNVVKDLSVELDRLSEESVNNDISSWTKGRSGEALSLLKKRFSHRPVQEKFVCLNCGFETHADEQAALNIARSWLFLRSQEYKKYQTNKTTGNTDKRAFVETWQSFYRKKLKEVWKPAV

SEQ ID NO: 38105 - protein, 978 aa, synthetic construct
  REGION 1..978: note = engineered CasX variant
QEIKRINKIRRRLVKDSNTKKAGKTGPMKTLLVRVMTPDLRERLENLRKKPENIPQPISNTSRANLNKLLTDYTEMKKAILHVYWEEFQKDPVGLMSRVAQPASKKIDQNKLKPEMDEKGNLTTAGFACSQCGQPLFVYKLEQVSEKGKAYTNYFGRCNVAEHEKLILLAQLKPEKDSDEAVTYSLGKFGQRALDFYSIHVTKESTHPVKPLAQIAGNRYASYPVGKALSDACMGTIASFLSKYQDIIIEHQKVVKGNQKRLESLRELAGKENLEYPSVTLPPQPHTKEGVDAYNEVIARVRMWVNLNLWQKLKLSRDDAKPLLRLKGFPSFPLVERQANEVDWWDMVCNVKKLINEKKEDGKVFWQNLAGYKRQEALRPYLSSEEDRKKGKKFARYQLGDLLLHLEKKHGEDWGKVYDEAWERIDKKVEGLSKHIKLEEERRSEDAQSKAALTDWLRAKASFVIEGLKEADKDEFCRCELKLQKWYGDLRGKPFAIEAENSILDISGFSKQYNCAFIWQKDGVKKLNLYLIINYFKGGKLRFKKIKPEAFEANRFYTVINKKSGEIVPMEVNFNFDDPNLIILPLAFGKRQGREFIWNDLLSLETGSLKLANGRVIEKTLYNRRTRQDEPALFVALTFERREVLDSSNIKPMNLIGVDRGENIPAVIALTDPEGCPLSRFKDSLGNPTHILRIRESYKEKQRTIQAKKEVEQRRAGGYSRKYASKAKNLADDMVRNTARDLLYYAVTQDAMLIFENLSRGFGRQGKRTFMAERQYTRMEDWLTAKLAYEGLPSKVYLSKTLAQYTSKTCSNCGFTITSADYDRVLEKLKKTATGWMTTINGKELKVEGQITYYNRYKRQNVVKDLSVELDRLSEESVNNDISSWTKGRSGEALSLLKKRFSHRPVQEKFVCLNCGFETHADEQAALNIARSWLFLRSQEYKKYQTNKTTGNTDKRAFVETWQSFYRKKLKEVWKPAV

SEQ ID NO: 38106 - protein, 978 aa, synthetic construct
  REGION 1..978: note = engineered CasX variant
QEIKRINKIRRRLVKDSNTKKAGKTGPMKTLLVRVMTPDLRERLENLRKKPENIPQPISNTSRANLNKLLTDYTEMKKAILHVYWEEFQKDPVGLMSRVAQPASKKIDQNKLKPEMDEKGNLTTAGFACSQCGQPLFVYKLEQVSEKGKAYTNYFGRCNVAEHEKLILLAQLKPEKDSDEAVTYSLGKFGQRALDFYSIHVTKESTHPVKPLAQIAGNRYASHPVGKALSDACMGTIASFLSKYQDIIIEHQKVVKGNQKRLESLRELAGKENLEYPSVTLPPQPHTKEGVDAYNEVIARVRMWVNLNLWQKLKLSRDDAKPLLRLKGFPSFPLVERQANEVDWWDMVCNVKKLINEKKEDGKVFWQNLAGYKRQEALRPYLSSEEDRKKGKKFARYQLGDLLLHLEKKHGEDWGKVYDEAWERIDKKVEGLSKHIKLEEERRSEDAQSKAALTDWLRAKASFVIEGLKEADKDEFCRCELKLQKWYGDLRGKPFAIEAENSILDISGFSKQYNCAFIWQKDGVKKLNLYLIINYFKGGKLRFKKIKPEAFEANRFYTVINKKSGEIVPMEVNFNFDDPNLIILPLAFGKRQGREFIWNDLLSLETGSLKLANGRVIEKTLYNRRTRQDEPALFVALTFERREVLDSSNIKPMNLIGVDRGENIPAVIALTDPEGCPLSRFKDSLGNPTHILRIRESYKEKQRTIQAKKEVEQRRAGGYSRKYASKAKNLADDMVRNTARDLLYYAVTQDAMLIFENLSRGFGRQGKRTFMAERQYTRMEDWLTAKLAYEGLPSKVYLSKTLAQYTSKTCSNCGFTITSADYDRVLEKLKKTATGWMTTINGKELKVEGQITYYNRYKRQNVVKDLSVELDRLSEESVNNDISSWTKGRSGEALSLLKKRFSHRPVQEKFVCLNCGFETHADEQAALNIARSWLFLRSQEYKKYQTNKTTGNTDKRAFVETWQSFYRKKLKEVWKPAV

SEQ ID NO: 38107 - protein, 978 aa, synthetic construct
  REGION 1..978: note = engineered CasX variant
QEIKRINKIRRRLVKDSNTKKAGKTGPMKTLLVRVMTPDLRERLENLRKKPENIPQPISNTSRANLNKLLTDYTEMKKAILHVYWEEFQKDPVGLMSRVAQPASKKIDQNKLKPEMDEKGNLTTAGFACSQCGQPLFVYKLEQVSEKGKAYTNYFGRCNVAEHEKLILLAQLKPEKDSDEAVTYSLGKFGQRALDFYSIHVTKESTHPVKPLAQIAGNRYASSPVGKALSDACMGTIASFLSKYQDIIIEHQKVVKGNQKRLESLRELAGKENLEYPSVTLPPQPHTKEGVDAYNEVIARVRMWVNLNLWQKLKLSRDDAKPLLRLKGFPSFPLVERQANEVDWWDMVCNVKKLINEKKEDGKVFWQNLAGYKRQEALRPYLSSEEDRKKGKKFARYQLGDLLLHLEKKHGEDWGKVYDEAWERIDKKVEGLSKHIKLEEERRSEDAQSKAALTDWLRAKASFVIEGLKEADKDEFCRCELKLQKWYGDLRGKPFAIEAENSILDISGFSKQYNCAFIWQKDGVKKLNLYLIINYFKGGKLRFKKIKPEAFEANRFYTVINKKSGEIVPMEVNFNFDDPNLIILPLAFGKRQGREFIWNDLLSLETGSLKLANGRVIEKTLYNRRTRQDEPALFVALTFERREVLDSSNIKPMNLIGVDRGENIPAVIALTDPEGCPLSRFKDSLGNPTHILRIRESYKEKQRTIQAKKEVEQRRAGGYSRKYASKAKNLADDMVRNTARDLLYYAVTQDAMLIFENLSRGFGRQGKRTFMAERQYTRMEDWLTAKLAYEGLPSKVYLSKTLAQYTSKTCSNCGFTITSADYDRVLEKLKKTATGWMTTINGKELKVEGQITYYNRYKRQNVVKDLSVELDRLSEESVNNDISSWTKGRSGEALSLLKKRFSHRPVQEKFVCLNCGFETHADEQAALNIARSWLFLRSQEYKKYQTNKTTGNTDKRAFVETWQSFYRKKLKEVWKPAV

SEQ ID NO: 38108 - protein, 978 aa, synthetic construct
  REGION 1..978: note = engineered CasX variant
QEIKRINKIRRRLVKDSNTKKAGKTGPMKTLLVRVMTPDLRERLENLRKKPENIPQPISNTSRANLNKLLTDYTEMKKAILHVYWEEFQKDPVGLMSRVAQPASKKIDQNKLKPEMDEKGNLTTAGFACSQCGQPLFVYKLEQVSEKGKAYTNYFGRCNVAEHEKLILLAQLKPEKDSDEAVTYSLGKFGQRALDFYSIHVTKESTHPVKPLAQIAGNRYASTPVGKALSDACMGTIASFLSKYQDIIIEHQKVVKGNQKRLESLRELAGKENLEYPSVTLPPQPHTKEGVDAYNEVIARVRMWVNLNLWQKLKLSRDDAKPLLRLKGFPSFPLVERQANEVDWWDMVCNVKKLINEKKEDGKVFWQNLAGYKRQEALRPYLSSEEDRKKGKKFARYQLGDLLLHLEKKHGEDWGKVYDEAWERIDKKVEGLSKHIKLEEERRSEDAQSKAALTDWLRAKASFVIEGLKEADKDEFCRCELKLQKWYGDLRGKPFAIEAENSILDISGFSKQYNCAFIWQKDGVKKLNLYLIINYFKGGKLRFKKIKPEAFEANRFYTVINKKSGEIVPMEVNFNFDDPNLIILPLAFGKRQGREFIWNDLLSLETGSLKLANGRVIEKTLYNRRTRQDEPALFVALTFERREVLDSSNIKPMNLIGVDRGENIPAVIALTDPEGCPLSRFKDSLGNPTHILRIRESYKEKQRTIQAKKEVEQRRAGGYSRKYASKAKNLADDMVRNTARDLLYYAVTQDAMLIFENLSRGFGRQGKRTFMAERQYTRMEDWLTAKLAYEGLPSKVYLSKTLAQYTSKTCSNCGFTITSADYDRVLEKLKKTATGWMTTINGKELKVEGQITYYNRYKRQNVVKDLSVELDRLSEESVNNDISSWTKGRSGEALSLLKKRFSHRPVQEKFVCLNCGFETHADEQAALNIARSWLFLRSQEYKKYQTNKTTGNTDKRAFVETWQSFYRKKLKEVWKPAV

SEQ ID NO: 38109 - protein, 978 aa, synthetic construct
  REGION 1..978: note = engineered CasX variant
QEIKRINKIRRRLVKDSNTKKAGKTGPMKTLLVRVMTPDLRERLENLRKKPENIPQPISNTSRANLNKLLTDYTEMKKAILHVYWEEFQKDPVGLMSRVAQPASKKIDQNKLKPEMDEKGNLTTAGFACSQCGQPLFVYKLEQVSEKGKAYTNYFGRCNVAEHEKLILLAQLKPEKDSDEAVTYSLGKFGQRALDFYSIHVTKESTHPVKPLAQIAGNRYASAPVGKALSDACMGTIASFLSKYQDIIIEHQKVVKGNQKRLESLRELAGKENLEYPSVTLPPQPHTKEGVDAYNEVIARVRMWVNLNLWQKLKLSRDDAKPLLRLKGFPSFPLVERQANEVDWWDMVCNVKKLINEKKEDGKVFWQNLAGYKRQEALRPYLSSEEDRKKGKKFARYQLGDLLLHLEKKHGEDWGKVYDEAWERIDKKVEGLSKHIKLEEERRSEDAQSKAALTDWLRAKASFVIEGLKEADKDEFCRCELKLQKWYGDLRGKPFAIEAENSILDISGFSKQYNCAFIWQKDGVKKLNLYLIINYFKGGKLRFKKIKPEAFEANRFYTVINKKSGEIVPMEVNFNFDDPNLIILPLAFGKRQGREFIWNDLLSLETGSLKLANGRVIEKTLYNRRTRQDEPALFVALTFERREVLDSSNIKPMNLIGVDRGENIPAVIALTDPEGCPLSRFKDSLGNPTHILRIRESYKEKQRTIQAKKEVEQRRAGGYSRKYASKAKNLADDMVRNTARDLLYYAVTQDAMLIFENLSRGFGRQGKRTFMAERQYTRMEDWLTAKLAYEGLPSKVYLSKTLAQYTSKTCSNCGFTITSADYDRVLEKLKKTATGWMTTINGKELKVEGQITYYNRYKRQNVVKDLSVELDRLSEESVNNDISSWTKGRSGEALSLLKKRFSHRPVQEKFVCLNCGFETHADEQAALNIARSWLFLRSQEYKKYQTNKTTGNTDKRAFVETWQSFYRKKLKEVWKPAV

SEQ ID NO: 38110 - protein, 978 aa, synthetic construct
  REGION 1..978: note = engineered CasX variant
QEIKRINKIRRRLVKDSNTKKAGKTGPMKTLLVRVMTPDLRERLENLRKKPENIPQPISNTSRANLNKLLTDYTEMKKAILHVYWEEFQKDPVGLMSRVAQPASKKIDQNKLKPEMDEKGNLTTAGFACSQCGQPLFVYKLEQVSEKGKAYTNYFGRCNVAEHEKLILLAQLKPEKDSDEAVTYSLGKFGQRALDFYSIHVTKESTHPVKPLAQIAGNRYASVPVGKALSDACMGTIASFLSKYQDIIIEHQKVVKGNQKRLESLRELAGKENLEYPSVTLPPQPHTKEGVDAYNEVIARVRMWVNLNLWQKLKLSRDDAKPLLRLKGFPSFPLVERQANEVDWWDMVCNVKKLINEKKEDGKVFWQNLAGYKRQEALRPYLSSEEDRKKGKKFARYQLGDLLLHLEKKHGEDWGKVYDEAWERIDKKVEGLSKHIKLEEERRSEDAQSKAALTDWLRAKASFVIEGLKEADKDEFCRCELKLQKWYGDLRGKPFAIEAENSILDISGFSKQYNCAFIWQKDGVKKLNLYLIINYFKGGKLRFKKIKPEAFEANRFYTVINKKSGEIVPMEVNFNFDDPNLIILPLAFGKRQGREFIWNDLLSLETGSLKLANGRVIEKTLYNRRTRQDEPALFVALTFERREVLDSSNIKPMNLIGVDRGENIPAVIALTDPEGCPLSRFKDSLGNPTHILRIRESYKEKQRTIQAKKEVEQRRAGGYSRKYASKAKNLADDMVRNTARDLLYYAVTQDAMLIFENLSRGFGRQGKRTFMAERQYTRMEDWLTAKLAYEGLPSKVYLSKTLAQYTSKTCSNCGFTITSADYDRVLEKLKKTATGWMTTINGKELKVEGQITYYNRYKRQNVVKDLSVELDRLSEESVNNDISSWTKGRSGEALSLLKKRFSHRPVQEKFVCLNCGFETHADEQAALNIARSWLFLRSQEYKKYQTNKTTGNTDKRAFVETWQSFYRKKLKEVWKPAV

SEQ ID NO: 38111 - protein, 978 aa, synthetic construct
  REGION 1..978: note = engineered CasX variant
QEIKRINKIRRRLVKDSNTKKAGKTGPMKTLLVRVMTPDLRERLENLRKKPENIPQPISNTSRANLNKLLTDYTEMKKAILHVYWEEFQKDPVGLMSRVAQPASKKIDQNKLKPEMDEKGNLTTAGFACSQCGQPLFVYKLEQVSEKGKAYTNYFGRCNVAEHEKLIKLAQLKPEKDSDEAVTYSLGKFGQRALDFYSIHVTKESTHPVKPLAQIAGNRYASGPVGKALSDACMGTIASFLSKYQDIIIEHQKVVKGNQKRLESLRELAGKENLEYPSVTLPPQPHTKEGVDAYNEVIARVRMWVNLNLWQKLKLSRDDAKPLLRLKGFPSFPLVERQANEVDWWDMVCNVKKLINEKKEDGKVFWQNLAGYKRQEALRPYLSSEEDRKKGKKFARYQLGDLLLHLEKKHGEDWGKVYDEAWERIDKKVEGLSKHIKLEEERRSEDAQSKAALTDWLRAKASFVIEGLKEADKDEFCRCELKLQKWYGDLRGKPFAIEAENSILDISGFSKQYNCAFIWQKDGVKKLNLYLIINYFKGGKLRFKKIKPEAFEANRFYTVINKKSGEIVPMEVNFNFDDPNLIILPLAFGKRQGREFIWNDLLSLETGSLKLANGRVIEKTLYNRRTRQDEPALFVALTFERREVLDSSNIKPMNLIGVDRGENIPAVIALTDPEGCPLSRFKDSLGNPTHILRIRESYKEKQRTIQAKKEVEQRRAGGYSRKYASKAKNLADDMVRNTARDLLYYAVTQDAMLIFENLSRGFGRQGKRTFMAERQYTRMEDWLTAKLAYEGLPSKVYLSKTLAQYTSKTCSNCGFTITSADYDRVLEKLKKTATGWMTTINGKELKVEGQITYYNRYKRQNVVKDLSVELDRLSEESVNNDISSWTKGRSGEALSLLKKRFSHRPVQEKFVCLNCGFETHADEQAALNIARSWLFLRSQEYKKYQTNKTTGNTDKRAFVETWQSFYRKKLKEVWKPAV

SEQ ID NO: 38112 - protein, 977 aa, synthetic construct
  REGION 1..977: note = engineered CasX variant
QEIKRINKIRRRLVKDSNTKKAGKTGPMKTLLVRVMTPDLRERLENLRKKPENIPQPISNTSRANLNKLLTDYTEMKKAILHVYWEEFQKDPVGLMSRVAQPASKKIDQNKLKPEMDEKGNLTTAGFACSQCGQPLFVYKLEQVSEKGKAYTNYFGRCNVAEHEKLILLAQLKPEKDSDEAVTYSLGKFGQRALDFYSIHVTKESTHPVKPLAQIAGNRYASPVGKALSDACMGTIASFLSKYQDIIIEHQKVVKGNQKRLESLRELAGKENLEYPSVTLPPQPHTKEGVDAYNEVIARVRMWVNLNLWQKLKLSRDDAKPLLRLKGFPSFPLVERQANEVDWWDMVCNVKKLINEKKEDGKVFWQNLAGYKRQEALRPYLSSEEDRKKGKKFARYQLGDLLLHLEKKHGEDWGKVYDEAWERIDKKVEGLSKHIKLEEERRSEDAQSKAALTDWLRAKASFVIEGLKEADKDEFCRCELKLQKWYGDLRGKPFAIEAENSILDISGFSKQYNCAFIWQKDGVKKLNLYLIINYFKGGKLRFKKIKPEAFEANRFYTVINKKSGEIVPMEVNFNFDDPNLIILPLAFGKRQGREFIWNDLLSLETGSLKLANGRVIEKTLYNRRTRQDEPALFVALTFERREVLDSSNIKPMNLIGVDRGENIPAVIALTDPEGCPLSRFKDSLGNPTHILRIRESYKEKQRTIQAKKEVEQRRAGGYSRKYASKAKNLADDMVRNTARDLLYYAVTQDAMLIFENLSRGFGRQGKRTFMAERQYTRMEDWLTAKLAYEGLPSKVYLSKTLAQYTSKTCSNCGFTITSADYDRVLEKLKKTATGWMTTINGKELKVEGQITYYNRYKRQNVVKDLSVELDRLSEESVNNDISSWTKGRSGEALSLLKKRFSHRPVQEKFVCLNCGFETHADEQAALNIARSWLFLRSQEYKKYQTNKTTGNTDKRAFVETWQSFYRKKLKEVWKPAV

SEQ ID NO: 38113 - protein, 979 aa, synthetic construct
  REGION 1..979: note = engineered CasX variant
QEIKRINKIRRRLVKDSNTKKAGKTGPMKTLLVRVMTPDLRERLENLRKKPENIPQPISNTSRANLNKLLTDYTEMKKAILHVYWEEFQKDPVGLMSRVAQPASKKIDQNKLKPEMDEKGNLTTAGFACSQCGQPLFVYKLEQVSEKGKAYTNYFGRCNVAEHEKLILLAQLKPEKDSDEAVTYSLGKFGQRALDFYSIHVTKESTHPVKPLAQIAGNRYASYPVGKALSDACMGTIASFLSKYQDIIIEHQKVVKGNQKRLESLRELAGKENLEYPSVTLPPQPHTKEGVDAYNEVIARVRMWVNLNLWQKLKLSRDDAKPLLRLKGFPSFPLVERQANEVDWWDMVCNVKKLINEKKEDGKVFWQNLAGYKRQEALRPYLSSEEDRKKGKKFARYQLGDLLLHLEKKHGEDWGKVYDEAWERIDKKVEGLSKHIKLEEERRSEDAQSKAALTDWLRAKASFVIEGLKEADKDEFCRCELKLQKWYGDLRGKPFAIEAENSILDISGFSKQYNCAFIWQKDGVKKLNLYLIINYFKGGKLRFKKIKPEAFEANRFYTVINKKSGEIVPMEVNFNFDDPNLIILPLAFGKRQGREFIWNDLLSLETGSLKLANGRVIEKTLYNRRTRQDEPALFVALTFERREVLDSSNIKPMNLIGVDRGENIPAVIALTDPEGCPLSRFKDSLGNPTHILRIRESYKEKQRTIQAKKEVEQRRAGGYSRKYASKAKNLADDMVRNTARDLLYYAVTQDAMLIFENLSRGFGRQGKRTFMAERQYTRMEDWLTAKLAYEGPLPSKTYLSKTLAQYTSKTCSNCGFTITSADYDRVLEKLKKTATGWMTTINGKELKVEGQITYYNRYKRQNVVKDLSVELDRLSEESVNNDISSWTKGRSGEALSLLKKRFSHRPVQEKFVCLNCGFETHADEQAALNIARSWLFLRSQEYKKYQTNKTTGNTDKRAFVETWQSFYRKKLKEVWKPAV

SEQ ID NO: 38114 - protein, 979 aa, synthetic construct
  REGION 1..979: note = engineered CasX variant
QEIKRINKIRRRLVKDSNTKKAGKTGPMKTLLVRVMTPDLRERLENLRKKPENIPQPISNTSRANLNKLLTDYTEMKKAILHVYWEEFQKDPVGLMSRVAQPASKKIDQNKLKPEMDEKGNLTTAGFACSQCGQPLFVYKLEQVSEKGKAYTNYFGRCNVAEHEKLILLAQLKPEKDSDEAVTYSLGKFGQRALDFYSIHVTKESTHPVKPLAQIAGNRYASHPVGKALSDACMGTIASFLSKYQDIIIEHQKVVKGNQKRLESLRELAGKENLEYPSVTLPPQPHTKEGVDAYNEVIARVRMWVNLNLWQKLKLSRDDAKPLLRLKGFPSFPLVERQANEVDWWDMVCNVKKLINEKKEDGKVFWQNLAGYKRQEALRPYLSSEEDRKKGKKFARYQLGDLLLHLEKKHGEDWGKVYDEAWERIDKKVEGLSKHIKLEEERRSEDAQSKAALTDWLRAKASFVIEGLKEADKDEFCRCELKLQKWYGDLRGKPFAIEAENSILDISGFSKQYNCAFIWQKDGVKKLNLYLIINYFKGGKLRFKKIKPEAFEANRFYTVINKKSGEIVPMEVNFNFDDPNLIILPLAFGKRQGREFIWNDLLSLETGSLKLANGRVIEKTLYNRRTRQDEPALFVALTFERREVLDSSNIKPMNLIGVDRGENIPAVIALTDPEGCPLSRFKDSLGNPTHILRIRESYKEKQRTIQAKKEVEQRRAGGYSRKYASKAKNLADDMVRNTARDLLYYAVTQDAMLIFENLSRGFGRQGKRTFMAERQYTRMEDWLTAKLAYEGPLPSKTYLSKTLAQYTSKTCSNCGFTITSADYDRVLEKLKKTATGWMTTINGKELKVEGQITYYNRYKRQNVVKDLSVELDRLSEESVNNDISSWTKGRSGEALSLLKKRFSHRPVQEKFVCLNCGFETHADEQAALNIARSWLFLRSQEYKKYQTNKTTGNTDKRAFVETWQSFYRKKLKEVWKPAV

SEQ ID NO: 38115 - protein, 979 aa, synthetic construct
  REGION 1..979: note = engineered CasX variant
QEIKRINKIRRRLVKDSNTKKAGKTGPMKTLLVRVMTPDLRERLENLRKKPENIPQPISNTSRANLNKLLTDYTEMKKAILHVYWEEFQKDPVGLMSRVAQPASKKIDQNKLKPEMDEKGNLTTAGFACSQCGQPLFVYKLEQVSEKGKAYTNYFGRCNVAEHEKLILLAQLKPEKDSDEAVTYSLGKFGQRALDFYSIHVTKESTHPVKPLAQIAGNRYASSPVGKALSDACMGTIASFLSKYQDIIIEHQKVVKGNQKRLESLRELAGKENLEYPSVTLPPQPHTKEGVDAYNEVIARVRMWVNLNLWQKLKLSRDDAKPLLRLKGFPSFPLVERQANEVDWWDMVCNVKKLINEKKEDGKVFWQNLAGYKRQEALRPYLSSEEDRKKGKKFARYQLGDLLLHLEKKHGEDWGKVYDEAWERIDKKVEGLSKHIKLEEERRSEDAQSKAALTDWLRAKASFVIEGLKEADKDEFCRCELKLQKWYGDLRGKPFAIEAENSILDISGFSKQYNCAFIWQKDGVKKLNLYLIINYFKGGKLRFKKIKPEAFEANRFYTVINKKSGEIVPMEVNFNFDDPNLIILPLAFGKRQGREFIWNDLLSLETGSLKLANGRVIEKTLYNRRTRQDEPALFVALTFERREVLDSSNIKPMNLIGVDRGENIPAVIALTDPEGCPLSRFKDSLGNPTHILRIRESYKEKQRTIQAKKEVEQRRAGGYSRKYASKAKNLADDMVRNTARDLLYYAVTQDAMLIFENLSRGFGRQGKRTFMAERQYTRMEDWLTAKLAYEGPLPSKTYLSKTLAQYTSKTCSNCGFTITSADYDRVLEKLKKTATGWMTTINGKELKVEGQITYYNRYKRQNVVKDLSVELDRLSEESVNNDISSWTKGRSGEALSLLKKRFSHRPVQEKFVCLNCGFETHADEQAALNIARSWLFLRSQEYKKYQTNKTTGNTDKRAFVETWQSFYRKKLKEVWKPAV

SEQ ID NO: 38116 - protein, 979 aa, synthetic construct
  REGION 1..979: note = engineered CasX variant
QEIKRINKIRRRLVKDSNTKKAGKTGPMKTLLVRVMTPDLRERLENLRKKPENIPQPISNTSRANLNKLLTDYTEMKKAILHVYWEEFQKDPVGLMSRVAQPASKKIDQNKLKPEMDEKGNLTTAGFACSQCGQPLFVYKLEQVSEKGKAYTNYFGRCNVAEHEKLILLAQLKPEKDSDEAVTYSLGKFGQRALDFYSIHVTKESTHPVKPLAQIAGNRYASTPVGKALSDACMGTIASFLSKYQDIIIEHQKVVKGNQKRLESLRELAGKENLEYPSVTLPPQPHTKEGVDAYNEVIARVRMWVNLNLWQKLKLSRDDAKPLLRLKGFPSFPLVERQANEVDWWDMVCNVKKLINEKKEDGKVFWQNLAGYKRQEALRPYLSSEEDRKKGKKFARYQLGDLLLHLEKKHGEDWGKVYDEAWERIDKKVEGLSKHIKLEEERRSEDAQSKAALTDWLRAKASFVIEGLKEADKDEFCRCELKLQKWYGDLRGKPFAIEAENSILDISGFSKQYNCAFIWQKDGVKKLNLYLIINYFKGGKLRFKKIKPEAFEANRFYTVINKKSGEIVPMEVNFNFDDPNLIILPLAFGKRQGREFIWNDLLSLETGSLKLANGRVIEKTLYNRRTRQDEPALFVALTFERREVLDSSNIKPMNLIGVDRGENIPAVIALTDPEGCPLSRFKDSLGNPTHILRIRESYKEKQRTIQAKKEVEQRRAGGYSRKYASKAKNLADDMVRNTARDLLYYAVTQDAMLIFENLSRGFGRQGKRTFMAERQYTRMEDWLTAKLAYEGPLPSKTYLSKTLAQYTSKTCSNCGFTITSADYDRVLEKLKKTATGWMTTINGKELKVEGQITYYNRYKRQNVVKDLSVELDRLSEESVNNDISSWTKGRSGEALSLLKKRFSHRPVQEKFVCLNCGFETHADEQAALNIARSWLFLRSQEYKKYQTNKTTGNTDKRAFVETWQSFYRKKLKEVWKPAV

SEQ ID NO: 38117 - protein, 979 aa, synthetic construct
  REGION 1..979: note = engineered CasX variant
QEIKRINKIRRRLVKDSNTKKAGKTGPMKTLLVRVMTPDLRERLENLRKKPENIPQPISNTSRANLNKLLTDYTEMKKAILHVYWEEFQKDPVGLMSRVAQPASKKIDQNKLKPEMDEKGNLTTAGFACSQCGQPLFVYKLEQVSEKGKAYTNYFGRCNVAEHEKLILLAQLKPEKDSDEAVTYSLGKFGQRALDFYSIHVTKESTHPVKPLAQIAGNRYASAPVGKALSDACMGTIASFLSKYQDIIIEHQKVVKGNQKRLESLRELAGKENLEYPSVTLPPQPHTKEGVDAYNEVIARVRMWVNLNLWQKLKLSRDDAKPLLRLKGFPSFPLVERQANEVDWWDMVCNVKKLINEKKEDGKVFWQNLAGYKRQEALRPYLSSEEDRKKGKKFARYQLGDLLLHLEKKHGEDWGKVYDEAWERIDKKVEGLSKHIKLEEERRSEDAQSKAALTDWLRAKASFVIEGLKEADKDEFCRCELKLQKWYGDLRGKPFAIEAENSILDISGFSKQYNCAFIWQKDGVKKLNLYLIINYFKGGKLRFKKIKPEAFEANRFYTVINKKSGEIVPMEVNFNFDDPNLIILPLAFGKRQGREFIWNDLLSLETGSLKLANGRVIEKTLYNRRTRQDEPALFVALTFERREVLDSSNIKPMNLIGVDRGENIPAVIALTDPEGCPLSRFKDSLGNPTHILRIRESYKEKQRTIQAKKEVEQRRAGGYSRKYASKAKNLADDMVRNTARDLLYYAVTQDAMLIFENLSRGFGRQGKRTFMAERQYTRMEDWLTAKLAYEGPLPSKTYLSKTLAQYTSKTCSNCGFTITSADYDRVLEKLKKTATGWMTTINGKELKVEGQITYYNRYKRQNVVKDLSVELDRLSEESVNNDISSWTKGRSGEALSLLKKRFSHRPVQEKFVCLNCGFETHADEQAALNIARSWLFLRSQEYKKYQTNKTTGNTDKRAFVETWQSFYRKKLKEVWKPAV

SEQ ID NO: 38118 - protein, 979 aa, synthetic construct
  REGION 1..979: note = engineered CasX variant
QEIKRINKIRRRLVKDSNTKKAGKTGPMKTLLVRVMTPDLRERLENLRKKPENIPQPISNTSRANLNKLLTDYTEMKKAILHVYWEEFQKDPVGLMSRVAQPASKKIDQNKLKPEMDEKGNLTTAGFACSQCGQPLFVYKLEQVSEKGKAYTNYFGRCNVAEHEKLILLAQLKPEKDSDEAVTYSLGKFGQRALDFYSIHVTKESTHPVKPLAQIAGNRYASVPVGKALSDACMGTIASFLSKYQDIIIEHQKVVKGNQKRLESLRELAGKENLEYPSVTLPPQPHTKEGVDAYNEVIARVRMWVNLNLWQKLKLSRDDAKPLLRLKGFPSFPLVERQANEVDWWDMVCNVKKLINEKKEDGKVFWQNLAGYKRQEALRPYLSSEEDRKKGKKFARYQLGDLLLHLEKKHGEDWGKVYDEAWERIDKKVEGLSKHIKLEEERRSEDAQSKAALTDWLRAKASFVIEGLKEADKDEFCRCELKLQKWYGDLRGKPFAIEAENSILDISGFSKQYNCAFIWQKDGVKKLNLYLIINYFKGGKLRFKKIKPEAFEANRFYTVINKKSGEIVPMEVNFNFDDPNLIILPLAFGKRQGREFIWNDLLSLETGSLKLANGRVIEKTLYNRRTRQDEPALFVALTFERREVLDSSNIKPMNLIGVDRGENIPAVIALTDPEGCPLSRFKDSLGNPTHILRIRESYKEKQRTIQAKKEVEQRRAGGYSRKYASKAKNLADDMVRNTARDLLYYAVTQDAMLIFENLSRGFGRQGKRTFMAERQYTRMEDWLTAKLAYEGPLPSKTYLSKTLAQYTSKTCSNCGFTITSADYDRVLEKLKKTATGWMTTINGKELKVEGQITYYNRYKRQNVVKDLSVELDRLSEESVNNDISSWTKGRSGEALSLLKKRFSHRPVQEKFVCLNCGFETHADEQAALNIARSWLFLRSQEYKKYQTNKTTGNTDKRAFVETWQSFYRKKLKEVWKPAV

SEQ ID NO: 38119 - protein, 979 aa, synthetic construct
  REGION 1..979: note = engineered CasX variant
QEIKRINKIRRRLVKDSNTKKAGKTGPMKTLLVRVMTPDLRERLENLRKKPENIPQPISNTSRANLNKLLTDYTEMKKAILHVYWEEFQKDPVGLMSRVAQPASKKIDQNKLKPEMDEKGNLTTAGFACSQCGQPLFVYKLEQVSEKGKAYTNYFGRCNVAEHEKLIKLAQLKPEKDSDEAVTYSLGKFGQRALDFYSIHVTKESTHPVKPLAQIAGNRYASGPVGKALSDACMGTIASFLSKYQDIIIEHQKVVKGNQKRLESLRELAGKENLEYPSVTLPPQPHTKEGVDAYNEVIARVRMWVNLNLWQKLKLSRDDAKPLLRLKGFPSFPLVERQANEVDWWDMVCNVKKLINEKKEDGKVFWQNLAGYKRQEALRPYLSSEEDRKKGKKFARYQLGDLLLHLEKKHGEDWGKVYDEAWERIDKKVEGLSKHIKLEEERRSEDAQSKAALTDWLRAKASFVIEGLKEADKDEFCRCELKLQKWYGDLRGKPFAIEAENSILDISGFSKQYNCAFIWQKDGVKKLNLYLIINYFKGGKLRFKKIKPEAFEANRFYTVINKKSGEIVPMEVNFNFDDPNLIILPLAFGKRQGREFIWNDLLSLETGSLKLANGRVIEKTLYNRRTRQDEPALFVALTFERREVLDSSNIKPMNLIGVDRGENIPAVIALTDPEGCPLSRFKDSLGNPTHILRIRESYKEKQRTIQAKKEVEQRRAGGYSRKYASKAKNLADDMVRNTARDLLYYAVTQDAMLIFENLSRGFGRQGKRTFMAERQYTRMEDWLTAKLAYEGPLPSKTYLSKTLAQYTSKTCSNCGFTITSADYDRVLEKLKKTATGWMTTINGKELKVEGQITYYNRYKRQNVVKDLSVELDRLSEESVNNDISSWTKGRSGEALSLLKKRFSHRPVQEKFVCLNCGFETHADEQAALNIARSWLFLRSQEYKKYQTNKTTGNTDKRAFVETWQSFYRKKLKEVWKPAV

SEQ ID NO: 38120 - protein, 978 aa, synthetic construct
  REGION 1..978: note = engineered CasX variant
QEIKRINKIRRRLVKDSNTKKAGKTGPMKTLLVRVMTPDLRERLENLRKKPENIPQPISNTSRANLNKLLTDYTEMKKAILHVYWEEFQKDPVGLMSRVAQPASKKIDQNKLKPEMDEKGNLTTAGFACSQCGQPLFVYKLEQVSEKGKAYTNYFGRCNVAEHEKLILLAQLKPEKDSDEAVTYSLGKFGQRALDFYSIHVTKESTHPVKPLAQIAGNRYASPVGKALSDACMGTIASFLSKYQDIIIEHQKVVKGNQKRLESLRELAGKENLEYPSVTLPPQPHTKEGVDAYNEVIARVRMWVNLNLWQKLKLSRDDAKPLLRLKGFPSFPLVERQANEVDWWDMVCNVKKLINEKKEDGKVFWQNLAGYKRQEALRPYLSSEEDRKKGKKFARYQLGDLLLHLEKKHGEDWGKVYDEAWERIDKKVEGLSKHIKLEEERRSEDAQSKAALTDWLRAKASFVIEGLKEADKDEFCRCELKLQKWYGDLRGKPFAIEAENSILDISGFSKQYNCAFIWQKDGVKKLNLYLIINYFKGGKLRFKKIKPEAFEANRFYTVINKKSGEIVPMEVNFNFDDPNLIILPLAFGKRQGREFIWNDLLSLETGSLKLANGRVIEKTLYNRRTRQDEPALFVALTFERREVLDSSNIKPMNLIGVDRGENIPAVIALTDPEGCPLSRFKDSLGNPTHILRIRESYKEKQRTIQAKKEVEQRRAGGYSRKYASKAKNLADDMVRNTARDLLYYAVTQDAMLIFENLSRGFGRQGKRTFMAERQYTRMEDWLTAKLAYEGPLPSKTYLSKTLAQYTSKTCSNCGFTITSADYDRVLEKLKKTATGWMTTINGKELKVEGQITYYNRYKRQNVVKDLSVELDRLSEESVNNDISSWTKGRSGEALSLLKKRFSHRPVQEKFVCLNCGFETHADEQAALNIARSWLFLRSQEYKKYQTNKTTGNTDKRAFVETWQSFYRKKLKEVWKPAV

SEQ ID NO: 38121 - protein, 979 aa, synthetic construct
  REGION 1..979: note = engineered CasX variant
QEIKRINKIRRRLVKDSNTKKAGKTGPMKTLLVRVMTPDLRERLENLRKKPENIPQPISNTSRANLNKLLTDYTEMKKAILHVYWEEFQKDPVGLMSRVAQPASKKIDQNKLKPEMDEKGNLTTAGFACSQCGQPLFVYKLEQVSEKGKAYTNYFGRCNVAEHEKLILLAQLKPEKDSDEAVTYSLGKFGQRALDFYSIHVTKESTHPVKPLAQIAGNRYASYPVGKALSDACMGTIASFLSKYQDIIIEHQKVVKGNQKRLESLRELAGKENLEYPSVTLPPQPHTKEGVDAYNEVIARVRMWVNLNLWQKLKLSRDDAKPLLRLKGFPSFPLVERQANEVDWWDMVCNVKKLINEKKEDGKVFWQNLAGYKRQEALRPYLSSEEDVRKKGKKFARYQLGDLLLHLEKKHGEDWGKVYDEAWERIDKKVEGLSKHIKLEEERRSEDAQSKAALTDWLRAKASFVIEGLKEADKDEFCRCELKLQKWYGDLRGKPFAIEAENSILDISGFSKQYNCAFIWQKDGVKKLNLYLIINYFKGGKLRFKKIKPEAFEANRFYTVINKKSGEIVPMEVNFNFDDPNLIILPLAFGKRQGREFIWNDLLSLETGSLKLANGRVIEKTLYNRRTRQDEPALFVALTFERREVLDSSNIKPMNLIGVDRGENIPAVIALTDPEGCPLSRFKDSLGNPTHILRIRESYKEKQRTIQAKKEVEQRRAGGYSRKYASKAKNLADDMVRNTARDLLYYAVTQDAMLIFENLSRGFGRQGKRTFMAERQYTRMEDWLTAKLAYEGLPSKTYLSKTLAQYTSKTCSNCGFTITSADYDRVLEKLKKTATGWMTTINGKELKVEGQITYYNRYKRQNVVKDLSVELDRLSEESVNNDISSWTKGRSGEALSLLKKRFSHRPVQEKFVCLNCGFETHADEQAALNIARSWLFLRSQEYKKYQTNKTTGNTDKRAFVETWQSFYRKKLKEVWKPAV

SEQ ID NO: 38122 - protein, 979 aa, synthetic construct
  REGION 1..979: note = engineered CasX variant
QEIKRINKIRRRLVKDSNTKKAGKTGPMKTLLVRVMTPDLRERLENLRKKPENIPQPISNTSRANLNKLLTDYTEMKKAILHVYWEEFQKDPVGLMSRVAQPASKKIDQNKLKPEMDEKGNLTTAGFACSQCGQPLFVYKLEQVSEKGKAYTNYFGRCNVAEHEKLILLAQLKPEKDSDEAVTYSLGKFGQRALDFYSIHVTKESTHPVKPLAQIAGNRYASHPVGKALSDACMGTIASFLSKYQDIIIEHQKVVKGNQKRLESLRELAGKENLEYPSVTLPPQPHTKEGVDAYNEVIARVRMWVNLNLWQKLKLSRDDAKPLLRLKGFPSFPLVERQANEVDWWDMVCNVKKLINEKKEDGKVFWQNLAGYKRQEALRPYLSSEEDVRKKGKKFARYQLGDLLLHLEKKHGEDWGKVYDEAWERIDKKVEGLSKHIKLEEERRSEDAQSKAALTDWLRAKASFVIEGLKEADKDEFCRCELKLQKWYGDLRGKPFAIEAENSILDISGFSKQYNCAFIWQKDGVKKLNLYLIINYFKGGKLRFKKIKPEAFEANRFYTVINKKSGEIVPMEVNFNFDDPNLIILPLAFGKRQGREFIWNDLLSLETGSLKLANGRVIEKTLYNRRTRQDEPALFVALTFERREVLDSSNIKPMNLIGVDRGENIPAVIALTDPEGCPLSRFKDSLGNPTHILRIRESYKEKQRTIQAKKEVEQRRAGGYSRKYASKAKNLADDMVRNTARDLLYYAVTQDAMLIFENLSRGFGRQGKRTFMAERQYTRMEDWLTAKLAYEGLPSKTYLSKTLAQYTSKTCSNCGFTITSADYDRVLEKLKKTATGWMTTINGKELKVEGQITYYNRYKRQNVVKDLSVELDRLSEESVNNDISSWTKGRSGEALSLLKKRFSHRPVQEKFVCLNCGFETHADEQAALNIARSWLFLRSQEYKKYQTNKTTGNTDKRAFVETWQSFYRKKLKEVWKPAV

SEQ ID NO: 38123 - protein, 979 aa, synthetic construct
  REGION 1..979: note = engineered CasX variant
QEIKRINKIRRRLVKDSNTKKAGKTGPMKTLLVRVMTPDLRERLENLRKKPENIPQPISNTSRANLNKLLTDYTEMKKAILHVYWEEFQKDPVGLMSRVAQPASKKIDQNKLKPEMDEKGNLTTAGFACSQCGQPLFVYKLEQVSEKGKAYTNYFGRCNVAEHEKLILLAQLKPEKDSDEAVTYSLGKFGQRALDFYSIHVTKESTHPVKPLAQIAGNRYASSPVGKALSDACMGTIASFLSKYQDIIIEHQKVVKGNQKRLESLRELAGKENLEYPSVTLPPQPHTKEGVDAYNEVIARVRMWVNLNLWQKLKLSRDDAKPLLRLKGFPSFPLVERQANEVDWWDMVCNVKKLINEKKEDGKVFWQNLAGYKRQEALRPYLSSEEDVRKKGKKFARYQLGDLLLHLEKKHGEDWGKVYDEAWERIDKKVEGLSKHIKLEEERRSEDAQSKAALTDWLRAKASFVIEGLKEADKDEFCRCELKLQKWYGDLRGKPFAIEAENSILDISGFSKQYNCAFIWQKDGVKKLNLYLIINYFKGGKLRFKKIKPEAFEANRFYTVINKKSGEIVPMEVNFNFDDPNLIILPLAFGKRQGREFIWNDLLSLETGSLKLANGRVIEKTLYNRRTRQDEPALFVALTFERREVLDSSNIKPMNLIGVDRGENIPAVIALTDPEGCPLSRFKDSLGNPTHILRIRESYKEKQRTIQAKKEVEQRRAGGYSRKYASKAKNLADDMVRNTARDLLYYAVTQDAMLIFENLSRGFGRQGKRTFMAERQYTRMEDWLTAKLAYEGLPSKTYLSKTLAQYTSKTCSNCGFTITSADYDRVLEKLKKTATGWMTTINGKELKVEGQITYYNRYKRQNVVKDLSVELDRLSEESVNNDISSWTKGRSGEALSLLKKRFSHRPVQEKFVCLNCGFETHADEQAALNIARSWLFLRSQEYKKYQTNKTTGNTDKRAFVETWQSFYRKKLKEVWKPAV

SEQ ID NO: 38124 - protein, 979 aa, synthetic construct
  REGION 1..979: note = engineered CasX variant
QEIKRINKIRRRLVKDSNTKKAGKTGPMKTLLVRVMTPDLRERLENLRKKPENIPQPISNTSRANLNKLLTDYTEMKKAILHVYWEEFQKDPVGLMSRVAQPASKKIDQNKLKPEMDEKGNLTTAGFACSQCGQPLFVYKLEQVSEKGKAYTNYFGRCNVAEHEKLILLAQLKPEKDSDEAVTYSLGKFGQRALDFYSIHVTKESTHPVKPLAQIAGNRYASTPVGKALSDACMGTIASFLSKYQDIIIEHQKVVKGNQKRLESLRELAGKENLEYPSVTLPPQPHTKEGVDAYNEVIARVRMWVNLNLWQKLKLSRDDAKPLLRLKGFPSFPLVERQANEVDWWDMVCNVKKLINEKKEDGKVFWQNLAGYKRQEALRPYLSSEEDVRKKGKKFARYQLGDLLLHLEKKHGEDWGKVYDEAWERIDKKVEGLSKHIKLEEERRSEDAQSKAALTDWLRAKASFVIEGLKEADKDEFCRCELKLQKWYGDLRGKPFAIEAENSILDISGFSKQYNCAFIWQKDGVKKLNLYLIINYFKGGKLRFKKIKPEAFEANRFYTVINKKSGEIVPMEVNFNFDDPNLIILPLAFGKRQGREFIWNDLLSLETGSLKLANGRVIEKTLYNRRTRQDEPALFVALTFERREVLDSSNIKPMNLIGVDRGENIPAVIALTDPEGCPLSRFKDSLGNPTHILRIRESYKEKQRTIQAKKEVEQRRAGGYSRKYASKAKNLADDMVRNTARDLLYYAVTQDAMLIFENLSRGFGRQGKRTFMAERQYTRMEDWLTAKLAYEGLPSKTYLSKTLAQYTSKTCSNCGFTITSADYDRVLEKLKKTATGWMTTINGKELKVEGQITYYNRYKRQNVVKDLSVELDRLSEESVNNDISSWTKGRSGEALSLLKKRFSHRPVQEKFVCLNCGFETHADEQAALNIARSWLFLRSQEYKKYQTNKTTGNTDKRAFVETWQSFYRKKLKEVWKPAV

SEQ ID NO: 38125 - protein, 979 aa, synthetic construct
  REGION 1..979: note = engineered CasX variant
QEIKRINKIRRRLVKDSNTKKAGKTGPMKTLLVRVMTPDLRERLENLRKKPENIPQPISNTSRANLNKLLTDYTEMKKAILHVYWEEFQKDPVGLMSRVAQPASKKIDQNKLKPEMDEKGNLTTAGFACSQCGQPLFVYKLEQVSEKGKAYTNYFGRCNVAEHEKLILLAQLKPEKDSDEAVTYSLGKFGQRALDFYSIHVTKESTHPVKPLAQIAGNRYASAPVGKALSDACMGTIASFLSKYQDIIIEHQKVVKGNQKRLESLRELAGKENLEYPSVTLPPQPHTKEGVDAYNEVIARVRMWVNLNLWQKLKLSRDDAKPLLRLKGFPSFPLVERQANEVDWWDMVCNVKKLINEKKEDGKVFWQNLAGYKRQEALRPYLSSEEDVRKKGKKFARYQLGDLLLHLEKKHGEDWGKVYDEAWERIDKKVEGLSKHIKLEEERRSEDAQSKAALTDWLRAKASFVIEGLKEADKDEFCRCELKLQKWYGDLRGKPFAIEAENSILDISGFSKQYNCAFIWQKDGVKKLNLYLIINYFKGGKLRFKKIKPEAFEANRFYTVINKKSGEIVPMEVNFNFDDPNLIILPLAFGKRQGREFIWNDLLSLETGSLKLANGRVIEKTLYNRRTRQDEPALFVALTFERREVLDSSNIKPMNLIGVDRGENIPAVIALTDPEGCPLSRFKDSLGNPTHILRIRESYKEKQRTIQAKKEVEQRRAGGYSRKYASKAKNLADDMVRNTARDLLYYAVTQDAMLIFENLSRGFGRQGKRTFMAERQYTRMEDWLTAKLAYEGLPSKTYLSKTLAQYTSKTCSNCGFTITSADYDRVLEKLKKTATGWMTTINGKELKVEGQITYYNRYKRQNVVKDLSVELDRLSEESVNNDISSWTKGRSGEALSLLKKRFSHRPVQEKFVCLNCGFETHADEQAALNIARSWLFLRSQEYKKYQTNKTTGNTDKRAFVETWQSFYRKKLKEVWKPAV

SEQ ID NO: 38126 - protein, 979 aa, synthetic construct
  REGION 1..979: note = engineered CasX variant
QEIKRINKIRRRLVKDSNTKKAGKTGPMKTLLVRVMTPDLRERLENLRKKPENIPQPISNTSRANLNKLLTDYTEMKKAILHVYWEEFQKDPVGLMSRVAQPASKKIDQNKLKPEMDEKGNLTTAGFACSQCGQPLFVYKLEQVSEKGKAYTNYFGRCNVAEHEKLILLAQLKPEKDSDEAVTYSLGKFGQRALDFYSIHVTKESTHPVKPLAQIAGNRYASVPVGKALSDACMGTIASFLSKYQDIIIEHQKVVKGNQKRLESLRELAGKENLEYPSVTLPPQPHTKEGVDAYNEVIARVRMWVNLNLWQKLKLSRDDAKPLLRLKGFPSFPLVERQANEVDWWDMVCNVKKLINEKKEDGKVFWQNLAGYKRQEALRPYLSSEEDVRKKGKKFARYQLGDLLLHLEKKHGEDWGKVYDEAWERIDKKVEGLSKHIKLEEERRSEDAQSKAALTDWLRAKASFVIEGLKEADKDEFCRCELKLQKWYGDLRGKPFAIEAENSILDISGFSKQYNCAFIWQKDGVKKLNLYLIINYFKGGKLRFKKIKPEAFEANRFYTVINKKSGEIVPMEVNFNFDDPNLIILPLAFGKRQGREFIWNDLLSLETGSLKLANGRVIEKTLYNRRTRQDEPALFVALTFERREVLDSSNIKPMNLIGVDRGENIPAVIALTDPEGCPLSRFKDSLGNPTHILRIRESYKEKQRTIQAKKEVEQRRAGGYSRKYASKAKNLADDMVRNTARDLLYYAVTQDAMLIFENLSRGFGRQGKRTFMAERQYTRMEDWLTAKLAYEGLPSKTYLSKTLAQYTSKTCSNCGFTITSADYDRVLEKLKKTATGWMTTINGKELKVEGQITYYNRYKRQNVVKDLSVELDRLSEESVNNDISSWTKGRSGEALSLLKKRFSHRPVQEKFVCLNCGFETHADEQAALNIARSWLFLRSQEYKKYQTNKTTGNTDKRAFVETWQSFYRKKLKEVWKPAV

SEQ ID NO: 38127 - protein, 979 aa, synthetic construct
  REGION 1..979: note = engineered CasX variant
QEIKRINKIRRRLVKDSNTKKAGKTGPMKTLLVRVMTPDLRERLENLRKKPENIPQPISNTSRANLNKLLTDYTEMKKAILHVYWEEFQKDPVGLMSRVAQPASKKIDQNKLKPEMDEKGNLTTAGFACSQCGQPLFVYKLEQVSEKGKAYTNYFGRCNVAEHEKLIKLAQLKPEKDSDEAVTYSLGKFGQRALDFYSIHVTKESTHPVKPLAQIAGNRYASGPVGKALSDACMGTIASFLSKYQDIIIEHQKVVKGNQKRLESLRELAGKENLEYPSVTLPPQPHTKEGVDAYNEVIARVRMWVNLNLWQKLKLSRDDAKPLLRLKGFPSFPLVERQANEVDWWDMVCNVKKLINEKKEDGKVFWQNLAGYKRQEALRPYLSSEEDVRKKGKKFARYQLGDLLLHLEKKHGEDWGKVYDEAWERIDKKVEGLSKHIKLEEERRSEDAQSKAALTDWLRAKASFVIEGLKEADKDEFCRCELKLQKWYGDLRGKPFAIEAENSILDISGFSKQYNCAFIWQKDGVKKLNLYLIINYFKGGKLRFKKIKPEAFEANRFYTVINKKSGEIVPMEVNFNFDDPNLIILPLAFGKRQGREFIWNDLLSLETGSLKLANGRVIEKTLYNRRTRQDEPALFVALTFERREVLDSSNIKPMNLIGVDRGENIPAVIALTDPEGCPLSRFKDSLGNPTHILRIRESYKEKQRTIQAKKEVEQRRAGGYSRKYASKAKNLADDMVRNTARDLLYYAVTQDAMLIFENLSRGFGRQGKRTFMAERQYTRMEDWLTAKLAYEGLPSKTYLSKTLAQYTSKTCSNCGFTITSADYDRVLEKLKKTATGWMTTINGKELKVEGQITYYNRYKRQNVVKDLSVELDRLSEESVNNDISSWTKGRSGEALSLLKKRFSHRPVQEKFVCLNCGFETHADEQAALNIARSWLFLRSQEYKKYQTNKTTGNTDKRAFVETWQSFYRKKLKEVWKPAV

SEQ ID NO: 38128 - protein, 978 aa, synthetic construct
  REGION 1..978: note = engineered CasX variant
QEIKRINKIRRRLVKDSNTKKAGKTGPMKTLLVRVMTPDLRERLENLRKKPENIPQPISNTSRANLNKLLTDYTEMKKAILHVYWEEFQKDPVGLMSRVAQPASKKIDQNKLKPEMDEKGNLTTAGFACSQCGQPLFVYKLEQVSEKGKAYTNYFGRCNVAEHEKLILLAQLKPEKDSDEAVTYSLGKFGQRALDFYSIHVTKESTHPVKPLAQIAGNRYASPVGKALSDACMGTIASFLSKYQDIIIEHQKVVKGNQKRLESLRELAGKENLEYPSVTLPPQPHTKEGVDAYNEVIARVRMWVNLNLWQKLKLSRDDAKPLLRLKGFPSFPLVERQANEVDWWDMVCNVKKLINEKKEDGKVFWQNLAGYKRQEALRPYLSSEEDVRKKGKKFARYQLGDLLLHLEKKHGEDWGKVYDEAWERIDKKVEGLSKHIKLEEERRSEDAQSKAALTDWLRAKASFVIEGLKEADKDEFCRCELKLQKWYGDLRGKPFAIEAENSILDISGFSKQYNCAFIWQKDGVKKLNLYLIINYFKGGKLRFKKIKPEAFEANRFYTVINKKSGEIVPMEVNFNFDDPNLIILPLAFGKRQGREFIWNDLLSLETGSLKLANGRVIEKTLYNRRTRQDEPALFVALTFERREVLDSSNIKPMNLIGVDRGENIPAVIALTDPEGCPLSRFKDSLGNPTHILRIRESYKEKQRTIQAKKEVEQRRAGGYSRKYASKAKNLADDMVRNTARDLLYYAVTQDAMLIFENLSRGFGRQGKRTFMAERQYTRMEDWLTAKLAYEGLPSKTYLSKTLAQYTSKTCSNCGFTITSADYDRVLEKLKKTATGWMTTINGKELKVEGQITYYNRYKRQNVVKDLSVELDRLSEESVNNDISSWTKGRSGEALSLLKKRFSHRPVQEKFVCLNCGFETHADEQAALNIARSWLFLRSQEYKKYQTNKTTGNTDKRAFVETWQSFYRKKLKEVWKPAV

SEQ ID NO: 38129 - protein, 978 aa, synthetic construct
  REGION 1..978: note = engineered CasX variant
QEIKRINKIRRRLVKDSNTKKAGKTGPMKTLLVRVMTPDLRERLENLRKKPENIPQPISNTSRANLNKLLTDYTEMKKAILHVYWEEFQKDPVGLMSRVAQPASKKIDQNKLKPEMDEKGNLTTAGFACSQCGQPLFVYKLEQVSEKGKAYTNYFGRCNVAEHEKLILLAQLKPEKDSDEAVTYSLGKFGQRALDFYSIHVTKESTHPVKPLAQIAGNRYASYPVGKALSDACMGTIASFLSKYQDIIIEHQKVVKGNQKRLESLRELAGKENLEYPSVTLPPQPHTKEGVDAYNEVIARVRMWVNLNLWQKLKLSRDDAKPLLRLKGFPSFPLVERQANEVDWWDMVCNVKKLINEKKEDGKVFWQNLAGYKRQEALRPYLSSEEDRKKGKKFARYQLGDLLLHLEKKHGEDWGKVYDEAWERIDKKVEGLSKHIKLEEERRSEDAQSKAALTDWLRAKASFVIEGLKEADKDEFCRCELKLQKWYGDLRGKPFAIEAENSILDISGFSKQYNCAFIWQKDGVKKLNLYLIINYFKGGKLRFKKIKPEAFEANRFYTVINKKSGEIVPMEVNFNFDDPNLIILPLAFGKRQGREFIWNDLLSLETGSLKLANGRVIEKTLYNRRTRQDEPALFVALTFERREVLDSSNIKPMNLIGVDRGENIPAVIALTDPEGCPLSRFKDSLGNPTHILRIRESYKEKQRTIQAKKEVEQRRAGGYSRKYASKAKNLADDMVRNTARDLLYYAVTQDAMLIFENLSRGFGRQGKRTFMAERQYTRMEDWLTAKLAYEGLPSKTYLSKTLAQYTSKTCSNCGFTITSADYDRMLEKLKKTATGWMTTINGKELKVEGQITYYNRYKRQNVVKDLSVELDRLSEESVNNDISSWTKGRSGEALSLLKKRFSHRPVQEKFVCLNCGFETHADEQAALNIARSWLFLRSQEYKKYQTNKTTGNTDKRAFVETWQSFYRKKLKEVWKPAV

SEQ ID NO: 38130 - protein, 978 aa, synthetic construct
  REGION 1..978: note = engineered CasX variant
QEIKRINKIRRRLVKDSNTKKAGKTGPMKTLLVRVMTPDLRERLENLRKKPENIPQPISNTSRANLNKLLTDYTEMKKAILHVYWEEFQKDPVGLMSRVAQPASKKIDQNKLKPEMDEKGNLTTAGFACSQCGQPLFVYKLEQVSEKGKAYTNYFGRCNVAEHEKLILLAQLKPEKDSDEAVTYSLGKFGQRALDFYSIHVTKESTHPVKPLAQIAGNRYASHPVGKALSDACMGTIASFLSKYQDIIIEHQKVVKGNQKRLESLRELAGKENLEYPSVTLPPQPHTKEGVDAYNEVIARVRMWVNLNLWQKLKLSRDDAKPLLRLKGFPSFPLVERQANEVDWWDMVCNVKKLINEKKEDGKVFWQNLAGYKRQEALRPYLSSEEDRKKGKKFARYQLGDLLLHLEKKHGEDWGKVYDEAWERIDKKVEGLSKHIKLEEERRSEDAQSKAALTDWLRAKASFVIEGLKEADKDEFCRCELKLQKWYGDLRGKPFAIEAENSILDISGFSKQYNCAFIWQKDGVKKLNLYLIINYFKGGKLRFKKIKPEAFEANRFYTVINKKSGEIVPMEVNFNFDDPNLIILPLAFGKRQGREFIWNDLLSLETGSLKLANGRVIEKTLYNRRTRQDEPALFVALTFERREVLDSSNIKPMNLIGVDRGENIPAVIALTDPEGCPLSRFKDSLGNPTHILRIRESYKEKQRTIQAKKEVEQRRAGGYSRKYASKAKNLADDMVRNTARDLLYYAVTQDAMLIFENLSRGFGRQGKRTFMAERQYTRMEDWLTAKLAYEGLPSKTYLSKTLAQYTSKTCSNCGFTITSADYDRMLEKLKKTATGWMTTINGKELKVEGQITYYNRYKRQNVVKDLSVELDRLSEESVNNDISSWTKGRSGEALSLLKKRFSHRPVQEKFVCLNCGFETHADEQAALNIARSWLFLRSQEYKKYQTNKTTGNTDKRAFVETWQSFYRKKLKEVWKPAV

SEQ ID NO: 38131 - protein, 978 aa, synthetic construct
  REGION 1..978: note = engineered CasX variant
QEIKRINKIRRRLVKDSNTKKAGKTGPMKTLLVRVMTPDLRERLENLRKKPENIPQPISNTSRANLNKLLTDYTEMKKAILHVYWEEFQKDPVGLMSRVAQPASKKIDQNKLKPEMDEKGNLTTAGFACSQCGQPLFVYKLEQVSEKGKAYTNYFGRCNVAEHEKLILLAQLKPEKDSDEAVTYSLGKFGQRALDFYSIHVTKESTHPVKPLAQIAGNRYASSPVGKALSDACMGTIASFLSKYQDIIIEHQKVVKGNQKRLESLRELAGKENLEYPSVTLPPQPHTKEGVDAYNEVIARVRMWVNLNLWQKLKLSRDDAKPLLRLKGFPSFPLVERQANEVDWWDMVCNVKKLINEKKEDGKVFWQNLAGYKRQEALRPYLSSEEDRKKGKKFARYQLGDLLLHLEKKHGEDWGKVYDEAWERIDKKVEGLSKHIKLEEERRSEDAQSKAALTDWLRAKASFVIEGLKEADKDEFCRCELKLQKWYGDLRGKPFAIEAENSILDISGFSKQYNCAFIWQKDGVKKLNLYLIINYFKGGKLRFKKIKPEAFEANRFYTVINKKSGEIVPMEVNFNFDDPNLIILPLAFGKRQGREFIWNDLLSLETGSLKLANGRVIEKTLYNRRTRQDEPALFVALTFERREVLDSSNIKPMNLIGVDRGENIPAVIALTDPEGCPLSRFKDSLGNPTHILRIRESYKEKQRTIQAKKEVEQRRAGGYSRKYASKAKNLADDMVRNTARDLLYYAVTQDAMLIFENLSRGFGRQGKRTFMAERQYTRMEDWLTAKLAYEGLPSKTYLSKTLAQYTSKTCSNCGFTITSADYDRMLEKLKKTATGWMTTINGKELKVEGQITYYNRYKRQNVVKDLSVELDRLSEESVNNDISSWTKGRSGEALSLLKKRFSHRPVQEKFVCLNCGFETHADEQAALNIARSWLFLRSQEYKKYQTNKTTGNTDKRAFVETWQSFYRKKLKEVWKPAV

SEQ ID NO: 38132 - protein, 978 aa, synthetic construct
  REGION 1..978: note = engineered CasX variant
QEIKRINKIRRRLVKDSNTKKAGKTGPMKTLLVRVMTPDLRERLENLRKKPENIPQPISNTSRANLNKLLTDYTEMKKAILHVYWEEFQKDPVGLMSRVAQPASKKIDQNKLKPEMDEKGNLTTAGFACSQCGQPLFVYKLEQVSEKGKAYTNYFGRCNVAEHEKLILLAQLKPEKDSDEAVTYSLGKFGQRALDFYSIHVTKESTHPVKPLAQIAGNRYASTPVGKALSDACMGTIASFLSKYQDIIIEHQKVVKGNQKRLESLRELAGKENLEYPSVTLPPQPHTKEGVDAYNEVIARVRMWVNLNLWQKLKLSRDDAKPLLRLKGFPSFPLVERQANEVDWWDMVCNVKKLINEKKEDGKVFWQNLAGYKRQEALRPYLSSEEDRKKGKKFARYQLGDLLLHLEKKHGEDWGKVYDEAWERIDKKVEGLSKHIKLEEERRSEDAQSKAALTDWLRAKASFVIEGLKEADKDEFCRCELKLQKWYGDLRGKPFAIEAENSILDISGFSKQYNCAFIWQKDGVKKLNLYLIINYFKGGKLRFKKIKPEAFEANRFYTVINKKSGEIVPMEVNFNFDDPNLIILPLAFGKRQGREFIWNDLLSLETGSLKLANGRVIEKTLYNRRTRQDEPALFVALTFERREVLDSSNIKPMNLIGVDRGENIPAVIALTDPEGCPLSRFKDSLGNPTHILRIRESYKEKQRTIQAKKEVEQRRAGGYSRKYASKAKNLADDMVRNTARDLLYYAVTQDAMLIFENLSRGFGRQGKRTFMAERQYTRMEDWLTAKLAYEGLPSKTYLSKTLAQYTSKTCSNCGFTITSADYDRMLEKLKKTATGWMTTINGKELKVEGQITYYNRYKRQNVVKDLSVELDRLSEESVNNDISSWTKGRSGEALSLLKKRFSHRPVQEKFVCLNCGFETHADEQAALNIARSWLFLRSQEYKKYQTNKTTGNTDKRAFVETWQSFYRKKLKEVWKPAV

SEQ ID NO: 38133 - protein, 978 aa, synthetic construct
  REGION 1..978: note = engineered CasX variant
QEIKRINKIRRRLVKDSNTKKAGKTGPMKTLLVRVMTPDLRERLENLRKKPENIPQPISNTSRANLNKLLTDYTEMKKAILHVYWEEFQKDPVGLMSRVAQPASKKIDQNKLKPEMDEKGNLTTAGFACSQCGQPLFVYKLEQVSEKGKAYTNYFGRCNVAEHEKLILLAQLKPEKDSDEAVTYSLGKFGQRALDFYSIHVTKESTHPVKPLAQIAGNRYASAPVGKALSDACMGTIASFLSKYQDIIIEHQKVVKGNQKRLESLRELAGKENLEYPSVTLPPQPHTKEGVDAYNEVIARVRMWVNLNLWQKLKLSRDDAKPLLRLKGFPSFPLVERQANEVDWWDMVCNVKKLINEKKEDGKVFWQNLAGYKRQEALRPYLSSEEDRKKGKKFARYQLGDLLLHLEKKHGEDWGKVYDEAWERIDKKVEGLSKHIKLEEERRSEDAQSKAALTDWLRAKASFVIEGLKEADKDEFCRCELKLQKWYGDLRGKPFAIEAENSILDISGFSKQYNCAFIWQKDGVKKLNLYLIINYFKGGKLRFKKIKPEAFEANRFYTVINKKSGEIVPMEVNFNFDDPNLIILPLAFGKRQGREFIWNDLLSLETGSLKLANGRVIEKTLYNRRTRQDEPALFVALTFERREVLDSSNIKPMNLIGVDRGENIPAVIALTDPEGCPLSRFKDSLGNPTHILRIRESYKEKQRTIQAKKEVEQRRAGGYSRKYASKAKNLADDMVRNTARDLLYYAVTQDAMLIFENLSRGFGRQGKRTFMAERQYTRMEDWLTAKLAYEGLPSKTYLSKTLAQYTSKTCSNCGFTITSADYDRMLEKLKKTATGWMTTINGKELKVEGQITYYNRYKRQNVVKDLSVELDRLSEESVNNDISSWTKGRSGEALSLLKKRFSHRPVQEKFVCLNCGFETHADEQAALNIARSWLFLRSQEYKKYQTNKTTGNTDKRAFVETWQSFYRKKLKEVWKPAV

SEQ ID NO: 38134 - protein, 978 aa, synthetic construct
  REGION 1..978: note = engineered CasX variant
QEIKRINKIRRRLVKDSNTKKAGKTGPMKTLLVRVMTPDLRERLENLRKKPENIPQPISNTSRANLNKLLTDYTEMKKAILHVYWEEFQKDPVGLMSRVAQPASKKIDQNKLKPEMDEKGNLTTAGFACSQCGQPLFVYKLEQVSEKGKAYTNYFGRCNVAEHEKLILLAQLKPEKDSDEAVTYSLGKFGQRALDFYSIHVTKESTHPVKPLAQIAGNRYASVPVGKALSDACMGTIASFLSKYQDIIIEHQKVVKGNQKRLESLRELAGKENLEYPSVTLPPQPHTKEGVDAYNEVIARVRMWVNLNLWQKLKLSRDDAKPLLRLKGFPSFPLVERQANEVDWWDMVCNVKKLINEKKEDGKVFWQNLAGYKRQEALRPYLSSEEDRKKGKKFARYQLGDLLLHLEKKHGEDWGKVYDEAWERIDKKVEGLSKHIKLEEERRSEDAQSKAALTDWLRAKASFVIEGLKEADKDEFCRCELKLQKWYGDLRGKPFAIEAENSILDISGFSKQYNCAFIWQKDGVKKLNLYLIINYFKGGKLRFKKIKPEAFEANRFYTVINKKSGEIVPMEVNFNFDDPNLIILPLAFGKRQGREFIWNDLLSLETGSLKLANGRVIEKTLYNRRTRQDEPALFVALTFERREVLDSSNIKPMNLIGVDRGENIPAVIALTDPEGCPLSRFKDSLGNPTHILRIRESYKEKQRTIQAKKEVEQRRAGGYSRKYASKAKNLADDMVRNTARDLLYYAVTQDAMLIFENLSRGFGRQGKRTFMAERQYTRMEDWLTAKLAYEGLPSKTYLSKTLAQYTSKTCSNCGFTITSADYDRMLEKLKKTATGWMTTINGKELKVEGQITYYNRYKRQNVVKDLSVELDRLSEESVNNDISSWTKGRSGEALSLLKKRFSHRPVQEKFVCLNCGFETHADEQAALNIARSWLFLRSQEYKKYQTNKTTGNTDKRAFVETWQSFYRKKLKEVWKPAV

SEQ ID NO: 38135 - protein, 978 aa, synthetic construct
  REGION 1..978: note = engineered CasX variant
QEIKRINKIRRRLVKDSNTKKAGKTGPMKTLLVRVMTPDLRERLENLRKKPENIPQPISNTSRANLNKLLTDYTEMKKAILHVYWEEFQKDPVGLMSRVAQPASKKIDQNKLKPEMDEKGNLTTAGFACSQCGQPLFVYKLEQVSEKGKAYTNYFGRCNVAEHEKLIKLAQLKPEKDSDEAVTYSLGKFGQRALDFYSIHVTKESTHPVKPLAQIAGNRYASGPVGKALSDACMGTIASFLSKYQDIIIEHQKVVKGNQKRLESLRELAGKENLEYPSVTLPPQPHTKEGVDAYNEVIARVRMWVNLNLWQKLKLSRDDAKPLLRLKGFPSFPLVERQANEVDWWDMVCNVKKLINEKKEDGKVFWQNLAGYKRQEALRPYLSSEEDRKKGKKFARYQLGDLLLHLEKKHGEDWGKVYDEAWERIDKKVEGLSKHIKLEEERRSEDAQSKAALTDWLRAKASFVIEGLKEADKDEFCRCELKLQKWYGDLRGKPFAIEAENSILDISGFSKQYNCAFIWQKDGVKKLNLYLIINYFKGGKLRFKKIKPEAFEANRFYTVINKKSGEIVPMEVNFNFDDPNLIILPLAFGKRQGREFIWNDLLSLETGSLKLANGRVIEKTLYNRRTRQDEPALFVALTFERREVLDSSNIKPMNLIGVDRGENIPAVIALTDPEGCPLSRFKDSLGNPTHILRIRESYKEKQRTIQAKKEVEQRRAGGYSRKYASKAKNLADDMVRNTARDLLYYAVTQDAMLIFENLSRGFGRQGKRTFMAERQYTRMEDWLTAKLAYEGLPSKTYLSKTLAQYTSKTCSNCGFTITSADYDRMLEKLKKTATGWMTTINGKELKVEGQITYYNRYKRQNVVKDLSVELDRLSEESVNNDISSWTKGRSGEALSLLKKRFSHRPVQEKFVCLNCGFETHADEQAALNIARSWLFLRSQEYKKYQTNKTTGNTDKRAFVETWQSFYRKKLKEVWKPAV

SEQ ID NO: 38136 - protein, 977 aa, synthetic construct
  REGION 1..977: note = engineered CasX variant
QEIKRINKIRRRLVKDSNTKKAGKTGPMKTLLVRVMTPDLRERLENLRKKPENIPQPISNTSRANLNKLLTDYTEMKKAILHVYWEEFQKDPVGLMSRVAQPASKKIDQNKLKPEMDEKGNLTTAGFACSQCGQPLFVYKLEQVSEKGKAYTNYFGRCNVAEHEKLILLAQLKPEKDSDEAVTYSLGKFGQRALDFYSIHVTKESTHPVKPLAQIAGNRYASPVGKALSDACMGTIASFLSKYQDIIIEHQKVVKGNQKRLESLRELAGKENLEYPSVTLPPQPHTKEGVDAYNEVIARVRMWVNLNLWQKLKLSRDDAKPLLRLKGFPSFPLVERQANEVDWWDMVCNVKKLINEKKEDGKVFWQNLAGYKRQEALRPYLSSEEDRKKGKKFARYQLGDLLLHLEKKHGEDWGKVYDEAWERIDKKVEGLSKHIKLEEERRSEDAQSKAALTDWLRAKASFVIEGLKEADKDEFCRCELKLQKWYGDLRGKPFAIEAENSILDISGFSKQYNCAFIWQKDGVKKLNLYLIINYFKGGKLRFKKIKPEAFEANRFYTVINKKSGEIVPMEVNFNFDDPNLIILPLAFGKRQGREFIWNDLLSLETGSLKLANGRVIEKTLYNRRTRQDEPALFVALTFERREVLDSSNIKPMNLIGVDRGENIPAVIALTDPEGCPLSRFKDSLGNPTHILRIRESYKEKQRTIQAKKEVEQRRAGGYSRKYASKAKNLADDMVRNTARDLLYYAVTQDAMLIFENLSRGFGRQGKRTFMAERQYTRMEDWLTAKLAYEGLPSKTYLSKTLAQYTSKTCSNCGFTITSADYDRMLEKLKKTATGWMTTINGKELKVEGQITYYNRYKRQNVVKDLSVELDRLSEESVNNDISSWTKGRSGEALSLLKKRFSHRPVQEKFVCLNCGFETHADEQAALNIARSWLFLRSQEYKKYQTNKTTGNTDKRAFVETWQSFYRKKLKEVWKPAV

SEQ ID NO: 38137 - protein, 978 aa, synthetic construct
  REGION 1..978: note = engineered CasX variant
QEIKRINKIRRRLVKDSNTKKAGKTGPMKTLLVRVMTPDLRERLENLRKKPENIPQPISNTSRANLNKLLTDYTEMKKAILHVYWEEFQKDPVGLMSRVAQPASKKIDQNKLKPEMDEKGNLTTAGFACSQCGQPLFVYKLEQVSEKGKAYTNYFGRCNVAEHEKLILLAQLKPEKDSDEAVTYSLGKFGQRALDFYSIHVTKESTHPVKPLAQIAGNRYASYPVGKALSDACMGTIASFLSKYQDIIIEHQKVVKGNQKRLESLRELAGKENLEYPSVTLPPQPHTKEGVDAYNEVIARVRMWVNLNLWQKLKLSRDDAKPLLRLKGFPSFPLVERQANEVDWWDMVCNVKKLINEKKEDGKVFWQNLAGYKRQEALRPYLSSEEDRKKGKKFARYQLGDLLLHLEKKHGEDWGKVYDEAWERIDKKVEGLSKHIKLEEERRSEDAQSKAALTDWLRAKASFVIEGLKEADKDEFCRCELKLQKWYGDLRGKPFAIEAENSILDISGFSKQYNCAFIWQKDGVKKLNLYLIINYFKGGKLRFKKIKPEAFEANRFYTVINKKSGEIVPMEVNFNFDDPNLIILPLAFGKRQGREFIWNDLLSLETGSLKLANGRVIEKTLYNRRTRQDEPALFVALTFERREVLDSSNIKPMNLIGVDRGENIPAVIALTDPEGCPLSRFKDSLGNPTHILRIRESYKEKQRTIQAKKEVEQRRAGGYSRKYASKAKNLADDMVRNTARDLLYYAVTQDAMLIFENLSRGFGRQGKRTFMAERQYTRMEDWLTAKLAYEGLPSKTYLSKTLAQYTSKTCSNCGFTITSADYDRVLEKLKKTATGWMTTINGKELKVEGQITYYNRYKRQNVVKDLSVELDRLSEESVNNDISSWTKGRQGEALSLLKKRFSHRPVQEKFVCLNCGFETHADEQAALNIARSWLFLRSQEYKKYQTNKTTGNTDKRAFVETWQSFYRKKLKEVWKPAV

SEQ ID NO: 38138 - protein, 978 aa, synthetic construct
  REGION 1..978: note = engineered CasX variant
QEIKRINKIRRRLVKDSNTKKAGKTGPMKTLLVRVMTPDLRERLENLRKKPENIPQPISNTSRANLNKLLTDYTEMKKAILHVYWEEFQKDPVGLMSRVAQPASKKIDQNKLKPEMDEKGNLTTAGFACSQCGQPLFVYKLEQVSEKGKAYTNYFGRCNVAEHEKLILLAQLKPEKDSDEAVTYSLGKFGQRALDFYSIHVTKESTHPVKPLAQIAGNRYASHPVGKALSDACMGTIASFLSKYQDIIIEHQKVVKGNQKRLESLRELAGKENLEYPSVTLPPQPHTKEGVDAYNEVIARVRMWVNLNLWQKLKLSRDDAKPLLRLKGFPSFPLVERQANEVDWWDMVCNVKKLINEKKEDGKVFWQNLAGYKRQEALRPYLSSEEDRKKGKKFARYQLGDLLLHLEKKHGEDWGKVYDEAWERIDKKVEGLSKHIKLEEERRSEDAQSKAALTDWLRAKASFVIEGLKEADKDEFCRCELKLQKWYGDLRGKPFAIEAENSILDISGFSKQYNCAFIWQKDGVKKLNLYLIINYFKGGKLRFKKIKPEAFEANRFYTVINKKSGEIVPMEVNFNFDDPNLIILPLAFGKRQGREFIWNDLLSLETGSLKLANGRVIEKTLYNRRTRQDEPALFVALTFERREVLDSSNIKPMNLIGVDRGENIPAVIALTDPEGCPLSRFKDSLGNPTHILRIRESYKEKQRTIQAKKEVEQRRAGGYSRKYASKAKNLADDMVRNTARDLLYYAVTQDAMLIFENLSRGFGRQGKRTFMAERQYTRMEDWLTAKLAYEGLPSKTYLSKTLAQYTSKTCSNCGFTITSADYDRVLEKLKKTATGWMTTINGKELKVEGQITYYNRYKRQNVVKDLSVELDRLSEESVNNDISSWTKGRQGEALSLLKKRFSHRPVQEKFVCLNCGFETHADEQAALNIARSWLFLRSQEYKKYQTNKTTGNTDKRAFVETWQSFYRKKLKEVWKPAV

SEQ ID NO: 38139 - protein, 978 aa, synthetic construct
  REGION 1..978: note = engineered CasX variant
QEIKRINKIRRRLVKDSNTKKAGKTGPMKTLLVRVMTPDLRERLENLRKKPENIPQPISNTSRANLNKLLTDYTEMKKAILHVYWEEFQKDPVGLMSRVAQPASKKIDQNKLKPEMDEKGNLTTAGFACSQCGQPLFVYKLEQVSEKGKAYTNYFGRCNVAEHEKLILLAQLKPEKDSDEAVTYSLGKFGQRALDFYSIHVTKESTHPVKPLAQIAGNRYASSPVGKALSDACMGTIASFLSKYQDIIIEHQKVVKGNQKRLESLRELAGKENLEYPSVTLPPQPHTKEGVDAYNEVIARVRMWVNLNLWQKLKLSRDDAKPLLRLKGFPSFPLVERQANEVDWWDMVCNVKKLINEKKEDGKVFWQNLAGYKRQEALRPYLSSEEDRKKGKKFARYQLGDLLLHLEKKHGEDWGKVYDEAWERIDKKVEGLSKHIKLEEERRSEDAQSKAALTDWLRAKASFVIEGLKEADKDEFCRCELKLQKWYGDLRGKPFAIEAENSILDISGFSKQYNCAFIWQKDGVKKLNLYLIINYFKGGKLRFKKIKPEAFEANRFYTVINKKSGEIVPMEVNFNFDDPNLIILPLAFGKRQGREFIWNDLLSLETGSLKLANGRVIEKTLYNRRTRQDEPALFVALTFERREVLDSSNIKPMNLIGVDRGENIPAVIALTDPEGCPLSRFKDSLGNPTHILRIRESYKEKQRTIQAKKEVEQRRAGGYSRKYASKAKNLADDMVRNTARDLLYYAVTQDAMLIFENLSRGFGRQGKRTFMAERQYTRMEDWLTAKLAYEGLPSKTYLSKTLAQYTSKTCSNCGFTITSADYDRVLEKLKKTATGWMTTINGKELKVEGQITYYNRYKRQNVVKDLSVELDRLSEESVNNDISSWTKGRQGEALSLLKKRFSHRPVQEKFVCLNCGFETHADEQAALNIARSWLFLRSQEYKKYQTNKTTGNTDKRAFVETWQSFYRKKLKEVWKPAV

SEQ ID NO: 38140 - protein, 978 aa, synthetic construct
  REGION 1..978: note = engineered CasX variant
QEIKRINKIRRRLVKDSNTKKAGKTGPMKTLLVRVMTPDLRERLENLRKKPENIPQPISNTSRANLNKLLTDYTEMKKAILHVYWEEFQKDPVGLMSRVAQPASKKIDQNKLKPEMDEKGNLTTAGFACSQCGQPLFVYKLEQVSEKGKAYTNYFGRCNVAEHEKLILLAQLKPEKDSDEAVTYSLGKFGQRALDFYSIHVTKESTHPVKPLAQIAGNRYASTPVGKALSDACMGTIASFLSKYQDIIIEHQKVVKGNQKRLESLRELAGKENLEYPSVTLPPQPHTKEGVDAYNEVIARVRMWVNLNLWQKLKLSRDDAKPLLRLKGFPSFPLVERQANEVDWWDMVCNVKKLINEKKEDGKVFWQNLAGYKRQEALRPYLSSEEDRKKGKKFARYQLGDLLLHLEKKHGEDWGKVYDEAWERIDKKVEGLSKHIKLEEERRSEDAQSKAALTDWLRAKASFVIEGLKEADKDEFCRCELKLQKWYGDLRGKPFAIEAENSILDISGFSKQYNCAFIWQKDGVKKLNLYLIINYFKGGKLRFKKIKPEAFEANRFYTVINKKSGEIVPMEVNFNFDDPNLIILPLAFGKRQGREFIWNDLLSLETGSLKLANGRVIEKTLYNRRTRQDEPALFVALTFERREVLDSSNIKPMNLIGVDRGENIPAVIALTDPEGCPLSRFKDSLGNPTHILRIRESYKEKQRTIQAKKEVEQRRAGGYSRKYASKAKNLADDMVRNTARDLLYYAVTQDAMLIFENLSRGFGRQGKRTFMAERQYTRMEDWLTAKLAYEGLPSKTYLSKTLAQYTSKTCSNCGFTITSADYDRVLEKLKKTATGWMTTINGKELKVEGQITYYNRYKRQNVVKDLSVELDRLSEESVNNDISSWTKGRQGEALSLLKKRFSHRPVQEKFVCLNCGFETHADEQAALNIARSWLFLRSQEYKKYQTNKTTGNTDKRAFVETWQSFYRKKLKEVWKPAV

SEQ ID NO: 38141 - protein, 978 aa, synthetic construct
  REGION 1..978: note = engineered CasX variant
QEIKRINKIRRRLVKDSNTKKAGKTGPMKTLLVRVMTPDLRERLENLRKKPENIPQPISNTSRANLNKLLTDYTEMKKAILHVYWEEFQKDPVGLMSRVAQPASKKIDQNKLKPEMDEKGNLTTAGFACSQCGQPLFVYKLEQVSEKGKAYTNYFGRCNVAEHEKLILLAQLKPEKDSDEAVTYSLGKFGQRALDFYSIHVTKESTHPVKPLAQIAGNRYASAPVGKALSDACMGTIASFLSKYQDIIIEHQKVVKGNQKRLESLRELAGKENLEYPSVTLPPQPHTKEGVDAYNEVIARVRMWVNLNLWQKLKLSRDDAKPLLRLKGFPSFPLVERQANEVDWWDMVCNVKKLINEKKEDGKVFWQNLAGYKRQEALRPYLSSEEDRKKGKKFARYQLGDLLLHLEKKHGEDWGKVYDEAWERIDKKVEGLSKHIKLEEERRSEDAQSKAALTDWLRAKASFVIEGLKEADKDEFCRCELKLQKWYGDLRGKPFAIEAENSILDISGFSKQYNCAFIWQKDGVKKLNLYLIINYFKGGKLRFKKIKPEAFEANRFYTVINKKSGEIVPMEVNFNFDDPNLIILPLAFGKRQGREFIWNDLLSLETGSLKLANGRVIEKTLYNRRTRQDEPALFVALTFERREVLDSSNIKPMNLIGVDRGENIPAVIALTDPEGCPLSRFKDSLGNPTHILRIRESYKEKQRTIQAKKEVEQRRAGGYSRKYASKAKNLADDMVRNTARDLLYYAVTQDAMLIFENLSRGFGRQGKRTFMAERQYTRMEDWLTAKLAYEGLPSKTYLSKTLAQYTSKTCSNCGFTITSADYDRVLEKLKKTATGWMTTINGKELKVEGQITYYNRYKRQNVVKDLSVELDRLSEESVNNDISSWTKGRQGEALSLLKKRFSHRPVQEKFVCLNCGFETHADEQAALNIARSWLFLRSQEYKKYQTNKTTGNTDKRAFVETWQSFYRKKLKEVWKPAV

SEQ ID NO: 38142 - protein, 978 aa, synthetic construct
  REGION 1..978: note = engineered CasX variant
QEIKRINKIRRRLVKDSNTKKAGKTGPMKTLLVRVMTPDLRERLENLRKKPENIPQPISNTSRANLNKLLTDYTEMKKAILHVYWEEFQKDPVGLMSRVAQPASKKIDQNKLKPEMDEKGNLTTAGFACSQCGQPLFVYKLEQVSEKGKAYTNYFGRCNVAEHEKLILLAQLKPEKDSDEAVTYSLGKFGQRALDFYSIHVTKESTHPVKPLAQIAGNRYASVPVGKALSDACMGTIASFLSKYQDIIIEHQKVVKGNQKRLESLRELAGKENLEYPSVTLPPQPHTKEGVDAYNEVIARVRMWVNLNLWQKLKLSRDDAKPLLRLKGFPSFPLVERQANEVDWWDMVCNVKKLINEKKEDGKVFWQNLAGYKRQEALRPYLSSEEDRKKGKKFARYQLGDLLLHLEKKHGEDWGKVYDEAWERIDKKVEGLSKHIKLEEERRSEDAQSKAALTDWLRAKASFVIEGLKEADKDEFCRCELKLQKWYGDLRGKPFAIEAENSILDISGFSKQYNCAFIWQKDGVKKLNLYLIINYFKGGKLRFKKIKPEAFEANRFYTVINKKSGEIVPMEVNFNFDDPNLIILPLAFGKRQGREFIWNDLLSLETGSLKLANGRVIEKTLYNRRTRQDEPALFVALTFERREVLDSSNIKPMNLIGVDRGENIPAVIALTDPEGCPLSRFKDSLGNPTHILRIRESYKEKQRTIQAKKEVEQRRAGGYSRKYASKAKNLADDMVRNTARDLLYYAVTQDAMLIFENLSRGFGRQGKRTFMAERQYTRMEDWLTAKLAYEGLPSKTYLSKTLAQYTSKTCSNCGFTITSADYDRVLEKLKKTATGWMTTINGKELKVEGQITYYNRYKRQNVVKDLSVELDRLSEESVNNDISSWTKGRQGEALSLLKKRFSHRPVQEKFVCLNCGFETHADEQAALNIARSWLFLRSQEYKKYQTNKTTGNTDKRAFVETWQSFYRKKLKEVWKPAV

SEQ ID NO: 38143 - protein, 978 aa, synthetic construct
  REGION 1..978: note = engineered CasX variant
QEIKRINKIRRRLVKDSNTKKAGKTGPMKTLLVRVMTPDLRERLENLRKKPENIPQPISNTSRANLNKLLTDYTEMKKAILHVYWEEFQKDPVGLMSRVAQPASKKIDQNKLKPEMDEKGNLTTAGFACSQCGQPLFVYKLEQVSEKGKAYTNYFGRCNVAEHEKLIKLAQLKPEKDSDEAVTYSLGKFGQRALDFYSIHVTKESTHPVKPLAQIAGNRYASGPVGKALSDACMGTIASFLSKYQDIIIEHQKVVKGNQKRLESLRELAGKENLEYPSVTLPPQPHTKEGVDAYNEVIARVRMWVNLNLWQKLKLSRDDAKPLLRLKGFPSFPLVERQANEVDWWDMVCNVKKLINEKKEDGKVFWQNLAGYKRQEALRPYLSSEEDRKKGKKFARYQLGDLLLHLEKKHGEDWGKVYDEAWERIDKKVEGLSKHIKLEEERRSEDAQSKAALTDWLRAKASFVIEGLKEADKDEFCRCELKLQKWYGDLRGKPFAIEAENSILDISGFSKQYNCAFIWQKDGVKKLNLYLIINYFKGGKLRFKKIKPEAFEANRFYTVINKKSGEIVPMEVNFNFDDPNLIILPLAFGKRQGREFIWNDLLSLETGSLKLANGRVIEKTLYNRRTRQDEPALFVALTFERREVLDSSNIKPMNLIGVDRGENIPAVIALTDPEGCPLSRFKDSLGNPTHILRIRESYKEKQRTIQAKKEVEQRRAGGYSRKYASKAKNLADDMVRNTARDLLYYAVTQDAMLIFENLSRGFGRQGKRTFMAERQYTRMEDWLTAKLAYEGLPSKTYLSKTLAQYTSKTCSNCGFTITSADYDRVLEKLKKTATGWMTTINGKELKVEGQITYYNRYKRQNVVKDLSVELDRLSEESVNNDISSWTKGRQGEALSLLKKRFSHRPVQEKFVCLNCGFETHADEQAALNIARSWLFLRSQEYKKYQTNKTTGNTDKRAFVETWQSFYRKKLKEVWKPAV

SEQ ID NO: 38144 - protein, 977 aa, synthetic construct
  REGION 1..977: note = engineered CasX variant
QEIKRINKIRRRLVKDSNTKKAGKTGPMKTLLVRVMTPDLRERLENLRKKPENIPQPISNTSRANLNKLLTDYTEMKKAILHVYWEEFQKDPVGLMSRVAQPASKKIDQNKLKPEMDEKGNLTTAGFACSQCGQPLFVYKLEQVSEKGKAYTNYFGRCNVAEHEKLILLAQLKPEKDSDEAVTYSLGKFGQRALDFYSIHVTKESTHPVKPLAQIAGNRYASPVGKALSDACMGTIASFLSKYQDIIIEHQKVVKGNQKRLESLRELAGKENLEYPSVTLPPQPHTKEGVDAYNEVIARVRMWVNLNLWQKLKLSRDDAKPLLRLKGFPSFPLVERQANEVDWWDMVCNVKKLINEKKEDGKVFWQNLAGYKRQEALRPYLSSEEDRKKGKKFARYQLGDLLLHLEKKHGEDWGKVYDEAWERIDKKVEGLSKHIKLEEERRSEDAQSKAALTDWLRAKASFVIEGLKEADKDEFCRCELKLQKWYGDLRGKPFAIEAENSILDISGFSKQYNCAFIWQKDGVKKLNLYLIINYFKGGKLRFKKIKPEAFEANRFYTVINKKSGEIVPMEVNFNFDDPNLIILPLAFGKRQGREFIWNDLLSLETGSLKLANGRVIEKTLYNRRTRQDEPALFVALTFERREVLDSSNIKPMNLIGVDRGENIPAVIALTDPEGCPLSRFKDSLGNPTHILRIRESYKEKQRTIQAKKEVEQRRAGGYSRKYASKAKNLADDMVRNTARDLLYYAVTQDAMLIFENLSRGFGRQGKRTFMAERQYTRMEDWLTAKLAYEGLPSKTYLSKTLAQYTSKTCSNCGFTITSADYDRVLEKLKKTATGWMTTINGKELKVEGQITYYNRYKRQNVVKDLSVELDRLSEESVNNDISSWTKGRQGEALSLLKKRFSHRPVQEKFVCLNCGFETHADEQAALNIARSWLFLRSQEYKKYQTNKTTGNTDKRAFVETWQSFYRKKLKEVWKPAV

SEQ ID NO: 38145 - protein, 978 aa, synthetic construct
  REGION 1..978: note = engineered CasX variant
QEIKRINKIRRRLVKDSNTKKAGKTGPMKTLLVRVMTPDLRERLENLRKKPENIPQPISNTSRANLNKLLTDYTEMKKAILHVYWEEFQKDPVGLMSRVAQPASKKIDQNKLKPEMDEKGNLTTAGFACSQCGQPLFVYKLEQVSEKGKAYTNYFGRCNVAEHEKLILLAQLKPEKDSDEAVTYSLGKFGQRALDFYSIHVTKESTHPVKPLAQIAGNRYASYPVGKALSDACMGTIASFLSKYQDIIIEHQKVVKGNQKRLESLRELAGKENLEYPSVTLPPQPHTKEGVDAYNEVIARVRMWVNLNLWQKLKLSRDDAKPLLRLKGFPSFPLVERQANEVDWWDMVCNVKKLINEKKEDGKVFWQNLAGYKRQEALRPYLSSEEDRKKGKKFARYQLGDLLLHLEKKHGEDWGKVYDEAWERIDKKVEGLSKHIKLEEERRSEDAQSKAALTDWLRAKASFVIEGLKEADKDEFCRCELKLQKWYGDLRGKPFAIEAENSILDISGFSKQYNCAFIWQKDGVKKLNLYLIINYFKGGKLRFKKIKPEAFEANRFYTVINKKSGEIVPMEVNFNFDDPNLIILPLAFGKRQGREFIWNDLLSLETGSLKLANGRVIEKTLYNRRTRQDEPALFVALTFERREVLDSSNIKPMNLIGVDRGENIPAVIALTDPEGCPLSRFKDSLGNPTHILRIRESYKEKQRTIQAKKEVEQRRAGGYSRKYASKAKNLADDMVRNTARDLLYYAVTQDAMLIFENLSRGFGRQGKRTFMAERQYTRMEDWLTAKLAYEGLPSKTYLSKTLAQYTSKTCSNCGFTITSADYDRVLEKLKKTATGWMTTINGKELKVEGQITYYNRYKRQNVVKDLSVELDRLSEESVNNDISSWTKGRSGEALSLLKKRFSHRPVQEKFVCLNCEFETHADEQAALNIARSWLFLRSQEYKKYQTNKTTGNTDKRAFVETWQSFYRKKLKEVWKPAV

SEQ ID NO: 38146 - protein, 978 aa, synthetic construct
  REGION 1..978: note = engineered CasX variant
QEIKRINKIRRRLVKDSNTKKAGKTGPMKTLLVRVMTPDLRERLENLRKKPENIPQPISNTSRANLNKLLTDYTEMKKAILHVYWEEFQKDPVGLMSRVAQPASKKIDQNKLKPEMDEKGNLTTAGFACSQCGQPLFVYKLEQVSEKGKAYTNYFGRCNVAEHEKLILLAQLKPEKDSDEAVTYSLGKFGQRALDFYSIHVTKESTHPVKPLAQIAGNRYASHPVGKALSDACMGTIASFLSKYQDIIIEHQKVVKGNQKRLESLRELAGKENLEYPSVTLPPQPHTKEGVDAYNEVIARVRMWVNLNLWQKLKLSRDDAKPLLRLKGFPSFPLVERQANEVDWWDMVCNVKKLINEKKEDGKVFWQNLAGYKRQEALRPYLSSEEDRKKGKKFARYQLGDLLLHLEKKHGEDWGKVYDEAWERIDKKVEGLSKHIKLEEERRSEDAQSKAALTDWLRAKASFVIEGLKEADKDEFCRCELKLQKWYGDLRGKPFAIEAENSILDISGFSKQYNCAFIWQKDGVKKLNLYLIINYFKGGKLRFKKIKPEAFEANRFYTVINKKSGEIVPMEVNFNFDDPNLIILPLAFGKRQGREFIWNDLLSLETGSLKLANGRVIEKTLYNRRTRQDEPALFVALTFERREVLDSSNIKPMNLIGVDRGENIPAVIALTDPEGCPLSRFKDSLGNPTHILRIRESYKEKQRTIQAKKEVEQRRAGGYSRKYASKAKNLADDMVRNTARDLLYYAVTQDAMLIFENLSRGFGRQGKRTFMAERQYTRMEDWLTAKLAYEGLPSKTYLSKTLAQYTSKTCSNCGFTITSADYDRVLEKLKKTATGWMTTINGKELKVEGQITYYNRYKRQNVVKDLSVELDRLSEESVNNDISSWTKGRSGEALSLLKKRFSHRPVQEKFVCLNCEFETHADEQAALNIARSWLFLRSQEYKKYQTNKTTGNTDKRAFVETWQSFYRKKLKEVWKPAV

SEQ ID NO: 38147 - protein, 978 aa, synthetic construct
  REGION 1..978: note = engineered CasX variant
QEIKRINKIRRRLVKDSNTKKAGKTGPMKTLLVRVMTPDLRERLENLRKKPENIPQPISNTSRANLNKLLTDYTEMKKAILHVYWEEFQKDPVGLMSRVAQPASKKIDQNKLKPEMDEKGNLTTAGFACSQCGQPLFVYKLEQVSEKGKAYTNYFGRCNVAEHEKLILLAQLKPEKDSDEAVTYSLGKFGQRALDFYSIHVTKESTHPVKPLAQIAGNRYASSPVGKALSDACMGTIASFLSKYQDIIIEHQKVVKGNQKRLESLRELAGKENLEYPSVTLPPQPHTKEGVDAYNEVIARVRMWVNLNLWQKLKLSRDDAKPLLRLKGFPSFPLVERQANEVDWWDMVCNVKKLINEKKEDGKVFWQNLAGYKRQEALRPYLSSEEDRKKGKKFARYQLGDLLLHLEKKHGEDWGKVYDEAWERIDKKVEGLSKHIKLEEERRSEDAQSKAALTDWLRAKASFVIEGLKEADKDEFCRCELKLQKWYGDLRGKPFAIEAENSILDISGFSKQYNCAFIWQKDGVKKLNLYLIINYFKGGKLRFKKIKPEAFEANRFYTVINKKSGEIVPMEVNFNFDDPNLIILPLAFGKRQGREFIWNDLLSLETGSLKLANGRVIEKTLYNRRTRQDEPALFVALTFERREVLDSSNIKPMNLIGVDRGENIPAVIALTDPEGCPLSRFKDSLGNPTHILRIRESYKEKQRTIQAKKEVEQRRAGGYSRKYASKAKNLADDMVRNTARDLLYYAVTQDAMLIFENLSRGFGRQGKRTFMAERQYTRMEDWLTAKLAYEGLPSKTYLSKTLAQYTSKTCSNCGFTITSADYDRVLEKLKKTATGWMTTINGKELKVEGQITYYNRYKRQNVVKDLSVELDRLSEESVNNDISSWTKGRSGEALSLLKKRFSHRPVQEKFVCLNCEFETHADEQAALNIARSWLFLRSQEYKKYQTNKTTGNTDKRAFVETWQSFYRKKLKEVWKPAV

SEQ ID NO: 38148 - protein, 978 aa, synthetic construct
  REGION 1..978: note = engineered CasX variant
QEIKRINKIRRRLVKDSNTKKAGKTGPMKTLLVRVMTPDLRERLENLRKKPENIPQPISNTSRANLNKLLTDYTEMKKAILHVYWEEFQKDPVGLMSRVAQPASKKIDQNKLKPEMDEKGNLTTAGFACSQCGQPLFVYKLEQVSEKGKAYTNYFGRCNVAEHEKLILLAQLKPEKDSDEAVTYSLGKFGQRALDFYSIHVTKESTHPVKPLAQIAGNRYASTPVGKALSDACMGTIASFLSKYQDIIIEHQKVVKGNQKRLESLRELAGKENLEYPSVTLPPQPHTKEGVDAYNEVIARVRMWVNLNLWQKLKLSRDDAKPLLRLKGFPSFPLVERQANEVDWWDMVCNVKKLINEKKEDGKVFWQNLAGYKRQEALRPYLSSEEDRKKGKKFARYQLGDLLLHLEKKHGEDWGKVYDEAWERIDKKVEGLSKHIKLEEERRSEDAQSKAALTDWLRAKASFVIEGLKEADKDEFCRCELKLQKWYGDLRGKPFAIEAENSILDISGFSKQYNCAFIWQKDGVKKLNLYLIINYFKGGKLRFKKIKPEAFEANRFYTVINKKSGEIVPMEVNFNFDDPNLIILPLAFGKRQGREFIWNDLLSLETGSLKLANGRVIEKTLYNRRTRQDEPALFVALTFERREVLDSSNIKPMNLIGVDRGENIPAVIALTDPEGCPLSRFKDSLGNPTHILRIRESYKEKQRTIQAKKEVEQRRAGGYSRKYASKAKNLADDMVRNTARDLLYYAVTQDAMLIFENLSRGFGRQGKRTFMAERQYTRMEDWLTAKLAYEGLPSKTYLSKTLAQYTSKTCSNCGFTITSADYDRVLEKLKKTATGWMTTINGKELKVEGQITYYNRYKRQNVVKDLSVELDRLSEESVNNDISSWTKGRSGEALSLLKKRFSHRPVQEKFVCLNCEFETHADEQAALNIARSWLFLRSQEYKKYQTNKTTGNTDKRAFVETWQSFYRKKLKEVWKPAV

SEQ ID NO: 38149 - protein, 978 aa, synthetic construct
  REGION 1..978: note = engineered CasX variant
QEIKRINKIRRRLVKDSNTKKAGKTGPMKTLLVRVMTPDLRERLENLRKKPENIPQPISNTSRANLNKLLTDYTEMKKAILHVYWEEFQKDPVGLMSRVAQPASKKIDQNKLKPEMDEKGNLTTAGFACSQCGQPLFVYKLEQVSEKGKAYTNYFGRCNVAEHEKLILLAQLKPEKDSDEAVTYSLGKFGQRALDFYSIHVTKESTHPVKPLAQIAGNRYASAPVGKALSDACMGTIASFLSKYQDIIIEHQKVVKGNQKRLESLRELAGKENLEYPSVTLPPQPHTKEGVDAYNEVIARVRMWVNLNLWQKLKLSRDDAKPLLRLKGFPSFPLVERQANEVDWWDMVCNVKKLINEKKEDGKVFWQNLAGYKRQEALRPYLSSEEDRKKGKKFARYQLGDLLLHLEKKHGEDWGKVYDEAWERIDKKVEGLSKHIKLEEERRSEDAQSKAALTDWLRAKASFVIEGLKEADKDEFCRCELKLQKWYGDLRGKPFAIEAENSILDISGFSKQYNCAFIWQKDGVKKLNLYLIINYFKGGKLRFKKIKPEAFEANRFYTVINKKSGEIVPMEVNFNFDDPNLIILPLAFGKRQGREFIWNDLLSLETGSLKLANGRVIEKTLYNRRTRQDEPALFVALTFERREVLDSSNIKPMNLIGVDRGENIPAVIALTDPEGCPLSRFKDSLGNPTHILRIRESYKEKQRTIQAKKEVEQRRAGGYSRKYASKAKNLADDMVRNTARDLLYYAVTQDAMLIFENLSRGFGRQGKRTFMAERQYTRMEDWLTAKLAYEGLPSKTYLSKTLAQYTSKTCSNCGFTITSADYDRVLEKLKKTATGWMTTINGKELKVEGQITYYNRYKRQNVVKDLSVELDRLSEESVNNDISSWTKGRSGEALSLLKKRFSHRPVQEKFVCLNCEFETHADEQAALNIARSWLFLRSQEYKKYQTNKTTGNTDKRAFVETWQSFYRKKLKEVWKPAV

SEQ ID NO: 38150 - protein, 978 aa, synthetic construct
  REGION 1..978: note = engineered CasX variant
QEIKRINKIRRRLVKDSNTKKAGKTGPMKTLLVRVMTPDLRERLENLRKKPENIPQPISNTSRANLNKLLTDYTEMKKAILHVYWEEFQKDPVGLMSRVAQPASKKIDQNKLKPEMDEKGNLTTAGFACSQCGQPLFVYKLEQVSEKGKAYTNYFGRCNVAEHEKLILLAQLKPEKDSDEAVTYSLGKFGQRALDFYSIHVTKESTHPVKPLAQIAGNRYASVPVGKALSDACMGTIASFLSKYQDIIIEHQKVVKGNQKRLESLRELAGKENLEYPSVTLPPQPHTKEGVDAYNEVIARVRMWVNLNLWQKLKLSRDDAKPLLRLKGFPSFPLVERQANEVDWWDMVCNVKKLINEKKEDGKVFWQNLAGYKRQEALRPYLSSEEDRKKGKKFARYQLGDLLLHLEKKHGEDWGKVYDEAWERIDKKVEGLSKHIKLEEERRSEDAQSKAALTDWLRAKASFVIEGLKEADKDEFCRCELKLQKWYGDLRGKPFAIEAENSILDISGFSKQYNCAFIWQKDGVKKLNLYLIINYFKGGKLRFKKIKPEAFEANRFYTVINKKSGEIVPMEVNFNFDDPNLIILPLAFGKRQGREFIWNDLLSLETGSLKLANGRVIEKTLYNRRTRQDEPALFVALTFERREVLDSSNIKPMNLIGVDRGENIPAVIALTDPEGCPLSRFKDSLGNPTHILRIRESYKEKQRTIQAKKEVEQRRAGGYSRKYASKAKNLADDMVRNTARDLLYYAVTQDAMLIFENLSRGFGRQGKRTFMAERQYTRMEDWLTAKLAYEGLPSKTYLSKTLAQYTSKTCSNCGFTITSADYDRVLEKLKKTATGWMTTINGKELKVEGQITYYNRYKRQNVVKDLSVELDRLSEESVNNDISSWTKGRSGEALSLLKKRFSHRPVQEKFVCLNCEFETHADEQAALNIARSWLFLRSQEYKKYQTNKTTGNTDKRAFVETWQSFYRKKLKEVWKPAV

SEQ ID NO: 38151 - protein, 978 aa, synthetic construct
  REGION 1..978: note = engineered CasX variant
QEIKRINKIRRRLVKDSNTKKAGKTGPMKTLLVRVMTPDLRERLENLRKKPENIPQPISNTSRANLNKLLTDYTEMKKAILHVYWEEFQKDPVGLMSRVAQPASKKIDQNKLKPEMDEKGNLTTAGFACSQCGQPLFVYKLEQVSEKGKAYTNYFGRCNVAEHEKLIKLAQLKPEKDSDEAVTYSLGKFGQRALDFYSIHVTKESTHPVKPLAQIAGNRYASGPVGKALSDACMGTIASFLSKYQDIIIEHQKVVKGNQKRLESLRELAGKENLEYPSVTLPPQPHTKEGVDAYNEVIARVRMWVNLNLWQKLKLSRDDAKPLLRLKGFPSFPLVERQANEVDWWDMVCNVKKLINEKKEDGKVFWQNLAGYKRQEALRPYLSSEEDRKKGKKFARYQLGDLLLHLEKKHGEDWGKVYDEAWERIDKKVEGLSKHIKLEEERRSEDAQSKAALTDWLRAKASFVIEGLKEADKDEFCRCELKLQKWYGDLRGKPFAIEAENSILDISGFSKQYNCAFIWQKDGVKKLNLYLIINYFKGGKLRFKKIKPEAFEANRFYTVINKKSGEIVPMEVNFNFDDPNLIILPLAFGKRQGREFIWNDLLSLETGSLKLANGRVIEKTLYNRRTRQDEPALFVALTFERREVLDSSNIKPMNLIGVDRGENIPAVIALTDPEGCPLSRFKDSLGNPTHILRIRESYKEKQRTIQAKKEVEQRRAGGYSRKYASKAKNLADDMVRNTARDLLYYAVTQDAMLIFENLSRGFGRQGKRTFMAERQYTRMEDWLTAKLAYEGLPSKTYLSKTLAQYTSKTCSNCGFTITSADYDRVLEKLKKTATGWMTTINGKELKVEGQITYYNRYKRQNVVKDLSVELDRLSEESVNNDISSWTKGRSGEALSLLKKRFSHRPVQEKFVCLNCEFETHADEQAALNIARSWLFLRSQEYKKYQTNKTTGNTDKRAFVETWQSFYRKKLKEVWKPAV

SEQ ID NO: 38152 - protein, 977 aa, synthetic construct
  REGION 1..977: note = engineered CasX variant
QEIKRINKIRRRLVKDSNTKKAGKTGPMKTLLVRVMTPDLRERLENLRKKPENIPQPISNTSRANLNKLLTDYTEMKKAILHVYWEEFQKDPVGLMSRVAQPASKKIDQNKLKPEMDEKGNLTTAGFACSQCGQPLFVYKLEQVSEKGKAYTNYFGRCNVAEHEKLILLAQLKPEKDSDEAVTYSLGKFGQRALDFYSIHVTKESTHPVKPLAQIAGNRYASPVGKALSDACMGTIASFLSKYQDIIIEHQKVVKGNQKRLESLRELAGKENLEYPSVTLPPQPHTKEGVDAYNEVIARVRMWVNLNLWQKLKLSRDDAKPLLRLKGFPSFPLVERQANEVDWWDMVCNVKKLINEKKEDGKVFWQNLAGYKRQEALRPYLSSEEDRKKGKKFARYQLGDLLLHLEKKHGEDWGKVYDEAWERIDKKVEGLSKHIKLEEERRSEDAQSKAALTDWLRAKASFVIEGLKEADKDEFCRCELKLQKWYGDLRGKPFAIEAENSILDISGFSKQYNCAFIWQKDGVKKLNLYLIINYFKGGKLRFKKIKPEAFEANRFYTVINKKSGEIVPMEVNFNFDDPNLIILPLAFGKRQGREFIWNDLLSLETGSLKLANGRVIEKTLYNRRTRQDEPALFVALTFERREVLDSSNIKPMNLIGVDRGENIPAVIALTDPEGCPLSRFKDSLGNPTHILRIRESYKEKQRTIQAKKEVEQRRAGGYSRKYASKAKNLADDMVRNTARDLLYYAVTQDAMLIFENLSRGFGRQGKRTFMAERQYTRMEDWLTAKLAYEGLPSKTYLSKTLAQYTSKTCSNCGFTITSADYDRVLEKLKKTATGWMTTINGKELKVEGQITYYNRYKRQNVVKDLSVELDRLSEESVNNDISSWTKGRSGEALSLLKKRFSHRPVQEKFVCLNCEFETHADEQAALNIARSWLFLRSQEYKKYQTNKTTGNTDKRAFVETWQSFYRKKLKEVWKPAV

SEQ ID NO: 38153 - protein, 979 aa, synthetic construct
  REGION 1..979: note = engineered CasX variant
QEIKRINKIRRRLVKDSNTKKAGKTGPMKTLLVRVMTPDLRERLENLRKKPENIPQPISNTSRANLNKLLTDYTEMKKAILHVYWEEFQKDPVGLMSRVAQPASKKIDQNKLKPEMDEKGNLTTAGFACSQCGQPLFVYKLEQVSEKGKAYTNYFGRCNVAEHEKLILLAQLKPEKDSDEAVTYSLGKFGQRALDFYSIHVTKESTHPVKPLAQIAGNRYASYPVGKALSDACMGTIASFLSKYQDIIIEHQKVVKGNQKRLESLRELAGKENLEYPSVTLPPQPHTKEGVDAYNEVIARVRMWVNLNLWQKLKLSRDDAKPLLRLKGFPSFPLVERQANEVDWWDMVCNVKKLINEKKEDGKVFWQNLAGYKRQEALRPYLSSEEDRKKGKKFARYQLGDLLLHLEKKHGEDWGKVYDEAWERIDKKVEGLSKHIKLEEERRSEDAQSKAALTDWLRAKASFVIEGLKEADKDEFCRCELKLQKWYGDLRGKPFAIEAENSILDISGFSKQYNCAFIWQKDGVKKLNLYLIINYFKGGKLRFKKIKPEAFEANRFYTVINKKSGEIVPMEVNFNFDDPNLIILPLAFGKRQGREFIWNDLLSLETGSLKLANGRVIEKTLYNRRTRQDEPALFVALTFERREVLDSSNIKPMNLIGVDRGENIPAVIALTDPEGCPLSRFKDSLGNPTHILRIRESYKEKQRTIQAKKEVEQRRAGGYSRKYASKAKNLADDMVRNTARDLLYYAVTQDAMLIFENLSRGFGRQGKRTFMAERQYTRMEDWLTAKLAYEGLPSKTYLSKTLAQYTSKTCSNCGFTITSADYDRVLEKLKKTATGWMTTINGKELKVEGQITYYNRYKRQNVVKDLSVELDRLSEESVNNDISSWTKGRSGEALSLLKKRFSHRPVQEKFVCLNCGFETHADEQAALNIARSWLFLRSQEYKKYQTNKTSTGNTDKRAFVETWQSFYRKKLKEVWKPAV

SEQ ID NO: 38154 - protein, 979 aa, synthetic construct
  REGION 1..979: note = engineered CasX variant
QEIKRINKIRRRLVKDSNTKKAGKTGPMKTLLVRVMTPDLRERLENLRKKPENIPQPISNTSRANLNKLLTDYTEMKKAILHVYWEEFQKDPVGLMSRVAQPASKKIDQNKLKPEMDEKGNLTTAGFACSQCGQPLFVYKLEQVSEKGKAYTNYFGRCNVAEHEKLILLAQLKPEKDSDEAVTYSLGKFGQRALDFYSIHVTKESTHPVKPLAQIAGNRYASHPVGKALSDACMGTIASFLSKYQDIIIEHQKVVKGNQKRLESLRELAGKENLEYPSVTLPPQPHTKEGVDAYNEVIARVRMWVNLNLWQKLKLSRDDAKPLLRLKGFPSFPLVERQANEVDWWDMVCNVKKLINEKKEDGKVFWQNLAGYKRQEALRPYLSSEEDRKKGKKFARYQLGDLLLHLEKKHGEDWGKVYDEAWERIDKKVEGLSKHIKLEEERRSEDAQSKAALTDWLRAKASFVIEGLKEADKDEFCRCELKLQKWYGDLRGKPFAIEAENSILDISGFSKQYNCAFIWQKDGVKKLNLYLIINYFKGGKLRFKKIKPEAFEANRFYTVINKKSGEIVPMEVNFNFDDPNLIILPLAFGKRQGREFIWNDLLSLETGSLKLANGRVIEKTLYNRRTRQDEPALFVALTFERREVLDSSNIKPMNLIGVDRGENIPAVIALTDPEGCPLSRFKDSLGNPTHILRIRESYKEKQRTIQAKKEVEQRRAGGYSRKYASKAKNLADDMVRNTARDLLYYAVTQDAMLIFENLSRGFGRQGKRTFMAERQYTRMEDWLTAKLAYEGLPSKTYLSKTLAQYTSKTCSNCGFTITSADYDRVLEKLKKTATGWMTTINGKELKVEGQITYYNRYKRQNVVKDLSVELDRLSEESVNNDISSWTKGRSGEALSLLKKRFSHRPVQEKFVCLNCGFETHADEQAALNIARSWLFLRSQEYKKYQTNKTSTGNTDKRAFVETWQSFYRKKLKEVWKPAV

SEQ ID NO: 38155 - protein, 979 aa, synthetic construct
  REGION 1..979: note = engineered CasX variant
QEIKRINKIRRRLVKDSNTKKAGKTGPMKTLLVRVMTPDLRERLENLRKKPENIPQPISNTSRANLNKLLTDYTEMKKAILHVYWEEFQKDPVGLMSRVAQPASKKIDQNKLKPEMDEKGNLTTAGFACSQCGQPLFVYKLEQVSEKGKAYTNYFGRCNVAEHEKLILLAQLKPEKDSDEAVTYSLGKFGQRALDFYSIHVTKESTHPVKPLAQIAGNRYASSPVGKALSDACMGTIASFLSKYQDIIIEHQKVVKGNQKRLESLRELAGKENLEYPSVTLPPQPHTKEGVDAYNEVIARVRMWVNLNLWQKLKLSRDDAKPLLRLKGFPSFPLVERQANEVDWWDMVCNVKKLINEKKEDGKVFWQNLAGYKRQEALRPYLSSEEDRKKGKKFARYQLGDLLLHLEKKHGEDWGKVYDEAWERIDKKVEGLSKHIKLEEERRSEDAQSKAALTDWLRAKASFVIEGLKEADKDEFCRCELKLQKWYGDLRGKPFAIEAENSILDISGFSKQYNCAFIWQKDGVKKLNLYLIINYFKGGKLRFKKIKPEAFEANRFYTVINKKSGEIVPMEVNFNFDDPNLIILPLAFGKRQGREFIWNDLLSLETGSLKLANGRVIEKTLYNRRTRQDEPALFVALTFERREVLDSSNIKPMNLIGVDRGENIPAVIALTDPEGCPLSRFKDSLGNPTHILRIRESYKEKQRTIQAKKEVEQRRAGGYSRKYASKAKNLADDMVRNTARDLLYYAVTQDAMLIFENLSRGFGRQGKRTFMAERQYTRMEDWLTAKLAYEGLPSKTYLSKTLAQYTSKTCSNCGFTITSADYDRVLEKLKKTATGWMTTINGKELKVEGQITYYNRYKRQNVVKDLSVELDRLSEESVNNDISSWTKGRSGEALSLLKKRFSHRPVQEKFVCLNCGFETHADEQAALNIARSWLFLRSQEYKKYQTNKTSTGNTDKRAFVETWQSFYRKKLKEVWKPAV

SEQ ID NO: 38156 - protein, 979 aa, synthetic construct
  REGION 1..979: note = engineered CasX variant
QEIKRINKIRRRLVKDSNTKKAGKTGPMKTLLVRVMTPDLRERLENLRKKPENIPQPISNTSRANLNKLLTDYTEMKKAILHVYWEEFQKDPVGLMSRVAQPASKKIDQNKLKPEMDEKGNLTTAGFACSQCGQPLFVYKLEQVSEKGKAYTNYFGRCNVAEHEKLILLAQLKPEKDSDEAVTYSLGKFGQRALDFYSIHVTKESTHPVKPLAQIAGNRYASTPVGKALSDACMGTIASFLSKYQDIIIEHQKVVKGNQKRLESLRELAGKENLEYPSVTLPPQPHTKEGVDAYNEVIARVRMWVNLNLWQKLKLSRDDAKPLLRLKGFPSFPLVERQANEVDWWDMVCNVKKLINEKKEDGKVFWQNLAGYKRQEALRPYLSSEEDRKKGKKFARYQLGDLLLHLEKKHGEDWGKVYDEAWERIDKKVEGLSKHIKLEEERRSEDAQSKAALTDWLRAKASFVIEGLKEADKDEFCRCELKLQKWYGDLRGKPFAIEAENSILDISGFSKQYNCAFIWQKDGVKKLNLYLIINYFKGGKLRFKKIKPEAFEANRFYTVINKKSGEIVPMEVNFNFDDPNLIILPLAFGKRQGREFIWNDLLSLETGSLKLANGRVIEKTLYNRRTRQDEPALFVALTFERREVLDSSNIKPMNLIGVDRGENIPAVIALTDPEGCPLSRFKDSLGNPTHILRIRESYKEKQRTIQAKKEVEQRRAGGYSRKYASKAKNLADDMVRNTARDLLYYAVTQDAMLIFENLSRGFGRQGKRTFMAERQYTRMEDWLTAKLAYEGLPSKTYLSKTLAQYTSKTCSNCGFTITSADYDRVLEKLKKTATGWMTTINGKELKVEGQITYYNRYKRQNVVKDLSVELDRLSEESVNNDISSWTKGRSGEALSLLKKRFSHRPVQEKFVCLNCGFETHADEQAALNIARSWLFLRSQEYKKYQTNKTSTGNTDKRAFVETWQSFYRKKLKEVWKPAV

SEQ ID NO: 38157 - protein, 979 aa, synthetic construct
  REGION 1..979: note = engineered CasX variant
QEIKRINKIRRRLVKDSNTKKAGKTGPMKTLLVRVMTPDLRERLENLRKKPENIPQPISNTSRANLNKLLTDYTEMKKAILHVYWEEFQKDPVGLMSRVAQPASKKIDQNKLKPEMDEKGNLTTAGFACSQCGQPLFVYKLEQVSEKGKAYTNYFGRCNVAEHEKLILLAQLKPEKDSDEAVTYSLGKFGQRALDFYSIHVTKESTHPVKPLAQIAGNRYASAPVGKALSDACMGTIASFLSKYQDIIIEHQKVVKGNQKRLESLRELAGKENLEYPSVTLPPQPHTKEGVDAYNEVIARVRMWVNLNLWQKLKLSRDDAKPLLRLKGFPSFPLVERQANEVDWWDMVCNVKKLINEKKEDGKVFWQNLAGYKRQEALRPYLSSEEDRKKGKKFARYQLGDLLLHLEKKHGEDWGKVYDEAWERIDKKVEGLSKHIKLEEERRSEDAQSKAALTDWLRAKASFVIEGLKEADKDEFCRCELKLQKWYGDLRGKPFAIEAENSILDISGFSKQYNCAFIWQKDGVKKLNLYLIINYFKGGKLRFKKIKPEAFEANRFYTVINKKSGEIVPMEVNFNFDDPNLIILPLAFGKRQGREFIWNDLLSLETGSLKLANGRVIEKTLYNRRTRQDEPALFVALTFERREVLDSSNIKPMNLIGVDRGENIPAVIALTDPEGCPLSRFKDSLGNPTHILRIRESYKEKQRTIQAKKEVEQRRAGGYSRKYASKAKNLADDMVRNTARDLLYYAVTQDAMLIFENLSRGFGRQGKRTFMAERQYTRMEDWLTAKLAYEGLPSKTYLSKTLAQYTSKTCSNCGFTITSADYDRVLEKLKKTATGWMTTINGKELKVEGQITYYNRYKRQNVVKDLSVELDRLSEESVNNDISSWTKGRSGEALSLLKKRFSHRPVQEKFVCLNCGFETHADEQAALNIARSWLFLRSQEYKKYQTNKTSTGNTDKRAFVETWQSFYRKKLKEVWKPAV

SEQ ID NO: 38158 - protein, 979 aa, synthetic construct
  REGION 1..979: note = engineered CasX variant
QEIKRINKIRRRLVKDSNTKKAGKTGPMKTLLVRVMTPDLRERLENLRKKPENIPQPISNTSRANLNKLLTDYTEMKKAILHVYWEEFQKDPVGLMSRVAQPASKKIDQNKLKPEMDEKGNLTTAGFACSQCGQPLFVYKLEQVSEKGKAYTNYFGRCNVAEHEKLILLAQLKPEKDSDEAVTYSLGKFGQRALDFYSIHVTKESTHPVKPLAQIAGNRYASVPVGKALSDACMGTIASFLSKYQDIIIEHQKVVKGNQKRLESLRELAGKENLEYPSVTLPPQPHTKEGVDAYNEVIARVRMWVNLNLWQKLKLSRDDAKPLLRLKGFPSFPLVERQANEVDWWDMVCNVKKLINEKKEDGKVFWQNLAGYKRQEALRPYLSSEEDRKKGKKFARYQLGDLLLHLEKKHGEDWGKVYDEAWERIDKKVEGLSKHIKLEEERRSEDAQSKAALTDWLRAKASFVIEGLKEADKDEFCRCELKLQKWYGDLRGKPFAIEAENSILDISGFSKQYNCAFIWQKDGVKKLNLYLIINYFKGGKLRFKKIKPEAFEANRFYTVINKKSGEIVPMEVNFNFDDPNLIILPLAFGKRQGREFIWNDLLSLETGSLKLANGRVIEKTLYNRRTRQDEPALFVALTFERREVLDSSNIKPMNLIGVDRGENIPAVIALTDPEGCPLSRFKDSLGNPTHILRIRESYKEKQRTIQAKKEVEQRRAGGYSRKYASKAKNLADDMVRNTARDLLYYAVTQDAMLIFENLSRGFGRQGKRTFMAERQYTRMEDWLTAKLAYEGLPSKTYLSKTLAQYTSKTCSNCGFTITSADYDRVLEKLKKTATGWMTTINGKELKVEGQITYYNRYKRQNVVKDLSVELDRLSEESVNNDISSWTKGRSGEALSLLKKRFSHRPVQEKFVCLNCGFETHADEQAALNIARSWLFLRSQEYKKYQTNKTSTGNTDKRAFVETWQSFYRKKLKEVWKPAV

SEQ ID NO: 38159 - protein, 979 aa, synthetic construct
  REGION 1..979: note = engineered CasX variant
QEIKRINKIRRRLVKDSNTKKAGKTGPMKTLLVRVMTPDLRERLENLRKKPENIPQPISNTSRANLNKLLTDYTEMKKAILHVYWEEFQKDPVGLMSRVAQPASKKIDQNKLKPEMDEKGNLTTAGFACSQCGQPLFVYKLEQVSEKGKAYTNYFGRCNVAEHEKLIKLAQLKPEKDSDEAVTYSLGKFGQRALDFYSIHVTKESTHPVKPLAQIAGNRYASGPVGKALSDACMGTIASFLSKYQDIIIEHQKVVKGNQKRLESLRELAGKENLEYPSVTLPPQPHTKEGVDAYNEVIARVRMWVNLNLWQKLKLSRDDAKPLLRLKGFPSFPLVERQANEVDWWDMVCNVKKLINEKKEDGKVFWQNLAGYKRQEALRPYLSSEEDRKKGKKFARYQLGDLLLHLEKKHGEDWGKVYDEAWERIDKKVEGLSKHIKLEEERRSEDAQSKAALTDWLRAKASFVIEGLKEADKDEFCRCELKLQKWYGDLRGKPFAIEAENSILDISGFSKQYNCAFIWQKDGVKKLNLYLIINYFKGGKLRFKKIKPEAFEANRFYTVINKKSGEIVPMEVNFNFDDPNLIILPLAFGKRQGREFIWNDLLSLETGSLKLANGRVIEKTLYNRRTRQDEPALFVALTFERREVLDSSNIKPMNLIGVDRGENIPAVIALTDPEGCPLSRFKDSLGNPTHILRIRESYKEKQRTIQAKKEVEQRRAGGYSRKYASKAKNLADDMVRNTARDLLYYAVTQDAMLIFENLSRGFGRQGKRTFMAERQYTRMEDWLTAKLAYEGLPSKTYLSKTLAQYTSKTCSNCGFTITSADYDRVLEKLKKTATGWMTTINGKELKVEGQITYYNRYKRQNVVKDLSVELDRLSEESVNNDISSWTKGRSGEALSLLKKRFSHRPVQEKFVCLNCGFETHADEQAALNIARSWLFLRSQEYKKYQTNKTSTGNTDKRAFVETWQSFYRKKLKEVWKPAV

SEQ ID NO: 38160 - protein, 978 aa, synthetic construct
  REGION 1..978: note = engineered CasX variant
QEIKRINKIRRRLVKDSNTKKAGKTGPMKTLLVRVMTPDLRERLENLRKKPENIPQPISNTSRANLNKLLTDYTEMKKAILHVYWEEFQKDPVGLMSRVAQPASKKIDQNKLKPEMDEKGNLTTAGFACSQCGQPLFVYKLEQVSEKGKAYTNYFGRCNVAEHEKLILLAQLKPEKDSDEAVTYSLGKFGQRALDFYSIHVTKESTHPVKPLAQIAGNRYASPVGKALSDACMGTIASFLSKYQDIIIEHQKVVKGNQKRLESLRELAGKENLEYPSVTLPPQPHTKEGVDAYNEVIARVRMWVNLNLWQKLKLSRDDAKPLLRLKGFPSFPLVERQANEVDWWDMVCNVKKLINEKKEDGKVFWQNLAGYKRQEALRPYLSSEEDRKKGKKFARYQLGDLLLHLEKKHGEDWGKVYDEAWERIDKKVEGLSKHIKLEEERRSEDAQSKAALTDWLRAKASFVIEGLKEADKDEFCRCELKLQKWYGDLRGKPFAIEAENSILDISGFSKQYNCAFIWQKDGVKKLNLYLIINYFKGGKLRFKKIKPEAFEANRFYTVINKKSGEIVPMEVNFNFDDPNLIILPLAFGKRQGREFIWNDLLSLETGSLKLANGRVIEKTLYNRRTRQDEPALFVALTFERREVLDSSNIKPMNLIGVDRGENIPAVIALTDPEGCPLSRFKDSLGNPTHILRIRESYKEKQRTIQAKKEVEQRRAGGYSRKYASKAKNLADDMVRNTARDLLYYAVTQDAMLIFENLSRGFGRQGKRTFMAERQYTRMEDWLTAKLAYEGLPSKTYLSKTLAQYTSKTCSNCGFTITSADYDRVLEKLKKTATGWMTTINGKELKVEGQITYYNRYKRQNVVKDLSVELDRLSEESVNNDISSWTKGRSGEALSLLKKRFSHRPVQEKFVCLNCGFETHADEQAALNIARSWLFLRSQEYKKYQTNKTSTGNTDKRAFVETWQSFYRKKLKEVWKPAV

SEQ ID NO: 38161 - protein, 979 aa, synthetic construct
  REGION 1..979: note = engineered CasX variant
QEIKRINKIRRRLVKDSNTKKAGKTGPMKTLLVRVMTPDLRERLENLRKKPENIPQPISNTSRANLNKLLTDYTEMKKAILHVYWEEFQKDPVGLMSRVAQPASKKIDQNKLKPEMDEKGNLTTAGFACSQCGQPLFVYKLEQVSEKGKAYTNYFGRCNVAEHEKLILLAQLKPEKDSDEAVTYSLGKFGQRALDFYSIHVTKESTHPVKPLAQIAGNRYASYPVGKALSDACMGTIASFLSKYQDIIIEHQKVVKGNQKRLESLRELAGKENLEYPSVTLPPQPHTKEGVDAYNEVIARVRMWVNLNLWQKLKLSRDDAKPLLRLKGFPSFPLVERQANEVDWWDMVCNVKKLINEKKEDGKVFWQNLAGYKRQEALRPYLSSEEDRKKGKKFARYQLGDLLLHLEKKHGEDWGKVYDEAWERIDKKVEGLSKHIKLEEERRSEDAQSKAALTDWLRAKASFVIEGLKEADKDEFCRCELKLQKWYGDLRGKPFAIEAENSILDISGFSKQYNCAFIWQKDGVKKLNLYLIINYFKGGKLRFKKIKPEAFEANRFYTVINKKSGEIVPMEVNFNFDDPNLIILPLAFGKRQGREFIWNDLLSLETGSLKLANGRVIEKTLYNRRTRQDEPALFVALTFERREVLDSSNIKPMNLIGVDRGENIPAVIALTDPEGCPLSRFKDSLGNPTHILRIRESYKEKQRTIQAKKEVEQRRAGGYSRKYASKAKNLADDMVRNTARDLLYYAVTQDAMLIFENLSRGFGRQGKRTFMAERQYTRMEDWLTAKLAYEGLPSKTYLSKTLAQYTSKTCSNCGFTITSADYDRVLEKLKKTATGWMTTINGKELKVEGQITYYNRYKRQNVVKDLSVELDRLSEESVNNDISSWTKGRSGEALSLLKKRFSHRPVQEKFVCLNCGFETHADEQAALNIARSWLFLRSQEYKKYQTNKTTGKNTDKRAFVETWQSFYRKKLKEVWKPAV

SEQ ID NO: 38162 - protein, 979 aa, synthetic construct
  REGION 1..979: note = engineered CasX variant
QEIKRINKIRRRLVKDSNTKKAGKTGPMKTLLVRVMTPDLRERLENLRKKPENIPQPISNTSRANLNKLLTDYTEMKKAILHVYWEEFQKDPVGLMSRVAQPASKKIDQNKLKPEMDEKGNLTTAGFACSQCGQPLFVYKLEQVSEKGKAYTNYFGRCNVAEHEKLILLAQLKPEKDSDEAVTYSLGKFGQRALDFYSIHVTKESTHPVKPLAQIAGNRYASHPVGKALSDACMGTIASFLSKYQDIIIEHQKVVKGNQKRLESLRELAGKENLEYPSVTLPPQPHTKEGVDAYNEVIARVRMWVNLNLWQKLKLSRDDAKPLLRLKGFPSFPLVERQANEVDWWDMVCNVKKLINEKKEDGKVFWQNLAGYKRQEALRPYLSSEEDRKKGKKFARYQLGDLLLHLEKKHGEDWGKVYDEAWERIDKKVEGLSKHIKLEEERRSEDAQSKAALTDWLRAKASFVIEGLKEADKDEFCRCELKLQKWYGDLRGKPFAIEAENSILDISGFSKQYNCAFIWQKDGVKKLNLYLIINYFKGGKLRFKKIKPEAFEANRFYTVINKKSGEIVPMEVNFNFDDPNLIILPLAFGKRQGREFIWNDLLSLETGSLKLANGRVIEKTLYNRRTRQDEPALFVALTFERREVLDSSNIKPMNLIGVDRGENIPAVIALTDPEGCPLSRFKDSLGNPTHILRIRESYKEKQRTIQAKKEVEQRRAGGYSRKYASKAKNLADDMVRNTARDLLYYAVTQDAMLIFENLSRGFGRQGKRTFMAERQYTRMEDWLTAKLAYEGLPSKTYLSKTLAQYTSKTCSNCGFTITSADYDRVLEKLKKTATGWMTTINGKELKVEGQITYYNRYKRQNVVKDLSVELDRLSEESVNNDISSWTKGRSGEALSLLKKRFSHRPVQEKFVCLNCGFETHADEQAALNIARSWLFLRSQEYKKYQTNKTTGKNTDKRAFVETWQSFYRKKLKEVWKPAV

SEQ ID NO: 38163 - protein, 979 aa, synthetic construct
  REGION 1..979: note = engineered CasX variant
QEIKRINKIRRRLVKDSNTKKAGKTGPMKTLLVRVMTPDLRERLENLRKKPENIPQPISNTSRANLNKLLTDYTEMKKAILHVYWEEFQKDPVGLMSRVAQPASKKIDQNKLKPEMDEKGNLTTAGFACSQCGQPLFVYKLEQVSEKGKAYTNYFGRCNVAEHEKLILLAQLKPEKDSDEAVTYSLGKFGQRALDFYSIHVTKESTHPVKPLAQIAGNRYASSPVGKALSDACMGTIASFLSKYQDIIIEHQKVVKGNQKRLESLRELAGKENLEYPSVTLPPQPHTKEGVDAYNEVIARVRMWVNLNLWQKLKLSRDDAKPLLRLKGFPSFPLVERQANEVDWWDMVCNVKKLINEKKEDGKVFWQNLAGYKRQEALRPYLSSEEDRKKGKKFARYQLGDLLLHLEKKHGEDWGKVYDEAWERIDKKVEGLSKHIKLEEERRSEDAQSKAALTDWLRAKASFVIEGLKEADKDEFCRCELKLQKWYGDLRGKPFAIEAENSILDISGFSKQYNCAFIWQKDGVKKLNLYLIINYFKGGKLRFKKIKPEAFEANRFYTVINKKSGEIVPMEVNFNFDDPNLIILPLAFGKRQGREFIWNDLLSLETGSLKLANGRVIEKTLYNRRTRQDEPALFVALTFERREVLDSSNIKPMNLIGVDRGENIPAVIALTDPEGCPLSRFKDSLGNPTHILRIRESYKEKQRTIQAKKEVEQRRAGGYSRKYASKAKNLADDMVRNTARDLLYYAVTQDAMLIFENLSRGFGRQGKRTFMAERQYTRMEDWLTAKLAYEGLPSKTYLSKTLAQYTSKTCSNCGFTITSADYDRVLEKLKKTATGWMTTINGKELKVEGQITYYNRYKRQNVVKDLSVELDRLSEESVNNDISSWTKGRSGEALSLLKKRFSHRPVQEKFVCLNCGFETHADEQAALNIARSWLFLRSQEYKKYQTNKTTGKNTDKRAFVETWQSFYRKKLKEVWKPAV

SEQ ID NO: 38164 - protein, 979 aa, synthetic construct
  REGION 1..979: note = engineered CasX variant
QEIKRINKIRRRLVKDSNTKKAGKTGPMKTLLVRVMTPDLRERLENLRKKPENIPQPISNTSRANLNKLLTDYTEMKKAILHVYWEEFQKDPVGLMSRVAQPASKKIDQNKLKPEMDEKGNLTTAGFACSQCGQPLFVYKLEQVSEKGKAYTNYFGRCNVAEHEKLILLAQLKPEKDSDEAVTYSLGKFGQRALDFYSIHVTKESTHPVKPLAQIAGNRYASTPVGKALSDACMGTIASFLSKYQDIIIEHQKVVKGNQKRLESLRELAGKENLEYPSVTLPPQPHTKEGVDAYNEVIARVRMWVNLNLWQKLKLSRDDAKPLLRLKGFPSFPLVERQANEVDWWDMVCNVKKLINEKKEDGKVFWQNLAGYKRQEALRPYLSSEEDRKKGKKFARYQLGDLLLHLEKKHGEDWGKVYDEAWERIDKKVEGLSKHIKLEEERRSEDAQSKAALTDWLRAKASFVIEGLKEADKDEFCRCELKLQKWYGDLRGKPFAIEAENSILDISGFSKQYNCAFIWQKDGVKKLNLYLIINYFKGGKLRFKKIKPEAFEANRFYTVINKKSGEIVPMEVNFNFDDPNLIILPLAFGKRQGREFIWNDLLSLETGSLKLANGRVIEKTLYNRRTRQDEPALFVALTFERREVLDSSNIKPMNLIGVDRGENIPAVIALTDPEGCPLSRFKDSLGNPTHILRIRESYKEKQRTIQAKKEVEQRRAGGYSRKYASKAKNLADDMVRNTARDLLYYAVTQDAMLIFENLSRGFGRQGKRTFMAERQYTRMEDWLTAKLAYEGLPSKTYLSKTLAQYTSKTCSNCGFTITSADYDRVLEKLKKTATGWMTTINGKELKVEGQITYYNRYKRQNVVKDLSVELDRLSEESVNNDISSWTKGRSGEALSLLKKRFSHRPVQEKFVCLNCGFETHADEQAALNIARSWLFLRSQEYKKYQTNKTTGKNTDKRAFVETWQSFYRKKLKEVWKPAV

SEQ ID NO: 38165 - protein, 979 aa, synthetic construct
  REGION 1..979: note = engineered CasX variant
QEIKRINKIRRRLVKDSNTKKAGKTGPMKTLLVRVMTPDLRERLENLRKKPENIPQPISNTSRANLNKLLTDYTEMKKAILHVYWEEFQKDPVGLMSRVAQPASKKIDQNKLKPEMDEKGNLTTAGFACSQCGQPLFVYKLEQVSEKGKAYTNYFGRCNVAEHEKLILLAQLKPEKDSDEAVTYSLGKFGQRALDFYSIHVTKESTHPVKPLAQIAGNRYASAPVGKALSDACMGTIASFLSKYQDIIIEHQKVVKGNQKRLESLRELAGKENLEYPSVTLPPQPHTKEGVDAYNEVIARVRMWVNLNLWQKLKLSRDDAKPLLRLKGFPSFPLVERQANEVDWWDMVCNVKKLINEKKEDGKVFWQNLAGYKRQEALRPYLSSEEDRKKGKKFARYQLGDLLLHLEKKHGEDWGKVYDEAWERIDKKVEGLSKHIKLEEERRSEDAQSKAALTDWLRAKASFVIEGLKEADKDEFCRCELKLQKWYGDLRGKPFAIEAENSILDISGFSKQYNCAFIWQKDGVKKLNLYLIINYFKGGKLRFKKIKPEAFEANRFYTVINKKSGEIVPMEVNFNFDDPNLIILPLAFGKRQGREFIWNDLLSLETGSLKLANGRVIEKTLYNRRTRQDEPALFVALTFERREVLDSSNIKPMNLIGVDRGENIPAVIALTDPEGCPLSRFKDSLGNPTHILRIRESYKEKQRTIQAKKEVEQRRAGGYSRKYASKAKNLADDMVRNTARDLLYYAVTQDAMLIFENLSRGFGRQGKRTFMAERQYTRMEDWLTAKLAYEGLPSKTYLSKTLAQYTSKTCSNCGFTITSADYDRVLEKLKKTATGWMTTINGKELKVEGQITYYNRYKRQNVVKDLSVELDRLSEESVNNDISSWTKGRSGEALSLLKKRFSHRPVQEKFVCLNCGFETHADEQAALNIARSWLFLRSQEYKKYQTNKTTGKNTDKRAFVETWQSFYRKKLKEVWKPAV

SEQ ID NO: 38166 - protein, 979 aa, synthetic construct
  REGION 1..979: note = engineered CasX variant
QEIKRINKIRRRLVKDSNTKKAGKTGPMKTLLVRVMTPDLRERLENLRKKPENIPQPISNTSRANLNKLLTDYTEMKKAILHVYWEEFQKDPVGLMSRVAQPASKKIDQNKLKPEMDEKGNLTTAGFACSQCGQPLFVYKLEQVSEKGKAYTNYFGRCNVAEHEKLILLAQLKPEKDSDEAVTYSLGKFGQRALDFYSIHVTKESTHPVKPLAQIAGNRYASVPVGKALSDACMGTIASFLSKYQDIIIEHQKVVKGNQKRLESLRELAGKENLEYPSVTLPPQPHTKEGVDAYNEVIARVRMWVNLNLWQKLKLSRDDAKPLLRLKGFPSFPLVERQANEVDWWDMVCNVKKLINEKKEDGKVFWQNLAGYKRQEALRPYLSSEEDRKKGKKFARYQLGDLLLHLEKKHGEDWGKVYDEAWERIDKKVEGLSKHIKLEEERRSEDAQSKAALTDWLRAKASFVIEGLKEADKDEFCRCELKLQKWYGDLRGKPFAIEAENSILDISGFSKQYNCAFIWQKDGVKKLNLYLIINYFKGGKLRFKKIKPEAFEANRFYTVINKKSGEIVPMEVNFNFDDPNLIILPLAFGKRQGREFIWNDLLSLETGSLKLANGRVIEKTLYNRRTRQDEPALFVALTFERREVLDSSNIKPMNLIGVDRGENIPAVIALTDPEGCPLSRFKDSLGNPTHILRIRESYKEKQRTIQAKKEVEQRRAGGYSRKYASKAKNLADDMVRNTARDLLYYAVTQDAMLIFENLSRGFGRQGKRTFMAERQYTRMEDWLTAKLAYEGLPSKTYLSKTLAQYTSKTCSNCGFTITSADYDRVLEKLKKTATGWMTTINGKELKVEGQITYYNRYKRQNVVKDLSVELDRLSEESVNNDISSWTKGRSGEALSLLKKRFSHRPVQEKFVCLNCGFETHADEQAALNIARSWLFLRSQEYKKYQTNKTTGKNTDKRAFVETWQSFYRKKLKEVWKPAV

SEQ ID NO: 38167 - protein, 979 aa, synthetic construct
  REGION 1..979: note = engineered CasX variant
QEIKRINKIRRRLVKDSNTKKAGKTGPMKTLLVRVMTPDLRERLENLRKKPENIPQPISNTSRANLNKLLTDYTEMKKAILHVYWEEFQKDPVGLMSRVAQPASKKIDQNKLKPEMDEKGNLTTAGFACSQCGQPLFVYKLEQVSEKGKAYTNYFGRCNVAEHEKLIKLAQLKPEKDSDEAVTYSLGKFGQRALDFYSIHVTKESTHPVKPLAQIAGNRYASGPVGKALSDACMGTIASFLSKYQDIIIEHQKVVKGNQKRLESLRELAGKENLEYPSVTLPPQPHTKEGVDAYNEVIARVRMWVNLNLWQKLKLSRDDAKPLLRLKGFPSFPLVERQANEVDWWDMVCNVKKLINEKKEDGKVFWQNLAGYKRQEALRPYLSSEEDRKKGKKFARYQLGDLLLHLEKKHGEDWGKVYDEAWERIDKKVEGLSKHIKLEEERRSEDAQSKAALTDWLRAKASFVIEGLKEADKDEFCRCELKLQKWYGDLRGKPFAIEAENSILDISGFSKQYNCAFIWQKDGVKKLNLYLIINYFKGGKLRFKKIKPEAFEANRFYTVINKKSGEIVPMEVNFNFDDPNLIILPLAFGKRQGREFIWNDLLSLETGSLKLANGRVIEKTLYNRRTRQDEPALFVALTFERREVLDSSNIKPMNLIGVDRGENIPAVIALTDPEGCPLSRFKDSLGNPTHILRIRESYKEKQRTIQAKKEVEQRRAGGYSRKYASKAKNLADDMVRNTARDLLYYAVTQDAMLIFENLSRGFGRQGKRTFMAERQYTRMEDWLTAKLAYEGLPSKTYLSKTLAQYTSKTCSNCGFTITSADYDRVLEKLKKTATGWMTTINGKELKVEGQITYYNRYKRQNVVKDLSVELDRLSEESVNNDISSWTKGRSGEALSLLKKRFSHRPVQEKFVCLNCGFETHADEQAALNIARSWLFLRSQEYKKYQTNKTTGKNTDKRAFVETWQSFYRKKLKEVWKPAV

SEQ ID NO: 38168 - protein, 978 aa, synthetic construct
  REGION 1..978: note = engineered CasX variant
QEIKRINKIRRRLVKDSNTKKAGKTGPMKTLLVRVMTPDLRERLENLRKKPENIPQPISNTSRANLNKLLTDYTEMKKAILHVYWEEFQKDPVGLMSRVAQPASKKIDQNKLKPEMDEKGNLTTAGFACSQCGQPLFVYKLEQVSEKGKAYTNYFGRCNVAEHEKLILLAQLKPEKDSDEAVTYSLGKFGQRALDFYSIHVTKESTHPVKPLAQIAGNRYASPVGKALSDACMGTIASFLSKYQDIIIEHQKVVKGNQKRLESLRELAGKENLEYPSVTLPPQPHTKEGVDAYNEVIARVRMWVNLNLWQKLKLSRDDAKPLLRLKGFPSFPLVERQANEVDWWDMVCNVKKLINEKKEDGKVFWQNLAGYKRQEALRPYLSSEEDRKKGKKFARYQLGDLLLHLEKKHGEDWGKVYDEAWERIDKKVEGLSKHIKLEEERRSEDAQSKAALTDWLRAKASFVIEGLKEADKDEFCRCELKLQKWYGDLRGKPFAIEAENSILDISGFSKQYNCAFIWQKDGVKKLNLYLIINYFKGGKLRFKKIKPEAFEANRFYTVINKKSGEIVPMEVNFNFDDPNLIILPLAFGKRQGREFIWNDLLSLETGSLKLANGRVIEKTLYNRRTRQDEPALFVALTFERREVLDSSNIKPMNLIGVDRGENIPAVIALTDPEGCPLSRFKDSLGNPTHILRIRESYKEKQRTIQAKKEVEQRRAGGYSRKYASKAKNLADDMVRNTARDLLYYAVTQDAMLIFENLSRGFGRQGKRTFMAERQYTRMEDWLTAKLAYEGLPSKTYLSKTLAQYTSKTCSNCGFTITSADYDRVLEKLKKTATGWMTTINGKELKVEGQITYYNRYKRQNVVKDLSVELDRLSEESVNNDISSWTKGRSGEALSLLKKRFSHRPVQEKFVCLNCGFETHADEQAALNIARSWLFLRSQEYKKYQTNKTTGKNTDKRAFVETWQSFYRKKLKEVWKPAV

SEQ ID NO: 38169 - protein, 978 aa, synthetic construct
  REGION 1..978: note = engineered CasX variant
QEIKRINKIRRRLVKDSNTKKAGKTGPMKTLLVRVMTPDLRERLENLRKKPENIPQPISNTSRANLNKLLTDYTEMKKAILHVYWEEFQKDPVGLMSRVAQPASKKIDQNKLKPEMDEKGNLTTAGFACSQCGQPLFVYKLEQVSEKGKAYTNYFGRCNVAEHEKLILLAQLKPEKDSDEAVTYSLGKFGQRALDFYSIHVTKESTHPVKPLAQIAGNRYASYPVGKALSDACMGTIASFLSKYQDIIIEHQKVVKGNQKRLESLRELAGKENLEYPSVTLPPQPHTKEGVDAYNEVIARVRMWVNLNLWQKLKLSRDDAKPLLRLKKFPSFPLVERQANEVDWWDMVCNVKKLINEKKEDGKVFWQNLAGYKRQEALRPYLSSEEDRKKGKKFARYQLGDLLLHLEKKHGEDWGKVYDEAWERIDKKVEGLSKHIKLEEERRSEDAQSKAALTDWLRAKASFVIEGLKEADKDEFCRCELKLQKWYGDLRGKPFAIEAENSILDISGFSKQYNCAFIWQKDGVKKLNLYLIINYFKGGKLRFKKIKPEAFEANRFYTVINKKSGEIVPMEVNFNFDDPNLIILPLAFGKRQGREFIWNDLLSLETGSLKLANGRVIEKTLYNRRTRQDEPALFVALTFERREVLDSSNIKPMNLIGVDRGENIPAVIALTDPEGCPLSRFKDSLGNPTHILRIRESYKEKQRTIQAKKEVEQRRAGGYSRKYASKAKNLADDMVRNTARDLLYYAVTQDAMLIFENLSRGFGRQGKRTFMAERQYTRMEDWLTAKLAYEGLPSKTYLSKTLAQYTSKTCSNCGFTITSADYDRVLEKLKKTATGWMTTINGKELKVEGQITYYNRYKRQNVVKDLSVELDRLSEESVNNDISSWTKGRSGEALSLLKKRFSHRPVQEKFVCLNCGFETHADEQAALNIARSWLFLRSQEYKKYQTNKTTGNTDKRAFVETWQSFYRKKLKEVWKPAV

SEQ ID NO: 38170 - protein, 978 aa, synthetic construct
  REGION 1..978: note = engineered CasX variant
QEIKRINKIRRRLVKDSNTKKAGKTGPMKTLLVRVMTPDLRERLENLRKKPENIPQPISNTSRANLNKLLTDYTEMKKAILHVYWEEFQKDPVGLMSRVAQPASKKIDQNKLKPEMDEKGNLTTAGFACSQCGQPLFVYKLEQVSEKGKAYTNYFGRCNVAEHEKLILLAQLKPEKDSDEAVTYSLGKFGQRALDFYSIHVTKESTHPVKPLAQIAGNRYASHPVGKALSDACMGTIASFLSKYQDIIIEHQKVVKGNQKRLESLRELAGKENLEYPSVTLPPQPHTKEGVDAYNEVIARVRMWVNLNLWQKLKLSRDDAKPLLRLKKFPSFPLVERQANEVDWWDMVCNVKKLINEKKEDGKVFWQNLAGYKRQEALRPYLSSEEDRKKGKKFARYQLGDLLLHLEKKHGEDWGKVYDEAWERIDKKVEGLSKHIKLEEERRSEDAQSKAALTDWLRAKASFVIEGLKEADKDEFCRCELKLQKWYGDLRGKPFAIEAENSILDISGFSKQYNCAFIWQKDGVKKLNLYLIINYFKGGKLRFKKIKPEAFEANRFYTVINKKSGEIVPMEVNFNFDDPNLIILPLAFGKRQGREFIWNDLLSLETGSLKLANGRVIEKTLYNRRTRQDEPALFVALTFERREVLDSSNIKPMNLIGVDRGENIPAVIALTDPEGCPLSRFKDSLGNPTHILRIRESYKEKQRTIQAKKEVEQRRAGGYSRKYASKAKNLADDMVRNTARDLLYYAVTQDAMLIFENLSRGFGRQGKRTFMAERQYTRMEDWLTAKLAYEGLPSKTYLSKTLAQYTSKTCSNCGFTITSADYDRVLEKLKKTATGWMTTINGKELKVEGQITYYNRYKRQNVVKDLSVELDRLSEESVNNDISSWTKGRSGEALSLLKKRFSHRPVQEKFVCLNCGFETHADEQAALNIARSWLFLRSQEYKKYQTNKTTGNTDKRAFVETWQSFYRKKLKEVWKPAV

SEQ ID NO: 38171 - protein, 978 aa, synthetic construct
  REGION 1..978: note = engineered CasX variant
QEIKRINKIRRRLVKDSNTKKAGKTGPMKTLLVRVMTPDLRERLENLRKKPENIPQPISNTSRANLNKLLTDYTEMKKAILHVYWEEFQKDPVGLMSRVAQPASKKIDQNKLKPEMDEKGNLTTAGFACSQCGQPLFVYKLEQVSEKGKAYTNYFGRCNVAEHEKLILLAQLKPEKDSDEAVTYSLGKFGQRALDFYSIHVTKESTHPVKPLAQIAGNRYASSPVGKALSDACMGTIASFLSKYQDIIIEHQKVVKGNQKRLESLRELAGKENLEYPSVTLPPQPHTKEGVDAYNEVIARVRMWVNLNLWQKLKLSRDDAKPLLRLKKFPSFPLVERQANEVDWWDMVCNVKKLINEKKEDGKVFWQNLAGYKRQEALRPYLSSEEDRKKGKKFARYQLGDLLLHLEKKHGEDWGKVYDEAWERIDKKVEGLSKHIKLEEERRSEDAQSKAALTDWLRAKASFVIEGLKEADKDEFCRCELKLQKWYGDLRGKPFAIEAENSILDISGFSKQYNCAFIWQKDGVKKLNLYLIINYFKGGKLRFKKIKPEAFEANRFYTVINKKSGEIVPMEVNFNFDDPNLIILPLAFGKRQGREFIWNDLLSLETGSLKLANGRVIEKTLYNRRTRQDEPALFVALTFERREVLDSSNIKPMNLIGVDRGENIPAVIALTDPEGCPLSRFKDSLGNPTHILRIRESYKEKQRTIQAKKEVEQRRAGGYSRKYASKAKNLADDMVRNTARDLLYYAVTQDAMLIFENLSRGFGRQGKRTFMAERQYTRMEDWLTAKLAYEGLPSKTYLSKTLAQYTSKTCSNCGFTITSADYDRVLEKLKKTATGWMTTINGKELKVEGQITYYNRYKRQNVVKDLSVELDRLSEESVNNDISSWTKGRSGEALSLLKKRFSHRPVQEKFVCLNCGFETHADEQAALNIARSWLFLRSQEYKKYQTNKTTGNTDKRAFVETWQSFYRKKLKEVWKPAV

SEQ ID NO: 38172 - protein, 978 aa, synthetic construct
  REGION 1..978: note = engineered CasX variant
QEIKRINKIRRRLVKDSNTKKAGKTGPMKTLLVRVMTPDLRERLENLRKKPENIPQPISNTSRANLNKLLTDYTEMKKAILHVYWEEFQKDPVGLMSRVAQPASKKIDQNKLKPEMDEKGNLTTAGFACSQCGQPLFVYKLEQVSEKGKAYTNYFGRCNVAEHEKLILLAQLKPEKDSDEAVTYSLGKFGQRALDFYSIHVTKESTHPVKPLAQIAGNRYASTPVGKALSDACMGTIASFLSKYQDIIIEHQKVVKGNQKRLESLRELAGKENLEYPSVTLPPQPHTKEGVDAYNEVIARVRMWVNLNLWQKLKLSRDDAKPLLRLKKFPSFPLVERQANEVDWWDMVCNVKKLINEKKEDGKVFWQNLAGYKRQEALRPYLSSEEDRKKGKKFARYQLGDLLLHLEKKHGEDWGKVYDEAWERIDKKVEGLSKHIKLEEERRSEDAQSKAALTDWLRAKASFVIEGLKEADKDEFCRCELKLQKWYGDLRGKPFAIEAENSILDISGFSKQYNCAFIWQKDGVKKLNLYLIINYFKGGKLRFKKIKPEAFEANRFYTVINKKSGEIVPMEVNFNFDDPNLIILPLAFGKRQGREFIWNDLLSLETGSLKLANGRVIEKTLYNRRTRQDEPALFVALTFERREVLDSSNIKPMNLIGVDRGENIPAVIALTDPEGCPLSRFKDSLGNPTHILRIRESYKEKQRTIQAKKEVEQRRAGGYSRKYASKAKNLADDMVRNTARDLLYYAVTQDAMLIFENLSRGFGRQGKRTFMAERQYTRMEDWLTAKLAYEGLPSKTYLSKTLAQYTSKTCSNCGFTITSADYDRVLEKLKKTATGWMTTINGKELKVEGQITYYNRYKRQNVVKDLSVELDRLSEESVNNDISSWTKGRSGEALSLLKKRFSHRPVQEKFVCLNCGFETHADEQAALNIARSWLFLRSQEYKKYQTNKTTGNTDKRAFVETWQSFYRKKLKEVWKPAV

SEQ ID NO: 38173 - protein, 978 aa, synthetic construct
  REGION 1..978: note = engineered CasX variant
QEIKRINKIRRRLVKDSNTKKAGKTGPMKTLLVRVMTPDLRERLENLRKKPENIPQPISNTSRANLNKLLTDYTEMKKAILHVYWEEFQKDPVGLMSRVAQPASKKIDQNKLKPEMDEKGNLTTAGFACSQCGQPLFVYKLEQVSEKGKAYTNYFGRCNVAEHEKLILLAQLKPEKDSDEAVTYSLGKFGQRALDFYSIHVTKESTHPVKPLAQIAGNRYASAPVGKALSDACMGTIASFLSKYQDIIIEHQKVVKGNQKRLESLRELAGKENLEYPSVTLPPQPHTKEGVDAYNEVIARVRMWVNLNLWQKLKLSRDDAKPLLRLKKFPSFPLVERQANEVDWWDMVCNVKKLINEKKEDGKVFWQNLAGYKRQEALRPYLSSEEDRKKGKKFARYQLGDLLLHLEKKHGEDWGKVYDEAWERIDKKVEGLSKHIKLEEERRSEDAQSKAALTDWLRAKASFVIEGLKEADKDEFCRCELKLQKWYGDLRGKPFAIEAENSILDISGFSKQYNCAFIWQKDGVKKLNLYLIINYFKGGKLRFKKIKPEAFEANRFYTVINKKSGEIVPMEVNFNFDDPNLIILPLAFGKRQGREFIWNDLLSLETGSLKLANGRVIEKTLYNRRTRQDEPALFVALTFERREVLDSSNIKPMNLIGVDRGENIPAVIALTDPEGCPLSRFKDSLGNPTHILRIRESYKEKQRTIQAKKEVEQRRAGGYSRKYASKAKNLADDMVRNTARDLLYYAVTQDAMLIFENLSRGFGRQGKRTFMAERQYTRMEDWLTAKLAYEGLPSKTYLSKTLAQYTSKTCSNCGFTITSADYDRVLEKLKKTATGWMTTINGKELKVEGQITYYNRYKRQNVVKDLSVELDRLSEESVNNDISSWTKGRSGEALSLLKKRFSHRPVQEKFVCLNCGFETHADEQAALNIARSWLFLRSQEYKKYQTNKTTGNTDKRAFVETWQSFYRKKLKEVWKPAV

SEQ ID NO: 38174 - protein, 978 aa, synthetic construct
  REGION 1..978: note = engineered CasX variant
QEIKRINKIRRRLVKDSNTKKAGKTGPMKTLLVRVMTPDLRERLENLRKKPENIPQPISNTSRANLNKLLTDYTEMKKAILHVYWEEFQKDPVGLMSRVAQPASKKIDQNKLKPEMDEKGNLTTAGFACSQCGQPLFVYKLEQVSEKGKAYTNYFGRCNVAEHEKLILLAQLKPEKDSDEAVTYSLGKFGQRALDFYSIHVTKESTHPVKPLAQIAGNRYASVPVGKALSDACMGTIASFLSKYQDIIIEHQKVVKGNQKRLESLRELAGKENLEYPSVTLPPQPHTKEGVDAYNEVIARVRMWVNLNLWQKLKLSRDDAKPLLRLKKFPSFPLVERQANEVDWWDMVCNVKKLINEKKEDGKVFWQNLAGYKRQEALRPYLSSEEDRKKGKKFARYQLGDLLLHLEKKHGEDWGKVYDEAWERIDKKVEGLSKHIKLEEERRSEDAQSKAALTDWLRAKASFVIEGLKEADKDEFCRCELKLQKWYGDLRGKPFAIEAENSILDISGFSKQYNCAFIWQKDGVKKLNLYLIINYFKGGKLRFKKIKPEAFEANRFYTVINKKSGEIVPMEVNFNFDDPNLIILPLAFGKRQGREFIWNDLLSLETGSLKLANGRVIEKTLYNRRTRQDEPALFVALTFERREVLDSSNIKPMNLIGVDRGENIPAVIALTDPEGCPLSRFKDSLGNPTHILRIRESYKEKQRTIQAKKEVEQRRAGGYSRKYASKAKNLADDMVRNTARDLLYYAVTQDAMLIFENLSRGFGRQGKRTFMAERQYTRMEDWLTAKLAYEGLPSKTYLSKTLAQYTSKTCSNCGFTITSADYDRVLEKLKKTATGWMTTINGKELKVEGQITYYNRYKRQNVVKDLSVELDRLSEESVNNDISSWTKGRSGEALSLLKKRFSHRPVQEKFVCLNCGFETHADEQAALNIARSWLFLRSQEYKKYQTNKTTGNTDKRAFVETWQSFYRKKLKEVWKPAV

SEQ ID NO: 38175 - protein, 978 aa, synthetic construct
  REGION 1..978: note = engineered CasX variant
QEIKRINKIRRRLVKDSNTKKAGKTGPMKTLLVRVMTPDLRERLENLRKKPENIPQPISNTSRANLNKLLTDYTEMKKAILHVYWEEFQKDPVGLMSRVAQPASKKIDQNKLKPEMDEKGNLTTAGFACSQCGQPLFVYKLEQVSEKGKAYTNYFGRCNVAEHEKLIKLAQLKPEKDSDEAVTYSLGKFGQRALDFYSIHVTKESTHPVKPLAQIAGNRYASGPVGKALSDACMGTIASFLSKYQDIIIEHQKVVKGNQKRLESLRELAGKENLEYPSVTLPPQPHTKEGVDAYNEVIARVRMWVNLNLWQKLKLSRDDAKPLLRLKKFPSFPLVERQANEVDWWDMVCNVKKLINEKKEDGKVFWQNLAGYKRQEALRPYLSSEEDRKKGKKFARYQLGDLLLHLEKKHGEDWGKVYDEAWERIDKKVEGLSKHIKLEEERRSEDAQSKAALTDWLRAKASFVIEGLKEADKDEFCRCELKLQKWYGDLRGKPFAIEAENSILDISGFSKQYNCAFIWQKDGVKKLNLYLIINYFKGGKLRFKKIKPEAFEANRFYTVINKKSGEIVPMEVNFNFDDPNLIILPLAFGKRQGREFIWNDLLSLETGSLKLANGRVIEKTLYNRRTRQDEPALFVALTFERREVLDSSNIKPMNLIGVDRGENIPAVIALTDPEGCPLSRFKDSLGNPTHILRIRESYKEKQRTIQAKKEVEQRRAGGYSRKYASKAKNLADDMVRNTARDLLYYAVTQDAMLIFENLSRGFGRQGKRTFMAERQYTRMEDWLTAKLAYEGLPSKTYLSKTLAQYTSKTCSNCGFTITSADYDRVLEKLKKTATGWMTTINGKELKVEGQITYYNRYKRQNVVKDLSVELDRLSEESVNNDISSWTKGRSGEALSLLKKRFSHRPVQEKFVCLNCGFETHADEQAALNIARSWLFLRSQEYKKYQTNKTTGNTDKRAFVETWQSFYRKKLKEVWKPAV

SEQ ID NO: 38176 - protein, 977 aa, synthetic construct
  REGION 1..977: note = engineered CasX variant
QEIKRINKIRRRLVKDSNTKKAGKTGPMKTLLVRVMTPDLRERLENLRKKPENIPQPISNTSRANLNKLLTDYTEMKKAILHVYWEEFQKDPVGLMSRVAQPASKKIDQNKLKPEMDEKGNLTTAGFACSQCGQPLFVYKLEQVSEKGKAYTNYFGRCNVAEHEKLILLAQLKPEKDSDEAVTYSLGKFGQRALDFYSIHVTKESTHPVKPLAQIAGNRYASPVGKALSDACMGTIASFLSKYQDIIIEHQKVVKGNQKRLESLRELAGKENLEYPSVTLPPQPHTKEGVDAYNEVIARVRMWVNLNLWQKLKLSRDDAKPLLRLKKFPSFPLVERQANEVDWWDMVCNVKKLINEKKEDGKVFWQNLAGYKRQEALRPYLSSEEDRKKGKKFARYQLGDLLLHLEKKHGEDWGKVYDEAWERIDKKVEGLSKHIKLEEERRSEDAQSKAALTDWLRAKASFVIEGLKEADKDEFCRCELKLQKWYGDLRGKPFAIEAENSILDISGFSKQYNCAFIWQKDGVKKLNLYLIINYFKGGKLRFKKIKPEAFEANRFYTVINKKSGEIVPMEVNFNFDDPNLIILPLAFGKRQGREFIWNDLLSLETGSLKLANGRVIEKTLYNRRTRQDEPALFVALTFERREVLDSSNIKPMNLIGVDRGENIPAVIALTDPEGCPLSRFKDSLGNPTHILRIRESYKEKQRTIQAKKEVEQRRAGGYSRKYASKAKNLADDMVRNTARDLLYYAVTQDAMLIFENLSRGFGRQGKRTFMAERQYTRMEDWLTAKLAYEGLPSKTYLSKTLAQYTSKTCSNCGFTITSADYDRVLEKLKKTATGWMTTINGKELKVEGQITYYNRYKRQNVVKDLSVELDRLSEESVNNDISSWTKGRSGEALSLLKKRFSHRPVQEKFVCLNCGFETHADEQAALNIARSWLFLRSQEYKKYQTNKTTGNTDKRAFVETWQSFYRKKLKEVWKPAV

SEQ ID NO: 38177 - protein, 978 aa, synthetic construct
  REGION 1..978: note = engineered CasX variant
QEIKRINKIRRRLVKDSNTKKAGKTGPMKTLLVRVMTPDLRERLENLRKKPENIPQPISNTSRANLNKLLTDYTEMKKAILHVYWEEFQKDPVGLMSRVAQPASKKIDQNKLKPEMDEKGNLTTAGFACSQCGQPLFVYKLEQVSEKGKAYTNYFGRCNVAEHEKLILLAQLKPEKDSDEAVTYSLGKFGQRALDFYSIHVTKESTHPVKPLAQIAGNRYASYPVGKALSDACMGTIASFLSKYQDIIIEHQKVVKGNQKRLESLRELAGKENLEYPSVTLPPQPHTKEGVDAYNEVIARVRMWVNLNLWQKLKLSRDDAKPLLRLKGFPSFPLVERQANEVDWWDMVCNVKKLINEKKEDGKVFWQNLAGYKRQEALRPYLSSEEDRKKGKKFARYQLGDLLLHLEKKHGEDWGKVYDEAWERIDKKVEGLSKHIKLEEERRSEDAQSKAALTDWLRAKASFVIEGLKEADKDEFCRCELKLQKWYGDLRGKPFAIEAENSILDISGFSKQYNCAFIWQKDGVKKLNLYLIINYFKGGKLRFKKIKPEAFEANRFYTVINKKSGEIVPMEVNFNFDDPNLIILPLAFGKRQGREFIWNDLLSLETGSLKLANGRVIEKTLYNRRTRQDEPALFVALTFERREVLDSSNIKPMNLIGVDRGENIPAVIALTDPEGCPLSRFKDSLGNPTHILRIRERYKEKQRTIQAKKEVEQRRAGGYSRKYASKAKNLADDMVRNTARDLLYYAVTQDAMLIFENLSRGFGRQGKRTFMAERQYTRMEDWLTAKLAYEGLPSKTYLSKTLAQYTSKTCSNCGFTITSADYDRVLEKLKKTATGWMTTINGKELKVEGQITYYNRYKRQNVVKDLSVELDRLSEESVNNDISSWTKGRSGEALSLLKKRFSHRPVQEKFVCLNCGFETHADEQAALNIARSWLFLRSQEYKKYQTNKTTGNTDKRAFVETWQSFYRKKLKEVWKPAV

SEQ ID NO: 38178 - protein, 978 aa, synthetic construct
  REGION 1..978: note = engineered CasX variant
QEIKRINKIRRRLVKDSNTKKAGKTGPMKTLLVRVMTPDLRERLENLRKKPENIPQPISNTSRANLNKLLTDYTEMKKAILHVYWEEFQKDPVGLMSRVAQPASKKIDQNKLKPEMDEKGNLTTAGFACSQCGQPLFVYKLEQVSEKGKAYTNYFGRCNVAEHEKLILLAQLKPEKDSDEAVTYSLGKFGQRALDFYSIHVTKESTHPVKPLAQIAGNRYASHPVGKALSDACMGTIASFLSKYQDIIIEHQKVVKGNQKRLESLRELAGKENLEYPSVTLPPQPHTKEGVDAYNEVIARVRMWVNLNLWQKLKLSRDDAKPLLRLKGFPSFPLVERQANEVDWWDMVCNVKKLINEKKEDGKVFWQNLAGYKRQEALRPYLSSEEDRKKGKKFARYQLGDLLLHLEKKHGEDWGKVYDEAWERIDKKVEGLSKHIKLEEERRSEDAQSKAALTDWLRAKASFVIEGLKEADKDEFCRCELKLQKWYGDLRGKPFAIEAENSILDISGFSKQYNCAFIWQKDGVKKLNLYLIINYFKGGKLRFKKIKPEAFEANRFYTVINKKSGEIVPMEVNFNFDDPNLIILPLAFGKRQGREFIWNDLLSLETGSLKLANGRVIEKTLYNRRTRQDEPALFVALTFERREVLDSSNIKPMNLIGVDRGENIPAVIALTDPEGCPLSRFKDSLGNPTHILRIRERYKEKQRTIQAKKEVEQRRAGGYSRKYASKAKNLADDMVRNTARDLLYYAVTQDAMLIFENLSRGFGRQGKRTFMAERQYTRMEDWLTAKLAYEGLPSKTYLSKTLAQYTSKTCSNCGFTITSADYDRVLEKLKKTATGWMTTINGKELKVEGQITYYNRYKRQNVVKDLSVELDRLSEESVNNDISSWTKGRSGEALSLLKKRFSHRPVQEKFVCLNCGFETHADEQAALNIARSWLFLRSQEYKKYQTNKTTGNTDKRAFVETWQSFYRKKLKEVWKPAV

SEQ ID NO: 38179 - protein, 978 aa, synthetic construct
  REGION 1..978: note = engineered CasX variant
QEIKRINKIRRRLVKDSNTKKAGKTGPMKTLLVRVMTPDLRERLENLRKKPENIPQPISNTSRANLNKLLTDYTEMKKAILHVYWEEFQKDPVGLMSRVAQPASKKIDQNKLKPEMDEKGNLTTAGFACSQCGQPLFVYKLEQVSEKGKAYTNYFGRCNVAEHEKLILLAQLKPEKDSDEAVTYSLGKFGQRALDFYSIHVTKESTHPVKPLAQIAGNRYASSPVGKALSDACMGTIASFLSKYQDIIIEHQKVVKGNQKRLESLRELAGKENLEYPSVTLPPQPHTKEGVDAYNEVIARVRMWVNLNLWQKLKLSRDDAKPLLRLKGFPSFPLVERQANEVDWWDMVCNVKKLINEKKEDGKVFWQNLAGYKRQEALRPYLSSEEDRKKGKKFARYQLGDLLLHLEKKHGEDWGKVYDEAWERIDKKVEGLSKHIKLEEERRSEDAQSKAALTDWLRAKASFVIEGLKEADKDEFCRCELKLQKWYGDLRGKPFAIEAENSILDISGFSKQYNCAFIWQKDGVKKLNLYLIINYFKGGKLRFKKIKPEAFEANRFYTVINKKSGEIVPMEVNFNFDDPNLIILPLAFGKRQGREFIWNDLLSLETGSLKLANGRVIEKTLYNRRTRQDEPALFVALTFERREVLDSSNIKPMNLIGVDRGENIPAVIALTDPEGCPLSRFKDSLGNPTHILRIRERYKEKQRTIQAKKEVEQRRAGGYSRKYASKAKNLADDMVRNTARDLLYYAVTQDAMLIFENLSRGFGRQGKRTFMAERQYTRMEDWLTAKLAYEGLPSKTYLSKTLAQYTSKTCSNCGFTITSADYDRVLEKLKKTATGWMTTINGKELKVEGQITYYNRYKRQNVVKDLSVELDRLSEESVNNDISSWTKGRSGEALSLLKKRFSHRPVQEKFVCLNCGFETHADEQAALNIARSWLFLRSQEYKKYQTNKTTGNTDKRAFVETWQSFYRKKLKEVWKPAV

SEQ ID NO: 38180 - protein, 978 aa, synthetic construct
  REGION 1..978: note = engineered CasX variant
QEIKRINKIRRRLVKDSNTKKAGKTGPMKTLLVRVMTPDLRERLENLRKKPENIPQPISNTSRANLNKLLTDYTEMKKAILHVYWEEFQKDPVGLMSRVAQPASKKIDQNKLKPEMDEKGNLTTAGFACSQCGQPLFVYKLEQVSEKGKAYTNYFGRCNVAEHEKLILLAQLKPEKDSDEAVTYSLGKFGQRALDFYSIHVTKESTHPVKPLAQIAGNRYASTPVGKALSDACMGTIASFLSKYQDIIIEHQKVVKGNQKRLESLRELAGKENLEYPSVTLPPQPHTKEGVDAYNEVIARVRMWVNLNLWQKLKLSRDDAKPLLRLKGFPSFPLVERQANEVDWWDMVCNVKKLINEKKEDGKVFWQNLAGYKRQEALRPYLSSEEDRKKGKKFARYQLGDLLLHLEKKHGEDWGKVYDEAWERIDKKVEGLSKHIKLEEERRSEDAQSKAALTDWLRAKASFVIEGLKEADKDEFCRCELKLQKWYGDLRGKPFAIEAENSILDISGFSKQYNCAFIWQKDGVKKLNLYLIINYFKGGKLRFKKIKPEAFEANRFYTVINKKSGEIVPMEVNFNFDDPNLIILPLAFGKRQGREFIWNDLLSLETGSLKLANGRVIEKTLYNRRTRQDEPALFVALTFERREVLDSSNIKPMNLIGVDRGENIPAVIALTDPEGCPLSRFKDSLGNPTHILRIRERYKEKQRTIQAKKEVEQRRAGGYSRKYASKAKNLADDMVRNTARDLLYYAVTQDAMLIFENLSRGFGRQGKRTFMAERQYTRMEDWLTAKLAYEGLPSKTYLSKTLAQYTSKTCSNCGFTITSADYDRVLEKLKKTATGWMTTINGKELKVEGQITYYNRYKRQNVVKDLSVELDRLSEESVNNDISSWTKGRSGEALSLLKKRFSHRPVQEKFVCLNCGFETHADEQAALNIARSWLFLRSQEYKKYQTNKTTGNTDKRAFVETWQSFYRKKLKEVWKPAV

SEQ ID NO: 38181 - protein, 978 aa, synthetic construct
  REGION 1..978: note = engineered CasX variant
QEIKRINKIRRRLVKDSNTKKAGKTGPMKTLLVRVMTPDLRERLENLRKKPENIPQPISNTSRANLNKLLTDYTEMKKAILHVYWEEFQKDPVGLMSRVAQPASKKIDQNKLKPEMDEKGNLTTAGFACSQCGQPLFVYKLEQVSEKGKAYTNYFGRCNVAEHEKLILLAQLKPEKDSDEAVTYSLGKFGQRALDFYSIHVTKESTHPVKPLAQIAGNRYASAPVGKALSDACMGTIASFLSKYQDIIIEHQKVVKGNQKRLESLRELAGKENLEYPSVTLPPQPHTKEGVDAYNEVIARVRMWVNLNLWQKLKLSRDDAKPLLRLKGFPSFPLVERQANEVDWWDMVCNVKKLINEKKEDGKVFWQNLAGYKRQEALRPYLSSEEDRKKGKKFARYQLGDLLLHLEKKHGEDWGKVYDEAWERIDKKVEGLSKHIKLEEERRSEDAQSKAALTDWLRAKASFVIEGLKEADKDEFCRCELKLQKWYGDLRGKPFAIEAENSILDISGFSKQYNCAFIWQKDGVKKLNLYLIINYFKGGKLRFKKIKPEAFEANRFYTVINKKSGEIVPMEVNFNFDDPNLIILPLAFGKRQGREFIWNDLLSLETGSLKLANGRVIEKTLYNRRTRQDEPALFVALTFERREVLDSSNIKPMNLIGVDRGENIPAVIALTDPEGCPLSRFKDSLGNPTHILRIRERYKEKQRTIQAKKEVEQRRAGGYSRKYASKAKNLADDMVRNTARDLLYYAVTQDAMLIFENLSRGFGRQGKRTFMAERQYTRMEDWLTAKLAYEGLPSKTYLSKTLAQYTSKTCSNCGFTITSADYDRVLEKLKKTATGWMTTINGKELKVEGQITYYNRYKRQNVVKDLSVELDRLSEESVNNDISSWTKGRSGEALSLLKKRFSHRPVQEKFVCLNCGFETHADEQAALNIARSWLFLRSQEYKKYQTNKTTGNTDKRAFVETWQSFYRKKLKEVWKPAV

SEQ ID NO: 38182 - protein, 978 aa, synthetic construct
  REGION 1..978: note = engineered CasX variant
QEIKRINKIRRRLVKDSNTKKAGKTGPMKTLLVRVMTPDLRERLENLRKKPENIPQPISNTSRANLNKLLTDYTEMKKAILHVYWEEFQKDPVGLMSRVAQPASKKIDQNKLKPEMDEKGNLTTAGFACSQCGQPLFVYKLEQVSEKGKAYTNYFGRCNVAEHEKLILLAQLKPEKDSDEAVTYSLGKFGQRALDFYSIHVTKESTHPVKPLAQIAGNRYASVPVGKALSDACMGTIASFLSKYQDIIIEHQKVVKGNQKRLESLRELAGKENLEYPSVTLPPQPHTKEGVDAYNEVIARVRMWVNLNLWQKLKLSRDDAKPLLRLKGFPSFPLVERQANEVDWWDMVCNVKKLINEKKEDGKVFWQNLAGYKRQEALRPYLSSEEDRKKGKKFARYQLGDLLLHLEKKHGEDWGKVYDEAWERIDKKVEGLSKHIKLEEERRSEDAQSKAALTDWLRAKASFVIEGLKEADKDEFCRCELKLQKWYGDLRGKPFAIEAENSILDISGFSKQYNCAFIWQKDGVKKLNLYLIINYFKGGKLRFKKIKPEAFEANRFYTVINKKSGEIVPMEVNFNFDDPNLIILPLAFGKRQGREFIWNDLLSLETGSLKLANGRVIEKTLYNRRTRQDEPALFVALTFERREVLDSSNIKPMNLIGVDRGENIPAVIALTDPEGCPLSRFKDSLGNPTHILRIRERYKEKQRTIQAKKEVEQRRAGGYSRKYASKAKNLADDMVRNTARDLLYYAVTQDAMLIFENLSRGFGRQGKRTFMAERQYTRMEDWLTAKLAYEGLPSKTYLSKTLAQYTSKTCSNCGFTITSADYDRVLEKLKKTATGWMTTINGKELKVEGQITYYNRYKRQNVVKDLSVELDRLSEESVNNDISSWTKGRSGEALSLLKKRFSHRPVQEKFVCLNCGFETHADEQAALNIARSWLFLRSQEYKKYQTNKTTGNTDKRAFVETWQSFYRKKLKEVWKPAV

SEQ ID NO: 38183 - protein, 978 aa, synthetic construct
  REGION 1..978: note = engineered CasX variant
QEIKRINKIRRRLVKDSNTKKAGKTGPMKTLLVRVMTPDLRERLENLRKKPENIPQPISNTSRANLNKLLTDYTEMKKAILHVYWEEFQKDPVGLMSRVAQPASKKIDQNKLKPEMDEKGNLTTAGFACSQCGQPLFVYKLEQVSEKGKAYTNYFGRCNVAEHEKLIKLAQLKPEKDSDEAVTYSLGKFGQRALDFYSIHVTKESTHPVKPLAQIAGNRYASGPVGKALSDACMGTIASFLSKYQDIIIEHQKVVKGNQKRLESLRELAGKENLEYPSVTLPPQPHTKEGVDAYNEVIARVRMWVNLNLWQKLKLSRDDAKPLLRLKGFPSFPLVERQANEVDWWDMVCNVKKLINEKKEDGKVFWQNLAGYKRQEALRPYLSSEEDRKKGKKFARYQLGDLLLHLEKKHGEDWGKVYDEAWERIDKKVEGLSKHIKLEEERRSEDAQSKAALTDWLRAKASFVIEGLKEADKDEFCRCELKLQKWYGDLRGKPFAIEAENSILDISGFSKQYNCAFIWQKDGVKKLNLYLIINYFKGGKLRFKKIKPEAFEANRFYTVINKKSGEIVPMEVNFNFDDPNLIILPLAFGKRQGREFIWNDLLSLETGSLKLANGRVIEKTLYNRRTRQDEPALFVALTFERREVLDSSNIKPMNLIGVDRGENIPAVIALTDPEGCPLSRFKDSLGNPTHILRIRERYKEKQRTIQAKKEVEQRRAGGYSRKYASKAKNLADDMVRNTARDLLYYAVTQDAMLIFENLSRGFGRQGKRTFMAERQYTRMEDWLTAKLAYEGLPSKTYLSKTLAQYTSKTCSNCGFTITSADYDRVLEKLKKTATGWMTTINGKELKVEGQITYYNRYKRQNVVKDLSVELDRLSEESVNNDISSWTKGRSGEALSLLKKRFSHRPVQEKFVCLNCGFETHADEQAALNIARSWLFLRSQEYKKYQTNKTTGNTDKRAFVETWQSFYRKKLKEVWKPAV

SEQ ID NO: 38184 - protein, 977 aa, synthetic construct
  REGION 1..977: note = engineered CasX variant
QEIKRINKIRRRLVKDSNTKKAGKTGPMKTLLVRVMTPDLRERLENLRKKPENIPQPISNTSRANLNKLLTDYTEMKKAILHVYWEEFQKDPVGLMSRVAQPASKKIDQNKLKPEMDEKGNLTTAGFACSQCGQPLFVYKLEQVSEKGKAYTNYFGRCNVAEHEKLILLAQLKPEKDSDEAVTYSLGKFGQRALDFYSIHVTKESTHPVKPLAQIAGNRYASPVGKALSDACMGTIASFLSKYQDIIIEHQKVVKGNQKRLESLRELAGKENLEYPSVTLPPQPHTKEGVDAYNEVIARVRMWVNLNLWQKLKLSRDDAKPLLRLKGFPSFPLVERQANEVDWWDMVCNVKKLINEKKEDGKVFWQNLAGYKRQEALRPYLSSEEDRKKGKKFARYQLGDLLLHLEKKHGEDWGKVYDEAWERIDKKVEGLSKHIKLEEERRSEDAQSKAALTDWLRAKASFVIEGLKEADKDEFCRCELKLQKWYGDLRGKPFAIEAENSILDISGFSKQYNCAFIWQKDGVKKLNLYLIINYFKGGKLRFKKIKPEAFEANRFYTVINKKSGEIVPMEVNFNFDDPNLIILPLAFGKRQGREFIWNDLLSLETGSLKLANGRVIEKTLYNRRTRQDEPALFVALTFERREVLDSSNIKPMNLIGVDRGENIPAVIALTDPEGCPLSRFKDSLGNPTHILRIRERYKEKQRTIQAKKEVEQRRAGGYSRKYASKAKNLADDMVRNTARDLLYYAVTQDAMLIFENLSRGFGRQGKRTFMAERQYTRMEDWLTAKLAYEGLPSKTYLSKTLAQYTSKTCSNCGFTITSADYDRVLEKLKKTATGWMTTINGKELKVEGQITYYNRYKRQNVVKDLSVELDRLSEESVNNDISSWTKGRSGEALSLLKKRFSHRPVQEKFVCLNCGFETHADEQAALNIARSWLFLRSQEYKKYQTNKTTGNTDKRAFVETWQSFYRKKLKEVWKPAV

SEQ ID NO: 38185 - protein, 978 aa, synthetic construct
  REGION 1..978: note = engineered CasX variant
QEIKRINKIRRRLVKDSNTKKAGKTGPMKTLLVRVMTPDLRERLENLRKKPENIPQPISNTSRANLNKLLTDYTEMKKAILHVYWEEFQKDPVGLMSRVAQPASKKIDQNKLKPEMDEKGNLTTAGFACSQCGQPLFVYKLEQVSEKGKAYTNYFGRCNVAEHEKLILLAQLKPEKDSDEAVTYSLGKFGQRALDFYSIHVTKESTHPVKPLAQIAGNRYASYPVGKALSDACMGTIASFLSKYQDIIIEHQKVVKGNQKRLESLRELAGKENLEYPSVTLPPQPHTKEGVDAYNEVIARVRMWVNLNLWQKLKLSRDDAKPLLRLKGFPSFPLVERQANEVDWWDMVCNVKKLINEKKEDGKVFWQNLAGYKRQEALRPYLSSEEDRKKGKKFARYQLGDLLLHLEKKHGEDWGKVYDEAWERIDKKVEGLSKHIKLEEERRSEDAQSKAALTDWLRAKASFVIEGLKEADKDEFCRCELKLQKWYGDLRGKPFAIEAENSILDISGFSKQYNCAFIWQKDGVKKLNLYLIINYFKGGKLRFKKIKPEAFEANRFYTVINKKSGEIVPMEVNFNFDDPNLIILPLAFGKRQGREFIWNDLLSLETGSLQLANGRVIEKTLYNRRTRQDEPALFVALTFERREVLDSSNIKPMNLIGVDRGENIPAVIALTDPEGCPLSRFKDSLGNPTHILRIRESYKEKQRTIQAKKEVEQRRAGGYSRKYASKAKNLADDMVRNTARDLLYYAVTQDAMLIFENLSRGFGRQGKRTFMAERQYTRMEDWLTAKLAYEGLPSKTYLSKTLAQYTSKTCSNCGFTITSADYDRVLEKLKKTATGWMTTINGKELKVEGQITYYNRYKRQNVVKDLSVELDRLSEESVNNDISSWTKGRSGEALSLLKKRFSHRPVQEKFVCLNCGFETHADEQAALNIARSWLFLRSQEYKKYQTNKTTGNTDKRAFVETWQSFYRKKLKEVWKPAV

SEQ ID NO: 38186 - protein, 978 aa, synthetic construct
  REGION 1..978: note = engineered CasX variant
QEIKRINKIRRRLVKDSNTKKAGKTGPMKTLLVRVMTPDLRERLENLRKKPENIPQPISNTSRANLNKLLTDYTEMKKAILHVYWEEFQKDPVGLMSRVAQPASKKIDQNKLKPEMDEKGNLTTAGFACSQCGQPLFVYKLEQVSEKGKAYTNYFGRCNVAEHEKLILLAQLKPEKDSDEAVTYSLGKFGQRALDFYSIHVTKESTHPVKPLAQIAGNRYASHPVGKALSDACMGTIASFLSKYQDIIIEHQKVVKGNQKRLESLRELAGKENLEYPSVTLPPQPHTKEGVDAYNEVIARVRMWVNLNLWQKLKLSRDDAKPLLRLKGFPSFPLVERQANEVDWWDMVCNVKKLINEKKEDGKVFWQNLAGYKRQEALRPYLSSEEDRKKGKKFARYQLGDLLLHLEKKHGEDWGKVYDEAWERIDKKVEGLSKHIKLEEERRSEDAQSKAALTDWLRAKASFVIEGLKEADKDEFCRCELKLQKWYGDLRGKPFAIEAENSILDISGFSKQYNCAFIWQKDGVKKLNLYLIINYFKGGKLRFKKIKPEAFEANRFYTVINKKSGEIVPMEVNFNFDDPNLIILPLAFGKRQGREFIWNDLLSLETGSLQLANGRVIEKTLYNRRTRQDEPALFVALTFERREVLDSSNIKPMNLIGVDRGENIPAVIALTDPEGCPLSRFKDSLGNPTHILRIRESYKEKQRTIQAKKEVEQRRAGGYSRKYASKAKNLADDMVRNTARDLLYYAVTQDAMLIFENLSRGFGRQGKRTFMAERQYTRMEDWLTAKLAYEGLPSKTYLSKTLAQYTSKTCSNCGFTITSADYDRVLEKLKKTATGWMTTINGKELKVEGQITYYNRYKRQNVVKDLSVELDRLSEESVNNDISSWTKGRSGEALSLLKKRFSHRPVQEKFVCLNCGFETHADEQAALNIARSWLFLRSQEYKKYQTNKTTGNTDKRAFVETWQSFYRKKLKEVWKPAV

SEQ ID NO: 38187 - protein, 978 aa, synthetic construct
  REGION 1..978: note = engineered CasX variant
QEIKRINKIRRRLVKDSNTKKAGKTGPMKTLLVRVMTPDLRERLENLRKKPENIPQPISNTSRANLNKLLTDYTEMKKAILHVYWEEFQKDPVGLMSRVAQPASKKIDQNKLKPEMDEKGNLTTAGFACSQCGQPLFVYKLEQVSEKGKAYTNYFGRCNVAEHEKLILLAQLKPEKDSDEAVTYSLGKFGQRALDFYSIHVTKESTHPVKPLAQIAGNRYASSPVGKALSDACMGTIASFLSKYQDIIIEHQKVVKGNQKRLESLRELAGKENLEYPSVTLPPQPHTKEGVDAYNEVIARVRMWVNLNLWQKLKLSRDDAKPLLRLKGFPSFPLVERQANEVDWWDMVCNVKKLINEKKEDGKVFWQNLAGYKRQEALRPYLSSEEDRKKGKKFARYQLGDLLLHLEKKHGEDWGKVYDEAWERIDKKVEGLSKHIKLEEERRSEDAQSKAALTDWLRAKASFVIEGLKEADKDEFCRCELKLQKWYGDLRGKPFAIEAENSILDISGFSKQYNCAFIWQKDGVKKLNLYLIINYFKGGKLRFKKIKPEAFEANRFYTVINKKSGEIVPMEVNFNFDDPNLIILPLAFGKRQGREFIWNDLLSLETGSLQLANGRVIEKTLYNRRTRQDEPALFVALTFERREVLDSSNIKPMNLIGVDRGENIPAVIALTDPEGCPLSRFKDSLGNPTHILRIRESYKEKQRTIQAKKEVEQRRAGGYSRKYASKAKNLADDMVRNTARDLLYYAVTQDAMLIFENLSRGFGRQGKRTFMAERQYTRMEDWLTAKLAYEGLPSKTYLSKTLAQYTSKTCSNCGFTITSADYDRVLEKLKKTATGWMTTINGKELKVEGQITYYNRYKRQNVVKDLSVELDRLSEESVNNDISSWTKGRSGEALSLLKKRFSHRPVQEKFVCLNCGFETHADEQAALNIARSWLFLRSQEYKKYQTNKTTGNTDKRAFVETWQSFYRKKLKEVWKPAV

SEQ ID NO: 38188 - protein, 978 aa, synthetic construct
  REGION 1..978: note = engineered CasX variant
QEIKRINKIRRRLVKDSNTKKAGKTGPMKTLLVRVMTPDLRERLENLRKKPENIPQPISNTSRANLNKLLTDYTEMKKAILHVYWEEFQKDPVGLMSRVAQPASKKIDQNKLKPEMDEKGNLTTAGFACSQCGQPLFVYKLEQVSEKGKAYTNYFGRCNVAEHEKLILLAQLKPEKDSDEAVTYSLGKFGQRALDFYSIHVTKESTHPVKPLAQIAGNRYASTPVGKALSDACMGTIASFLSKYQDIIIEHQKVVKGNQKRLESLRELAGKENLEYPSVTLPPQPHTKEGVDAYNEVIARVRMWVNLNLWQKLKLSRDDAKPLLRLKGFPSFPLVERQANEVDWWDMVCNVKKLINEKKEDGKVFWQNLAGYKRQEALRPYLSSEEDRKKGKKFARYQLGDLLLHLEKKHGEDWGKVYDEAWERIDKKVEGLSKHIKLEEERRSEDAQSKAALTDWLRAKASFVIEGLKEADKDEFCRCELKLQKWYGDLRGKPFAIEAENSILDISGFSKQYNCAFIWQKDGVKKLNLYLIINYFKGGKLRFKKIKPEAFEANRFYTVINKKSGEIVPMEVNFNFDDPNLIILPLAFGKRQGREFIWNDLLSLETGSLQLANGRVIEKTLYNRRTRQDEPALFVALTFERREVLDSSNIKPMNLIGVDRGENIPAVIALTDPEGCPLSRFKDSLGNPTHILRIRESYKEKQRTIQAKKEVEQRRAGGYSRKYASKAKNLADDMVRNTARDLLYYAVTQDAMLIFENLSRGFGRQGKRTFMAERQYTRMEDWLTAKLAYEGLPSKTYLSKTLAQYTSKTCSNCGFTITSADYDRVLEKLKKTATGWMTTINGKELKVEGQITYYNRYKRQNVVKDLSVELDRLSEESVNNDISSWTKGRSGEALSLLKKRFSHRPVQEKFVCLNCGFETHADEQAALNIARSWLFLRSQEYKKYQTNKTTGNTDKRAFVETWQSFYRKKLKEVWKPAV

SEQ ID NO: 38189 - protein, 978 aa, synthetic construct
  REGION 1..978: note = engineered CasX variant
QEIKRINKIRRRLVKDSNTKKAGKTGPMKTLLVRVMTPDLRERLENLRKKPENIPQPISNTSRANLNKLLTDYTEMKKAILHVYWEEFQKDPVGLMSRVAQPASKKIDQNKLKPEMDEKGNLTTAGFACSQCGQPLFVYKLEQVSEKGKAYTNYFGRCNVAEHEKLILLAQLKPEKDSDEAVTYSLGKFGQRALDFYSIHVTKESTHPVKPLAQIAGNRYASAPVGKALSDACMGTIASFLSKYQDIIIEHQKVVKGNQKRLESLRELAGKENLEYPSVTLPPQPHTKEGVDAYNEVIARVRMWVNLNLWQKLKLSRDDAKPLLRLKGFPSFPLVERQANEVDWWDMVCNVKKLINEKKEDGKVFWQNLAGYKRQEALRPYLSSEEDRKKGKKFARYQLGDLLLHLEKKHGEDWGKVYDEAWERIDKKVEGLSKHIKLEEERRSEDAQSKAALTDWLRAKASFVIEGLKEADKDEFCRCELKLQKWYGDLRGKPFAIEAENSILDISGFSKQYNCAFIWQKDGVKKLNLYLIINYFKGGKLRFKKIKPEAFEANRFYTVINKKSGEIVPMEVNFNFDDPNLIILPLAFGKRQGREFIWNDLLSLETGSLQLANGRVIEKTLYNRRTRQDEPALFVALTFERREVLDSSNIKPMNLIGVDRGENIPAVIALTDPEGCPLSRFKDSLGNPTHILRIRESYKEKQRTIQAKKEVEQRRAGGYSRKYASKAKNLADDMVRNTARDLLYYAVTQDAMLIFENLSRGFGRQGKRTFMAERQYTRMEDWLTAKLAYEGLPSKTYLSKTLAQYTSKTCSNCGFTITSADYDRVLEKLKKTATGWMTTINGKELKVEGQITYYNRYKRQNVVKDLSVELDRLSEESVNNDISSWTKGRSGEALSLLKKRFSHRPVQEKFVCLNCGFETHADEQAALNIARSWLFLRSQEYKKYQTNKTTGNTDKRAFVETWQSFYRKKLKEVWKPAV

SEQ ID NO: 38190 - protein, 978 aa, synthetic construct
  REGION 1..978: note = engineered CasX variant
QEIKRINKIRRRLVKDSNTKKAGKTGPMKTLLVRVMTPDLRERLENLRKKPENIPQPISNTSRANLNKLLTDYTEMKKAILHVYWEEFQKDPVGLMSRVAQPASKKIDQNKLKPEMDEKGNLTTAGFACSQCGQPLFVYKLEQVSEKGKAYTNYFGRCNVAEHEKLILLAQLKPEKDSDEAVTYSLGKFGQRALDFYSIHVTKESTHPVKPLAQIAGNRYASVPVGKALSDACMGTIASFLSKYQDIIIEHQKVVKGNQKRLESLRELAGKENLEYPSVTLPPQPHTKEGVDAYNEVIARVRMWVNLNLWQKLKLSRDDAKPLLRLKGFPSFPLVERQANEVDWWDMVCNVKKLINEKKEDGKVFWQNLAGYKRQEALRPYLSSEEDRKKGKKFARYQLGDLLLHLEKKHGEDWGKVYDEAWERIDKKVEGLSKHIKLEEERRSEDAQSKAALTDWLRAKASFVIEGLKEADKDEFCRCELKLQKWYGDLRGKPFAIEAENSILDISGFSKQYNCAFIWQKDGVKKLNLYLIINYFKGGKLRFKKIKPEAFEANRFYTVINKKSGEIVPMEVNFNFDDPNLIILPLAFGKRQGREFIWNDLLSLETGSLQLANGRVIEKTLYNRRTRQDEPALFVALTFERREVLDSSNIKPMNLIGVDRGENIPAVIALTDPEGCPLSRFKDSLGNPTHILRIRESYKEKQRTIQAKKEVEQRRAGGYSRKYASKAKNLADDMVRNTARDLLYYAVTQDAMLIFENLSRGFGRQGKRTFMAERQYTRMEDWLTAKLAYEGLPSKTYLSKTLAQYTSKTCSNCGFTITSADYDRVLEKLKKTATGWMTTINGKELKVEGQITYYNRYKRQNVVKDLSVELDRLSEESVNNDISSWTKGRSGEALSLLKKRFSHRPVQEKFVCLNCGFETHADEQAALNIARSWLFLRSQEYKKYQTNKTTGNTDKRAFVETWQSFYRKKLKEVWKPAV

SEQ ID NO: 38191 - protein, 978 aa, synthetic construct
  REGION 1..978: note = engineered CasX variant
QEIKRINKIRRRLVKDSNTKKAGKTGPMKTLLVRVMTPDLRERLENLRKKPENIPQPISNTSRANLNKLLTDYTEMKKAILHVYWEEFQKDPVGLMSRVAQPASKKIDQNKLKPEMDEKGNLTTAGFACSQCGQPLFVYKLEQVSEKGKAYTNYFGRCNVAEHEKLIKLAQLKPEKDSDEAVTYSLGKFGQRALDFYSIHVTKESTHPVKPLAQIAGNRYASGPVGKALSDACMGTIASFLSKYQDIIIEHQKVVKGNQKRLESLRELAGKENLEYPSVTLPPQPHTKEGVDAYNEVIARVRMWVNLNLWQKLKLSRDDAKPLLRLKGFPSFPLVERQANEVDWWDMVCNVKKLINEKKEDGKVFWQNLAGYKRQEALRPYLSSEEDRKKGKKFARYQLGDLLLHLEKKHGEDWGKVYDEAWERIDKKVEGLSKHIKLEEERRSEDAQSKAALTDWLRAKASFVIEGLKEADKDEFCRCELKLQKWYGDLRGKPFAIEAENSILDISGFSKQYNCAFIWQKDGVKKLNLYLIINYFKGGKLRFKKIKPEAFEANRFYTVINKKSGEIVPMEVNFNFDDPNLIILPLAFGKRQGREFIWNDLLSLETGSLQLANGRVIEKTLYNRRTRQDEPALFVALTFERREVLDSSNIKPMNLIGVDRGENIPAVIALTDPEGCPLSRFKDSLGNPTHILRIRESYKEKQRTIQAKKEVEQRRAGGYSRKYASKAKNLADDMVRNTARDLLYYAVTQDAMLIFENLSRGFGRQGKRTFMAERQYTRMEDWLTAKLAYEGLPSKTYLSKTLAQYTSKTCSNCGFTITSADYDRVLEKLKKTATGWMTTINGKELKVEGQITYYNRYKRQNVVKDLSVELDRLSEESVNNDISSWTKGRSGEALSLLKKRFSHRPVQEKFVCLNCGFETHADEQAALNIARSWLFLRSQEYKKYQTNKTTGNTDKRAFVETWQSFYRKKLKEVWKPAV

SEQ ID NO: 38192 - protein, 977 aa, synthetic construct
  REGION 1..977: note = engineered CasX variant
QEIKRINKIRRRLVKDSNTKKAGKTGPMKTLLVRVMTPDLRERLENLRKKPENIPQPISNTSRANLNKLLTDYTEMKKAILHVYWEEFQKDPVGLMSRVAQPASKKIDQNKLKPEMDEKGNLTTAGFACSQCGQPLFVYKLEQVSEKGKAYTNYFGRCNVAEHEKLILLAQLKPEKDSDEAVTYSLGKFGQRALDFYSIHVTKESTHPVKPLAQIAGNRYASPVGKALSDACMGTIASFLSKYQDIIIEHQKVVKGNQKRLESLRELAGKENLEYPSVTLPPQPHTKEGVDAYNEVIARVRMWVNLNLWQKLKLSRDDAKPLLRLKGFPSFPLVERQANEVDWWDMVCNVKKLINEKKEDGKVFWQNLAGYKRQEALRPYLSSEEDRKKGKKFARYQLGDLLLHLEKKHGEDWGKVYDEAWERIDKKVEGLSKHIKLEEERRSEDAQSKAALTDWLRAKASFVIEGLKEADKDEFCRCELKLQKWYGDLRGKPFAIEAENSILDISGFSKQYNCAFIWQKDGVKKLNLYLIINYFKGGKLRFKKIKPEAFEANRFYTVINKKSGEIVPMEVNFNFDDPNLIILPLAFGKRQGREFIWNDLLSLETGSLQLANGRVIEKTLYNRRTRQDEPALFVALTFERREVLDSSNIKPMNLIGVDRGENIPAVIALTDPEGCPLSRFKDSLGNPTHILRIRESYKEKQRTIQAKKEVEQRRAGGYSRKYASKAKNLADDMVRNTARDLLYYAVTQDAMLIFENLSRGFGRQGKRTFMAERQYTRMEDWLTAKLAYEGLPSKTYLSKTLAQYTSKTCSNCGFTITSADYDRVLEKLKKTATGWMTTINGKELKVEGQITYYNRYKRQNVVKDLSVELDRLSEESVNNDISSWTKGRSGEALSLLKKRFSHRPVQEKFVCLNCGFETHADEQAALNIARSWLFLRSQEYKKYQTNKTTGNTDKRAFVETWQSFYRKKLKEVWKPAV

SEQ ID NO: 38193 - protein, 978 aa, synthetic construct
  REGION 1..978: note = engineered CasX variant
QEIKRINKIRRRLVKDSNTKKAGKTGPMKTLLVRVMTPDLRERLENLRKKPENIPQPISNTSRANLNKLLTDYTEMKKAILHVYWEEFQKDPVGLMSRVAQPASKKIDQNKLKPEMDEKGNLTTAGFACSQCGQPLFVYKLEQVSEKGKAYTNYFGRCNVAEHEKLILLAQLKPEKDSDEAVTYSLGKFGQRALDFYSIHVTKESTHPVKPLAQIAGNRYASYPVGKALSDACMGTIASFLSKYQDIIIEHQKVVKGNQKRLESLRELAGKENLEYPSVTLPPQPHTKEGVDAYNEVIARVRMWVNLNLWQKLKLSRDDAKPLLRLKGFPSFPLVERQANEVDWWDMVCNVKKLINEKKEDGKVFWQNLAGYKRQEALRPYLSSEEDRKKGKKFARYQLGDLLLHLEKKHGEDWGKVYDEAWERIDKKVEGLSKHIKLEEERRSEDAQSKAALTDWLRAKASFVIEGLKEADKDEFCRCELKLQKWYGDLRGKPFAIEAENSILDISGFSKQYNCAFIWQKDGVKKLNLYLIINYFKGGKLRFKKIKPEAFEANRFYTVINKKSGEIVPMEVNFNFDDPNLIILPLAFGKRQGREFIWNDLLSLETGSLKLANGRVIEKTLYNRRTRQDEPALFVALTFERREVLDSSNIKPMNLIGVDRGENIPAVIALTDPEGCPLSRFKDSLGNPTHILRIGESYKEKQRTIQAKKEVEQRRAGGYSRKYASKAKNLADDMVRNTARDLLYYAVTQDAMLIFENLSRGFGRQGKRTFSAERQYTRMEDWLTAKLAYEGLPSKTYLSKTLAQYTSKTCSNCGFTITSADYDRVLEKLKKTATGWMTTINGKELKVEGQITYYNRYKRQNVVKDLSVELDRLSEESVNNDISSWDKGRSGEALSLLKKRFSHRPVQEKFVCLNCGFETHADEQAALNIARSWLFLRSQEYKKYQTNKTTGNTDKRAFVETWQSFYRKKLKEVWKPAV

SEQ ID NO: 38194 - protein, 978 aa, synthetic construct
  REGION 1..978: note = engineered CasX variant
QEIKRINKIRRRLVKDSNTKKAGKTGPMKTLLVRVMTPDLRERLENLRKKPENIPQPISNTSRANLNKLLTDYTEMKKAILHVYWEEFQKDPVGLMSRVAQPASKKIDQNKLKPEMDEKGNLTTAGFACSQCGQPLFVYKLEQVSEKGKAYTNYFGRCNVAEHEKLILLAQLKPEKDSDEAVTYSLGKFGQRALDFYSIHVTKESTHPVKPLAQIAGNRYASHPVGKALSDACMGTIASFLSKYQDIIIEHQKVVKGNQKRLESLRELAGKENLEYPSVTLPPQPHTKEGVDAYNEVIARVRMWVNLNLWQKLKLSRDDAKPLLRLKGFPSFPLVERQANEVDWWDMVCNVKKLINEKKEDGKVFWQNLAGYKRQEALRPYLSSEEDRKKGKKFARYQLGDLLLHLEKKHGEDWGKVYDEAWERIDKKVEGLSKHIKLEEERRSEDAQSKAALTDWLRAKASFVIEGLKEADKDEFCRCELKLQKWYGDLRGKPFAIEAENSILDISGFSKQYNCAFIWQKDGVKKLNLYLIINYFKGGKLRFKKIKPEAFEANRFYTVINKKSGEIVPMEVNFNFDDPNLIILPLAFGKRQGREFIWNDLLSLETGSLKLANGRVIEKTLYNRRTRQDEPALFVALTFERREVLDSSNIKPMNLIGVDRGENIPAVIALTDPEGCPLSRFKDSLGNPTHILRIGESYKEKQRTIQAKKEVEQRRAGGYSRKYASKAKNLADDMVRNTARDLLYYAVTQDAMLIFENLSRGFGRQGKRTFSAERQYTRMEDWLTAKLAYEGLPSKTYLSKTLAQYTSKTCSNCGFTITSADYDRVLEKLKKTATGWMTTINGKELKVEGQITYYNRYKRQNVVKDLSVELDRLSEESVNNDISSWDKGRSGEALSLLKKRFSHRPVQEKFVCLNCGFETHADEQAALNIARSWLFLRSQEYKKYQTNKTTGNTDKRAFVETWQSFYRKKLKEVWKPAV

SEQ ID NO: 38195 - protein, 978 aa, synthetic construct
  REGION 1..978: note = engineered CasX variant
QEIKRINKIRRRLVKDSNTKKAGKTGPMKTLLVRVMTPDLRERLENLRKKPENIPQPISNTSRANLNKLLTDYTEMKKAILHVYWEEFQKDPVGLMSRVAQPASKKIDQNKLKPEMDEKGNLTTAGFACSQCGQPLFVYKLEQVSEKGKAYTNYFGRCNVAEHEKLILLAQLKPEKDSDEAVTYSLGKFGQRALDFYSIHVTKESTHPVKPLAQIAGNRYASSPVGKALSDACMGTIASFLSKYQDIIIEHQKVVKGNQKRLESLRELAGKENLEYPSVTLPPQPHTKEGVDAYNEVIARVRMWVNLNLWQKLKLSRDDAKPLLRLKGFPSFPLVERQANEVDWWDMVCNVKKLINEKKEDGKVFWQNLAGYKRQEALRPYLSSEEDRKKGKKFARYQLGDLLLHLEKKHGEDWGKVYDEAWERIDKKVEGLSKHIKLEEERRSEDAQSKAALTDWLRAKASFVIEGLKEADKDEFCRCELKLQKWYGDLRGKPFAIEAENSILDISGFSKQYNCAFIWQKDGVKKLNLYLIINYFKGGKLRFKKIKPEAFEANRFYTVINKKSGEIVPMEVNFNFDDPNLIILPLAFGKRQGREFIWNDLLSLETGSLKLANGRVIEKTLYNRRTRQDEPALFVALTFERREVLDSSNIKPMNLIGVDRGENIPAVIALTDPEGCPLSRFKDSLGNPTHILRIGESYKEKQRTIQAKKEVEQRRAGGYSRKYASKAKNLADDMVRNTARDLLYYAVTQDAMLIFENLSRGFGRQGKRTFSAERQYTRMEDWLTAKLAYEGLPSKTYLSKTLAQYTSKTCSNCGFTITSADYDRVLEKLKKTATGWMTTINGKELKVEGQITYYNRYKRQNVVKDLSVELDRLSEESVNNDISSWDKGRSGEALSLLKKRFSHRPVQEKFVCLNCGFETHADEQAALNIARSWLFLRSQEYKKYQTNKTTGNTDKRAFVETWQSFYRKKLKEVWKPAV

SEQ ID NO: 38196 - protein, 978 aa, synthetic construct
  REGION 1..978: note = engineered CasX variant
QEIKRINKIRRRLVKDSNTKKAGKTGPMKTLLVRVMTPDLRERLENLRKKPENIPQPISNTSRANLNKLLTDYTEMKKAILHVYWEEFQKDPVGLMSRVAQPASKKIDQNKLKPEMDEKGNLTTAGFACSQCGQPLFVYKLEQVSEKGKAYTNYFGRCNVAEHEKLILLAQLKPEKDSDEAVTYSLGKFGQRALDFYSIHVTKESTHPVKPLAQIAGNRYASTPVGKALSDACMGTIASFLSKYQDIIIEHQKVVKGNQKRLESLRELAGKENLEYPSVTLPPQPHTKEGVDAYNEVIARVRMWVNLNLWQKLKLSRDDAKPLLRLKGFPSFPLVERQANEVDWWDMVCNVKKLINEKKEDGKVFWQNLAGYKRQEALRPYLSSEEDRKKGKKFARYQLGDLLLHLEKKHGEDWGKVYDEAWERIDKKVEGLSKHIKLEEERRSEDAQSKAALTDWLRAKASFVIEGLKEADKDEFCRCELKLQKWYGDLRGKPFAIEAENSILDISGFSKQYNCAFIWQKDGVKKLNLYLIINYFKGGKLRFKKIKPEAFEANRFYTVINKKSGEIVPMEVNFNFDDPNLIILPLAFGKRQGREFIWNDLLSLETGSLKLANGRVIEKTLYNRRTRQDEPALFVALTFERREVLDSSNIKPMNLIGVDRGENIPAVIALTDPEGCPLSRFKDSLGNPTHILRIGESYKEKQRTIQAKKEVEQRRAGGYSRKYASKAKNLADDMVRNTARDLLYYAVTQDAMLIFENLSRGFGRQGKRTFSAERQYTRMEDWLTAKLAYEGLPSKTYLSKTLAQYTSKTCSNCGFTITSADYDRVLEKLKKTATGWMTTINGKELKVEGQITYYNRYKRQNVVKDLSVELDRLSEESVNNDISSWDKGRSGEALSLLKKRFSHRPVQEKFVCLNCGFETHADEQAALNIARSWLFLRSQEYKKYQTNKTTGNTDKRAFVETWQSFYRKKLKEVWKPAV

SEQ ID NO: 38197 - protein, 978 aa, synthetic construct
  REGION 1..978: note = engineered CasX variant
QEIKRINKIRRRLVKDSNTKKAGKTGPMKTLLVRVMTPDLRERLENLRKKPENIPQPISNTSRANLNKLLTDYTEMKKAILHVYWEEFQKDPVGLMSRVAQPASKKIDQNKLKPEMDEKGNLTTAGFACSQCGQPLFVYKLEQVSEKGKAYTNYFGRCNVAEHEKLILLAQLKPEKDSDEAVTYSLGKFGQRALDFYSIHVTKESTHPVKPLAQIAGNRYASAPVGKALSDACMGTIASFLSKYQDIIIEHQKVVKGNQKRLESLRELAGKENLEYPSVTLPPQPHTKEGVDAYNEVIARVRMWVNLNLWQKLKLSRDDAKPLLRLKGFPSFPLVERQANEVDWWDMVCNVKKLINEKKEDGKVFWQNLAGYKRQEALRPYLSSEEDRKKGKKFARYQLGDLLLHLEKKHGEDWGKVYDEAWERIDKKVEGLSKHIKLEEERRSEDAQSKAALTDWLRAKASFVIEGLKEADKDEFCRCELKLQKWYGDLRGKPFAIEAENSILDISGFSKQYNCAFIWQKDGVKKLNLYLIINYFKGGKLRFKKIKPEAFEANRFYTVINKKSGEIVPMEVNFNFDDPNLIILPLAFGKRQGREFIWNDLLSLETGSLKLANGRVIEKTLYNRRTRQDEPALFVALTFERREVLDSSNIKPMNLIGVDRGENIPAVIALTDPEGCPLSRFKDSLGNPTHILRIGESYKEKQRTIQAKKEVEQRRAGGYSRKYASKAKNLADDMVRNTARDLLYYAVTQDAMLIFENLSRGFGRQGKRTFSAERQYTRMEDWLTAKLAYEGLPSKTYLSKTLAQYTSKTCSNCGFTITSADYDRVLEKLKKTATGWMTTINGKELKVEGQITYYNRYKRQNVVKDLSVELDRLSEESVNNDISSWDKGRSGEALSLLKKRFSHRPVQEKFVCLNCGFETHADEQAALNIARSWLFLRSQEYKKYQTNKTTGNTDKRAFVETWQSFYRKKLKEVWKPAV

SEQ ID NO: 38198 - protein, 978 aa, synthetic construct
  REGION 1..978: note = engineered CasX variant
QEIKRINKIRRRLVKDSNTKKAGKTGPMKTLLVRVMTPDLRERLENLRKKPENIPQPISNTSRANLNKLLTDYTEMKKAILHVYWEEFQKDPVGLMSRVAQPASKKIDQNKLKPEMDEKGNLTTAGFACSQCGQPLFVYKLEQVSEKGKAYTNYFGRCNVAEHEKLILLAQLKPEKDSDEAVTYSLGKFGQRALDFYSIHVTKESTHPVKPLAQIAGNRYASVPVGKALSDACMGTIASFLSKYQDIIIEHQKVVKGNQKRLESLRELAGKENLEYPSVTLPPQPHTKEGVDAYNEVIARVRMWVNLNLWQKLKLSRDDAKPLLRLKGFPSFPLVERQANEVDWWDMVCNVKKLINEKKEDGKVFWQNLAGYKRQEALRPYLSSEEDRKKGKKFARYQLGDLLLHLEKKHGEDWGKVYDEAWERIDKKVEGLSKHIKLEEERRSEDAQSKAALTDWLRAKASFVIEGLKEADKDEFCRCELKLQKWYGDLRGKPFAIEAENSILDISGFSKQYNCAFIWQKDGVKKLNLYLIINYFKGGKLRFKKIKPEAFEANRFYTVINKKSGEIVPMEVNFNFDDPNLIILPLAFGKRQGREFIWNDLLSLETGSLKLANGRVIEKTLYNRRTRQDEPALFVALTFERREVLDSSNIKPMNLIGVDRGENIPAVIALTDPEGCPLSRFKDSLGNPTHILRIGESYKEKQRTIQAKKEVEQRRAGGYSRKYASKAKNLADDMVRNTARDLLYYAVTQDAMLIFENLSRGFGRQGKRTFSAERQYTRMEDWLTAKLAYEGLPSKTYLSKTLAQYTSKTCSNCGFTITSADYDRVLEKLKKTATGWMTTINGKELKVEGQITYYNRYKRQNVVKDLSVELDRLSEESVNNDISSWDKGRSGEALSLLKKRFSHRPVQEKFVCLNCGFETHADEQAALNIARSWLFLRSQEYKKYQTNKTTGNTDKRAFVETWQSFYRKKLKEVWKPAV

SEQ ID NO: 38199 - protein, 978 aa, synthetic construct
  REGION 1..978: note = engineered CasX variant
QEIKRINKIRRRLVKDSNTKKAGKTGPMKTLLVRVMTPDLRERLENLRKKPENIPQPISNTSRANLNKLLTDYTEMKKAILHVYWEEFQKDPVGLMSRVAQPASKKIDQNKLKPEMDEKGNLTTAGFACSQCGQPLFVYKLEQVSEKGKAYTNYFGRCNVAEHEKLIKLAQLKPEKDSDEAVTYSLGKFGQRALDFYSIHVTKESTHPVKPLAQIAGNRYASGPVGKALSDACMGTIASFLSKYQDIIIEHQKVVKGNQKRLESLRELAGKENLEYPSVTLPPQPHTKEGVDAYNEVIARVRMWVNLNLWQKLKLSRDDAKPLLRLKGFPSFPLVERQANEVDWWDMVCNVKKLINEKKEDGKVFWQNLAGYKRQEALRPYLSSEEDRKKGKKFARYQLGDLLLHLEKKHGEDWGKVYDEAWERIDKKVEGLSKHIKLEEERRSEDAQSKAALTDWLRAKASFVIEGLKEADKDEFCRCELKLQKWYGDLRGKPFAIEAENSILDISGFSKQYNCAFIWQKDGVKKLNLYLIINYFKGGKLRFKKIKPEAFEANRFYTVINKKSGEIVPMEVNFNFDDPNLIILPLAFGKRQGREFIWNDLLSLETGSLKLANGRVIEKTLYNRRTRQDEPALFVALTFERREVLDSSNIKPMNLIGVDRGENIPAVIALTDPEGCPLSRFKDSLGNPTHILRIGESYKEKQRTIQAKKEVEQRRAGGYSRKYASKAKNLADDMVRNTARDLLYYAVTQDAMLIFENLSRGFGRQGKRTFSAERQYTRMEDWLTAKLAYEGLPSKTYLSKTLAQYTSKTCSNCGFTITSADYDRVLEKLKKTATGWMTTINGKELKVEGQITYYNRYKRQNVVKDLSVELDRLSEESVNNDISSWDKGRSGEALSLLKKRFSHRPVQEKFVCLNCGFETHADEQAALNIARSWLFLRSQEYKKYQTNKTTGNTDKRAFVETWQSFYRKKLKEVWKPAV

SEQ ID NO: 38200 - protein, 977 aa, synthetic construct
  REGION 1..977: note = engineered CasX variant
QEIKRINKIRRRLVKDSNTKKAGKTGPMKTLLVRVMTPDLRERLENLRKKPENIPQPISNTSRANLNKLLTDYTEMKKAILHVYWEEFQKDPVGLMSRVAQPASKKIDQNKLKPEMDEKGNLTTAGFACSQCGQPLFVYKLEQVSEKGKAYTNYFGRCNVAEHEKLILLAQLKPEKDSDEAVTYSLGKFGQRALDFYSIHVTKESTHPVKPLAQIAGNRYASPVGKALSDACMGTIASFLSKYQDIIIEHQKVVKGNQKRLESLRELAGKENLEYPSVTLPPQPHTKEGVDAYNEVIARVRMWVNLNLWQKLKLSRDDAKPLLRLKGFPSFPLVERQANEVDWWDMVCNVKKLINEKKEDGKVFWQNLAGYKRQEALRPYLSSEEDRKKGKKFARYQLGDLLLHLEKKHGEDWGKVYDEAWERIDKKVEGLSKHIKLEEERRSEDAQSKAALTDWLRAKASFVIEGLKEADKDEFCRCELKLQKWYGDLRGKPFAIEAENSILDISGFSKQYNCAFIWQKDGVKKLNLYLIINYFKGGKLRFKKIKPEAFEANRFYTVINKKSGEIVPMEVNFNFDDPNLIILPLAFGKRQGREFIWNDLLSLETGSLKLANGRVIEKTLYNRRTRQDEPALFVALTFERREVLDSSNIKPMNLIGVDRGENIPAVIALTDPEGCPLSRFKDSLGNPTHILRIGESYKEKQRTIQAKKEVEQRRAGGYSRKYASKAKNLADDMVRNTARDLLYYAVTQDAMLIFENLSRGFGRQGKRTFSAERQYTRMEDWLTAKLAYEGLPSKTYLSKTLAQYTSKTCSNCGFTITSADYDRVLEKLKKTATGWMTTINGKELKVEGQITYYNRYKRQNVVKDLSVELDRLSEESVNNDISSWDKGRSGEALSLLKKRFSHRPVQEKFVCLNCGFETHADEQAALNIARSWLFLRSQEYKKYQTNKTTGNTDKRAFVETWQSFYRKKLKEVWKPAV

SEQ ID NO: 38201 - protein, 978 aa, synthetic construct
  REGION 1..978: note = engineered CasX variant
QEIKRINKIRRRLVKDSNTKKAGKTGPMKTLLVRVMTPDLRERLENLRKKPENIPQPISNTSRANLNKLLTDYTEMKKAILHVYWEEFQVDPVGLMSRVAQPASKKIDQNKLKPEMDEKGNLTTAGFACSQCGQPLFVYKLEQVSEKGKAYTNYFGRCNVAEHEKLILLAQLKPEKDSDEAVTYSLGKFGQRALDFYSIHVTKESTHPVKPLAQIAGNRYASYPVGKALSDACMGTIASFLSKYQDIIIEHQKVVKGNQKRLESLRELAGKENLEYPSVTLPPQPHTKEGVDAYNEVIARVRMWVNLNLWQKLKLSRDDAKPLLRLKGFPSFPLVERQANEVDWWDMVCNVKKLINEKKEDGKVFWQNLAGYKRQEALRPYLSSEEDRKKGKKFARYQLGDLLLHLEKKHGEDWGKVYDEAWERIDKKVEGLSKHIKLEEERRSEDAQSKAALTDWLRAKASFVIEGLKEADKDEFCRCELKLQKWYGDLRGKPFAIEAENSILDISGFSKQYNCAFIWQKDGVKKLNLYLIINYFKGGKLRFKKIKPEAFEANRFYTVINKKSGEIVPMEVNFNFDDPNLIILPLAFGKRQGREFIWNDLLSLETGSLKLANGRVIEKTLYNRRTRQDEPALFVALTFERREVLDSSNIKPMNLIGVDRGENIPAVIALTDPEGCPLSRFKDSLGNPTHILRIGESYKEKQRTIQAKKEVEQRRAGGYSRKYASKAKNLADDMVRNTARDLLYYAVTQDAMLIFENLSRGFGRQGKRTFSAERQYTRMEDWLTAKLAYEGLPSKTYLSKTLAQYTSKTCSNCGFTITSADYDRVLEKLKKTATGWMTTINGKELKVEGQITYYNRYKRQNVVKDLSVELDRLSEESVNNDISSWTKGRSGEALSLLKKRFSHRPVQEKFVCLNCGFETHADEQAALNIARSWLFLRSQEYKKYQTNKTTGNTDKRAFVETWQSFYRKKLKEVWKPAV

SEQ ID NO: 38202 - protein, 978 aa, synthetic construct
  REGION 1..978: note = engineered CasX variant
QEIKRINKIRRRLVKDSNTKKAGKTGPMKTLLVRVMTPDLRERLENLRKKPENIPQPISNTSRANLNKLLTDYTEMKKAILHVYWEEFQVDPVGLMSRVAQPASKKIDQNKLKPEMDEKGNLTTAGFACSQCGQPLFVYKLEQVSEKGKAYTNYFGRCNVAEHEKLILLAQLKPEKDSDEAVTYSLGKFGQRALDFYSIHVTKESTHPVKPLAQIAGNRYASHPVGKALSDACMGTIASFLSKYQDIIIEHQKVVKGNQKRLESLRELAGKENLEYPSVTLPPQPHTKEGVDAYNEVIARVRMWVNLNLWQKLKLSRDDAKPLLRLKGFPSFPLVERQANEVDWWDMVCNVKKLINEKKEDGKVFWQNLAGYKRQEALRPYLSSEEDRKKGKKFARYQLGDLLLHLEKKHGEDWGKVYDEAWERIDKKVEGLSKHIKLEEERRSEDAQSKAALTDWLRAKASFVIEGLKEADKDEFCRCELKLQKWYGDLRGKPFAIEAENSILDISGFSKQYNCAFIWQKDGVKKLNLYLIINYFKGGKLRFKKIKPEAFEANRFYTVINKKSGEIVPMEVNFNFDDPNLIILPLAFGKRQGREFIWNDLLSLETGSLKLANGRVIEKTLYNRRTRQDEPALFVALTFERREVLDSSNIKPMNLIGVDRGENIPAVIALTDPEGCPLSRFKDSLGNPTHILRIGESYKEKQRTIQAKKEVEQRRAGGYSRKYASKAKNLADDMVRNTARDLLYYAVTQDAMLIFENLSRGFGRQGKRTFSAERQYTRMEDWLTAKLAYEGLPSKTYLSKTLAQYTSKTCSNCGFTITSADYDRVLEKLKKTATGWMTTINGKELKVEGQITYYNRYKRQNVVKDLSVELDRLSEESVNNDISSWTKGRSGEALSLLKKRFSHRPVQEKFVCLNCGFETHADEQAALNIARSWLFLRSQEYKKYQTNKTTGNTDKRAFVETWQSFYRKKLKEVWKPAV

SEQ ID NO: 38203 - protein, 978 aa, synthetic construct
  REGION 1..978: note = engineered CasX variant
QEIKRINKIRRRLVKDSNTKKAGKTGPMKTLLVRVMTPDLRERLENLRKKPENIPQPISNTSRANLNKLLTDYTEMKKAILHVYWEEFQVDPVGLMSRVAQPASKKIDQNKLKPEMDEKGNLTTAGFACSQCGQPLFVYKLEQVSEKGKAYTNYFGRCNVAEHEKLILLAQLKPEKDSDEAVTYSLGKFGQRALDFYSIHVTKESTHPVKPLAQIAGNRYASSPVGKALSDACMGTIASFLSKYQDIIIEHQKVVKGNQKRLESLRELAGKENLEYPSVTLPPQPHTKEGVDAYNEVIARVRMWVNLNLWQKLKLSRDDAKPLLRLKGFPSFPLVERQANEVDWWDMVCNVKKLINEKKEDGKVFWQNLAGYKRQEALRPYLSSEEDRKKGKKFARYQLGDLLLHLEKKHGEDWGKVYDEAWERIDKKVEGLSKHIKLEEERRSEDAQSKAALTDWLRAKASFVIEGLKEADKDEFCRCELKLQKWYGDLRGKPFAIEAENSILDISGFSKQYNCAFIWQKDGVKKLNLYLIINYFKGGKLRFKKIKPEAFEANRFYTVINKKSGEIVPMEVNFNFDDPNLIILPLAFGKRQGREFIWNDLLSLETGSLKLANGRVIEKTLYNRRTRQDEPALFVALTFERREVLDSSNIKPMNLIGVDRGENIPAVIALTDPEGCPLSRFKDSLGNPTHILRIGESYKEKQRTIQAKKEVEQRRAGGYSRKYASKAKNLADDMVRNTARDLLYYAVTQDAMLIFENLSRGFGRQGKRTFSAERQYTRMEDWLTAKLAYEGLPSKTYLSKTLAQYTSKTCSNCGFTITSADYDRVLEKLKKTATGWMTTINGKELKVEGQITYYNRYKRQNVVKDLSVELDRLSEESVNNDISSWTKGRSGEALSLLKKRFSHRPVQEKFVCLNCGFETHADEQAALNIARSWLFLRSQEYKKYQTNKTTGNTDKRAFVETWQSFYRKKLKEVWKPAV

SEQ ID NO: 38204 - protein, 978 aa, synthetic construct
  REGION 1..978: note = engineered CasX variant
QEIKRINKIRRRLVKDSNTKKAGKTGPMKTLLVRVMTPDLRERLENLRKKPENIPQPISNTSRANLNKLLTDYTEMKKAILHVYWEEFQVDPVGLMSRVAQPASKKIDQNKLKPEMDEKGNLTTAGFACSQCGQPLFVYKLEQVSEKGKAYTNYFGRCNVAEHEKLILLAQLKPEKDSDEAVTYSLGKFGQRALDFYSIHVTKESTHPVKPLAQIAGNRYASTPVGKALSDACMGTIASFLSKYQDIIIEHQKVVKGNQKRLESLRELAGKENLEYPSVTLPPQPHTKEGVDAYNEVIARVRMWVNLNLWQKLKLSRDDAKPLLRLKGFPSFPLVERQANEVDWWDMVCNVKKLINEKKEDGKVFWQNLAGYKRQEALRPYLSSEEDRKKGKKFARYQLGDLLLHLEKKHGEDWGKVYDEAWERIDKKVEGLSKHIKLEEERRSEDAQSKAALTDWLRAKASFVIEGLKEADKDEFCRCELKLQKWYGDLRGKPFAIEAENSILDISGFSKQYNCAFIWQKDGVKKLNLYLIINYFKGGKLRFKKIKPEAFEANRFYTVINKKSGEIVPMEVNFNFDDPNLIILPLAFGKRQGREFIWNDLLSLETGSLKLANGRVIEKTLYNRRTRQDEPALFVALTFERREVLDSSNIKPMNLIGVDRGENIPAVIALTDPEGCPLSRFKDSLGNPTHILRIGESYKEKQRTIQAKKEVEQRRAGGYSRKYASKAKNLADDMVRNTARDLLYYAVTQDAMLIFENLSRGFGRQGKRTFSAERQYTRMEDWLTAKLAYEGLPSKTYLSKTLAQYTSKTCSNCGFTITSADYDRVLEKLKKTATGWMTTINGKELKVEGQITYYNRYKRQNVVKDLSVELDRLSEESVNNDISSWTKGRSGEALSLLKKRFSHRPVQEKFVCLNCGFETHADEQAALNIARSWLFLRSQEYKKYQTNKTTGNTDKRAFVETWQSFYRKKLKEVWKPAV

SEQ ID NO: 38205 - protein, 978 aa, synthetic construct
  REGION 1..978: note = engineered CasX variant
QEIKRINKIRRRLVKDSNTKKAGKTGPMKTLLVRVMTPDLRERLENLRKKPENIPQPISNTSRANLNKLLTDYTEMKKAILHVYWEEFQVDPVGLMSRVAQPASKKIDQNKLKPEMDEKGNLTTAGFACSQCGQPLFVYKLEQVSEKGKAYTNYFGRCNVAEHEKLILLAQLKPEKDSDEAVTYSLGKFGQRALDFYSIHVTKESTHPVKPLAQIAGNRYASAPVGKALSDACMGTIASFLSKYQDIIIEHQKVVKGNQKRLESLRELAGKENLEYPSVTLPPQPHTKEGVDAYNEVIARVRMWVNLNLWQKLKLSRDDAKPLLRLKGFPSFPLVERQANEVDWWDMVCNVKKLINEKKEDGKVFWQNLAGYKRQEALRPYLSSEEDRKKGKKFARYQLGDLLLHLEKKHGEDWGKVYDEAWERIDKKVEGLSKHIKLEEERRSEDAQSKAALTDWLRAKASFVIEGLKEADKDEFCRCELKLQKWYGDLRGKPFAIEAENSILDISGFSKQYNCAFIWQKDGVKKLNLYLIINYFKGGKLRFKKIKPEAFEANRFYTVINKKSGEIVPMEVNFNFDDPNLIILPLAFGKRQGREFIWNDLLSLETGSLKLANGRVIEKTLYNRRTRQDEPALFVALTFERREVLDSSNIKPMNLIGVDRGENIPAVIALTDPEGCPLSRFKDSLGNPTHILRIGESYKEKQRTIQAKKEVEQRRAGGYSRKYASKAKNLADDMVRNTARDLLYYAVTQDAMLIFENLSRGFGRQGKRTFSAERQYTRMEDWLTAKLAYEGLPSKTYLSKTLAQYTSKTCSNCGFTITSADYDRVLEKLKKTATGWMTTINGKELKVEGQITYYNRYKRQNVVKDLSVELDRLSEESVNNDISSWTKGRSGEALSLLKKRFSHRPVQEKFVCLNCGFETHADEQAALNIARSWLFLRSQEYKKYQTNKTTGNTDKRAFVETWQSFYRKKLKEVWKPAV

SEQ ID NO: 38206 - protein, 978 aa, synthetic construct
  REGION 1..978: note = engineered CasX variant
QEIKRINKIRRRLVKDSNTKKAGKTGPMKTLLVRVMTPDLRERLENLRKKPENIPQPISNTSRANLNKLLTDYTEMKKAILHVYWEEFQVDPVGLMSRVAQPASKKIDQNKLKPEMDEKGNLTTAGFACSQCGQPLFVYKLEQVSEKGKAYTNYFGRCNVAEHEKLILLAQLKPEKDSDEAVTYSLGKFGQRALDFYSIHVTKESTHPVKPLAQIAGNRYASVPVGKALSDACMGTIASFLSKYQDIIIEHQKVVKGNQKRLESLRELAGKENLEYPSVTLPPQPHTKEGVDAYNEVIARVRMWVNLNLWQKLKLSRDDAKPLLRLKGFPSFPLVERQANEVDWWDMVCNVKKLINEKKEDGKVFWQNLAGYKRQEALRPYLSSEEDRKKGKKFARYQLGDLLLHLEKKHGEDWGKVYDEAWERIDKKVEGLSKHIKLEEERRSEDAQSKAALTDWLRAKASFVIEGLKEADKDEFCRCELKLQKWYGDLRGKPFAIEAENSILDISGFSKQYNCAFIWQKDGVKKLNLYLIINYFKGGKLRFKKIKPEAFEANRFYTVINKKSGEIVPMEVNFNFDDPNLIILPLAFGKRQGREFIWNDLLSLETGSLKLANGRVIEKTLYNRRTRQDEPALFVALTFERREVLDSSNIKPMNLIGVDRGENIPAVIALTDPEGCPLSRFKDSLGNPTHILRIGESYKEKQRTIQAKKEVEQRRAGGYSRKYASKAKNLADDMVRNTARDLLYYAVTQDAMLIFENLSRGFGRQGKRTFSAERQYTRMEDWLTAKLAYEGLPSKTYLSKTLAQYTSKTCSNCGFTITSADYDRVLEKLKKTATGWMTTINGKELKVEGQITYYNRYKRQNVVKDLSVELDRLSEESVNNDISSWTKGRSGEALSLLKKRFSHRPVQEKFVCLNCGFETHADEQAALNIARSWLFLRSQEYKKYQTNKTTGNTDKRAFVETWQSFYRKKLKEVWKPAV

SEQ ID NO: 38207 - protein, 978 aa, synthetic construct
  REGION 1..978: note = engineered CasX variant
QEIKRINKIRRRLVKDSNTKKAGKTGPMKTLLVRVMTPDLRERLENLRKKPENIPQPISNTSRANLNKLLTDYTEMKKAILHVYWEEFQVDPVGLMSRVAQPASKKIDQNKLKPEMDEKGNLTTAGFACSQCGQPLFVYKLEQVSEKGKAYTNYFGRCNVAEHEKLIKLAQLKPEKDSDEAVTYSLGKFGQRALDFYSIHVTKESTHPVKPLAQIAGNRYASGPVGKALSDACMGTIASFLSKYQDIIIEHQKVVKGNQKRLESLRELAGKENLEYPSVTLPPQPHTKEGVDAYNEVIARVRMWVNLNLWQKLKLSRDDAKPLLRLKGFPSFPLVERQANEVDWWDMVCNVKKLINEKKEDGKVFWQNLAGYKRQEALRPYLSSEEDRKKGKKFARYQLGDLLLHLEKKHGEDWGKVYDEAWERIDKKVEGLSKHIKLEEERRSEDAQSKAALTDWLRAKASFVIEGLKEADKDEFCRCELKLQKWYGDLRGKPFAIEAENSILDISGFSKQYNCAFIWQKDGVKKLNLYLIINYFKGGKLRFKKIKPEAFEANRFYTVINKKSGEIVPMEVNFNFDDPNLIILPLAFGKRQGREFIWNDLLSLETGSLKLANGRVIEKTLYNRRTRQDEPALFVALTFERREVLDSSNIKPMNLIGVDRGENIPAVIALTDPEGCPLSRFKDSLGNPTHILRIGESYKEKQRTIQAKKEVEQRRAGGYSRKYASKAKNLADDMVRNTARDLLYYAVTQDAMLIFENLSRGFGRQGKRTFSAERQYTRMEDWLTAKLAYEGLPSKTYLSKTLAQYTSKTCSNCGFTITSADYDRVLEKLKKTATGWMTTINGKELKVEGQITYYNRYKRQNVVKDLSVELDRLSEESVNNDISSWTKGRSGEALSLLKKRFSHRPVQEKFVCLNCGFETHADEQAALNIARSWLFLRSQEYKKYQTNKTTGNTDKRAFVETWQSFYRKKLKEVWKPAV

SEQ ID NO: 38208 - protein, 977 aa, synthetic construct
  REGION 1..977: note = engineered CasX variant
QEIKRINKIRRRLVKDSNTKKAGKTGPMKTLLVRVMTPDLRERLENLRKKPENIPQPISNTSRANLNKLLTDYTEMKKAILHVYWEEFQVDPVGLMSRVAQPASKKIDQNKLKPEMDEKGNLTTAGFACSQCGQPLFVYKLEQVSEKGKAYTNYFGRCNVAEHEKLILLAQLKPEKDSDEAVTYSLGKFGQRALDFYSIHVTKESTHPVKPLAQIAGNRYASPVGKALSDACMGTIASFLSKYQDIIIEHQKVVKGNQKRLESLRELAGKENLEYPSVTLPPQPHTKEGVDAYNEVIARVRMWVNLNLWQKLKLSRDDAKPLLRLKGFPSFPLVERQANEVDWWDMVCNVKKLINEKKEDGKVFWQNLAGYKRQEALRPYLSSEEDRKKGKKFARYQLGDLLLHLEKKHGEDWGKVYDEAWERIDKKVEGLSKHIKLEEERRSEDAQSKAALTDWLRAKASFVIEGLKEADKDEFCRCELKLQKWYGDLRGKPFAIEAENSILDISGFSKQYNCAFIWQKDGVKKLNLYLIINYFKGGKLRFKKIKPEAFEANRFYTVINKKSGEIVPMEVNFNFDDPNLIILPLAFGKRQGREFIWNDLLSLETGSLKLANGRVIEKTLYNRRTRQDEPALFVALTFERREVLDSSNIKPMNLIGVDRGENIPAVIALTDPEGCPLSRFKDSLGNPTHILRIGESYKEKQRTIQAKKEVEQRRAGGYSRKYASKAKNLADDMVRNTARDLLYYAVTQDAMLIFENLSRGFGRQGKRTFSAERQYTRMEDWLTAKLAYEGLPSKTYLSKTLAQYTSKTCSNCGFTITSADYDRVLEKLKKTATGWMTTINGKELKVEGQITYYNRYKRQNVVKDLSVELDRLSEESVNNDISSWTKGRSGEALSLLKKRFSHRPVQEKFVCLNCGFETHADEQAALNIARSWLFLRSQEYKKYQTNKTTGNTDKRAFVETWQSFYRKKLKEVWKPAV

SEQ ID NO: 38209 - protein, 978 aa, synthetic construct
  REGION 1..978: note = engineered CasX variant
QEIKRLNKIRRRLVKDSNTKKAGKTGPMKTLLVRVMTPDLRERLENLRKKPENIPQPISNTSRANLNKLLTDYTEMKKAILHVYWEEFQKDPVGLMSRVAQPASKKIDQNKLKPEMDEKGNLTTAGFACSQCGQPLFVYKLEQVSEKGKAYTNYFGRCNVAEHEKLILLAQLKPEKDSDEAVTYSLGKFGQRALDFYSIHVTKESTHPVKPLAQIAGNRYASYPVGKALSDACMGTIASFLSKYQDIIIEHQKVVKGNQKRLESLRELAGKENLEYPSVTLPPQPHTKEGVDAYNEVIARVRMWVNLNLWQKLKLSRDDAKPLLRLKGFPSFPLVERQANEVDWWDMVCNVKKLINEKKEDGKVFWQNLAGYKRQEALRPYLSSEEDRKKGKKFARYQLGDLLLHLEKKHGEDWGKVYDEAWERIDKKVEGLSKHIKLEEERRSEDAQSKAALTDWLRAKASFVIEGLKEADKDEFCRCELKLQKWYGDLRGKPFAIEAENSILDISGFSKQYNCAFIWQKDGVKKLNLYLIINYFKGGKLRFKKIKPEAFEANRFYTVINKKSGEIVPMEVNFNFDDPNLIILPLAFGKRQGREFIWNDLLSLETGSLKLANGRVIEKTLYNRRTRQDEPALFVALTFERREVLDSSNIKPMNLIGVDRGENIPAVIALTDPEGCPLSRFKDSLGNPTHILRIGESYKEKQRTIQAKKEVEQRRAGGYSRKYASKAKNLADDMVRNTARDLLYYAVTQDAMLIFENLSRGFGRQGKRTFSAERQYTRMEDWLTAKLAYEGLPSKTYLSKTLAQYTSKTCSNCGFTITSADYDRVLEKLKKTATGWMTTINGKELKVEGQITYYNRYKRQNVVKDLSVELDRLSEESVNNDISSWTKGRSGEALSLLKKRFSHRPVQEKFVCLNCGFETHADEQAALNIARSWLFLRSQEYKKYQTNKTTGNTDKRAFVETWQSFYRKKLKEVWKPAV

SEQ ID NO: 38210 - protein, 978 aa, synthetic construct
  REGION 1..978: note = engineered CasX variant
QEIKRLNKIRRRLVKDSNTKKAGKTGPMKTLLVRVMTPDLRERLENLRKKPENIPQPISNTSRANLNKLLTDYTEMKKAILHVYWEEFQKDPVGLMSRVAQPASKKIDQNKLKPEMDEKGNLTTAGFACSQCGQPLFVYKLEQVSEKGKAYTNYFGRCNVAEHEKLILLAQLKPEKDSDEAVTYSLGKFGQRALDFYSIHVTKESTHPVKPLAQIAGNRYASHPVGKALSDACMGTIASFLSKYQDIIIEHQKVVKGNQKRLESLRELAGKENLEYPSVTLPPQPHTKEGVDAYNEVIARVRMWVNLNLWQKLKLSRDDAKPLLRLKGFPSFPLVERQANEVDWWDMVCNVKKLINEKKEDGKVFWQNLAGYKRQEALRPYLSSEEDRKKGKKFARYQLGDLLLHLEKKHGEDWGKVYDEAWERIDKKVEGLSKHIKLEEERRSEDAQSKAALTDWLRAKASFVIEGLKEADKDEFCRCELKLQKWYGDLRGKPFAIEAENSILDISGFSKQYNCAFIWQKDGVKKLNLYLIINYFKGGKLRFKKIKPEAFEANRFYTVINKKSGEIVPMEVNFNFDDPNLIILPLAFGKRQGREFIWNDLLSLETGSLKLANGRVIEKTLYNRRTRQDEPALFVALTFERREVLDSSNIKPMNLIGVDRGENIPAVIALTDPEGCPLSRFKDSLGNPTHILRIGESYKEKQRTIQAKKEVEQRRAGGYSRKYASKAKNLADDMVRNTARDLLYYAVTQDAMLIFENLSRGFGRQGKRTFSAERQYTRMEDWLTAKLAYEGLPSKTYLSKTLAQYTSKTCSNCGFTITSADYDRVLEKLKKTATGWMTTINGKELKVEGQITYYNRYKRQNVVKDLSVELDRLSEESVNNDISSWTKGRSGEALSLLKKRFSHRPVQEKFVCLNCGFETHADEQAALNIARSWLFLRSQEYKKYQTNKTTGNTDKRAFVETWQSFYRKKLKEVWKPAV

SEQ ID NO: 38211 - protein, 978 aa, synthetic construct
  REGION 1..978: note = engineered CasX variant
QEIKRLNKIRRRLVKDSNTKKAGKTGPMKTLLVRVMTPDLRERLENLRKKPENIPQPISNTSRANLNKLLTDYTEMKKAILHVYWEEFQKDPVGLMSRVAQPASKKIDQNKLKPEMDEKGNLTTAGFACSQCGQPLFVYKLEQVSEKGKAYTNYFGRCNVAEHEKLILLAQLKPEKDSDEAVTYSLGKFGQRALDFYSIHVTKESTHPVKPLAQIAGNRYASSPVGKALSDACMGTIASFLSKYQDIIIEHQKVVKGNQKRLESLRELAGKENLEYPSVTLPPQPHTKEGVDAYNEVIARVRMWVNLNLWQKLKLSRDDAKPLLRLKGFPSFPLVERQANEVDWWDMVCNVKKLINEKKEDGKVFWQNLAGYKRQEALRPYLSSEEDRKKGKKFARYQLGDLLLHLEKKHGEDWGKVYDEAWERIDKKVEGLSKHIKLEEERRSEDAQSKAALTDWLRAKASFVIEGLKEADKDEFCRCELKLQKWYGDLRGKPFAIEAENSILDISGFSKQYNCAFIWQKDGVKKLNLYLIINYFKGGKLRFKKIKPEAFEANRFYTVINKKSGEIVPMEVNFNFDDPNLIILPLAFGKRQGREFIWNDLLSLETGSLKLANGRVIEKTLYNRRTRQDEPALFVALTFERREVLDSSNIKPMNLIGVDRGENIPAVIALTDPEGCPLSRFKDSLGNPTHILRIGESYKEKQRTIQAKKEVEQRRAGGYSRKYASKAKNLADDMVRNTARDLLYYAVTQDAMLIFENLSRGFGRQGKRTFSAERQYTRMEDWLTAKLAYEGLPSKTYLSKTLAQYTSKTCSNCGFTITSADYDRVLEKLKKTATGWMTTINGKELKVEGQITYYNRYKRQNVVKDLSVELDRLSEESVNNDISSWTKGRSGEALSLLKKRFSHRPVQEKFVCLNCGFETHADEQAALNIARSWLFLRSQEYKKYQTNKTTGNTDKRAFVETWQSFYRKKLKEVWKPAV

SEQ ID NO: 38212 - protein, 978 aa, synthetic construct
  REGION 1..978: note = engineered CasX variant
QEIKRLNKIRRRLVKDSNTKKAGKTGPMKTLLVRVMTPDLRERLENLRKKPENIPQPISNTSRANLNKLLTDYTEMKKAILHVYWEEFQKDPVGLMSRVAQPASKKIDQNKLKPEMDEKGNLTTAGFACSQCGQPLFVYKLEQVSEKGKAYTNYFGRCNVAEHEKLILLAQLKPEKDSDEAVTYSLGKFGQRALDFYSIHVTKESTHPVKPLAQIAGNRYASTPVGKALSDACMGTIASFLSKYQDIIIEHQKVVKGNQKRLESLRELAGKENLEYPSVTLPPQPHTKEGVDAYNEVIARVRMWVNLNLWQKLKLSRDDAKPLLRLKGFPSFPLVERQANEVDWWDMVCNVKKLINEKKEDGKVFWQNLAGYKRQEALRPYLSSEEDRKKGKKFARYQLGDLLLHLEKKHGEDWGKVYDEAWERIDKKVEGLSKHIKLEEERRSEDAQSKAALTDWLRAKASFVIEGLKEADKDEFCRCELKLQKWYGDLRGKPFAIEAENSILDISGFSKQYNCAFIWQKDGVKKLNLYLIINYFKGGKLRFKKIKPEAFEANRFYTVINKKSGEIVPMEVNFNFDDPNLIILPLAFGKRQGREFIWNDLLSLETGSLKLANGRVIEKTLYNRRTRQDEPALFVALTFERREVLDSSNIKPMNLIGVDRGENIPAVIALTDPEGCPLSRFKDSLGNPTHILRIGESYKEKQRTIQAKKEVEQRRAGGYSRKYASKAKNLADDMVRNTARDLLYYAVTQDAMLIFENLSRGFGRQGKRTFSAERQYTRMEDWLTAKLAYEGLPSKTYLSKTLAQYTSKTCSNCGFTITSADYDRVLEKLKKTATGWMTTINGKELKVEGQITYYNRYKRQNVVKDLSVELDRLSEESVNNDISSWTKGRSGEALSLLKKRFSHRPVQEKFVCLNCGFETHADEQAALNIARSWLFLRSQEYKKYQTNKTTGNTDKRAFVETWQSFYRKKLKEVWKPAV

SEQ ID NO: 38213 - protein, 978 aa, synthetic construct
  REGION 1..978: note = engineered CasX variant
QEIKRLNKIRRRLVKDSNTKKAGKTGPMKTLLVRVMTPDLRERLENLRKKPENIPQPISNTSRANLNKLLTDYTEMKKAILHVYWEEFQKDPVGLMSRVAQPASKKIDQNKLKPEMDEKGNLTTAGFACSQCGQPLFVYKLEQVSEKGKAYTNYFGRCNVAEHEKLILLAQLKPEKDSDEAVTYSLGKFGQRALDFYSIHVTKESTHPVKPLAQIAGNRYASAPVGKALSDACMGTIASFLSKYQDIIIEHQKVVKGNQKRLESLRELAGKENLEYPSVTLPPQPHTKEGVDAYNEVIARVRMWVNLNLWQKLKLSRDDAKPLLRLKGFPSFPLVERQANEVDWWDMVCNVKKLINEKKEDGKVFWQNLAGYKRQEALRPYLSSEEDRKKGKKFARYQLGDLLLHLEKKHGEDWGKVYDEAWERIDKKVEGLSKHIKLEEERRSEDAQSKAALTDWLRAKASFVIEGLKEADKDEFCRCELKLQKWYGDLRGKPFAIEAENSILDISGFSKQYNCAFIWQKDGVKKLNLYLIINYFKGGKLRFKKIKPEAFEANRFYTVINKKSGEIVPMEVNFNFDDPNLIILPLAFGKRQGREFIWNDLLSLETGSLKLANGRVIEKTLYNRRTRQDEPALFVALTFERREVLDSSNIKPMNLIGVDRGENIPAVIALTDPEGCPLSRFKDSLGNPTHILRIGESYKEKQRTIQAKKEVEQRRAGGYSRKYASKAKNLADDMVRNTARDLLYYAVTQDAMLIFENLSRGFGRQGKRTFSAERQYTRMEDWLTAKLAYEGLPSKTYLSKTLAQYTSKTCSNCGFTITSADYDRVLEKLKKTATGWMTTINGKELKVEGQITYYNRYKRQNVVKDLSVELDRLSEESVNNDISSWTKGRSGEALSLLKKRFSHRPVQEKFVCLNCGFETHADEQAALNIARSWLFLRSQEYKKYQTNKTTGNTDKRAFVETWQSFYRKKLKEVWKPAV

SEQ ID NO: 38214 - protein, 978 aa, synthetic construct
  REGION 1..978: note = engineered CasX variant
QEIKRLNKIRRRLVKDSNTKKAGKTGPMKTLLVRVMTPDLRERLENLRKKPENIPQPISNTSRANLNKLLTDYTEMKKAILHVYWEEFQKDPVGLMSRVAQPASKKIDQNKLKPEMDEKGNLTTAGFACSQCGQPLFVYKLEQVSEKGKAYTNYFGRCNVAEHEKLILLAQLKPEKDSDEAVTYSLGKFGQRALDFYSIHVTKESTHPVKPLAQIAGNRYASVPVGKALSDACMGTIASFLSKYQDIIIEHQKVVKGNQKRLESLRELAGKENLEYPSVTLPPQPHTKEGVDAYNEVIARVRMWVNLNLWQKLKLSRDDAKPLLRLKGFPSFPLVERQANEVDWWDMVCNVKKLINEKKEDGKVFWQNLAGYKRQEALRPYLSSEEDRKKGKKFARYQLGDLLLHLEKKHGEDWGKVYDEAWERIDKKVEGLSKHIKLEEERRSEDAQSKAALTDWLRAKASFVIEGLKEADKDEFCRCELKLQKWYGDLRGKPFAIEAENSILDISGFSKQYNCAFIWQKDGVKKLNLYLIINYFKGGKLRFKKIKPEAFEANRFYTVINKKSGEIVPMEVNFNFDDPNLIILPLAFGKRQGREFIWNDLLSLETGSLKLANGRVIEKTLYNRRTRQDEPALFVALTFERREVLDSSNIKPMNLIGVDRGENIPAVIALTDPEGCPLSRFKDSLGNPTHILRIGESYKEKQRTIQAKKEVEQRRAGGYSRKYASKAKNLADDMVRNTARDLLYYAVTQDAMLIFENLSRGFGRQGKRTFSAERQYTRMEDWLTAKLAYEGLPSKTYLSKTLAQYTSKTCSNCGFTITSADYDRVLEKLKKTATGWMTTINGKELKVEGQITYYNRYKRQNVVKDLSVELDRLSEESVNNDISSWTKGRSGEALSLLKKRFSHRPVQEKFVCLNCGFETHADEQAALNIARSWLFLRSQEYKKYQTNKTTGNTDKRAFVETWQSFYRKKLKEVWKPAV

SEQ ID NO: 38215 - protein, 978 aa, synthetic construct
  REGION 1..978: note = engineered CasX variant
QEIKRLNKIRRRLVKDSNTKKAGKTGPMKTLLVRVMTPDLRERLENLRKKPENIPQPISNTSRANLNKLLTDYTEMKKAILHVYWEEFQKDPVGLMSRVAQPASKKIDQNKLKPEMDEKGNLTTAGFACSQCGQPLFVYKLEQVSEKGKAYTNYFGRCNVAEHEKLIKLAQLKPEKDSDEAVTYSLGKFGQRALDFYSIHVTKESTHPVKPLAQIAGNRYASGPVGKALSDACMGTIASFLSKYQDIIIEHQKVVKGNQKRLESLRELAGKENLEYPSVTLPPQPHTKEGVDAYNEVIARVRMWVNLNLWQKLKLSRDDAKPLLRLKGFPSFPLVERQANEVDWWDMVCNVKKLINEKKEDGKVFWQNLAGYKRQEALRPYLSSEEDRKKGKKFARYQLGDLLLHLEKKHGEDWGKVYDEAWERIDKKVEGLSKHIKLEEERRSEDAQSKAALTDWLRAKASFVIEGLKEADKDEFCRCELKLQKWYGDLRGKPFAIEAENSILDISGFSKQYNCAFIWQKDGVKKLNLYLIINYFKGGKLRFKKIKPEAFEANRFYTVINKKSGEIVPMEVNFNFDDPNLIILPLAFGKRQGREFIWNDLLSLETGSLKLANGRVIEKTLYNRRTRQDEPALFVALTFERREVLDSSNIKPMNLIGVDRGENIPAVIALTDPEGCPLSRFKDSLGNPTHILRIGESYKEKQRTIQAKKEVEQRRAGGYSRKYASKAKNLADDMVRNTARDLLYYAVTQDAMLIFENLSRGFGRQGKRTFSAERQYTRMEDWLTAKLAYEGLPSKTYLSKTLAQYTSKTCSNCGFTITSADYDRVLEKLKKTATGWMTTINGKELKVEGQITYYNRYKRQNVVKDLSVELDRLSEESVNNDISSWTKGRSGEALSLLKKRFSHRPVQEKFVCLNCGFETHADEQAALNIARSWLFLRSQEYKKYQTNKTTGNTDKRAFVETWQSFYRKKLKEVWKPAV

SEQ ID NO: 38216 - protein, 977 aa, synthetic construct
  REGION 1..977: note = engineered CasX variant
QEIKRLNKIRRRLVKDSNTKKAGKTGPMKTLLVRVMTPDLRERLENLRKKPENIPQPISNTSRANLNKLLTDYTEMKKAILHVYWEEFQKDPVGLMSRVAQPASKKIDQNKLKPEMDEKGNLTTAGFACSQCGQPLFVYKLEQVSEKGKAYTNYFGRCNVAEHEKLILLAQLKPEKDSDEAVTYSLGKFGQRALDFYSIHVTKESTHPVKPLAQIAGNRYASPVGKALSDACMGTIASFLSKYQDIIIEHQKVVKGNQKRLESLRELAGKENLEYPSVTLPPQPHTKEGVDAYNEVIARVRMWVNLNLWQKLKLSRDDAKPLLRLKGFPSFPLVERQANEVDWWDMVCNVKKLINEKKEDGKVFWQNLAGYKRQEALRPYLSSEEDRKKGKKFARYQLGDLLLHLEKKHGEDWGKVYDEAWERIDKKVEGLSKHIKLEEERRSEDAQSKAALTDWLRAKASFVIEGLKEADKDEFCRCELKLQKWYGDLRGKPFAIEAENSILDISGFSKQYNCAFIWQKDGVKKLNLYLIINYFKGGKLRFKKIKPEAFEANRFYTVINKKSGEIVPMEVNFNFDDPNLIILPLAFGKRQGREFIWNDLLSLETGSLKLANGRVIEKTLYNRRTRQDEPALFVALTFERREVLDSSNIKPMNLIGVDRGENIPAVIALTDPEGCPLSRFKDSLGNPTHILRIGESYKEKQRTIQAKKEVEQRRAGGYSRKYASKAKNLADDMVRNTARDLLYYAVTQDAMLIFENLSRGFGRQGKRTFSAERQYTRMEDWLTAKLAYEGLPSKTYLSKTLAQYTSKTCSNCGFTITSADYDRVLEKLKKTATGWMTTINGKELKVEGQITYYNRYKRQNVVKDLSVELDRLSEESVNNDISSWTKGRSGEALSLLKKRFSHRPVQEKFVCLNCGFETHADEQAALNIARSWLFLRSQEYKKYQTNKTTGNTDKRAFVETWQSFYRKKLKEVWKPAV

SEQ ID NO: 38217 - protein, 978 aa, synthetic construct
  REGION 1..978: note = engineered CasX variant
QEIKRINKIRRRLVKDSNTKKAGKTGPMKTLLVRVMTPDLRERLENLRKKPENIPQPISNTSRANLNKLLTDYTEMKKAILHVYWEEFQKDPVGLMSRVAQPASKKIDQNKLKPEMDEKGNLTTAGFACSQCGQPLFVYKLEQVSEKGKAYTNYVGRCNVAEHEKLILLAQLKPEKDSDEAVTYSLGKFGQRALDFYSIHVTKESTHPVKPLAQIAGNRYASYPVGKALSDACMGTIASFLSKYQDIIIEHQKVVKGNQKRLESLRELAGKENLEYPSVTLPPQPHTKEGVDAYNEVIARVRMWVNLNLWQKLKLSRDDAKPLLRLKGFPSFPLVERQANEVDWWDMVCNVKKLINEKKEDGKVFWQNLAGYKRQEALRPYLSSEEDRKKGKKFARYQLGDLLLHLEKKHGEDWGKVYDEAWERIDKKVEGLSKHIKLEEERRSEDAQSKAALTDWLRAKASFVIEGLKEADKDEFCRCELKLQKWYGDLRGKPFAIEAENSILDISGFSKQYNCAFIWQKDGVKKLNLYLIINYFKGGKLRFKKIKPEAFEANRFYTVINKKSGEIVPMEVNFNFDDPNLIILPLAFGKRQGREFIWNDLLSLETGSLKLANGRVIEKTLYNRRTRQDEPALFVALTFERREVLDSSNIKPMNLIGVDRGENIPAVIALTDPEGCPLSRFKDSLGNPTHILRIGESYKEKQRTIQAKKEVEQRRAGGYSRKYASKAKNLADDMVRNTARDLLYYAVTQDAMLIFENLSRGFGRQGKRTFSAERQYTRMEDWLTAKLAYEGLPSKTYLSKTLAQYTSKTCSNCGFTITSADYDRVLEKLKKTATGWMTTINGKELKVEGQITYYNRYKRQNVVKDLSVELDRLSEESVNNDISSWTKGRSGEALSLLKKRFSHRPVQEKFVCLNCGFETHADEQAALNIARSWLFLRSQEYKKYQTNKTTGNTDKRAFVETWQSFYRKKLKEVWKPAV

SEQ ID NO: 38218 - protein, 978 aa, synthetic construct
  REGION 1..978: note = engineered CasX variant
QEIKRINKIRRRLVKDSNTKKAGKTGPMKTLLVRVMTPDLRERLENLRKKPENIPQPISNTSRANLNKLLTDYTEMKKAILHVYWEEFQKDPVGLMSRVAQPASKKIDQNKLKPEMDEKGNLTTAGFACSQCGQPLFVYKLEQVSEKGKAYTNYVGRCNVAEHEKLILLAQLKPEKDSDEAVTYSLGKFGQRALDFYSIHVTKESTHPVKPLAQIAGNRYASHPVGKALSDACMGTIASFLSKYQDIIIEHQKVVKGNQKRLESLRELAGKENLEYPSVTLPPQPHTKEGVDAYNEVIARVRMWVNLNLWQKLKLSRDDAKPLLRLKGFPSFPLVERQANEVDWWDMVCNVKKLINEKKEDGKVFWQNLAGYKRQEALRPYLSSEEDRKKGKKFARYQLGDLLLHLEKKHGEDWGKVYDEAWERIDKKVEGLSKHIKLEEERRSEDAQSKAALTDWLRAKASFVIEGLKEADKDEFCRCELKLQKWYGDLRGKPFAIEAENSILDISGFSKQYNCAFIWQKDGVKKLNLYLIINYFKGGKLRFKKIKPEAFEANRFYTVINKKSGEIVPMEVNFNFDDPNLIILPLAFGKRQGREFIWNDLLSLETGSLKLANGRVIEKTLYNRRTRQDEPALFVALTFERREVLDSSNIKPMNLIGVDRGENIPAVIALTDPEGCPLSRFKDSLGNPTHILRIGESYKEKQRTIQAKKEVEQRRAGGYSRKYASKAKNLADDMVRNTARDLLYYAVTQDAMLIFENLSRGFGRQGKRTFSAERQYTRMEDWLTAKLAYEGLPSKTYLSKTLAQYTSKTCSNCGFTITSADYDRVLEKLKKTATGWMTTINGKELKVEGQITYYNRYKRQNVVKDLSVELDRLSEESVNNDISSWTKGRSGEALSLLKKRFSHRPVQEKFVCLNCGFETHADEQAALNIARSWLFLRSQEYKKYQTNKTTGNTDKRAFVETWQSFYRKKLKEVWKPAV

SEQ ID NO: 38219 - protein, 978 aa, synthetic construct
  REGION 1..978: note = engineered CasX variant
QEIKRINKIRRRLVKDSNTKKAGKTGPMKTLLVRVMTPDLRERLENLRKKPENIPQPISNTSRANLNKLLTDYTEMKKAILHVYWEEFQKDPVGLMSRVAQPASKKIDQNKLKPEMDEKGNLTTAGFACSQCGQPLFVYKLEQVSEKGKAYTNYVGRCNVAEHEKLILLAQLKPEKDSDEAVTYSLGKFGQRALDFYSIHVTKESTHPVKPLAQIAGNRYASSPVGKALSDACMGTIASFLSKYQDIIIEHQKVVKGNQKRLESLRELAGKENLEYPSVTLPPQPHTKEGVDAYNEVIARVRMWVNLNLWQKLKLSRDDAKPLLRLKGFPSFPLVERQANEVDWWDMVCNVKKLINEKKEDGKVFWQNLAGYKRQEALRPYLSSEEDRKKGKKFARYQLGDLLLHLEKKHGEDWGKVYDEAWERIDKKVEGLSKHIKLEEERRSEDAQSKAALTDWLRAKASFVIEGLKEADKDEFCRCELKLQKWYGDLRGKPFAIEAENSILDISGFSKQYNCAFIWQKDGVKKLNLYLIINYFKGGKLRFKKIKPEAFEANRFYTVINKKSGEIVPMEVNFNFDDPNLIILPLAFGKRQGREFIWNDLLSLETGSLKLANGRVIEKTLYNRRTRQDEPALFVALTFERREVLDSSNIKPMNLIGVDRGENIPAVIALTDPEGCPLSRFKDSLGNPTHILRIGESYKEKQRTIQAKKEVEQRRAGGYSRKYASKAKNLADDMVRNTARDLLYYAVTQDAMLIFENLSRGFGRQGKRTFSAERQYTRMEDWLTAKLAYEGLPSKTYLSKTLAQYTSKTCSNCGFTITSADYDRVLEKLKKTATGWMTTINGKELKVEGQITYYNRYKRQNVVKDLSVELDRLSEESVNNDISSWTKGRSGEALSLLKKRFSHRPVQEKFVCLNCGFETHADEQAALNIARSWLFLRSQEYKKYQTNKTTGNTDKRAFVETWQSFYRKKLKEVWKPAV

SEQ ID NO: 38220 - protein, 978 aa, synthetic construct
  REGION 1..978: note = engineered CasX variant
QEIKRINKIRRRLVKDSNTKKAGKTGPMKTLLVRVMTPDLRERLENLRKKPENIPQPISNTSRANLNKLLTDYTEMKKAILHVYWEEFQKDPVGLMSRVAQPASKKIDQNKLKPEMDEKGNLTTAGFACSQCGQPLFVYKLEQVSEKGKAYTNYVGRCNVAEHEKLILLAQLKPEKDSDEAVTYSLGKFGQRALDFYSIHVTKESTHPVKPLAQIAGNRYASTPVGKALSDACMGTIASFLSKYQDIIIEHQKVVKGNQKRLESLRELAGKENLEYPSVTLPPQPHTKEGVDAYNEVIARVRMWVNLNLWQKLKLSRDDAKPLLRLKGFPSFPLVERQANEVDWWDMVCNVKKLINEKKEDGKVFWQNLAGYKRQEALRPYLSSEEDRKKGKKFARYQLGDLLLHLEKKHGEDWGKVYDEAWERIDKKVEGLSKHIKLEEERRSEDAQSKAALTDWLRAKASFVIEGLKEADKDEFCRCELKLQKWYGDLRGKPFAIEAENSILDISGFSKQYNCAFIWQKDGVKKLNLYLIINYFKGGKLRFKKIKPEAFEANRFYTVINKKSGEIVPMEVNFNFDDPNLIILPLAFGKRQGREFIWNDLLSLETGSLKLANGRVIEKTLYNRRTRQDEPALFVALTFERREVLDSSNIKPMNLIGVDRGENIPAVIALTDPEGCPLSRFKDSLGNPTHILRIGESYKEKQRTIQAKKEVEQRRAGGYSRKYASKAKNLADDMVRNTARDLLYYAVTQDAMLIFENLSRGFGRQGKRTFSAERQYTRMEDWLTAKLAYEGLPSKTYLSKTLAQYTSKTCSNCGFTITSADYDRVLEKLKKTATGWMTTINGKELKVEGQITYYNRYKRQNVVKDLSVELDRLSEESVNNDISSWTKGRSGEALSLLKKRFSHRPVQEKFVCLNCGFETHADEQAALNIARSWLFLRSQEYKKYQTNKTTGNTDKRAFVETWQSFYRKKLKEVWKPAV

SEQ ID NO: 38221 - protein, 978 aa, synthetic construct
  REGION 1..978: note = engineered CasX variant
QEIKRINKIRRRLVKDSNTKKAGKTGPMKTLLVRVMTPDLRERLENLRKKPENIPQPISNTSRANLNKLLTDYTEMKKAILHVYWEEFQKDPVGLMSRVAQPASKKIDQNKLKPEMDEKGNLTTAGFACSQCGQPLFVYKLEQVSEKGKAYTNYVGRCNVAEHEKLILLAQLKPEKDSDEAVTYSLGKFGQRALDFYSIHVTKESTHPVKPLAQIAGNRYASAPVGKALSDACMGTIASFLSKYQDIIIEHQKVVKGNQKRLESLRELAGKENLEYPSVTLPPQPHTKEGVDAYNEVIARVRMWVNLNLWQKLKLSRDDAKPLLRLKGFPSFPLVERQANEVDWWDMVCNVKKLINEKKEDGKVFWQNLAGYKRQEALRPYLSSEEDRKKGKKFARYQLGDLLLHLEKKHGEDWGKVYDEAWERIDKKVEGLSKHIKLEEERRSEDAQSKAALTDWLRAKASFVIEGLKEADKDEFCRCELKLQKWYGDLRGKPFAIEAENSILDISGFSKQYNCAFIWQKDGVKKLNLYLIINYFKGGKLRFKKIKPEAFEANRFYTVINKKSGEIVPMEVNFNFDDPNLIILPLAFGKRQGREFIWNDLLSLETGSLKLANGRVIEKTLYNRRTRQDEPALFVALTFERREVLDSSNIKPMNLIGVDRGENIPAVIALTDPEGCPLSRFKDSLGNPTHILRIGESYKEKQRTIQAKKEVEQRRAGGYSRKYASKAKNLADDMVRNTARDLLYYAVTQDAMLIFENLSRGFGRQGKRTFSAERQYTRMEDWLTAKLAYEGLPSKTYLSKTLAQYTSKTCSNCGFTITSADYDRVLEKLKKTATGWMTTINGKELKVEGQITYYNRYKRQNVVKDLSVELDRLSEESVNNDISSWTKGRSGEALSLLKKRFSHRPVQEKFVCLNCGFETHADEQAALNIARSWLFLRSQEYKKYQTNKTTGNTDKRAFVETWQSFYRKKLKEVWKPAV

SEQ ID NO: 38222 - protein, 978 aa, synthetic construct
  REGION 1..978: note = engineered CasX variant
QEIKRINKIRRRLVKDSNTKKAGKTGPMKTLLVRVMTPDLRERLENLRKKPENIPQPISNTSRANLNKLLTDYTEMKKAILHVYWEEFQKDPVGLMSRVAQPASKKIDQNKLKPEMDEKGNLTTAGFACSQCGQPLFVYKLEQVSEKGKAYTNYVGRCNVAEHEKLILLAQLKPEKDSDEAVTYSLGKFGQRALDFYSIHVTKESTHPVKPLAQIAGNRYASVPVGKALSDACMGTIASFLSKYQDIIIEHQKVVKGNQKRLESLRELAGKENLEYPSVTLPPQPHTKEGVDAYNEVIARVRMWVNLNLWQKLKLSRDDAKPLLRLKGFPSFPLVERQANEVDWWDMVCNVKKLINEKKEDGKVFWQNLAGYKRQEALRPYLSSEEDRKKGKKFARYQLGDLLLHLEKKHGEDWGKVYDEAWERIDKKVEGLSKHIKLEEERRSEDAQSKAALTDWLRAKASFVIEGLKEADKDEFCRCELKLQKWYGDLRGKPFAIEAENSILDISGFSKQYNCAFIWQKDGVKKLNLYLIINYFKGGKLRFKKIKPEAFEANRFYTVINKKSGEIVPMEVNFNFDDPNLIILPLAFGKRQGREFIWNDLLSLETGSLKLANGRVIEKTLYNRRTRQDEPALFVALTFERREVLDSSNIKPMNLIGVDRGENIPAVIALTDPEGCPLSRFKDSLGNPTHILRIGESYKEKQRTIQAKKEVEQRRAGGYSRKYASKAKNLADDMVRNTARDLLYYAVTQDAMLIFENLSRGFGRQGKRTFSAERQYTRMEDWLTAKLAYEGLPSKTYLSKTLAQYTSKTCSNCGFTITSADYDRVLEKLKKTATGWMTTINGKELKVEGQITYYNRYKRQNVVKDLSVELDRLSEESVNNDISSWTKGRSGEALSLLKKRFSHRPVQEKFVCLNCGFETHADEQAALNIARSWLFLRSQEYKKYQTNKTTGNTDKRAFVETWQSFYRKKLKEVWKPAV

SEQ ID NO: 38223 - protein, 978 aa, synthetic construct
  REGION 1..978: note = engineered CasX variant
QEIKRINKIRRRLVKDSNTKKAGKTGPMKTLLVRVMTPDLRERLENLRKKPENIPQPISNTSRANLNKLLTDYTEMKKAILHVYWEEFQKDPVGLMSRVAQPASKKIDQNKLKPEMDEKGNLTTAGFACSQCGQPLFVYKLEQVSEKGKAYTNYVGRCNVAEHEKLIKLAQLKPEKDSDEAVTYSLGKFGQRALDFYSIHVTKESTHPVKPLAQIAGNRYASGPVGKALSDACMGTIASFLSKYQDIIIEHQKVVKGNQKRLESLRELAGKENLEYPSVTLPPQPHTKEGVDAYNEVIARVRMWVNLNLWQKLKLSRDDAKPLLRLKGFPSFPLVERQANEVDWWDMVCNVKKLINEKKEDGKVFWQNLAGYKRQEALRPYLSSEEDRKKGKKFARYQLGDLLLHLEKKHGEDWGKVYDEAWERIDKKVEGLSKHIKLEEERRSEDAQSKAALTDWLRAKASFVIEGLKEADKDEFCRCELKLQKWYGDLRGKPFAIEAENSILDISGFSKQYNCAFIWQKDGVKKLNLYLIINYFKGGKLRFKKIKPEAFEANRFYTVINKKSGEIVPMEVNFNFDDPNLIILPLAFGKRQGREFIWNDLLSLETGSLKLANGRVIEKTLYNRRTRQDEPALFVALTFERREVLDSSNIKPMNLIGVDRGENIPAVIALTDPEGCPLSRFKDSLGNPTHILRIGESYKEKQRTIQAKKEVEQRRAGGYSRKYASKAKNLADDMVRNTARDLLYYAVTQDAMLIFENLSRGFGRQGKRTFSAERQYTRMEDWLTAKLAYEGLPSKTYLSKTLAQYTSKTCSNCGFTITSADYDRVLEKLKKTATGWMTTINGKELKVEGQITYYNRYKRQNVVKDLSVELDRLSEESVNNDISSWTKGRSGEALSLLKKRFSHRPVQEKFVCLNCGFETHADEQAALNIARSWLFLRSQEYKKYQTNKTTGNTDKRAFVETWQSFYRKKLKEVWKPAV

SEQ ID NO: 38224 - protein, 977 aa, synthetic construct
  REGION 1..977: note = engineered CasX variant
QEIKRINKIRRRLVKDSNTKKAGKTGPMKTLLVRVMTPDLRERLENLRKKPENIPQPISNTSRANLNKLLTDYTEMKKAILHVYWEEFQKDPVGLMSRVAQPASKKIDQNKLKPEMDEKGNLTTAGFACSQCGQPLFVYKLEQVSEKGKAYTNYVGRCNVAEHEKLILLAQLKPEKDSDEAVTYSLGKFGQRALDFYSIHVTKESTHPVKPLAQIAGNRYASPVGKALSDACMGTIASFLSKYQDIIIEHQKVVKGNQKRLESLRELAGKENLEYPSVTLPPQPHTKEGVDAYNEVIARVRMWVNLNLWQKLKLSRDDAKPLLRLKGFPSFPLVERQANEVDWWDMVCNVKKLINEKKEDGKVFWQNLAGYKRQEALRPYLSSEEDRKKGKKFARYQLGDLLLHLEKKHGEDWGKVYDEAWERIDKKVEGLSKHIKLEEERRSEDAQSKAALTDWLRAKASFVIEGLKEADKDEFCRCELKLQKWYGDLRGKPFAIEAENSILDISGFSKQYNCAFIWQKDGVKKLNLYLIINYFKGGKLRFKKIKPEAFEANRFYTVINKKSGEIVPMEVNFNFDDPNLIILPLAFGKRQGREFIWNDLLSLETGSLKLANGRVIEKTLYNRRTRQDEPALFVALTFERREVLDSSNIKPMNLIGVDRGENIPAVIALTDPEGCPLSRFKDSLGNPTHILRIGESYKEKQRTIQAKKEVEQRRAGGYSRKYASKAKNLADDMVRNTARDLLYYAVTQDAMLIFENLSRGFGRQGKRTFSAERQYTRMEDWLTAKLAYEGLPSKTYLSKTLAQYTSKTCSNCGFTITSADYDRVLEKLKKTATGWMTTINGKELKVEGQITYYNRYKRQNVVKDLSVELDRLSEESVNNDISSWTKGRSGEALSLLKKRFSHRPVQEKFVCLNCGFETHADEQAALNIARSWLFLRSQEYKKYQTNKTTGNTDKRAFVETWQSFYRKKLKEVWKPAV

SEQ ID NO: 38225 - protein, 978 aa, synthetic construct
  REGION 1..978: note = engineered CasX variant
QEIKRINKIRRRLVKDSNTKKAGKTGPMKTLLVRVMTPDLRERLENLRKKPENIPQPISNTSRANLNKLLTDYTEMKKAILHVYWEEFQKDPVGLMSRVAQPASKKIDQNKLKPEMDEKGNLTTAGFACSQCGQPLFVYKLEQVSEKGKAYTNYFGRCNVAEHEKLILLAQLKPEKDSDEAVTYSLGKFGQRALDFYSIHVTKESTHPVKPLAQIAGNRYASYPVGKALSDACMGTIASFLSKYQDIIIEHQKVVKGNQKRLESLRELAGKENLEYPSVTLPPQPHTKEGVDAYNEVIARVRMWVNLNLWQKLKLSRDDAKPLLRLKGFPSFPLVERQANEVDWWDMVCNVKKLINEKKEDGKVFWQNLAGYKRQEALRPYLSSEEDRKKGKKFARYQLGDLLLHLEKKHGEDWGKVYDEAWERIDKKVEGLSKHIKLEEERRSEDAQSKAALTDWLRAKASFVIEGLKEADKDEFCRCELKLQKWYGDLRGKPFAIEAENSILDISGFSKQYNCAFIWQKDGVKKLNLYLIINYFKGGKLRFKKIKPEAFEANRFYTVINKKSGEIVPMEVNFNFDDPNLIILPLAFGKRQGREFIWNDLLSLETGSLKLANGRVIEKTLYNRRTRQDEPALFVALTFERREVLDSSNIKPMNLIGVDRGENIPAVIALTDPEGCPLSRFKDSLGNPTHILRIGESYKEKQRTIQAKKEVEQRRAGGYSRKYASKAKNLADDMVRNTARDLLYYAVTQDAMLIFENLSRGFGRQGKRTFSAERQYTRMEDWLTAKLAYEGLASKTYLSKTLAQYTSKTCSNCGFTITSADYDRVLEKLKKTATGWMTTINGKELKVEGQITYYNRYKRQNVVKDLSVELDRLSEESVNNDISSWTKGRSGEALSLLKKRFSHRPVQEKFVCLNCGFETHADEQAALNIARSWLFLRSQEYKKYQTNKTTGNTDKRAFVETWQSFYRKKLKEVWKPAV

SEQ ID NO: 38226 - protein, 978 aa, synthetic construct
  REGION 1..978: note = engineered CasX variant
QEIKRINKIRRRLVKDSNTKKAGKTGPMKTLLVRVMTPDLRERLENLRKKPENIPQPISNTSRANLNKLLTDYTEMKKAILHVYWEEFQKDPVGLMSRVAQPASKKIDQNKLKPEMDEKGNLTTAGFACSQCGQPLFVYKLEQVSEKGKAYTNYFGRCNVAEHEKLILLAQLKPEKDSDEAVTYSLGKFGQRALDFYSIHVTKESTHPVKPLAQIAGNRYASHPVGKALSDACMGTIASFLSKYQDIIIEHQKVVKGNQKRLESLRELAGKENLEYPSVTLPPQPHTKEGVDAYNEVIARVRMWVNLNLWQKLKLSRDDAKPLLRLKGFPSFPLVERQANEVDWWDMVCNVKKLINEKKEDGKVFWQNLAGYKRQEALRPYLSSEEDRKKGKKFARYQLGDLLLHLEKKHGEDWGKVYDEAWERIDKKVEGLSKHIKLEEERRSEDAQSKAALTDWLRAKASFVIEGLKEADKDEFCRCELKLQKWYGDLRGKPFAIEAENSILDISGFSKQYNCAFIWQKDGVKKLNLYLIINYFKGGKLRFKKIKPEAFEANRFYTVINKKSGEIVPMEVNFNFDDPNLIILPLAFGKRQGREFIWNDLLSLETGSLKLANGRVIEKTLYNRRTRQDEPALFVALTFERREVLDSSNIKPMNLIGVDRGENIPAVIALTDPEGCPLSRFKDSLGNPTHILRIGESYKEKQRTIQAKKEVEQRRAGGYSRKYASKAKNLADDMVRNTARDLLYYAVTQDAMLIFENLSRGFGRQGKRTFSAERQYTRMEDWLTAKLAYEGLASKTYLSKTLAQYTSKTCSNCGFTITSADYDRVLEKLKKTATGWMTTINGKELKVEGQITYYNRYKRQNVVKDLSVELDRLSEESVNNDISSWTKGRSGEALSLLKKRFSHRPVQEKFVCLNCGFETHADEQAALNIARSWLFLRSQEYKKYQTNKTTGNTDKRAFVETWQSFYRKKLKEVWKPAV

SEQ ID NO: 38227 - protein, 978 aa, synthetic construct
  REGION 1..978: note = engineered CasX variant
QEIKRINKIRRRLVKDSNTKKAGKTGPMKTLLVRVMTPDLRERLENLRKKPENIPQPISNTSRANLNKLLTDYTEMKKAILHVYWEEFQKDPVGLMSRVAQPASKKIDQNKLKPEMDEKGNLTTAGFACSQCGQPLFVYKLEQVSEKGKAYTNYFGRCNVAEHEKLILLAQLKPEKDSDEAVTYSLGKFGQRALDFYSIHVTKESTHPVKPLAQIAGNRYASSPVGKALSDACMGTIASFLSKYQDIIIEHQKVVKGNQKRLESLRELAGKENLEYPSVTLPPQPHTKEGVDAYNEVIARVRMWVNLNLWQKLKLSRDDAKPLLRLKGFPSFPLVERQANEVDWWDMVCNVKKLINEKKEDGKVFWQNLAGYKRQEALRPYLSSEEDRKKGKKFARYQLGDLLLHLEKKHGEDWGKVYDEAWERIDKKVEGLSKHIKLEEERRSEDAQSKAALTDWLRAKASFVIEGLKEADKDEFCRCELKLQKWYGDLRGKPFAIEAENSILDISGFSKQYNCAFIWQKDGVKKLNLYLIINYFKGGKLRFKKIKPEAFEANRFYTVINKKSGEIVPMEVNFNFDDPNLIILPLAFGKRQGREFIWNDLLSLETGSLKLANGRVIEKTLYNRRTRQDEPALFVALTFERREVLDSSNIKPMNLIGVDRGENIPAVIALTDPEGCPLSRFKDSLGNPTHILRIGESYKEKQRTIQAKKEVEQRRAGGYSRKYASKAKNLADDMVRNTARDLLYYAVTQDAMLIFENLSRGFGRQGKRTFSAERQYTRMEDWLTAKLAYEGLASKTYLSKTLAQYTSKTCSNCGFTITSADYDRVLEKLKKTATGWMTTINGKELKVEGQITYYNRYKRQNVVKDLSVELDRLSEESVNNDISSWTKGRSGEALSLLKKRFSHRPVQEKFVCLNCGFETHADEQAALNIARSWLFLRSQEYKKYQTNKTTGNTDKRAFVETWQSFYRKKLKEVWKPAV

SEQ ID NO: 38228 - protein, 978 aa, synthetic construct
  REGION 1..978: note = engineered CasX variant
QEIKRINKIRRRLVKDSNTKKAGKTGPMKTLLVRVMTPDLRERLENLRKKPENIPQPISNTSRANLNKLLTDYTEMKKAILHVYWEEFQKDPVGLMSRVAQPASKKIDQNKLKPEMDEKGNLTTAGFACSQCGQPLFVYKLEQVSEKGKAYTNYFGRCNVAEHEKLILLAQLKPEKDSDEAVTYSLGKFGQRALDFYSIHVTKESTHPVKPLAQIAGNRYASTPVGKALSDACMGTIASFLSKYQDIIIEHQKVVKGNQKRLESLRELAGKENLEYPSVTLPPQPHTKEGVDAYNEVIARVRMWVNLNLWQKLKLSRDDAKPLLRLKGFPSFPLVERQANEVDWWDMVCNVKKLINEKKEDGKVFWQNLAGYKRQEALRPYLSSEEDRKKGKKFARYQLGDLLLHLEKKHGEDWGKVYDEAWERIDKKVEGLSKHIKLEEERRSEDAQSKAALTDWLRAKASFVIEGLKEADKDEFCRCELKLQKWYGDLRGKPFAIEAENSILDISGFSKQYNCAFIWQKDGVKKLNLYLIINYFKGGKLRFKKIKPEAFEANRFYTVINKKSGEIVPMEVNFNFDDPNLIILPLAFGKRQGREFIWNDLLSLETGSLKLANGRVIEKTLYNRRTRQDEPALFVALTFERREVLDSSNIKPMNLIGVDRGENIPAVIALTDPEGCPLSRFKDSLGNPTHILRIGESYKEKQRTIQAKKEVEQRRAGGYSRKYASKAKNLADDMVRNTARDLLYYAVTQDAMLIFENLSRGFGRQGKRTFSAERQYTRMEDWLTAKLAYEGLASKTYLSKTLAQYTSKTCSNCGFTITSADYDRVLEKLKKTATGWMTTINGKELKVEGQITYYNRYKRQNVVKDLSVELDRLSEESVNNDISSWTKGRSGEALSLLKKRFSHRPVQEKFVCLNCGFETHADEQAALNIARSWLFLRSQEYKKYQTNKTTGNTDKRAFVETWQSFYRKKLKEVWKPAV

SEQ ID NO: 38229 - protein, 978 aa, synthetic construct
  REGION 1..978: note = engineered CasX variant
QEIKRINKIRRRLVKDSNTKKAGKTGPMKTLLVRVMTPDLRERLENLRKKPENIPQPISNTSRANLNKLLTDYTEMKKAILHVYWEEFQKDPVGLMSRVAQPASKKIDQNKLKPEMDEKGNLTTAGFACSQCGQPLFVYKLEQVSEKGKAYTNYFGRCNVAEHEKLILLAQLKPEKDSDEAVTYSLGKFGQRALDFYSIHVTKESTHPVKPLAQIAGNRYASAPVGKALSDACMGTIASFLSKYQDIIIEHQKVVKGNQKRLESLRELAGKENLEYPSVTLPPQPHTKEGVDAYNEVIARVRMWVNLNLWQKLKLSRDDAKPLLRLKGFPSFPLVERQANEVDWWDMVCNVKKLINEKKEDGKVFWQNLAGYKRQEALRPYLSSEEDRKKGKKFARYQLGDLLLHLEKKHGEDWGKVYDEAWERIDKKVEGLSKHIKLEEERRSEDAQSKAALTDWLRAKASFVIEGLKEADKDEFCRCELKLQKWYGDLRGKPFAIEAENSILDISGFSKQYNCAFIWQKDGVKKLNLYLIINYFKGGKLRFKKIKPEAFEANRFYTVINKKSGEIVPMEVNFNFDDPNLIILPLAFGKRQGREFIWNDLLSLETGSLKLANGRVIEKTLYNRRTRQDEPALFVALTFERREVLDSSNIKPMNLIGVDRGENIPAVIALTDPEGCPLSRFKDSLGNPTHILRIGESYKEKQRTIQAKKEVEQRRAGGYSRKYASKAKNLADDMVRNTARDLLYYAVTQDAMLIFENLSRGFGRQGKRTFSAERQYTRMEDWLTAKLAYEGLASKTYLSKTLAQYTSKTCSNCGFTITSADYDRVLEKLKKTATGWMTTINGKELKVEGQITYYNRYKRQNVVKDLSVELDRLSEESVNNDISSWTKGRSGEALSLLKKRFSHRPVQEKFVCLNCGFETHADEQAALNIARSWLFLRSQEYKKYQTNKTTGNTDKRAFVETWQSFYRKKLKEVWKPAV

SEQ ID NO: 38230 - protein, 978 aa, synthetic construct
  REGION 1..978: note = engineered CasX variant
QEIKRINKIRRRLVKDSNTKKAGKTGPMKTLLVRVMTPDLRERLENLRKKPENIPQPISNTSRANLNKLLTDYTEMKKAILHVYWEEFQKDPVGLMSRVAQPASKKIDQNKLKPEMDEKGNLTTAGFACSQCGQPLFVYKLEQVSEKGKAYTNYFGRCNVAEHEKLILLAQLKPEKDSDEAVTYSLGKFGQRALDFYSIHVTKESTHPVKPLAQIAGNRYASVPVGKALSDACMGTIASFLSKYQDIIIEHQKVVKGNQKRLESLRELAGKENLEYPSVTLPPQPHTKEGVDAYNEVIARVRMWVNLNLWQKLKLSRDDAKPLLRLKGFPSFPLVERQANEVDWWDMVCNVKKLINEKKEDGKVFWQNLAGYKRQEALRPYLSSEEDRKKGKKFARYQLGDLLLHLEKKHGEDWGKVYDEAWERIDKKVEGLSKHIKLEEERRSEDAQSKAALTDWLRAKASFVIEGLKEADKDEFCRCELKLQKWYGDLRGKPFAIEAENSILDISGFSKQYNCAFIWQKDGVKKLNLYLIINYFKGGKLRFKKIKPEAFEANRFYTVINKKSGEIVPMEVNFNFDDPNLIILPLAFGKRQGREFIWNDLLSLETGSLKLANGRVIEKTLYNRRTRQDEPALFVALTFERREVLDSSNIKPMNLIGVDRGENIPAVIALTDPEGCPLSRFKDSLGNPTHILRIGESYKEKQRTIQAKKEVEQRRAGGYSRKYASKAKNLADDMVRNTARDLLYYAVTQDAMLIFENLSRGFGRQGKRTFSAERQYTRMEDWLTAKLAYEGLASKTYLSKTLAQYTSKTCSNCGFTITSADYDRVLEKLKKTATGWMTTINGKELKVEGQITYYNRYKRQNVVKDLSVELDRLSEESVNNDISSWTKGRSGEALSLLKKRFSHRPVQEKFVCLNCGFETHADEQAALNIARSWLFLRSQEYKKYQTNKTTGNTDKRAFVETWQSFYRKKLKEVWKPAV

SEQ ID NO: 38231 - protein, 978 aa, synthetic construct
  REGION 1..978: note = engineered CasX variant
QEIKRINKIRRRLVKDSNTKKAGKTGPMKTLLVRVMTPDLRERLENLRKKPENIPQPISNTSRANLNKLLTDYTEMKKAILHVYWEEFQKDPVGLMSRVAQPASKKIDQNKLKPEMDEKGNLTTAGFACSQCGQPLFVYKLEQVSEKGKAYTNYFGRCNVAEHEKLIKLAQLKPEKDSDEAVTYSLGKFGQRALDFYSIHVTKESTHPVKPLAQIAGNRYASGPVGKALSDACMGTIASFLSKYQDIIIEHQKVVKGNQKRLESLRELAGKENLEYPSVTLPPQPHTKEGVDAYNEVIARVRMWVNLNLWQKLKLSRDDAKPLLRLKGFPSFPLVERQANEVDWWDMVCNVKKLINEKKEDGKVFWQNLAGYKRQEALRPYLSSEEDRKKGKKFARYQLGDLLLHLEKKHGEDWGKVYDEAWERIDKKVEGLSKHIKLEEERRSEDAQSKAALTDWLRAKASFVIEGLKEADKDEFCRCELKLQKWYGDLRGKPFAIEAENSILDISGFSKQYNCAFIWQKDGVKKLNLYLIINYFKGGKLRFKKIKPEAFEANRFYTVINKKSGEIVPMEVNFNFDDPNLIILPLAFGKRQGREFIWNDLLSLETGSLKLANGRVIEKTLYNRRTRQDEPALFVALTFERREVLDSSNIKPMNLIGVDRGENIPAVIALTDPEGCPLSRFKDSLGNPTHILRIGESYKEKQRTIQAKKEVEQRRAGGYSRKYASKAKNLADDMVRNTARDLLYYAVTQDAMLIFENLSRGFGRQGKRTFSAERQYTRMEDWLTAKLAYEGLASKTYLSKTLAQYTSKTCSNCGFTITSADYDRVLEKLKKTATGWMTTINGKELKVEGQITYYNRYKRQNVVKDLSVELDRLSEESVNNDISSWTKGRSGEALSLLKKRFSHRPVQEKFVCLNCGFETHADEQAALNIARSWLFLRSQEYKKYQTNKTTGNTDKRAFVETWQSFYRKKLKEVWKPAV

SEQ ID NO: 38232 - protein, 977 aa, synthetic construct
  REGION 1..977: note = engineered CasX variant
QEIKRINKIRRRLVKDSNTKKAGKTGPMKTLLVRVMTPDLRERLENLRKKPENIPQPISNTSRANLNKLLTDYTEMKKAILHVYWEEFQKDPVGLMSRVAQPASKKIDQNKLKPEMDEKGNLTTAGFACSQCGQPLFVYKLEQVSEKGKAYTNYFGRCNVAEHEKLILLAQLKPEKDSDEAVTYSLGKFGQRALDFYSIHVTKESTHPVKPLAQIAGNRYASPVGKALSDACMGTIASFLSKYQDIIIEHQKVVKGNQKRLESLRELAGKENLEYPSVTLPPQPHTKEGVDAYNEVIARVRMWVNLNLWQKLKLSRDDAKPLLRLKGFPSFPLVERQANEVDWWDMVCNVKKLINEKKEDGKVFWQNLAGYKRQEALRPYLSSEEDRKKGKKFARYQLGDLLLHLEKKHGEDWGKVYDEAWERIDKKVEGLSKHIKLEEERRSEDAQSKAALTDWLRAKASFVIEGLKEADKDEFCRCELKLQKWYGDLRGKPFAIEAENSILDISGFSKQYNCAFIWQKDGVKKLNLYLIINYFKGGKLRFKKIKPEAFEANRFYTVINKKSGEIVPMEVNFNFDDPNLIILPLAFGKRQGREFIWNDLLSLETGSLKLANGRVIEKTLYNRRTRQDEPALFVALTFERREVLDSSNIKPMNLIGVDRGENIPAVIALTDPEGCPLSRFKDSLGNPTHILRIGESYKEKQRTIQAKKEVEQRRAGGYSRKYASKAKNLADDMVRNTARDLLYYAVTQDAMLIFENLSRGFGRQGKRTFSAERQYTRMEDWLTAKLAYEGLASKTYLSKTLAQYTSKTCSNCGFTITSADYDRVLEKLKKTATGWMTTINGKELKVEGQITYYNRYKRQNVVKDLSVELDRLSEESVNNDISSWTKGRSGEALSLLKKRFSHRPVQEKFVCLNCGFETHADEQAALNIARSWLFLRSQEYKKYQTNKTTGNTDKRAFVETWQSFYRKKLKEVWKPAV

SEQ ID NO: 38233 - protein, 978 aa, synthetic construct
  REGION 1..978: note = engineered CasX variant
QEIKRINKIRRRLVKDSNTKKAGKTGPMKTLLVRVMTPDLRERLENLRKKPENIPQPISNTSRANLNKLLTDYTEMKKAILHVYWEEFQKDPVGLMSRVAQPASKKIDQNKLKPEMDEKGNLTTAGFACSQCGQPLFVYKLEQVSEKGKAYTNYFGRCNVAEHEKLILLAQLKPEKDSDEAVTYSLGKFGQRALDFYSIHVTKESTHPVKPLAQIAGNRYASYPVGKALSDACMGTIASFLSKYQDIIIEHQKVVKGNQKRLESLRELAGKENLEYPSVTLPPQPHTKEGVDAYNEVIARVRMWVNLNLWQKLKLSRDDAKPLLRLKGFPSFPLVERQANEVDWWDMVCNVKKLINEKKEDGKVFWQNLAGYKRQEALRPYLSSEEDRKKGKKFARYQLGDLLLHLEKKHGEDWGKVYDEAWERIDKKVEGLSKHIKLEEERRSEDAQSKAALTDWLRAKASFVIEGLKEADKDEFCRCELKLQKWYGDLRGKPFAIEAENSILDISGFSKQYNCAFIWQKDGVKKLNLYLIINYFKGGKLRFKKIKPEAFEANRFYTVINKKSGEIVPMEVNFNFDDPNLIILPLAFGKRQGREFIWNDLLSLETGSLKLANGRVIEKTLYNRRTRQDEPALFVALTFERREVLDSSNIKPMNLIGVDRGENIPAVIALTDPEGCPLSRFKDSLGNPTHILRIGESYKEKQRTIQAKKEVEQRRAGGYSRKYASKAKNLADDMVRNTARDLLYYAVTQDAMLIFENLSRGFGRQGKRTFSAERQYTRMEDWLTAKLAYEGLPSKVYLSKTLAQYTSKTCSNCGFTITSADYDRVLEKLKKTATGWMTTINGKELKVEGQITYYNRYKRQNVVKDLSVELDRLSEESVNNDISSWTKGRSGEALSLLKKRFSHRPVQEKFVCLNCGFETHADEQAALNIARSWLFLRSQEYKKYQTNKTTGNTDKRAFVETWQSFYRKKLKEVWKPAV

SEQ ID NO: 38234 - protein, 978 aa, synthetic construct
  REGION 1..978: note = engineered CasX variant
QEIKRINKIRRRLVKDSNTKKAGKTGPMKTLLVRVMTPDLRERLENLRKKPENIPQPISNTSRANLNKLLTDYTEMKKAILHVYWEEFQKDPVGLMSRVAQPASKKIDQNKLKPEMDEKGNLTTAGFACSQCGQPLFVYKLEQVSEKGKAYTNYFGRCNVAEHEKLILLAQLKPEKDSDEAVTYSLGKFGQRALDFYSIHVTKESTHPVKPLAQIAGNRYASHPVGKALSDACMGTIASFLSKYQDIIIEHQKVVKGNQKRLESLRELAGKENLEYPSVTLPPQPHTKEGVDAYNEVIARVRMWVNLNLWQKLKLSRDDAKPLLRLKGFPSFPLVERQANEVDWWDMVCNVKKLINEKKEDGKVFWQNLAGYKRQEALRPYLSSEEDRKKGKKFARYQLGDLLLHLEKKHGEDWGKVYDEAWERIDKKVEGLSKHIKLEEERRSEDAQSKAALTDWLRAKASFVIEGLKEADKDEFCRCELKLQKWYGDLRGKPFAIEAENSILDISGFSKQYNCAFIWQKDGVKKLNLYLIINYFKGGKLRFKKIKPEAFEANRFYTVINKKSGEIVPMEVNFNFDDPNLIILPLAFGKRQGREFIWNDLLSLETGSLKLANGRVIEKTLYNRRTRQDEPALFVALTFERREVLDSSNIKPMNLIGVDRGENIPAVIALTDPEGCPLSRFKDSLGNPTHILRIGESYKEKQRTIQAKKEVEQRRAGGYSRKYASKAKNLADDMVRNTARDLLYYAVTQDAMLIFENLSRGFGRQGKRTFSAERQYTRMEDWLTAKLAYEGLPSKVYLSKTLAQYTSKTCSNCGFTITSADYDRVLEKLKKTATGWMTTINGKELKVEGQITYYNRYKRQNVVKDLSVELDRLSEESVNNDISSWTKGRSGEALSLLKKRFSHRPVQEKFVCLNCGFETHADEQAALNIARSWLFLRSQEYKKYQTNKTTGNTDKRAFVETWQSFYRKKLKEVWKPAV

SEQ ID NO: 38235 - protein, 978 aa, synthetic construct
  REGION 1..978: note = engineered CasX variant
QEIKRINKIRRRLVKDSNTKKAGKTGPMKTLLVRVMTPDLRERLENLRKKPENIPQPISNTSRANLNKLLTDYTEMKKAILHVYWEEFQKDPVGLMSRVAQPASKKIDQNKLKPEMDEKGNLTTAGFACSQCGQPLFVYKLEQVSEKGKAYTNYFGRCNVAEHEKLILLAQLKPEKDSDEAVTYSLGKFGQRALDFYSIHVTKESTHPVKPLAQIAGNRYASSPVGKALSDACMGTIASFLSKYQDIIIEHQKVVKGNQKRLESLRELAGKENLEYPSVTLPPQPHTKEGVDAYNEVIARVRMWVNLNLWQKLKLSRDDAKPLLRLKGFPSFPLVERQANEVDWWDMVCNVKKLINEKKEDGKVFWQNLAGYKRQEALRPYLSSEEDRKKGKKFARYQLGDLLLHLEKKHGEDWGKVYDEAWERIDKKVEGLSKHIKLEEERRSEDAQSKAALTDWLRAKASFVIEGLKEADKDEFCRCELKLQKWYGDLRGKPFAIEAENSILDISGFSKQYNCAFIWQKDGVKKLNLYLIINYFKGGKLRFKKIKPEAFEANRFYTVINKKSGEIVPMEVNFNFDDPNLIILPLAFGKRQGREFIWNDLLSLETGSLKLANGRVIEKTLYNRRTRQDEPALFVALTFERREVLDSSNIKPMNLIGVDRGENIPAVIALTDPEGCPLSRFKDSLGNPTHILRIGESYKEKQRTIQAKKEVEQRRAGGYSRKYASKAKNLADDMVRNTARDLLYYAVTQDAMLIFENLSRGFGRQGKRTFSAERQYTRMEDWLTAKLAYEGLPSKVYLSKTLAQYTSKTCSNCGFTITSADYDRVLEKLKKTATGWMTTINGKELKVEGQITYYNRYKRQNVVKDLSVELDRLSEESVNNDISSWTKGRSGEALSLLKKRFSHRPVQEKFVCLNCGFETHADEQAALNIARSWLFLRSQEYKKYQTNKTTGNTDKRAFVETWQSFYRKKLKEVWKPAV

SEQ ID NO: 38236 - protein, 978 aa, synthetic construct
  REGION 1..978: note = engineered CasX variant
QEIKRINKIRRRLVKDSNTKKAGKTGPMKTLLVRVMTPDLRERLENLRKKPENIPQPISNTSRANLNKLLTDYTEMKKAILHVYWEEFQKDPVGLMSRVAQPASKKIDQNKLKPEMDEKGNLTTAGFACSQCGQPLFVYKLEQVSEKGKAYTNYFGRCNVAEHEKLILLAQLKPEKDSDEAVTYSLGKFGQRALDFYSIHVTKESTHPVKPLAQIAGNRYASTPVGKALSDACMGTIASFLSKYQDIIIEHQKVVKGNQKRLESLRELAGKENLEYPSVTLPPQPHTKEGVDAYNEVIARVRMWVNLNLWQKLKLSRDDAKPLLRLKGFPSFPLVERQANEVDWWDMVCNVKKLINEKKEDGKVFWQNLAGYKRQEALRPYLSSEEDRKKGKKFARYQLGDLLLHLEKKHGEDWGKVYDEAWERIDKKVEGLSKHIKLEEERRSEDAQSKAALTDWLRAKASFVIEGLKEADKDEFCRCELKLQKWYGDLRGKPFAIEAENSILDISGFSKQYNCAFIWQKDGVKKLNLYLIINYFKGGKLRFKKIKPEAFEANRFYTVINKKSGEIVPMEVNFNFDDPNLIILPLAFGKRQGREFIWNDLLSLETGSLKLANGRVIEKTLYNRRTRQDEPALFVALTFERREVLDSSNIKPMNLIGVDRGENIPAVIALTDPEGCPLSRFKDSLGNPTHILRIGESYKEKQRTIQAKKEVEQRRAGGYSRKYASKAKNLADDMVRNTARDLLYYAVTQDAMLIFENLSRGFGRQGKRTFSAERQYTRMEDWLTAKLAYEGLPSKVYLSKTLAQYTSKTCSNCGFTITSADYDRVLEKLKKTATGWMTTINGKELKVEGQITYYNRYKRQNVVKDLSVELDRLSEESVNNDISSWTKGRSGEALSLLKKRFSHRPVQEKFVCLNCGFETHADEQAALNIARSWLFLRSQEYKKYQTNKTTGNTDKRAFVETWQSFYRKKLKEVWKPAV

SEQ ID NO: 38237 - protein, 978 aa, synthetic construct
  REGION 1..978: note = engineered CasX variant
QEIKRINKIRRRLVKDSNTKKAGKTGPMKTLLVRVMTPDLRERLENLRKKPENIPQPISNTSRANLNKLLTDYTEMKKAILHVYWEEFQKDPVGLMSRVAQPASKKIDQNKLKPEMDEKGNLTTAGFACSQCGQPLFVYKLEQVSEKGKAYTNYFGRCNVAEHEKLILLAQLKPEKDSDEAVTYSLGKFGQRALDFYSIHVTKESTHPVKPLAQIAGNRYASAPVGKALSDACMGTIASFLSKYQDIIIEHQKVVKGNQKRLESLRELAGKENLEYPSVTLPPQPHTKEGVDAYNEVIARVRMWVNLNLWQKLKLSRDDAKPLLRLKGFPSFPLVERQANEVDWWDMVCNVKKLINEKKEDGKVFWQNLAGYKRQEALRPYLSSEEDRKKGKKFARYQLGDLLLHLEKKHGEDWGKVYDEAWERIDKKVEGLSKHIKLEEERRSEDAQSKAALTDWLRAKASFVIEGLKEADKDEFCRCELKLQKWYGDLRGKPFAIEAENSILDISGFSKQYNCAFIWQKDGVKKLNLYLIINYFKGGKLRFKKIKPEAFEANRFYTVINKKSGEIVPMEVNFNFDDPNLIILPLAFGKRQGREFIWNDLLSLETGSLKLANGRVIEKTLYNRRTRQDEPALFVALTFERREVLDSSNIKPMNLIGVDRGENIPAVIALTDPEGCPLSRFKDSLGNPTHILRIGESYKEKQRTIQAKKEVEQRRAGGYSRKYASKAKNLADDMVRNTARDLLYYAVTQDAMLIFENLSRGFGRQGKRTFSAERQYTRMEDWLTAKLAYEGLPSKVYLSKTLAQYTSKTCSNCGFTITSADYDRVLEKLKKTATGWMTTINGKELKVEGQITYYNRYKRQNVVKDLSVELDRLSEESVNNDISSWTKGRSGEALSLLKKRFSHRPVQEKFVCLNCGFETHADEQAALNIARSWLFLRSQEYKKYQTNKTTGNTDKRAFVETWQSFYRKKLKEVWKPAV

SEQ ID NO: 38238 - protein, 978 aa, synthetic construct
  REGION 1..978: note = engineered CasX variant
QEIKRINKIRRRLVKDSNTKKAGKTGPMKTLLVRVMTPDLRERLENLRKKPENIPQPISNTSRANLNKLLTDYTEMKKAILHVYWEEFQKDPVGLMSRVAQPASKKIDQNKLKPEMDEKGNLTTAGFACSQCGQPLFVYKLEQVSEKGKAYTNYFGRCNVAEHEKLILLAQLKPEKDSDEAVTYSLGKFGQRALDFYSIHVTKESTHPVKPLAQIAGNRYASVPVGKALSDACMGTIASFLSKYQDIIIEHQKVVKGNQKRLESLRELAGKENLEYPSVTLPPQPHTKEGVDAYNEVIARVRMWVNLNLWQKLKLSRDDAKPLLRLKGFPSFPLVERQANEVDWWDMVCNVKKLINEKKEDGKVFWQNLAGYKRQEALRPYLSSEEDRKKGKKFARYQLGDLLLHLEKKHGEDWGKVYDEAWERIDKKVEGLSKHIKLEEERRSEDAQSKAALTDWLRAKASFVIEGLKEADKDEFCRCELKLQKWYGDLRGKPFAIEAENSILDISGFSKQYNCAFIWQKDGVKKLNLYLIINYFKGGKLRFKKIKPEAFEANRFYTVINKKSGEIVPMEVNFNFDDPNLIILPLAFGKRQGREFIWNDLLSLETGSLKLANGRVIEKTLYNRRTRQDEPALFVALTFERREVLDSSNIKPMNLIGVDRGENIPAVIALTDPEGCPLSRFKDSLGNPTHILRIGESYKEKQRTIQAKKEVEQRRAGGYSRKYASKAKNLADDMVRNTARDLLYYAVTQDAMLIFENLSRGFGRQGKRTFSAERQYTRMEDWLTAKLAYEGLPSKVYLSKTLAQYTSKTCSNCGFTITSADYDRVLEKLKKTATGWMTTINGKELKVEGQITYYNRYKRQNVVKDLSVELDRLSEESVNNDISSWTKGRSGEALSLLKKRFSHRPVQEKFVCLNCGFETHADEQAALNIARSWLFLRSQEYKKYQTNKTTGNTDKRAFVETWQSFYRKKLKEVWKPAV

SEQ ID NO: 38239 - protein, 978 aa, synthetic construct
  REGION 1..978: note = engineered CasX variant
QEIKRINKIRRRLVKDSNTKKAGKTGPMKTLLVRVMTPDLRERLENLRKKPENIPQPISNTSRANLNKLLTDYTEMKKAILHVYWEEFQKDPVGLMSRVAQPASKKIDQNKLKPEMDEKGNLTTAGFACSQCGQPLFVYKLEQVSEKGKAYTNYFGRCNVAEHEKLIKLAQLKPEKDSDEAVTYSLGKFGQRALDFYSIHVTKESTHPVKPLAQIAGNRYASGPVGKALSDACMGTIASFLSKYQDIIIEHQKVVKGNQKRLESLRELAGKENLEYPSVTLPPQPHTKEGVDAYNEVIARVRMWVNLNLWQKLKLSRDDAKPLLRLKGFPSFPLVERQANEVDWWDMVCNVKKLINEKKEDGKVFWQNLAGYKRQEALRPYLSSEEDRKKGKKFARYQLGDLLLHLEKKHGEDWGKVYDEAWERIDKKVEGLSKHIKLEEERRSEDAQSKAALTDWLRAKASFVIEGLKEADKDEFCRCELKLQKWYGDLRGKPFAIEAENSILDISGFSKQYNCAFIWQKDGVKKLNLYLIINYFKGGKLRFKKIKPEAFEANRFYTVINKKSGEIVPMEVNFNFDDPNLIILPLAFGKRQGREFIWNDLLSLETGSLKLANGRVIEKTLYNRRTRQDEPALFVALTFERREVLDSSNIKPMNLIGVDRGENIPAVIALTDPEGCPLSRFKDSLGNPTHILRIGESYKEKQRTIQAKKEVEQRRAGGYSRKYASKAKNLADDMVRNTARDLLYYAVTQDAMLIFENLSRGFGRQGKRTFSAERQYTRMEDWLTAKLAYEGLPSKVYLSKTLAQYTSKTCSNCGFTITSADYDRVLEKLKKTATGWMTTINGKELKVEGQITYYNRYKRQNVVKDLSVELDRLSEESVNNDISSWTKGRSGEALSLLKKRFSHRPVQEKFVCLNCGFETHADEQAALNIARSWLFLRSQEYKKYQTNKTTGNTDKRAFVETWQSFYRKKLKEVWKPAV

SEQ ID NO: 38240 - protein, 977 aa, synthetic construct
  REGION 1..977: note = engineered CasX variant
QEIKRINKIRRRLVKDSNTKKAGKTGPMKTLLVRVMTPDLRERLENLRKKPENIPQPISNTSRANLNKLLTDYTEMKKAILHVYWEEFQKDPVGLMSRVAQPASKKIDQNKLKPEMDEKGNLTTAGFACSQCGQPLFVYKLEQVSEKGKAYTNYFGRCNVAEHEKLILLAQLKPEKDSDEAVTYSLGKFGQRALDFYSIHVTKESTHPVKPLAQIAGNRYASPVGKALSDACMGTIASFLSKYQDIIIEHQKVVKGNQKRLESLRELAGKENLEYPSVTLPPQPHTKEGVDAYNEVIARVRMWVNLNLWQKLKLSRDDAKPLLRLKGFPSFPLVERQANEVDWWDMVCNVKKLINEKKEDGKVFWQNLAGYKRQEALRPYLSSEEDRKKGKKFARYQLGDLLLHLEKKHGEDWGKVYDEAWERIDKKVEGLSKHIKLEEERRSEDAQSKAALTDWLRAKASFVIEGLKEADKDEFCRCELKLQKWYGDLRGKPFAIEAENSILDISGFSKQYNCAFIWQKDGVKKLNLYLIINYFKGGKLRFKKIKPEAFEANRFYTVINKKSGEIVPMEVNFNFDDPNLIILPLAFGKRQGREFIWNDLLSLETGSLKLANGRVIEKTLYNRRTRQDEPALFVALTFERREVLDSSNIKPMNLIGVDRGENIPAVIALTDPEGCPLSRFKDSLGNPTHILRIGESYKEKQRTIQAKKEVEQRRAGGYSRKYASKAKNLADDMVRNTARDLLYYAVTQDAMLIFENLSRGFGRQGKRTFSAERQYTRMEDWLTAKLAYEGLPSKVYLSKTLAQYTSKTCSNCGFTITSADYDRVLEKLKKTATGWMTTINGKELKVEGQITYYNRYKRQNVVKDLSVELDRLSEESVNNDISSWTKGRSGEALSLLKKRFSHRPVQEKFVCLNCGFETHADEQAALNIARSWLFLRSQEYKKYQTNKTTGNTDKRAFVETWQSFYRKKLKEVWKPAV

SEQ ID NO: 38241 - protein, 979 aa, synthetic construct
  REGION 1..979: note = engineered CasX variant
QEIKRINKIRRRLVKDSNTKKAGKTGPMKTLLVRVMTPDLRERLENLRKKPENIPQPISNTSRANLNKLLTDYTEMKKAILHVYWEEFQKDPVGLMSRVAQPASKKIDQNKLKPEMDEKGNLTTAGFACSQCGQPLFVYKLEQVSEKGKAYTNYFGRCNVAEHEKLILLAQLKPEKDSDEAVTYSLGKFGQRALDFYSIHVTKESTHPVKPLAQIAGNRYASYPVGKALSDACMGTIASFLSKYQDIIIEHQKVVKGNQKRLESLRELAGKENLEYPSVTLPPQPHTKEGVDAYNEVIARVRMWVNLNLWQKLKLSRDDAKPLLRLKGFPSFPLVERQANEVDWWDMVCNVKKLINEKKEDGKVFWQNLAGYKRQEALRPYLSSEEDRKKGKKFARYQLGDLLLHLEKKHGEDWGKVYDEAWERIDKKVEGLSKHIKLEEERRSEDAQSKAALTDWLRAKASFVIEGLKEADKDEFCRCELKLQKWYGDLRGKPFAIEAENSILDISGFSKQYNCAFIWQKDGVKKLNLYLIINYFKGGKLRFKKIKPEAFEANRFYTVINKKSGEIVPMEVNFNFDDPNLIILPLAFGKRQGREFIWNDLLSLETGSLKLANGRVIEKTLYNRRTRQDEPALFVALTFERREVLDSSNIKPMNLIGVDRGENIPAVIALTDPEGCPLSRFKDSLGNPTHILRIGESYKEKQRTIQAKKEVEQRRAGGYSRKYASKAKNLADDMVRNTARDLLYYAVTQDAMLIFENLSRGFGRQGKRTFSAERQYTRMEDWLTAKLAYEGPLPSKTYLSKTLAQYTSKTCSNCGFTITSADYDRVLEKLKKTATGWMTTINGKELKVEGQITYYNRYKRQNVVKDLSVELDRLSEESVNNDISSWTKGRSGEALSLLKKRFSHRPVQEKFVCLNCGFETHADEQAALNIARSWLFLRSQEYKKYQTNKTTGNTDKRAFVETWQSFYRKKLKEVWKPAV

SEQ ID NO: 38242 - protein, 979 aa, synthetic construct
  REGION 1..979: note = engineered CasX variant
QEIKRINKIRRRLVKDSNTKKAGKTGPMKTLLVRVMTPDLRERLENLRKKPENIPQPISNTSRANLNKLLTDYTEMKKAILHVYWEEFQKDPVGLMSRVAQPASKKIDQNKLKPEMDEKGNLTTAGFACSQCGQPLFVYKLEQVSEKGKAYTNYFGRCNVAEHEKLILLAQLKPEKDSDEAVTYSLGKFGQRALDFYSIHVTKESTHPVKPLAQIAGNRYASHPVGKALSDACMGTIASFLSKYQDIIIEHQKVVKGNQKRLESLRELAGKENLEYPSVTLPPQPHTKEGVDAYNEVIARVRMWVNLNLWQKLKLSRDDAKPLLRLKGFPSFPLVERQANEVDWWDMVCNVKKLINEKKEDGKVFWQNLAGYKRQEALRPYLSSEEDRKKGKKFARYQLGDLLLHLEKKHGEDWGKVYDEAWERIDKKVEGLSKHIKLEEERRSEDAQSKAALTDWLRAKASFVIEGLKEADKDEFCRCELKLQKWYGDLRGKPFAIEAENSILDISGFSKQYNCAFIWQKDGVKKLNLYLIINYFKGGKLRFKKIKPEAFEANRFYTVINKKSGEIVPMEVNFNFDDPNLIILPLAFGKRQGREFIWNDLLSLETGSLKLANGRVIEKTLYNRRTRQDEPALFVALTFERREVLDSSNIKPMNLIGVDRGENIPAVIALTDPEGCPLSRFKDSLGNPTHILRIGESYKEKQRTIQAKKEVEQRRAGGYSRKYASKAKNLADDMVRNTARDLLYYAVTQDAMLIFENLSRGFGRQGKRTFSAERQYTRMEDWLTAKLAYEGPLPSKTYLSKTLAQYTSKTCSNCGFTITSADYDRVLEKLKKTATGWMTTINGKELKVEGQITYYNRYKRQNVVKDLSVELDRLSEESVNNDISSWTKGRSGEALSLLKKRFSHRPVQEKFVCLNCGFETHADEQAALNIARSWLFLRSQEYKKYQTNKTTGNTDKRAFVETWQSFYRKKLKEVWKPAV

SEQ ID NO: 38243 - protein, 979 aa, synthetic construct
  REGION 1..979: note = engineered CasX variant
QEIKRINKIRRRLVKDSNTKKAGKTGPMKTLLVRVMTPDLRERLENLRKKPENIPQPISNTSRANLNKLLTDYTEMKKAILHVYWEEFQKDPVGLMSRVAQPASKKIDQNKLKPEMDEKGNLTTAGFACSQCGQPLFVYKLEQVSEKGKAYTNYFGRCNVAEHEKLILLAQLKPEKDSDEAVTYSLGKFGQRALDFYSIHVTKESTHPVKPLAQIAGNRYASSPVGKALSDACMGTIASFLSKYQDIIIEHQKVVKGNQKRLESLRELAGKENLEYPSVTLPPQPHTKEGVDAYNEVIARVRMWVNLNLWQKLKLSRDDAKPLLRLKGFPSFPLVERQANEVDWWDMVCNVKKLINEKKEDGKVFWQNLAGYKRQEALRPYLSSEEDRKKGKKFARYQLGDLLLHLEKKHGEDWGKVYDEAWERIDKKVEGLSKHIKLEEERRSEDAQSKAALTDWLRAKASFVIEGLKEADKDEFCRCELKLQKWYGDLRGKPFAIEAENSILDISGFSKQYNCAFIWQKDGVKKLNLYLIINYFKGGKLRFKKIKPEAFEANRFYTVINKKSGEIVPMEVNFNFDDPNLIILPLAFGKRQGREFIWNDLLSLETGSLKLANGRVIEKTLYNRRTRQDEPALFVALTFERREVLDSSNIKPMNLIGVDRGENIPAVIALTDPEGCPLSRFKDSLGNPTHILRIGESYKEKQRTIQAKKEVEQRRAGGYSRKYASKAKNLADDMVRNTARDLLYYAVTQDAMLIFENLSRGFGRQGKRTFSAERQYTRMEDWLTAKLAYEGPLPSKTYLSKTLAQYTSKTCSNCGFTITSADYDRVLEKLKKTATGWMTTINGKELKVEGQITYYNRYKRQNVVKDLSVELDRLSEESVNNDISSWTKGRSGEALSLLKKRFSHRPVQEKFVCLNCGFETHADEQAALNIARSWLFLRSQEYKKYQTNKTTGNTDKRAFVETWQSFYRKKLKEVWKPAV

SEQ ID NO: 38244 - protein, 979 aa, synthetic construct
  REGION 1..979: note = engineered CasX variant
QEIKRINKIRRRLVKDSNTKKAGKTGPMKTLLVRVMTPDLRERLENLRKKPENIPQPISNTSRANLNKLLTDYTEMKKAILHVYWEEFQKDPVGLMSRVAQPASKKIDQNKLKPEMDEKGNLTTAGFACSQCGQPLFVYKLEQVSEKGKAYTNYFGRCNVAEHEKLILLAQLKPEKDSDEAVTYSLGKFGQRALDFYSIHVTKESTHPVKPLAQIAGNRYASTPVGKALSDACMGTIASFLSKYQDIIIEHQKVVKGNQKRLESLRELAGKENLEYPSVTLPPQPHTKEGVDAYNEVIARVRMWVNLNLWQKLKLSRDDAKPLLRLKGFPSFPLVERQANEVDWWDMVCNVKKLINEKKEDGKVFWQNLAGYKRQEALRPYLSSEEDRKKGKKFARYQLGDLLLHLEKKHGEDWGKVYDEAWERIDKKVEGLSKHIKLEEERRSEDAQSKAALTDWLRAKASFVIEGLKEADKDEFCRCELKLQKWYGDLRGKPFAIEAENSILDISGFSKQYNCAFIWQKDGVKKLNLYLIINYFKGGKLRFKKIKPEAFEANRFYTVINKKSGEIVPMEVNFNFDDPNLIILPLAFGKRQGREFIWNDLLSLETGSLKLANGRVIEKTLYNRRTRQDEPALFVALTFERREVLDSSNIKPMNLIGVDRGENIPAVIALTDPEGCPLSRFKDSLGNPTHILRIGESYKEKQRTIQAKKEVEQRRAGGYSRKYASKAKNLADDMVRNTARDLLYYAVTQDAMLIFENLSRGFGRQGKRTFSAERQYTRMEDWLTAKLAYEGPLPSKTYLSKTLAQYTSKTCSNCGFTITSADYDRVLEKLKKTATGWMTTINGKELKVEGQITYYNRYKRQNVVKDLSVELDRLSEESVNNDISSWTKGRSGEALSLLKKRFSHRPVQEKFVCLNCGFETHADEQAALNIARSWLFLRSQEYKKYQTNKTTGNTDKRAFVETWQSFYRKKLKEVWKPAV

SEQ ID NO: 38245 - protein, 979 aa, synthetic construct
  REGION 1..979: note = engineered CasX variant
QEIKRINKIRRRLVKDSNTKKAGKTGPMKTLLVRVMTPDLRERLENLRKKPENIPQPISNTSRANLNKLLTDYTEMKKAILHVYWEEFQKDPVGLMSRVAQPASKKIDQNKLKPEMDEKGNLTTAGFACSQCGQPLFVYKLEQVSEKGKAYTNYFGRCNVAEHEKLILLAQLKPEKDSDEAVTYSLGKFGQRALDFYSIHVTKESTHPVKPLAQIAGNRYASAPVGKALSDACMGTIASFLSKYQDIIIEHQKVVKGNQKRLESLRELAGKENLEYPSVTLPPQPHTKEGVDAYNEVIARVRMWVNLNLWQKLKLSRDDAKPLLRLKGFPSFPLVERQANEVDWWDMVCNVKKLINEKKEDGKVFWQNLAGYKRQEALRPYLSSEEDRKKGKKFARYQLGDLLLHLEKKHGEDWGKVYDEAWERIDKKVEGLSKHIKLEEERRSEDAQSKAALTDWLRAKASFVIEGLKEADKDEFCRCELKLQKWYGDLRGKPFAIEAENSILDISGFSKQYNCAFIWQKDGVKKLNLYLIINYFKGGKLRFKKIKPEAFEANRFYTVINKKSGEIVPMEVNFNFDDPNLIILPLAFGKRQGREFIWNDLLSLETGSLKLANGRVIEKTLYNRRTRQDEPALFVALTFERREVLDSSNIKPMNLIGVDRGENIPAVIALTDPEGCPLSRFKDSLGNPTHILRIGESYKEKQRTIQAKKEVEQRRAGGYSRKYASKAKNLADDMVRNTARDLLYYAVTQDAMLIFENLSRGFGRQGKRTFSAERQYTRMEDWLTAKLAYEGPLPSKTYLSKTLAQYTSKTCSNCGFTITSADYDRVLEKLKKTATGWMTTINGKELKVEGQITYYNRYKRQNVVKDLSVELDRLSEESVNNDISSWTKGRSGEALSLLKKRFSHRPVQEKFVCLNCGFETHADEQAALNIARSWLFLRSQEYKKYQTNKTTGNTDKRAFVETWQSFYRKKLKEVWKPAV

SEQ ID NO: 38246 - protein, 979 aa, synthetic construct
  REGION 1..979: note = engineered CasX variant
QEIKRINKIRRRLVKDSNTKKAGKTGPMKTLLVRVMTPDLRERLENLRKKPENIPQPISNTSRANLNKLLTDYTEMKKAILHVYWEEFQKDPVGLMSRVAQPASKKIDQNKLKPEMDEKGNLTTAGFACSQCGQPLFVYKLEQVSEKGKAYTNYFGRCNVAEHEKLILLAQLKPEKDSDEAVTYSLGKFGQRALDFYSIHVTKESTHPVKPLAQIAGNRYASVPVGKALSDACMGTIASFLSKYQDIIIEHQKVVKGNQKRLESLRELAGKENLEYPSVTLPPQPHTKEGVDAYNEVIARVRMWVNLNLWQKLKLSRDDAKPLLRLKGFPSFPLVERQANEVDWWDMVCNVKKLINEKKEDGKVFWQNLAGYKRQEALRPYLSSEEDRKKGKKFARYQLGDLLLHLEKKHGEDWGKVYDEAWERIDKKVEGLSKHIKLEEERRSEDAQSKAALTDWLRAKASFVIEGLKEADKDEFCRCELKLQKWYGDLRGKPFAIEAENSILDISGFSKQYNCAFIWQKDGVKKLNLYLIINYFKGGKLRFKKIKPEAFEANRFYTVINKKSGEIVPMEVNFNFDDPNLIILPLAFGKRQGREFIWNDLLSLETGSLKLANGRVIEKTLYNRRTRQDEPALFVALTFERREVLDSSNIKPMNLIGVDRGENIPAVIALTDPEGCPLSRFKDSLGNPTHILRIGESYKEKQRTIQAKKEVEQRRAGGYSRKYASKAKNLADDMVRNTARDLLYYAVTQDAMLIFENLSRGFGRQGKRTFSAERQYTRMEDWLTAKLAYEGPLPSKTYLSKTLAQYTSKTCSNCGFTITSADYDRVLEKLKKTATGWMTTINGKELKVEGQITYYNRYKRQNVVKDLSVELDRLSEESVNNDISSWTKGRSGEALSLLKKRFSHRPVQEKFVCLNCGFETHADEQAALNIARSWLFLRSQEYKKYQTNKTTGNTDKRAFVETWQSFYRKKLKEVWKPAV

SEQ ID NO: 38247 - protein, 979 aa, synthetic construct
  REGION 1..979: note = engineered CasX variant
QEIKRINKIRRRLVKDSNTKKAGKTGPMKTLLVRVMTPDLRERLENLRKKPENIPQPISNTSRANLNKLLTDYTEMKKAILHVYWEEFQKDPVGLMSRVAQPASKKIDQNKLKPEMDEKGNLTTAGFACSQCGQPLFVYKLEQVSEKGKAYTNYFGRCNVAEHEKLIKLAQLKPEKDSDEAVTYSLGKFGQRALDFYSIHVTKESTHPVKPLAQIAGNRYASGPVGKALSDACMGTIASFLSKYQDIIIEHQKVVKGNQKRLESLRELAGKENLEYPSVTLPPQPHTKEGVDAYNEVIARVRMWVNLNLWQKLKLSRDDAKPLLRLKGFPSFPLVERQANEVDWWDMVCNVKKLINEKKEDGKVFWQNLAGYKRQEALRPYLSSEEDRKKGKKFARYQLGDLLLHLEKKHGEDWGKVYDEAWERIDKKVEGLSKHIKLEEERRSEDAQSKAALTDWLRAKASFVIEGLKEADKDEFCRCELKLQKWYGDLRGKPFAIEAENSILDISGFSKQYNCAFIWQKDGVKKLNLYLIINYFKGGKLRFKKIKPEAFEANRFYTVINKKSGEIVPMEVNFNFDDPNLIILPLAFGKRQGREFIWNDLLSLETGSLKLANGRVIEKTLYNRRTRQDEPALFVALTFERREVLDSSNIKPMNLIGVDRGENIPAVIALTDPEGCPLSRFKDSLGNPTHILRIGESYKEKQRTIQAKKEVEQRRAGGYSRKYASKAKNLADDMVRNTARDLLYYAVTQDAMLIFENLSRGFGRQGKRTFSAERQYTRMEDWLTAKLAYEGPLPSKTYLSKTLAQYTSKTCSNCGFTITSADYDRVLEKLKKTATGWMTTINGKELKVEGQITYYNRYKRQNVVKDLSVELDRLSEESVNNDISSWTKGRSGEALSLLKKRFSHRPVQEKFVCLNCGFETHADEQAALNIARSWLFLRSQEYKKYQTNKTTGNTDKRAFVETWQSFYRKKLKEVWKPAV

SEQ ID NO: 38248 - protein, 978 aa, synthetic construct
  REGION 1..978: note = engineered CasX variant
QEIKRINKIRRRLVKDSNTKKAGKTGPMKTLLVRVMTPDLRERLENLRKKPENIPQPISNTSRANLNKLLTDYTEMKKAILHVYWEEFQKDPVGLMSRVAQPASKKIDQNKLKPEMDEKGNLTTAGFACSQCGQPLFVYKLEQVSEKGKAYTNYFGRCNVAEHEKLILLAQLKPEKDSDEAVTYSLGKFGQRALDFYSIHVTKESTHPVKPLAQIAGNRYASPVGKALSDACMGTIASFLSKYQDIIIEHQKVVKGNQKRLESLRELAGKENLEYPSVTLPPQPHTKEGVDAYNEVIARVRMWVNLNLWQKLKLSRDDAKPLLRLKGFPSFPLVERQANEVDWWDMVCNVKKLINEKKEDGKVFWQNLAGYKRQEALRPYLSSEEDRKKGKKFARYQLGDLLLHLEKKHGEDWGKVYDEAWERIDKKVEGLSKHIKLEEERRSEDAQSKAALTDWLRAKASFVIEGLKEADKDEFCRCELKLQKWYGDLRGKPFAIEAENSILDISGFSKQYNCAFIWQKDGVKKLNLYLIINYFKGGKLRFKKIKPEAFEANRFYTVINKKSGEIVPMEVNFNFDDPNLIILPLAFGKRQGREFIWNDLLSLETGSLKLANGRVIEKTLYNRRTRQDEPALFVALTFERREVLDSSNIKPMNLIGVDRGENIPAVIALTDPEGCPLSRFKDSLGNPTHILRIGESYKEKQRTIQAKKEVEQRRAGGYSRKYASKAKNLADDMVRNTARDLLYYAVTQDAMLIFENLSRGFGRQGKRTFSAERQYTRMEDWLTAKLAYEGPLPSKTYLSKTLAQYTSKTCSNCGFTITSADYDRVLEKLKKTATGWMTTINGKELKVEGQITYYNRYKRQNVVKDLSVELDRLSEESVNNDISSWTKGRSGEALSLLKKRFSHRPVQEKFVCLNCGFETHADEQAALNIARSWLFLRSQEYKKYQTNKTTGNTDKRAFVETWQSFYRKKLKEVWKPAV

SEQ ID NO: 38249 - protein, 979 aa, synthetic construct
  REGION 1..979: note = engineered CasX variant
QEIKRINKIRRRLVKDSNTKKAGKTGPMKTLLVRVMTPDLRERLENLRKKPENIPQPISNTSRANLNKLLTDYTEMKKAILHVYWEEFQKDPVGLMSRVAQPASKKIDQNKLKPEMDEKGNLTTAGFACSQCGQPLFVYKLEQVSEKGKAYTNYFGRCNVAEHEKLILLAQLKPEKDSDEAVTYSLGKFGQRALDFYSIHVTKESTHPVKPLAQIAGNRYASYPVGKALSDACMGTIASFLSKYQDIIIEHQKVVKGNQKRLESLRELAGKENLEYPSVTLPPQPHTKEGVDAYNEVIARVRMWVNLNLWQKLKLSRDDAKPLLRLKGFPSFPLVERQANEVDWWDMVCNVKKLINEKKEDGKVFWQNLAGYKRQEALRPYLSSEEDVRKKGKKFARYQLGDLLLHLEKKHGEDWGKVYDEAWERIDKKVEGLSKHIKLEEERRSEDAQSKAALTDWLRAKASFVIEGLKEADKDEFCRCELKLQKWYGDLRGKPFAIEAENSILDISGFSKQYNCAFIWQKDGVKKLNLYLIINYFKGGKLRFKKIKPEAFEANRFYTVINKKSGEIVPMEVNFNFDDPNLIILPLAFGKRQGREFIWNDLLSLETGSLKLANGRVIEKTLYNRRTRQDEPALFVALTFERREVLDSSNIKPMNLIGVDRGENIPAVIALTDPEGCPLSRFKDSLGNPTHILRIGESYKEKQRTIQAKKEVEQRRAGGYSRKYASKAKNLADDMVRNTARDLLYYAVTQDAMLIFENLSRGFGRQGKRTFSAERQYTRMEDWLTAKLAYEGLPSKTYLSKTLAQYTSKTCSNCGFTITSADYDRVLEKLKKTATGWMTTINGKELKVEGQITYYNRYKRQNVVKDLSVELDRLSEESVNNDISSWTKGRSGEALSLLKKRFSHRPVQEKFVCLNCGFETHADEQAALNIARSWLFLRSQEYKKYQTNKTTGNTDKRAFVETWQSFYRKKLKEVWKPAV

SEQ ID NO: 38250 - protein, 979 aa, synthetic construct
  REGION 1..979: note = engineered CasX variant
QEIKRINKIRRRLVKDSNTKKAGKTGPMKTLLVRVMTPDLRERLENLRKKPENIPQPISNTSRANLNKLLTDYTEMKKAILHVYWEEFQKDPVGLMSRVAQPASKKIDQNKLKPEMDEKGNLTTAGFACSQCGQPLFVYKLEQVSEKGKAYTNYFGRCNVAEHEKLILLAQLKPEKDSDEAVTYSLGKFGQRALDFYSIHVTKESTHPVKPLAQIAGNRYASHPVGKALSDACMGTIASFLSKYQDIIIEHQKVVKGNQKRLESLRELAGKENLEYPSVTLPPQPHTKEGVDAYNEVIARVRMWVNLNLWQKLKLSRDDAKPLLRLKGFPSFPLVERQANEVDWWDMVCNVKKLINEKKEDGKVFWQNLAGYKRQEALRPYLSSEEDVRKKGKKFARYQLGDLLLHLEKKHGEDWGKVYDEAWERIDKKVEGLSKHIKLEEERRSEDAQSKAALTDWLRAKASFVIEGLKEADKDEFCRCELKLQKWYGDLRGKPFAIEAENSILDISGFSKQYNCAFIWQKDGVKKLNLYLIINYFKGGKLRFKKIKPEAFEANRFYTVINKKSGEIVPMEVNFNFDDPNLIILPLAFGKRQGREFIWNDLLSLETGSLKLANGRVIEKTLYNRRTRQDEPALFVALTFERREVLDSSNIKPMNLIGVDRGENIPAVIALTDPEGCPLSRFKDSLGNPTHILRIGESYKEKQRTIQAKKEVEQRRAGGYSRKYASKAKNLADDMVRNTARDLLYYAVTQDAMLIFENLSRGFGRQGKRTFSAERQYTRMEDWLTAKLAYEGLPSKTYLSKTLAQYTSKTCSNCGFTITSADYDRVLEKLKKTATGWMTTINGKELKVEGQITYYNRYKRQNVVKDLSVELDRLSEESVNNDISSWTKGRSGEALSLLKKRFSHRPVQEKFVCLNCGFETHADEQAALNIARSWLFLRSQEYKKYQTNKTTGNTDKRAFVETWQSFYRKKLKEVWKPAV

SEQ ID NO: 38251 - protein, 979 aa, synthetic construct
  REGION 1..979: note = engineered CasX variant
QEIKRINKIRRRLVKDSNTKKAGKTGPMKTLLVRVMTPDLRERLENLRKKPENIPQPISNTSRANLNKLLTDYTEMKKAILHVYWEEFQKDPVGLMSRVAQPASKKIDQNKLKPEMDEKGNLTTAGFACSQCGQPLFVYKLEQVSEKGKAYTNYFGRCNVAEHEKLILLAQLKPEKDSDEAVTYSLGKFGQRALDFYSIHVTKESTHPVKPLAQIAGNRYASSPVGKALSDACMGTIASFLSKYQDIIIEHQKVVKGNQKRLESLRELAGKENLEYPSVTLPPQPHTKEGVDAYNEVIARVRMWVNLNLWQKLKLSRDDAKPLLRLKGFPSFPLVERQANEVDWWDMVCNVKKLINEKKEDGKVFWQNLAGYKRQEALRPYLSSEEDVRKKGKKFARYQLGDLLLHLEKKHGEDWGKVYDEAWERIDKKVEGLSKHIKLEEERRSEDAQSKAALTDWLRAKASFVIEGLKEADKDEFCRCELKLQKWYGDLRGKPFAIEAENSILDISGFSKQYNCAFIWQKDGVKKLNLYLIINYFKGGKLRFKKIKPEAFEANRFYTVINKKSGEIVPMEVNFNFDDPNLIILPLAFGKRQGREFIWNDLLSLETGSLKLANGRVIEKTLYNRRTRQDEPALFVALTFERREVLDSSNIKPMNLIGVDRGENIPAVIALTDPEGCPLSRFKDSLGNPTHILRIGESYKEKQRTIQAKKEVEQRRAGGYSRKYASKAKNLADDMVRNTARDLLYYAVTQDAMLIFENLSRGFGRQGKRTFSAERQYTRMEDWLTAKLAYEGLPSKTYLSKTLAQYTSKTCSNCGFTITSADYDRVLEKLKKTATGWMTTINGKELKVEGQITYYNRYKRQNVVKDLSVELDRLSEESVNNDISSWTKGRSGEALSLLKKRFSHRPVQEKFVCLNCGFETHADEQAALNIARSWLFLRSQEYKKYQTNKTTGNTDKRAFVETWQSFYRKKLKEVWKPAV

SEQ ID NO: 38252 - protein, 979 aa, synthetic construct
  REGION 1..979: note = engineered CasX variant
QEIKRINKIRRRLVKDSNTKKAGKTGPMKTLLVRVMTPDLRERLENLRKKPENIPQPISNTSRANLNKLLTDYTEMKKAILHVYWEEFQKDPVGLMSRVAQPASKKIDQNKLKPEMDEKGNLTTAGFACSQCGQPLFVYKLEQVSEKGKAYTNYFGRCNVAEHEKLILLAQLKPEKDSDEAVTYSLGKFGQRALDFYSIHVTKESTHPVKPLAQIAGNRYASTPVGKALSDACMGTIASFLSKYQDIIIEHQKVVKGNQKRLESLRELAGKENLEYPSVTLPPQPHTKEGVDAYNEVIARVRMWVNLNLWQKLKLSRDDAKPLLRLKGFPSFPLVERQANEVDWWDMVCNVKKLINEKKEDGKVFWQNLAGYKRQEALRPYLSSEEDVRKKGKKFARYQLGDLLLHLEKKHGEDWGKVYDEAWERIDKKVEGLSKHIKLEEERRSEDAQSKAALTDWLRAKASFVIEGLKEADKDEFCRCELKLQKWYGDLRGKPFAIEAENSILDISGFSKQYNCAFIWQKDGVKKLNLYLIINYFKGGKLRFKKIKPEAFEANRFYTVINKKSGEIVPMEVNFNFDDPNLIILPLAFGKRQGREFIWNDLLSLETGSLKLANGRVIEKTLYNRRTRQDEPALFVALTFERREVLDSSNIKPMNLIGVDRGENIPAVIALTDPEGCPLSRFKDSLGNPTHILRIGESYKEKQRTIQAKKEVEQRRAGGYSRKYASKAKNLADDMVRNTARDLLYYAVTQDAMLIFENLSRGFGRQGKRTFSAERQYTRMEDWLTAKLAYEGLPSKTYLSKTLAQYTSKTCSNCGFTITSADYDRVLEKLKKTATGWMTTINGKELKVEGQITYYNRYKRQNVVKDLSVELDRLSEESVNNDISSWTKGRSGEALSLLKKRFSHRPVQEKFVCLNCGFETHADEQAALNIARSWLFLRSQEYKKYQTNKTTGNTDKRAFVETWQSFYRKKLKEVWKPAV

SEQ ID NO: 38253 - protein, 979 aa, synthetic construct
  REGION 1..979: note = engineered CasX variant
QEIKRINKIRRRLVKDSNTKKAGKTGPMKTLLVRVMTPDLRERLENLRKKPENIPQPISNTSRANLNKLLTDYTEMKKAILHVYWEEFQKDPVGLMSRVAQPASKKIDQNKLKPEMDEKGNLTTAGFACSQCGQPLFVYKLEQVSEKGKAYTNYFGRCNVAEHEKLILLAQLKPEKDSDEAVTYSLGKFGQRALDFYSIHVTKESTHPVKPLAQIAGNRYASAPVGKALSDACMGTIASFLSKYQDIIIEHQKVVKGNQKRLESLRELAGKENLEYPSVTLPPQPHTKEGVDAYNEVIARVRMWVNLNLWQKLKLSRDDAKPLLRLKGFPSFPLVERQANEVDWWDMVCNVKKLINEKKEDGKVFWQNLAGYKRQEALRPYLSSEEDVRKKGKKFARYQLGDLLLHLEKKHGEDWGKVYDEAWERIDKKVEGLSKHIKLEEERRSEDAQSKAALTDWLRAKASFVIEGLKEADKDEFCRCELKLQKWYGDLRGKPFAIEAENSILDISGFSKQYNCAFIWQKDGVKKLNLYLIINYFKGGKLRFKKIKPEAFEANRFYTVINKKSGEIVPMEVNFNFDDPNLIILPLAFGKRQGREFIWNDLLSLETGSLKLANGRVIEKTLYNRRTRQDEPALFVALTFERREVLDSSNIKPMNLIGVDRGENIPAVIALTDPEGCPLSRFKDSLGNPTHILRIGESYKEKQRTIQAKKEVEQRRAGGYSRKYASKAKNLADDMVRNTARDLLYYAVTQDAMLIFENLSRGFGRQGKRTFSAERQYTRMEDWLTAKLAYEGLPSKTYLSKTLAQYTSKTCSNCGFTITSADYDRVLEKLKKTATGWMTTINGKELKVEGQITYYNRYKRQNVVKDLSVELDRLSEESVNNDISSWTKGRSGEALSLLKKRFSHRPVQEKFVCLNCGFETHADEQAALNIARSWLFLRSQEYKKYQTNKTTGNTDKRAFVETWQSFYRKKLKEVWKPAV

SEQ ID NO: 38254 - protein, 979 aa, synthetic construct
  REGION 1..979: note = engineered CasX variant
QEIKRINKIRRRLVKDSNTKKAGKTGPMKTLLVRVMTPDLRERLENLRKKPENIPQPISNTSRANLNKLLTDYTEMKKAILHVYWEEFQKDPVGLMSRVAQPASKKIDQNKLKPEMDEKGNLTTAGFACSQCGQPLFVYKLEQVSEKGKAYTNYFGRCNVAEHEKLILLAQLKPEKDSDEAVTYSLGKFGQRALDFYSIHVTKESTHPVKPLAQIAGNRYASVPVGKALSDACMGTIASFLSKYQDIIIEHQKVVKGNQKRLESLRELAGKENLEYPSVTLPPQPHTKEGVDAYNEVIARVRMWVNLNLWQKLKLSRDDAKPLLRLKGFPSFPLVERQANEVDWWDMVCNVKKLINEKKEDGKVFWQNLAGYKRQEALRPYLSSEEDVRKKGKKFARYQLGDLLLHLEKKHGEDWGKVYDEAWERIDKKVEGLSKHIKLEEERRSEDAQSKAALTDWLRAKASFVIEGLKEADKDEFCRCELKLQKWYGDLRGKPFAIEAENSILDISGFSKQYNCAFIWQKDGVKKLNLYLIINYFKGGKLRFKKIKPEAFEANRFYTVINKKSGEIVPMEVNFNFDDPNLIILPLAFGKRQGREFIWNDLLSLETGSLKLANGRVIEKTLYNRRTRQDEPALFVALTFERREVLDSSNIKPMNLIGVDRGENIPAVIALTDPEGCPLSRFKDSLGNPTHILRIGESYKEKQRTIQAKKEVEQRRAGGYSRKYASKAKNLADDMVRNTARDLLYYAVTQDAMLIFENLSRGFGRQGKRTFSAERQYTRMEDWLTAKLAYEGLPSKTYLSKTLAQYTSKTCSNCGFTITSADYDRVLEKLKKTATGWMTTINGKELKVEGQITYYNRYKRQNVVKDLSVELDRLSEESVNNDISSWTKGRSGEALSLLKKRFSHRPVQEKFVCLNCGFETHADEQAALNIARSWLFLRSQEYKKYQTNKTTGNTDKRAFVETWQSFYRKKLKEVWKPAV

SEQ ID NO: 38255 - protein, 979 aa, synthetic construct
  REGION 1..979: note = engineered CasX variant
QEIKRINKIRRRLVKDSNTKKAGKTGPMKTLLVRVMTPDLRERLENLRKKPENIPQPISNTSRANLNKLLTDYTEMKKAILHVYWEEFQKDPVGLMSRVAQPASKKIDQNKLKPEMDEKGNLTTAGFACSQCGQPLFVYKLEQVSEKGKAYTNYFGRCNVAEHEKLIKLAQLKPEKDSDEAVTYSLGKFGQRALDFYSIHVTKESTHPVKPLAQIAGNRYASGPVGKALSDACMGTIASFLSKYQDIIIEHQKVVKGNQKRLESLRELAGKENLEYPSVTLPPQPHTKEGVDAYNEVIARVRMWVNLNLWQKLKLSRDDAKPLLRLKGFPSFPLVERQANEVDWWDMVCNVKKLINEKKEDGKVFWQNLAGYKRQEALRPYLSSEEDVRKKGKKFARYQLGDLLLHLEKKHGEDWGKVYDEAWERIDKKVEGLSKHIKLEEERRSEDAQSKAALTDWLRAKASFVIEGLKEADKDEFCRCELKLQKWYGDLRGKPFAIEAENSILDISGFSKQYNCAFIWQKDGVKKLNLYLIINYFKGGKLRFKKIKPEAFEANRFYTVINKKSGEIVPMEVNFNFDDPNLIILPLAFGKRQGREFIWNDLLSLETGSLKLANGRVIEKTLYNRRTRQDEPALFVALTFERREVLDSSNIKPMNLIGVDRGENIPAVIALTDPEGCPLSRFKDSLGNPTHILRIGESYKEKQRTIQAKKEVEQRRAGGYSRKYASKAKNLADDMVRNTARDLLYYAVTQDAMLIFENLSRGFGRQGKRTFSAERQYTRMEDWLTAKLAYEGLPSKTYLSKTLAQYTSKTCSNCGFTITSADYDRVLEKLKKTATGWMTTINGKELKVEGQITYYNRYKRQNVVKDLSVELDRLSEESVNNDISSWTKGRSGEALSLLKKRFSHRPVQEKFVCLNCGFETHADEQAALNIARSWLFLRSQEYKKYQTNKTTGNTDKRAFVETWQSFYRKKLKEVWKPAV

SEQ ID NO: 38256 - protein, 978 aa, synthetic construct
  REGION 1..978: note = engineered CasX variant
QEIKRINKIRRRLVKDSNTKKAGKTGPMKTLLVRVMTPDLRERLENLRKKPENIPQPISNTSRANLNKLLTDYTEMKKAILHVYWEEFQKDPVGLMSRVAQPASKKIDQNKLKPEMDEKGNLTTAGFACSQCGQPLFVYKLEQVSEKGKAYTNYFGRCNVAEHEKLILLAQLKPEKDSDEAVTYSLGKFGQRALDFYSIHVTKESTHPVKPLAQIAGNRYASPVGKALSDACMGTIASFLSKYQDIIIEHQKVVKGNQKRLESLRELAGKENLEYPSVTLPPQPHTKEGVDAYNEVIARVRMWVNLNLWQKLKLSRDDAKPLLRLKGFPSFPLVERQANEVDWWDMVCNVKKLINEKKEDGKVFWQNLAGYKRQEALRPYLSSEEDVRKKGKKFARYQLGDLLLHLEKKHGEDWGKVYDEAWERIDKKVEGLSKHIKLEEERRSEDAQSKAALTDWLRAKASFVIEGLKEADKDEFCRCELKLQKWYGDLRGKPFAIEAENSILDISGFSKQYNCAFIWQKDGVKKLNLYLIINYFKGGKLRFKKIKPEAFEANRFYTVINKKSGEIVPMEVNFNFDDPNLIILPLAFGKRQGREFIWNDLLSLETGSLKLANGRVIEKTLYNRRTRQDEPALFVALTFERREVLDSSNIKPMNLIGVDRGENIPAVIALTDPEGCPLSRFKDSLGNPTHILRIGESYKEKQRTIQAKKEVEQRRAGGYSRKYASKAKNLADDMVRNTARDLLYYAVTQDAMLIFENLSRGFGRQGKRTFSAERQYTRMEDWLTAKLAYEGLPSKTYLSKTLAQYTSKTCSNCGFTITSADYDRVLEKLKKTATGWMTTINGKELKVEGQITYYNRYKRQNVVKDLSVELDRLSEESVNNDISSWTKGRSGEALSLLKKRFSHRPVQEKFVCLNCGFETHADEQAALNIARSWLFLRSQEYKKYQTNKTTGNTDKRAFVETWQSFYRKKLKEVWKPAV

SEQ ID NO: 38257 - protein, 978 aa, synthetic construct
  REGION 1..978: note = engineered CasX variant
QEIKRINKIRRRLVKDSNTKKAGKTGPMKTLLVRVMTPDLRERLENLRKKPENIPQPISNTSRANLNKLLTDYTEMKKAILHVYWEEFQKDPVGLMSRVAQPASKKIDQNKLKPEMDEKGNLTTAGFACSQCGQPLFVYKLEQVSEKGKAYTNYFGRCNVAEHEKLILLAQLKPEKDSDEAVTYSLGKFGQRALDFYSIHVTKESTHPVKPLAQIAGNRYASYPVGKALSDACMGTIASFLSKYQDIIIEHQKVVKGNQKRLESLRELAGKENLEYPSVTLPPQPHTKEGVDAYNEVIARVRMWVNLNLWQKLKLSRDDAKPLLRLKGFPSFPLVERQANEVDWWDMVCNVKKLINEKKEDGKVFWQNLAGYKRQEALRPYLSSEEDRKKGKKFARYQLGDLLLHLEKKHGEDWGKVYDEAWERIDKKVEGLSKHIKLEEERRSEDAQSKAALTDWLRAKASFVIEGLKEADKDEFCRCELKLQKWYGDLRGKPFAIEAENSILDISGFSKQYNCAFIWQKDGVKKLNLYLIINYFKGGKLRFKKIKPEAFEANRFYTVINKKSGEIVPMEVNFNFDDPNLIILPLAFGKRQGREFIWNDLLSLETGSLKLANGRVIEKTLYNRRTRQDEPALFVALTFERREVLDSSNIKPMNLIGVDRGENIPAVIALTDPEGCPLSRFKDSLGNPTHILRIGESYKEKQRTIQAKKEVEQRRAGGYSRKYASKAKNLADDMVRNTARDLLYYAVTQDAMLIFENLSRGFGRQGKRTFSAERQYTRMEDWLTAKLAYEGLPSKTYLSKTLAQYTSKTCSNCGFTITSADYDRMLEKLKKTATGWMTTINGKELKVEGQITYYNRYKRQNVVKDLSVELDRLSEESVNNDISSWTKGRSGEALSLLKKRFSHRPVQEKFVCLNCGFETHADEQAALNIARSWLFLRSQEYKKYQTNKTTGNTDKRAFVETWQSFYRKKLKEVWKPAV

SEQ ID NO: 38258 - protein, 978 aa, synthetic construct
  REGION 1..978: note = engineered CasX variant
QEIKRINKIRRRLVKDSNTKKAGKTGPMKTLLVRVMTPDLRERLENLRKKPENIPQPISNTSRANLNKLLTDYTEMKKAILHVYWEEFQKDPVGLMSRVAQPASKKIDQNKLKPEMDEKGNLTTAGFACSQCGQPLFVYKLEQVSEKGKAYTNYFGRCNVAEHEKLILLAQLKPEKDSDEAVTYSLGKFGQRALDFYSIHVTKESTHPVKPLAQIAGNRYASHPVGKALSDACMGTIASFLSKYQDIIIEHQKVVKGNQKRLESLRELAGKENLEYPSVTLPPQPHTKEGVDAYNEVIARVRMWVNLNLWQKLKLSRDDAKPLLRLKGFPSFPLVERQANEVDWWDMVCNVKKLINEKKEDGKVFWQNLAGYKRQEALRPYLSSEEDRKKGKKFARYQLGDLLLHLEKKHGEDWGKVYDEAWERIDKKVEGLSKHIKLEEERRSEDAQSKAALTDWLRAKASFVIEGLKEADKDEFCRCELKLQKWYGDLRGKPFAIEAENSILDISGFSKQYNCAFIWQKDGVKKLNLYLIINYFKGGKLRFKKIKPEAFEANRFYTVINKKSGEIVPMEVNFNFDDPNLIILPLAFGKRQGREFIWNDLLSLETGSLKLANGRVIEKTLYNRRTRQDEPALFVALTFERREVLDSSNIKPMNLIGVDRGENIPAVIALTDPEGCPLSRFKDSLGNPTHILRIGESYKEKQRTIQAKKEVEQRRAGGYSRKYASKAKNLADDMVRNTARDLLYYAVTQDAMLIFENLSRGFGRQGKRTFSAERQYTRMEDWLTAKLAYEGLPSKTYLSKTLAQYTSKTCSNCGFTITSADYDRMLEKLKKTATGWMTTINGKELKVEGQITYYNRYKRQNVVKDLSVELDRLSEESVNNDISSWTKGRSGEALSLLKKRFSHRPVQEKFVCLNCGFETHADEQAALNIARSWLFLRSQEYKKYQTNKTTGNTDKRAFVETWQSFYRKKLKEVWKPAV

SEQ ID NO: 38259 - protein, 978 aa, synthetic construct
  REGION 1..978: note = engineered CasX variant
QEIKRINKIRRRLVKDSNTKKAGKTGPMKTLLVRVMTPDLRERLENLRKKPENIPQPISNTSRANLNKLLTDYTEMKKAILHVYWEEFQKDPVGLMSRVAQPASKKIDQNKLKPEMDEKGNLTTAGFACSQCGQPLFVYKLEQVSEKGKAYTNYFGRCNVAEHEKLILLAQLKPEKDSDEAVTYSLGKFGQRALDFYSIHVTKESTHPVKPLAQIAGNRYASSPVGKALSDACMGTIASFLSKYQDIIIEHQKVVKGNQKRLESLRELAGKENLEYPSVTLPPQPHTKEGVDAYNEVIARVRMWVNLNLWQKLKLSRDDAKPLLRLKGFPSFPLVERQANEVDWWDMVCNVKKLINEKKEDGKVFWQNLAGYKRQEALRPYLSSEEDRKKGKKFARYQLGDLLLHLEKKHGEDWGKVYDEAWERIDKKVEGLSKHIKLEEERRSEDAQSKAALTDWLRAKASFVIEGLKEADKDEFCRCELKLQKWYGDLRGKPFAIEAENSILDISGFSKQYNCAFIWQKDGVKKLNLYLIINYFKGGKLRFKKIKPEAFEANRFYTVINKKSGEIVPMEVNFNFDDPNLIILPLAFGKRQGREFIWNDLLSLETGSLKLANGRVIEKTLYNRRTRQDEPALFVALTFERREVLDSSNIKPMNLIGVDRGENIPAVIALTDPEGCPLSRFKDSLGNPTHILRIGESYKEKQRTIQAKKEVEQRRAGGYSRKYASKAKNLADDMVRNTARDLLYYAVTQDAMLIFENLSRGFGRQGKRTFSAERQYTRMEDWLTAKLAYEGLPSKTYLSKTLAQYTSKTCSNCGFTITSADYDRMLEKLKKTATGWMTTINGKELKVEGQITYYNRYKRQNVVKDLSVELDRLSEESVNNDISSWTKGRSGEALSLLKKRFSHRPVQEKFVCLNCGFETHADEQAALNIARSWLFLRSQEYKKYQTNKTTGNTDKRAFVETWQSFYRKKLKEVWKPAV

SEQ ID NO: 38260 - protein, 978 aa, synthetic construct
  REGION 1..978: note = engineered CasX variant
QEIKRINKIRRRLVKDSNTKKAGKTGPMKTLLVRVMTPDLRERLENLRKKPENIPQPISNTSRANLNKLLTDYTEMKKAILHVYWEEFQKDPVGLMSRVAQPASKKIDQNKLKPEMDEKGNLTTAGFACSQCGQPLFVYKLEQVSEKGKAYTNYFGRCNVAEHEKLILLAQLKPEKDSDEAVTYSLGKFGQRALDFYSIHVTKESTHPVKPLAQIAGNRYASTPVGKALSDACMGTIASFLSKYQDIIIEHQKVVKGNQKRLESLRELAGKENLEYPSVTLPPQPHTKEGVDAYNEVIARVRMWVNLNLWQKLKLSRDDAKPLLRLKGFPSFPLVERQANEVDWWDMVCNVKKLINEKKEDGKVFWQNLAGYKRQEALRPYLSSEEDRKKGKKFARYQLGDLLLHLEKKHGEDWGKVYDEAWERIDKKVEGLSKHIKLEEERRSEDAQSKAALTDWLRAKASFVIEGLKEADKDEFCRCELKLQKWYGDLRGKPFAIEAENSILDISGFSKQYNCAFIWQKDGVKKLNLYLIINYFKGGKLRFKKIKPEAFEANRFYTVINKKSGEIVPMEVNFNFDDPNLIILPLAFGKRQGREFIWNDLLSLETGSLKLANGRVIEKTLYNRRTRQDEPALFVALTFERREVLDSSNIKPMNLIGVDRGENIPAVIALTDPEGCPLSRFKDSLGNPTHILRIGESYKEKQRTIQAKKEVEQRRAGGYSRKYASKAKNLADDMVRNTARDLLYYAVTQDAMLIFENLSRGFGRQGKRTFSAERQYTRMEDWLTAKLAYEGLPSKTYLSKTLAQYTSKTCSNCGFTITSADYDRMLEKLKKTATGWMTTINGKELKVEGQITYYNRYKRQNVVKDLSVELDRLSEESVNNDISSWTKGRSGEALSLLKKRFSHRPVQEKFVCLNCGFETHADEQAALNIARSWLFLRSQEYKKYQTNKTTGNTDKRAFVETWQSFYRKKLKEVWKPAV

SEQ ID NO: 38261 - protein, 978 aa, synthetic construct
  REGION 1..978: note = engineered CasX variant
QEIKRINKIRRRLVKDSNTKKAGKTGPMKTLLVRVMTPDLRERLENLRKKPENIPQPISNTSRANLNKLLTDYTEMKKAILHVYWEEFQKDPVGLMSRVAQPASKKIDQNKLKPEMDEKGNLTTAGFACSQCGQPLFVYKLEQVSEKGKAYTNYFGRCNVAEHEKLILLAQLKPEKDSDEAVTYSLGKFGQRALDFYSIHVTKESTHPVKPLAQIAGNRYASAPVGKALSDACMGTIASFLSKYQDIIIEHQKVVKGNQKRLESLRELAGKENLEYPSVTLPPQPHTKEGVDAYNEVIARVRMWVNLNLWQKLKLSRDDAKPLLRLKGFPSFPLVERQANEVDWWDMVCNVKKLINEKKEDGKVFWQNLAGYKRQEALRPYLSSEEDRKKGKKFARYQLGDLLLHLEKKHGEDWGKVYDEAWERIDKKVEGLSKHIKLEEERRSEDAQSKAALTDWLRAKASFVIEGLKEADKDEFCRCELKLQKWYGDLRGKPFAIEAENSILDISGFSKQYNCAFIWQKDGVKKLNLYLIINYFKGGKLRFKKIKPEAFEANRFYTVINKKSGEIVPMEVNFNFDDPNLIILPLAFGKRQGREFIWNDLLSLETGSLKLANGRVIEKTLYNRRTRQDEPALFVALTFERREVLDSSNIKPMNLIGVDRGENIPAVIALTDPEGCPLSRFKDSLGNPTHILRIGESYKEKQRTIQAKKEVEQRRAGGYSRKYASKAKNLADDMVRNTARDLLYYAVTQDAMLIFENLSRGFGRQGKRTFSAERQYTRMEDWLTAKLAYEGLPSKTYLSKTLAQYTSKTCSNCGFTITSADYDRMLEKLKKTATGWMTTINGKELKVEGQITYYNRYKRQNVVKDLSVELDRLSEESVNNDISSWTKGRSGEALSLLKKRFSHRPVQEKFVCLNCGFETHADEQAALNIARSWLFLRSQEYKKYQTNKTTGNTDKRAFVETWQSFYRKKLKEVWKPAV

SEQ ID NO: 38262 - protein, 978 aa, synthetic construct
  REGION 1..978: note = engineered CasX variant
QEIKRINKIRRRLVKDSNTKKAGKTGPMKTLLVRVMTPDLRERLENLRKKPENIPQPISNTSRANLNKLLTDYTEMKKAILHVYWEEFQKDPVGLMSRVAQPASKKIDQNKLKPEMDEKGNLTTAGFACSQCGQPLFVYKLEQVSEKGKAYTNYFGRCNVAEHEKLILLAQLKPEKDSDEAVTYSLGKFGQRALDFYSIHVTKESTHPVKPLAQIAGNRYASVPVGKALSDACMGTIASFLSKYQDIIIEHQKVVKGNQKRLESLRELAGKENLEYPSVTLPPQPHTKEGVDAYNEVIARVRMWVNLNLWQKLKLSRDDAKPLLRLKGFPSFPLVERQANEVDWWDMVCNVKKLINEKKEDGKVFWQNLAGYKRQEALRPYLSSEEDRKKGKKFARYQLGDLLLHLEKKHGEDWGKVYDEAWERIDKKVEGLSKHIKLEEERRSEDAQSKAALTDWLRAKASFVIEGLKEADKDEFCRCELKLQKWYGDLRGKPFAIEAENSILDISGFSKQYNCAFIWQKDGVKKLNLYLIINYFKGGKLRFKKIKPEAFEANRFYTVINKKSGEIVPMEVNFNFDDPNLIILPLAFGKRQGREFIWNDLLSLETGSLKLANGRVIEKTLYNRRTRQDEPALFVALTFERREVLDSSNIKPMNLIGVDRGENIPAVIALTDPEGCPLSRFKDSLGNPTHILRIGESYKEKQRTIQAKKEVEQRRAGGYSRKYASKAKNLADDMVRNTARDLLYYAVTQDAMLIFENLSRGFGRQGKRTFSAERQYTRMEDWLTAKLAYEGLPSKTYLSKTLAQYTSKTCSNCGFTITSADYDRMLEKLKKTATGWMTTINGKELKVEGQITYYNRYKRQNVVKDLSVELDRLSEESVNNDISSWTKGRSGEALSLLKKRFSHRPVQEKFVCLNCGFETHADEQAALNIARSWLFLRSQEYKKYQTNKTTGNTDKRAFVETWQSFYRKKLKEVWKPAV

SEQ ID NO: 38263 - protein, 978 aa, synthetic construct
  REGION 1..978: note = engineered CasX variant
QEIKRINKIRRRLVKDSNTKKAGKTGPMKTLLVRVMTPDLRERLENLRKKPENIPQPISNTSRANLNKLLTDYTEMKKAILHVYWEEFQKDPVGLMSRVAQPASKKIDQNKLKPEMDEKGNLTTAGFACSQCGQPLFVYKLEQVSEKGKAYTNYFGRCNVAEHEKLIKLAQLKPEKDSDEAVTYSLGKFGQRALDFYSIHVTKESTHPVKPLAQIAGNRYASGPVGKALSDACMGTIASFLSKYQDIIIEHQKVVKGNQKRLESLRELAGKENLEYPSVTLPPQPHTKEGVDAYNEVIARVRMWVNLNLWQKLKLSRDDAKPLLRLKGFPSFPLVERQANEVDWWDMVCNVKKLINEKKEDGKVFWQNLAGYKRQEALRPYLSSEEDRKKGKKFARYQLGDLLLHLEKKHGEDWGKVYDEAWERIDKKVEGLSKHIKLEEERRSEDAQSKAALTDWLRAKASFVIEGLKEADKDEFCRCELKLQKWYGDLRGKPFAIEAENSILDISGFSKQYNCAFIWQKDGVKKLNLYLIINYFKGGKLRFKKIKPEAFEANRFYTVINKKSGEIVPMEVNFNFDDPNLIILPLAFGKRQGREFIWNDLLSLETGSLKLANGRVIEKTLYNRRTRQDEPALFVALTFERREVLDSSNIKPMNLIGVDRGENIPAVIALTDPEGCPLSRFKDSLGNPTHILRIGESYKEKQRTIQAKKEVEQRRAGGYSRKYASKAKNLADDMVRNTARDLLYYAVTQDAMLIFENLSRGFGRQGKRTFSAERQYTRMEDWLTAKLAYEGLPSKTYLSKTLAQYTSKTCSNCGFTITSADYDRMLEKLKKTATGWMTTINGKELKVEGQITYYNRYKRQNVVKDLSVELDRLSEESVNNDISSWTKGRSGEALSLLKKRFSHRPVQEKFVCLNCGFETHADEQAALNIARSWLFLRSQEYKKYQTNKTTGNTDKRAFVETWQSFYRKKLKEVWKPAV

SEQ ID NO: 38264 - protein, 977 aa, synthetic construct
  REGION 1..977: note = engineered CasX variant
QEIKRINKIRRRLVKDSNTKKAGKTGPMKTLLVRVMTPDLRERLENLRKKPENIPQPISNTSRANLNKLLTDYTEMKKAILHVYWEEFQKDPVGLMSRVAQPASKKIDQNKLKPEMDEKGNLTTAGFACSQCGQPLFVYKLEQVSEKGKAYTNYFGRCNVAEHEKLILLAQLKPEKDSDEAVTYSLGKFGQRALDFYSIHVTKESTHPVKPLAQIAGNRYASPVGKALSDACMGTIASFLSKYQDIIIEHQKVVKGNQKRLESLRELAGKENLEYPSVTLPPQPHTKEGVDAYNEVIARVRMWVNLNLWQKLKLSRDDAKPLLRLKGFPSFPLVERQANEVDWWDMVCNVKKLINEKKEDGKVFWQNLAGYKRQEALRPYLSSEEDRKKGKKFARYQLGDLLLHLEKKHGEDWGKVYDEAWERIDKKVEGLSKHIKLEEERRSEDAQSKAALTDWLRAKASFVIEGLKEADKDEFCRCELKLQKWYGDLRGKPFAIEAENSILDISGFSKQYNCAFIWQKDGVKKLNLYLIINYFKGGKLRFKKIKPEAFEANRFYTVINKKSGEIVPMEVNFNFDDPNLIILPLAFGKRQGREFIWNDLLSLETGSLKLANGRVIEKTLYNRRTRQDEPALFVALTFERREVLDSSNIKPMNLIGVDRGENIPAVIALTDPEGCPLSRFKDSLGNPTHILRIGESYKEKQRTIQAKKEVEQRRAGGYSRKYASKAKNLADDMVRNTARDLLYYAVTQDAMLIFENLSRGFGRQGKRTFSAERQYTRMEDWLTAKLAYEGLPSKTYLSKTLAQYTSKTCSNCGFTITSADYDRMLEKLKKTATGWMTTINGKELKVEGQITYYNRYKRQNVVKDLSVELDRLSEESVNNDISSWTKGRSGEALSLLKKRFSHRPVQEKFVCLNCGFETHADEQAALNIARSWLFLRSQEYKKYQTNKTTGNTDKRAFVETWQSFYRKKLKEVWKPAV

SEQ ID NO: 38265 - protein, 978 aa, synthetic construct
  REGION 1..978: note = engineered CasX variant
QEIKRINKIRRRLVKDSNTKKAGKTGPMKTLLVRVMTPDLRERLENLRKKPENIPQPISNTSRANLNKLLTDYTEMKKAILHVYWEEFQKDPVGLMSRVAQPASKKIDQNKLKPEMDEKGNLTTAGFACSQCGQPLFVYKLEQVSEKGKAYTNYFGRCNVAEHEKLILLAQLKPEKDSDEAVTYSLGKFGQRALDFYSIHVTKESTHPVKPLAQIAGNRYASYPVGKALSDACMGTIASFLSKYQDIIIEHQKVVKGNQKRLESLRELAGKENLEYPSVTLPPQPHTKEGVDAYNEVIARVRMWVNLNLWQKLKLSRDDAKPLLRLKGFPSFPLVERQANEVDWWDMVCNVKKLINEKKEDGKVFWQNLAGYKRQEALRPYLSSEEDRKKGKKFARYQLGDLLLHLEKKHGEDWGKVYDEAWERIDKKVEGLSKHIKLEEERRSEDAQSKAALTDWLRAKASFVIEGLKEADKDEFCRCELKLQKWYGDLRGKPFAIEAENSILDISGFSKQYNCAFIWQKDGVKKLNLYLIINYFKGGKLRFKKIKPEAFEANRFYTVINKKSGEIVPMEVNFNFDDPNLIILPLAFGKRQGREFIWNDLLSLETGSLKLANGRVIEKTLYNRRTRQDEPALFVALTFERREVLDSSNIKPMNLIGVDRGENIPAVIALTDPEGCPLSRFKDSLGNPTHILRIGESYKEKQRTIQAKKEVEQRRAGGYSRKYASKAKNLADDMVRNTARDLLYYAVTQDAMLIFENLSRGFGRQGKRTFSAERQYTRMEDWLTAKLAYEGLPSKTYLSKTLAQYTSKTCSNCGFTITSADYDRVLEKLKKTATGWMTTINGKELKVEGQITYYNRYKRQNVVKDLSVELDRLSEESVNNDISSWTKGRQGEALSLLKKRFSHRPVQEKFVCLNCGFETHADEQAALNIARSWLFLRSQEYKKYQTNKTTGNTDKRAFVETWQSFYRKKLKEVWKPAV

SEQ ID NO: 38266 - protein, 978 aa, synthetic construct
  REGION 1..978: note = engineered CasX variant
QEIKRINKIRRRLVKDSNTKKAGKTGPMKTLLVRVMTPDLRERLENLRKKPENIPQPISNTSRANLNKLLTDYTEMKKAILHVYWEEFQKDPVGLMSRVAQPASKKIDQNKLKPEMDEKGNLTTAGFACSQCGQPLFVYKLEQVSEKGKAYTNYFGRCNVAEHEKLILLAQLKPEKDSDEAVTYSLGKFGQRALDFYSIHVTKESTHPVKPLAQIAGNRYASHPVGKALSDACMGTIASFLSKYQDIIIEHQKVVKGNQKRLESLRELAGKENLEYPSVTLPPQPHTKEGVDAYNEVIARVRMWVNLNLWQKLKLSRDDAKPLLRLKGFPSFPLVERQANEVDWWDMVCNVKKLINEKKEDGKVFWQNLAGYKRQEALRPYLSSEEDRKKGKKFARYQLGDLLLHLEKKHGEDWGKVYDEAWERIDKKVEGLSKHIKLEEERRSEDAQSKAALTDWLRAKASFVIEGLKEADKDEFCRCELKLQKWYGDLRGKPFAIEAENSILDISGFSKQYNCAFIWQKDGVKKLNLYLIINYFKGGKLRFKKIKPEAFEANRFYTVINKKSGEIVPMEVNFNFDDPNLIILPLAFGKRQGREFIWNDLLSLETGSLKLANGRVIEKTLYNRRTRQDEPALFVALTFERREVLDSSNIKPMNLIGVDRGENIPAVIALTDPEGCPLSRFKDSLGNPTHILRIGESYKEKQRTIQAKKEVEQRRAGGYSRKYASKAKNLADDMVRNTARDLLYYAVTQDAMLIFENLSRGFGRQGKRTFSAERQYTRMEDWLTAKLAYEGLPSKTYLSKTLAQYTSKTCSNCGFTITSADYDRVLEKLKKTATGWMTTINGKELKVEGQITYYNRYKRQNVVKDLSVELDRLSEESVNNDISSWTKGRQGEALSLLKKRFSHRPVQEKFVCLNCGFETHADEQAALNIARSWLFLRSQEYKKYQTNKTTGNTDKRAFVETWQSFYRKKLKEVWKPAV

SEQ ID NO: 38267 - protein, 978 aa, synthetic construct
  REGION 1..978: note = engineered CasX variant
QEIKRINKIRRRLVKDSNTKKAGKTGPMKTLLVRVMTPDLRERLENLRKKPENIPQPISNTSRANLNKLLTDYTEMKKAILHVYWEEFQKDPVGLMSRVAQPASKKIDQNKLKPEMDEKGNLTTAGFACSQCGQPLFVYKLEQVSEKGKAYTNYFGRCNVAEHEKLILLAQLKPEKDSDEAVTYSLGKFGQRALDFYSIHVTKESTHPVKPLAQIAGNRYASSPVGKALSDACMGTIASFLSKYQDIIIEHQKVVKGNQKRLESLRELAGKENLEYPSVTLPPQPHTKEGVDAYNEVIARVRMWVNLNLWQKLKLSRDDAKPLLRLKGFPSFPLVERQANEVDWWDMVCNVKKLINEKKEDGKVFWQNLAGYKRQEALRPYLSSEEDRKKGKKFARYQLGDLLLHLEKKHGEDWGKVYDEAWERIDKKVEGLSKHIKLEEERRSEDAQSKAALTDWLRAKASFVIEGLKEADKDEFCRCELKLQKWYGDLRGKPFAIEAENSILDISGFSKQYNCAFIWQKDGVKKLNLYLIINYFKGGKLRFKKIKPEAFEANRFYTVINKKSGEIVPMEVNFNFDDPNLIILPLAFGKRQGREFIWNDLLSLETGSLKLANGRVIEKTLYNRRTRQDEPALFVALTFERREVLDSSNIKPMNLIGVDRGENIPAVIALTDPEGCPLSRFKDSLGNPTHILRIGESYKEKQRTIQAKKEVEQRRAGGYSRKYASKAKNLADDMVRNTARDLLYYAVTQDAMLIFENLSRGFGRQGKRTFSAERQYTRMEDWLTAKLAYEGLPSKTYLSKTLAQYTSKTCSNCGFTITSADYDRVLEKLKKTATGWMTTINGKELKVEGQITYYNRYKRQNVVKDLSVELDRLSEESVNNDISSWTKGRQGEALSLLKKRFSHRPVQEKFVCLNCGFETHADEQAALNIARSWLFLRSQEYKKYQTNKTTGNTDKRAFVETWQSFYRKKLKEVWKPAV

SEQ ID NO: 38268 - protein, 978 aa, synthetic construct
  REGION 1..978: note = engineered CasX variant
QEIKRINKIRRRLVKDSNTKKAGKTGPMKTLLVRVMTPDLRERLENLRKKPENIPQPISNTSRANLNKLLTDYTEMKKAILHVYWEEFQKDPVGLMSRVAQPASKKIDQNKLKPEMDEKGNLTTAGFACSQCGQPLFVYKLEQVSEKGKAYTNYFGRCNVAEHEKLILLAQLKPEKDSDEAVTYSLGKFGQRALDFYSIHVTKESTHPVKPLAQIAGNRYASTPVGKALSDACMGTIASFLSKYQDIIIEHQKVVKGNQKRLESLRELAGKENLEYPSVTLPPQPHTKEGVDAYNEVIARVRMWVNLNLWQKLKLSRDDAKPLLRLKGFPSFPLVERQANEVDWWDMVCNVKKLINEKKEDGKVFWQNLAGYKRQEALRPYLSSEEDRKKGKKFARYQLGDLLLHLEKKHGEDWGKVYDEAWERIDKKVEGLSKHIKLEEERRSEDAQSKAALTDWLRAKASFVIEGLKEADKDEFCRCELKLQKWYGDLRGKPFAIEAENSILDISGFSKQYNCAFIWQKDGVKKLNLYLIINYFKGGKLRFKKIKPEAFEANRFYTVINKKSGEIVPMEVNFNFDDPNLIILPLAFGKRQGREFIWNDLLSLETGSLKLANGRVIEKTLYNRRTRQDEPALFVALTFERREVLDSSNIKPMNLIGVDRGENIPAVIALTDPEGCPLSRFKDSLGNPTHILRIGESYKEKQRTIQAKKEVEQRRAGGYSRKYASKAKNLADDMVRNTARDLLYYAVTQDAMLIFENLSRGFGRQGKRTFSAERQYTRMEDWLTAKLAYEGLPSKTYLSKTLAQYTSKTCSNCGFTITSADYDRVLEKLKKTATGWMTTINGKELKVEGQITYYNRYKRQNVVKDLSVELDRLSEESVNNDISSWTKGRQGEALSLLKKRFSHRPVQEKFVCLNCGFETHADEQAALNIARSWLFLRSQEYKKYQTNKTTGNTDKRAFVETWQSFYRKKLKEVWKPAV

SEQ ID NO: 38269 - protein, 978 aa, synthetic construct
  REGION 1..978: note = engineered CasX variant
QEIKRINKIRRRLVKDSNTKKAGKTGPMKTLLVRVMTPDLRERLENLRKKPENIPQPISNTSRANLNKLLTDYTEMKKAILHVYWEEFQKDPVGLMSRVAQPASKKIDQNKLKPEMDEKGNLTTAGFACSQCGQPLFVYKLEQVSEKGKAYTNYFGRCNVAEHEKLILLAQLKPEKDSDEAVTYSLGKFGQRALDFYSIHVTKESTHPVKPLAQIAGNRYASAPVGKALSDACMGTIASFLSKYQDIIIEHQKVVKGNQKRLESLRELAGKENLEYPSVTLPPQPHTKEGVDAYNEVIARVRMWVNLNLWQKLKLSRDDAKPLLRLKGFPSFPLVERQANEVDWWDMVCNVKKLINEKKEDGKVFWQNLAGYKRQEALRPYLSSEEDRKKGKKFARYQLGDLLLHLEKKHGEDWGKVYDEAWERIDKKVEGLSKHIKLEEERRSEDAQSKAALTDWLRAKASFVIEGLKEADKDEFCRCELKLQKWYGDLRGKPFAIEAENSILDISGFSKQYNCAFIWQKDGVKKLNLYLIINYFKGGKLRFKKIKPEAFEANRFYTVINKKSGEIVPMEVNFNFDDPNLIILPLAFGKRQGREFIWNDLLSLETGSLKLANGRVIEKTLYNRRTRQDEPALFVALTFERREVLDSSNIKPMNLIGVDRGENIPAVIALTDPEGCPLSRFKDSLGNPTHILRIGESYKEKQRTIQAKKEVEQRRAGGYSRKYASKAKNLADDMVRNTARDLLYYAVTQDAMLIFENLSRGFGRQGKRTFSAERQYTRMEDWLTAKLAYEGLPSKTYLSKTLAQYTSKTCSNCGFTITSADYDRVLEKLKKTATGWMTTINGKELKVEGQITYYNRYKRQNVVKDLSVELDRLSEESVNNDISSWTKGRQGEALSLLKKRFSHRPVQEKFVCLNCGFETHADEQAALNIARSWLFLRSQEYKKYQTNKTTGNTDKRAFVETWQSFYRKKLKEVWKPAV

SEQ ID NO: 38270 - protein, 978 aa, synthetic construct
  REGION 1..978: note = engineered CasX variant
QEIKRINKIRRRLVKDSNTKKAGKTGPMKTLLVRVMTPDLRERLENLRKKPENIPQPISNTSRANLNKLLTDYTEMKKAILHVYWEEFQKDPVGLMSRVAQPASKKIDQNKLKPEMDEKGNLTTAGFACSQCGQPLFVYKLEQVSEKGKAYTNYFGRCNVAEHEKLILLAQLKPEKDSDEAVTYSLGKFGQRALDFYSIHVTKESTHPVKPLAQIAGNRYASVPVGKALSDACMGTIASFLSKYQDIIIEHQKVVKGNQKRLESLRELAGKENLEYPSVTLPPQPHTKEGVDAYNEVIARVRMWVNLNLWQKLKLSRDDAKPLLRLKGFPSFPLVERQANEVDWWDMVCNVKKLINEKKEDGKVFWQNLAGYKRQEALRPYLSSEEDRKKGKKFARYQLGDLLLHLEKKHGEDWGKVYDEAWERIDKKVEGLSKHIKLEEERRSEDAQSKAALTDWLRAKASFVIEGLKEADKDEFCRCELKLQKWYGDLRGKPFAIEAENSILDISGFSKQYNCAFIWQKDGVKKLNLYLIINYFKGGKLRFKKIKPEAFEANRFYTVINKKSGEIVPMEVNFNFDDPNLIILPLAFGKRQGREFIWNDLLSLETGSLKLANGRVIEKTLYNRRTRQDEPALFVALTFERREVLDSSNIKPMNLIGVDRGENIPAVIALTDPEGCPLSRFKDSLGNPTHILRIGESYKEKQRTIQAKKEVEQRRAGGYSRKYASKAKNLADDMVRNTARDLLYYAVTQDAMLIFENLSRGFGRQGKRTFSAERQYTRMEDWLTAKLAYEGLPSKTYLSKTLAQYTSKTCSNCGFTITSADYDRVLEKLKKTATGWMTTINGKELKVEGQITYYNRYKRQNVVKDLSVELDRLSEESVNNDISSWTKGRQGEALSLLKKRFSHRPVQEKFVCLNCGFETHADEQAALNIARSWLFLRSQEYKKYQTNKTTGNTDKRAFVETWQSFYRKKLKEVWKPAV

SEQ ID NO: 38271 - protein, 978 aa, synthetic construct
  REGION 1..978: note = engineered CasX variant
QEIKRINKIRRRLVKDSNTKKAGKTGPMKTLLVRVMTPDLRERLENLRKKPENIPQPISNTSRANLNKLLTDYTEMKKAILHVYWEEFQKDPVGLMSRVAQPASKKIDQNKLKPEMDEKGNLTTAGFACSQCGQPLFVYKLEQVSEKGKAYTNYFGRCNVAEHEKLIKLAQLKPEKDSDEAVTYSLGKFGQRALDFYSIHVTKESTHPVKPLAQIAGNRYASGPVGKALSDACMGTIASFLSKYQDIIIEHQKVVKGNQKRLESLRELAGKENLEYPSVTLPPQPHTKEGVDAYNEVIARVRMWVNLNLWQKLKLSRDDAKPLLRLKGFPSFPLVERQANEVDWWDMVCNVKKLINEKKEDGKVFWQNLAGYKRQEALRPYLSSEEDRKKGKKFARYQLGDLLLHLEKKHGEDWGKVYDEAWERIDKKVEGLSKHIKLEEERRSEDAQSKAALTDWLRAKASFVIEGLKEADKDEFCRCELKLQKWYGDLRGKPFAIEAENSILDISGFSKQYNCAFIWQKDGVKKLNLYLIINYFKGGKLRFKKIKPEAFEANRFYTVINKKSGEIVPMEVNFNFDDPNLIILPLAFGKRQGREFIWNDLLSLETGSLKLANGRVIEKTLYNRRTRQDEPALFVALTFERREVLDSSNIKPMNLIGVDRGENIPAVIALTDPEGCPLSRFKDSLGNPTHILRIGESYKEKQRTIQAKKEVEQRRAGGYSRKYASKAKNLADDMVRNTARDLLYYAVTQDAMLIFENLSRGFGRQGKRTFSAERQYTRMEDWLTAKLAYEGLPSKTYLSKTLAQYTSKTCSNCGFTITSADYDRVLEKLKKTATGWMTTINGKELKVEGQITYYNRYKRQNVVKDLSVELDRLSEESVNNDISSWTKGRQGEALSLLKKRFSHRPVQEKFVCLNCGFETHADEQAALNIARSWLFLRSQEYKKYQTNKTTGNTDKRAFVETWQSFYRKKLKEVWKPAV

SEQ ID NO: 38272 - protein, 977 aa, synthetic construct
  REGION 1..977: note = engineered CasX variant
QEIKRINKIRRRLVKDSNTKKAGKTGPMKTLLVRVMTPDLRERLENLRKKPENIPQPISNTSRANLNKLLTDYTEMKKAILHVYWEEFQKDPVGLMSRVAQPASKKIDQNKLKPEMDEKGNLTTAGFACSQCGQPLFVYKLEQVSEKGKAYTNYFGRCNVAEHEKLILLAQLKPEKDSDEAVTYSLGKFGQRALDFYSIHVTKESTHPVKPLAQIAGNRYASPVGKALSDACMGTIASFLSKYQDIIIEHQKVVKGNQKRLESLRELAGKENLEYPSVTLPPQPHTKEGVDAYNEVIARVRMWVNLNLWQKLKLSRDDAKPLLRLKGFPSFPLVERQANEVDWWDMVCNVKKLINEKKEDGKVFWQNLAGYKRQEALRPYLSSEEDRKKGKKFARYQLGDLLLHLEKKHGEDWGKVYDEAWERIDKKVEGLSKHIKLEEERRSEDAQSKAALTDWLRAKASFVIEGLKEADKDEFCRCELKLQKWYGDLRGKPFAIEAENSILDISGFSKQYNCAFIWQKDGVKKLNLYLIINYFKGGKLRFKKIKPEAFEANRFYTVINKKSGEIVPMEVNFNFDDPNLIILPLAFGKRQGREFIWNDLLSLETGSLKLANGRVIEKTLYNRRTRQDEPALFVALTFERREVLDSSNIKPMNLIGVDRGENIPAVIALTDPEGCPLSRFKDSLGNPTHILRIGESYKEKQRTIQAKKEVEQRRAGGYSRKYASKAKNLADDMVRNTARDLLYYAVTQDAMLIFENLSRGFGRQGKRTFSAERQYTRMEDWLTAKLAYEGLPSKTYLSKTLAQYTSKTCSNCGFTITSADYDRVLEKLKKTATGWMTTINGKELKVEGQITYYNRYKRQNVVKDLSVELDRLSEESVNNDISSWTKGRQGEALSLLKKRFSHRPVQEKFVCLNCGFETHADEQAALNIARSWLFLRSQEYKKYQTNKTTGNTDKRAFVETWQSFYRKKLKEVWKPAV

SEQ ID NO: 38273 - protein, 978 aa, synthetic construct
  REGION 1..978: note = engineered CasX variant
QEIKRINKIRRRLVKDSNTKKAGKTGPMKTLLVRVMTPDLRERLENLRKKPENIPQPISNTSRANLNKLLTDYTEMKKAILHVYWEEFQKDPVGLMSRVAQPASKKIDQNKLKPEMDEKGNLTTAGFACSQCGQPLFVYKLEQVSEKGKAYTNYFGRCNVAEHEKLILLAQLKPEKDSDEAVTYSLGKFGQRALDFYSIHVTKESTHPVKPLAQIAGNRYASYPVGKALSDACMGTIASFLSKYQDIIIEHQKVVKGNQKRLESLRELAGKENLEYPSVTLPPQPHTKEGVDAYNEVIARVRMWVNLNLWQKLKLSRDDAKPLLRLKGFPSFPLVERQANEVDWWDMVCNVKKLINEKKEDGKVFWQNLAGYKRQEALRPYLSSEEDRKKGKKFARYQLGDLLLHLEKKHGEDWGKVYDEAWERIDKKVEGLSKHIKLEEERRSEDAQSKAALTDWLRAKASFVIEGLKEADKDEFCRCELKLQKWYGDLRGKPFAIEAENSILDISGFSKQYNCAFIWQKDGVKKLNLYLIINYFKGGKLRFKKIKPEAFEANRFYTVINKKSGEIVPMEVNFNFDDPNLIILPLAFGKRQGREFIWNDLLSLETGSLKLANGRVIEKTLYNRRTRQDEPALFVALTFERREVLDSSNIKPMNLIGVDRGENIPAVIALTDPEGCPLSRFKDSLGNPTHILRIGESYKEKQRTIQAKKEVEQRRAGGYSRKYASKAKNLADDMVRNTARDLLYYAVTQDAMLIFENLSRGFGRQGKRTFSAERQYTRMEDWLTAKLAYEGLPSKTYLSKTLAQYTSKTCSNCGFTITSADYDRVLEKLKKTATGWMTTINGKELKVEGQITYYNRYKRQNVVKDLSVELDRLSEESVNNDISSWTKGRSGEALSLLKKRFSHRPVQEKFVCLNCEFETHADEQAALNIARSWLFLRSQEYKKYQTNKTTGNTDKRAFVETWQSFYRKKLKEVWKPAV

SEQ ID NO: 38274 - protein, 978 aa, synthetic construct
  REGION 1..978: note = engineered CasX variant
QEIKRINKIRRRLVKDSNTKKAGKTGPMKTLLVRVMTPDLRERLENLRKKPENIPQPISNTSRANLNKLLTDYTEMKKAILHVYWEEFQKDPVGLMSRVAQPASKKIDQNKLKPEMDEKGNLTTAGFACSQCGQPLFVYKLEQVSEKGKAYTNYFGRCNVAEHEKLILLAQLKPEKDSDEAVTYSLGKFGQRALDFYSIHVTKESTHPVKPLAQIAGNRYASHPVGKALSDACMGTIASFLSKYQDIIIEHQKVVKGNQKRLESLRELAGKENLEYPSVTLPPQPHTKEGVDAYNEVIARVRMWVNLNLWQKLKLSRDDAKPLLRLKGFPSFPLVERQANEVDWWDMVCNVKKLINEKKEDGKVFWQNLAGYKRQEALRPYLSSEEDRKKGKKFARYQLGDLLLHLEKKHGEDWGKVYDEAWERIDKKVEGLSKHIKLEEERRSEDAQSKAALTDWLRAKASFVIEGLKEADKDEFCRCELKLQKWYGDLRGKPFAIEAENSILDISGFSKQYNCAFIWQKDGVKKLNLYLIINYFKGGKLRFKKIKPEAFEANRFYTVINKKSGEIVPMEVNFNFDDPNLIILPLAFGKRQGREFIWNDLLSLETGSLKLANGRVIEKTLYNRRTRQDEPALFVALTFERREVLDSSNIKPMNLIGVDRGENIPAVIALTDPEGCPLSRFKDSLGNPTHILRIGESYKEKQRTIQAKKEVEQRRAGGYSRKYASKAKNLADDMVRNTARDLLYYAVTQDAMLIFENLSRGFGRQGKRTFSAERQYTRMEDWLTAKLAYEGLPSKTYLSKTLAQYTSKTCSNCGFTITSADYDRVLEKLKKTATGWMTTINGKELKVEGQITYYNRYKRQNVVKDLSVELDRLSEESVNNDISSWTKGRSGEALSLLKKRFSHRPVQEKFVCLNCEFETHADEQAALNIARSWLFLRSQEYKKYQTNKTTGNTDKRAFVETWQSFYRKKLKEVWKPAV

SEQ ID NO: 38275 - protein, 978 aa, synthetic construct
  REGION 1..978: note = engineered CasX variant
QEIKRINKIRRRLVKDSNTKKAGKTGPMKTLLVRVMTPDLRERLENLRKKPENIPQPISNTSRANLNKLLTDYTEMKKAILHVYWEEFQKDPVGLMSRVAQPASKKIDQNKLKPEMDEKGNLTTAGFACSQCGQPLFVYKLEQVSEKGKAYTNYFGRCNVAEHEKLILLAQLKPEKDSDEAVTYSLGKFGQRALDFYSIHVTKESTHPVKPLAQIAGNRYASSPVGKALSDACMGTIASFLSKYQDIIIEHQKVVKGNQKRLESLRELAGKENLEYPSVTLPPQPHTKEGVDAYNEVIARVRMWVNLNLWQKLKLSRDDAKPLLRLKGFPSFPLVERQANEVDWWDMVCNVKKLINEKKEDGKVFWQNLAGYKRQEALRPYLSSEEDRKKGKKFARYQLGDLLLHLEKKHGEDWGKVYDEAWERIDKKVEGLSKHIKLEEERRSEDAQSKAALTDWLRAKASFVIEGLKEADKDEFCRCELKLQKWYGDLRGKPFAIEAENSILDISGFSKQYNCAFIWQKDGVKKLNLYLIINYFKGGKLRFKKIKPEAFEANRFYTVINKKSGEIVPMEVNFNFDDPNLIILPLAFGKRQGREFIWNDLLSLETGSLKLANGRVIEKTLYNRRTRQDEPALFVALTFERREVLDSSNIKPMNLIGVDRGENIPAVIALTDPEGCPLSRFKDSLGNPTHILRIGESYKEKQRTIQAKKEVEQRRAGGYSRKYASKAKNLADDMVRNTARDLLYYAVTQDAMLIFENLSRGFGRQGKRTFSAERQYTRMEDWLTAKLAYEGLPSKTYLSKTLAQYTSKTCSNCGFTITSADYDRVLEKLKKTATGWMTTINGKELKVEGQITYYNRYKRQNVVKDLSVELDRLSEESVNNDISSWTKGRSGEALSLLKKRFSHRPVQEKFVCLNCEFETHADEQAALNIARSWLFLRSQEYKKYQTNKTTGNTDKRAFVETWQSFYRKKLKEVWKPAV

SEQ ID NO: 38276 - protein, 978 aa, synthetic construct
  REGION 1..978: note = engineered CasX variant
QEIKRINKIRRRLVKDSNTKKAGKTGPMKTLLVRVMTPDLRERLENLRKKPENIPQPISNTSRANLNKLLTDYTEMKKAILHVYWEEFQKDPVGLMSRVAQPASKKIDQNKLKPEMDEKGNLTTAGFACSQCGQPLFVYKLEQVSEKGKAYTNYFGRCNVAEHEKLILLAQLKPEKDSDEAVTYSLGKFGQRALDFYSIHVTKESTHPVKPLAQIAGNRYASTPVGKALSDACMGTIASFLSKYQDIIIEHQKVVKGNQKRLESLRELAGKENLEYPSVTLPPQPHTKEGVDAYNEVIARVRMWVNLNLWQKLKLSRDDAKPLLRLKGFPSFPLVERQANEVDWWDMVCNVKKLINEKKEDGKVFWQNLAGYKRQEALRPYLSSEEDRKKGKKFARYQLGDLLLHLEKKHGEDWGKVYDEAWERIDKKVEGLSKHIKLEEERRSEDAQSKAALTDWLRAKASFVIEGLKEADKDEFCRCELKLQKWYGDLRGKPFAIEAENSILDISGFSKQYNCAFIWQKDGVKKLNLYLIINYFKGGKLRFKKIKPEAFEANRFYTVINKKSGEIVPMEVNFNFDDPNLIILPLAFGKRQGREFIWNDLLSLETGSLKLANGRVIEKTLYNRRTRQDEPALFVALTFERREVLDSSNIKPMNLIGVDRGENIPAVIALTDPEGCPLSRFKDSLGNPTHILRIGESYKEKQRTIQAKKEVEQRRAGGYSRKYASKAKNLADDMVRNTARDLLYYAVTQDAMLIFENLSRGFGRQGKRTFSAERQYTRMEDWLTAKLAYEGLPSKTYLSKTLAQYTSKTCSNCGFTITSADYDRVLEKLKKTATGWMTTINGKELKVEGQITYYNRYKRQNVVKDLSVELDRLSEESVNNDISSWTKGRSGEALSLLKKRFSHRPVQEKFVCLNCEFETHADEQAALNIARSWLFLRSQEYKKYQTNKTTGNTDKRAFVETWQSFYRKKLKEVWKPAV

SEQ ID NO: 38277 - protein, 978 aa, synthetic construct
  REGION 1..978: note = engineered CasX variant
QEIKRINKIRRRLVKDSNTKKAGKTGPMKTLLVRVMTPDLRERLENLRKKPENIPQPISNTSRANLNKLLTDYTEMKKAILHVYWEEFQKDPVGLMSRVAQPASKKIDQNKLKPEMDEKGNLTTAGFACSQCGQPLFVYKLEQVSEKGKAYTNYFGRCNVAEHEKLILLAQLKPEKDSDEAVTYSLGKFGQRALDFYSIHVTKESTHPVKPLAQIAGNRYASAPVGKALSDACMGTIASFLSKYQDIIIEHQKVVKGNQKRLESLRELAGKENLEYPSVTLPPQPHTKEGVDAYNEVIARVRMWVNLNLWQKLKLSRDDAKPLLRLKGFPSFPLVERQANEVDWWDMVCNVKKLINEKKEDGKVFWQNLAGYKRQEALRPYLSSEEDRKKGKKFARYQLGDLLLHLEKKHGEDWGKVYDEAWERIDKKVEGLSKHIKLEEERRSEDAQSKAALTDWLRAKASFVIEGLKEADKDEFCRCELKLQKWYGDLRGKPFAIEAENSILDISGFSKQYNCAFIWQKDGVKKLNLYLIINYFKGGKLRFKKIKPEAFEANRFYTVINKKSGEIVPMEVNFNFDDPNLIILPLAFGKRQGREFIWNDLLSLETGSLKLANGRVIEKTLYNRRTRQDEPALFVALTFERREVLDSSNIKPMNLIGVDRGENIPAVIALTDPEGCPLSRFKDSLGNPTHILRIGESYKEKQRTIQAKKEVEQRRAGGYSRKYASKAKNLADDMVRNTARDLLYYAVTQDAMLIFENLSRGFGRQGKRTFSAERQYTRMEDWLTAKLAYEGLPSKTYLSKTLAQYTSKTCSNCGFTITSADYDRVLEKLKKTATGWMTTINGKELKVEGQITYYNRYKRQNVVKDLSVELDRLSEESVNNDISSWTKGRSGEALSLLKKRFSHRPVQEKFVCLNCEFETHADEQAALNIARSWLFLRSQEYKKYQTNKTTGNTDKRAFVETWQSFYRKKLKEVWKPAV

SEQ ID NO: 38278 - protein, 978 aa, synthetic construct
  REGION 1..978: note = engineered CasX variant
QEIKRINKIRRRLVKDSNTKKAGKTGPMKTLLVRVMTPDLRERLENLRKKPENIPQPISNTSRANLNKLLTDYTEMKKAILHVYWEEFQKDPVGLMSRVAQPASKKIDQNKLKPEMDEKGNLTTAGFACSQCGQPLFVYKLEQVSEKGKAYTNYFGRCNVAEHEKLILLAQLKPEKDSDEAVTYSLGKFGQRALDFYSIHVTKESTHPVKPLAQIAGNRYASVPVGKALSDACMGTIASFLSKYQDIIIEHQKVVKGNQKRLESLRELAGKENLEYPSVTLPPQPHTKEGVDAYNEVIARVRMWVNLNLWQKLKLSRDDAKPLLRLKGFPSFPLVERQANEVDWWDMVCNVKKLINEKKEDGKVFWQNLAGYKRQEALRPYLSSEEDRKKGKKFARYQLGDLLLHLEKKHGEDWGKVYDEAWERIDKKVEGLSKHIKLEEERRSEDAQSKAALTDWLRAKASFVIEGLKEADKDEFCRCELKLQKWYGDLRGKPFAIEAENSILDISGFSKQYNCAFIWQKDGVKKLNLYLIINYFKGGKLRFKKIKPEAFEANRFYTVINKKSGEIVPMEVNFNFDDPNLIILPLAFGKRQGREFIWNDLLSLETGSLKLANGRVIEKTLYNRRTRQDEPALFVALTFERREVLDSSNIKPMNLIGVDRGENIPAVIALTDPEGCPLSRFKDSLGNPTHILRIGESYKEKQRTIQAKKEVEQRRAGGYSRKYASKAKNLADDMVRNTARDLLYYAVTQDAMLIFENLSRGFGRQGKRTFSAERQYTRMEDWLTAKLAYEGLPSKTYLSKTLAQYTSKTCSNCGFTITSADYDRVLEKLKKTATGWMTTINGKELKVEGQITYYNRYKRQNVVKDLSVELDRLSEESVNNDISSWTKGRSGEALSLLKKRFSHRPVQEKFVCLNCEFETHADEQAALNIARSWLFLRSQEYKKYQTNKTTGNTDKRAFVETWQSFYRKKLKEVWKPAV

SEQ ID NO: 38279 - protein, 978 aa, synthetic construct
  REGION 1..978: note = engineered CasX variant
QEIKRINKIRRRLVKDSNTKKAGKTGPMKTLLVRVMTPDLRERLENLRKKPENIPQPISNTSRANLNKLLTDYTEMKKAILHVYWEEFQKDPVGLMSRVAQPASKKIDQNKLKPEMDEKGNLTTAGFACSQCGQPLFVYKLEQVSEKGKAYTNYFGRCNVAEHEKLIKLAQLKPEKDSDEAVTYSLGKFGQRALDFYSIHVTKESTHPVKPLAQIAGNRYASGPVGKALSDACMGTIASFLSKYQDIIIEHQKVVKGNQKRLESLRELAGKENLEYPSVTLPPQPHTKEGVDAYNEVIARVRMWVNLNLWQKLKLSRDDAKPLLRLKGFPSFPLVERQANEVDWWDMVCNVKKLINEKKEDGKVFWQNLAGYKRQEALRPYLSSEEDRKKGKKFARYQLGDLLLHLEKKHGEDWGKVYDEAWERIDKKVEGLSKHIKLEEERRSEDAQSKAALTDWLRAKASFVIEGLKEADKDEFCRCELKLQKWYGDLRGKPFAIEAENSILDISGFSKQYNCAFIWQKDGVKKLNLYLIINYFKGGKLRFKKIKPEAFEANRFYTVINKKSGEIVPMEVNFNFDDPNLIILPLAFGKRQGREFIWNDLLSLETGSLKLANGRVIEKTLYNRRTRQDEPALFVALTFERREVLDSSNIKPMNLIGVDRGENIPAVIALTDPEGCPLSRFKDSLGNPTHILRIGESYKEKQRTIQAKKEVEQRRAGGYSRKYASKAKNLADDMVRNTARDLLYYAVTQDAMLIFENLSRGFGRQGKRTFSAERQYTRMEDWLTAKLAYEGLPSKTYLSKTLAQYTSKTCSNCGFTITSADYDRVLEKLKKTATGWMTTINGKELKVEGQITYYNRYKRQNVVKDLSVELDRLSEESVNNDISSWTKGRSGEALSLLKKRFSHRPVQEKFVCLNCEFETHADEQAALNIARSWLFLRSQEYKKYQTNKTTGNTDKRAFVETWQSFYRKKLKEVWKPAV

SEQ ID NO: 38280 - protein, 977 aa, synthetic construct
  REGION 1..977: note = engineered CasX variant
QEIKRINKIRRRLVKDSNTKKAGKTGPMKTLLVRVMTPDLRERLENLRKKPENIPQPISNTSRANLNKLLTDYTEMKKAILHVYWEEFQKDPVGLMSRVAQPASKKIDQNKLKPEMDEKGNLTTAGFACSQCGQPLFVYKLEQVSEKGKAYTNYFGRCNVAEHEKLILLAQLKPEKDSDEAVTYSLGKFGQRALDFYSIHVTKESTHPVKPLAQIAGNRYASPVGKALSDACMGTIASFLSKYQDIIIEHQKVVKGNQKRLESLRELAGKENLEYPSVTLPPQPHTKEGVDAYNEVIARVRMWVNLNLWQKLKLSRDDAKPLLRLKGFPSFPLVERQANEVDWWDMVCNVKKLINEKKEDGKVFWQNLAGYKRQEALRPYLSSEEDRKKGKKFARYQLGDLLLHLEKKHGEDWGKVYDEAWERIDKKVEGLSKHIKLEEERRSEDAQSKAALTDWLRAKASFVIEGLKEADKDEFCRCELKLQKWYGDLRGKPFAIEAENSILDISGFSKQYNCAFIWQKDGVKKLNLYLIINYFKGGKLRFKKIKPEAFEANRFYTVINKKSGEIVPMEVNFNFDDPNLIILPLAFGKRQGREFIWNDLLSLETGSLKLANGRVIEKTLYNRRTRQDEPALFVALTFERREVLDSSNIKPMNLIGVDRGENIPAVIALTDPEGCPLSRFKDSLGNPTHILRIGESYKEKQRTIQAKKEVEQRRAGGYSRKYASKAKNLADDMVRNTARDLLYYAVTQDAMLIFENLSRGFGRQGKRTFSAERQYTRMEDWLTAKLAYEGLPSKTYLSKTLAQYTSKTCSNCGFTITSADYDRVLEKLKKTATGWMTTINGKELKVEGQITYYNRYKRQNVVKDLSVELDRLSEESVNNDISSWTKGRSGEALSLLKKRFSHRPVQEKFVCLNCEFETHADEQAALNIARSWLFLRSQEYKKYQTNKTTGNTDKRAFVETWQSFYRKKLKEVWKPAV

SEQ ID NO: 38281 - protein, 979 aa, synthetic construct
  REGION 1..979: note = engineered CasX variant
QEIKRINKIRRRLVKDSNTKKAGKTGPMKTLLVRVMTPDLRERLENLRKKPENIPQPISNTSRANLNKLLTDYTEMKKAILHVYWEEFQKDPVGLMSRVAQPASKKIDQNKLKPEMDEKGNLTTAGFACSQCGQPLFVYKLEQVSEKGKAYTNYFGRCNVAEHEKLILLAQLKPEKDSDEAVTYSLGKFGQRALDFYSIHVTKESTHPVKPLAQIAGNRYASYPVGKALSDACMGTIASFLSKYQDIIIEHQKVVKGNQKRLESLRELAGKENLEYPSVTLPPQPHTKEGVDAYNEVIARVRMWVNLNLWQKLKLSRDDAKPLLRLKGFPSFPLVERQANEVDWWDMVCNVKKLINEKKEDGKVFWQNLAGYKRQEALRPYLSSEEDRKKGKKFARYQLGDLLLHLEKKHGEDWGKVYDEAWERIDKKVEGLSKHIKLEEERRSEDAQSKAALTDWLRAKASFVIEGLKEADKDEFCRCELKLQKWYGDLRGKPFAIEAENSILDISGFSKQYNCAFIWQKDGVKKLNLYLIINYFKGGKLRFKKIKPEAFEANRFYTVINKKSGEIVPMEVNFNFDDPNLIILPLAFGKRQGREFIWNDLLSLETGSLKLANGRVIEKTLYNRRTRQDEPALFVALTFERREVLDSSNIKPMNLIGVDRGENIPAVIALTDPEGCPLSRFKDSLGNPTHILRIGESYKEKQRTIQAKKEVEQRRAGGYSRKYASKAKNLADDMVRNTARDLLYYAVTQDAMLIFENLSRGFGRQGKRTFSAERQYTRMEDWLTAKLAYEGLPSKTYLSKTLAQYTSKTCSNCGFTITSADYDRVLEKLKKTATGWMTTINGKELKVEGQITYYNRYKRQNVVKDLSVELDRLSEESVNNDISSWTKGRSGEALSLLKKRFSHRPVQEKFVCLNCGFETHADEQAALNIARSWLFLRSQEYKKYQTNKTSTGNTDKRAFVETWQSFYRKKLKEVWKPAV

SEQ ID NO: 38282 - protein, 979 aa, synthetic construct
  REGION 1..979: note = engineered CasX variant
QEIKRINKIRRRLVKDSNTKKAGKTGPMKTLLVRVMTPDLRERLENLRKKPENIPQPISNTSRANLNKLLTDYTEMKKAILHVYWEEFQKDPVGLMSRVAQPASKKIDQNKLKPEMDEKGNLTTAGFACSQCGQPLFVYKLEQVSEKGKAYTNYFGRCNVAEHEKLILLAQLKPEKDSDEAVTYSLGKFGQRALDFYSIHVTKESTHPVKPLAQIAGNRYASHPVGKALSDACMGTIASFLSKYQDIIIEHQKVVKGNQKRLESLRELAGKENLEYPSVTLPPQPHTKEGVDAYNEVIARVRMWVNLNLWQKLKLSRDDAKPLLRLKGFPSFPLVERQANEVDWWDMVCNVKKLINEKKEDGKVFWQNLAGYKRQEALRPYLSSEEDRKKGKKFARYQLGDLLLHLEKKHGEDWGKVYDEAWERIDKKVEGLSKHIKLEEERRSEDAQSKAALTDWLRAKASFVIEGLKEADKDEFCRCELKLQKWYGDLRGKPFAIEAENSILDISGFSKQYNCAFIWQKDGVKKLNLYLIINYFKGGKLRFKKIKPEAFEANRFYTVINKKSGEIVPMEVNFNFDDPNLIILPLAFGKRQGREFIWNDLLSLETGSLKLANGRVIEKTLYNRRTRQDEPALFVALTFERREVLDSSNIKPMNLIGVDRGENIPAVIALTDPEGCPLSRFKDSLGNPTHILRIGESYKEKQRTIQAKKEVEQRRAGGYSRKYASKAKNLADDMVRNTARDLLYYAVTQDAMLIFENLSRGFGRQGKRTFSAERQYTRMEDWLTAKLAYEGLPSKTYLSKTLAQYTSKTCSNCGFTITSADYDRVLEKLKKTATGWMTTINGKELKVEGQITYYNRYKRQNVVKDLSVELDRLSEESVNNDISSWTKGRSGEALSLLKKRFSHRPVQEKFVCLNCGFETHADEQAALNIARSWLFLRSQEYKKYQTNKTSTGNTDKRAFVETWQSFYRKKLKEVWKPAV

SEQ ID NO: 38283 - protein, 979 aa, synthetic construct
  REGION 1..979: note = engineered CasX variant
QEIKRINKIRRRLVKDSNTKKAGKTGPMKTLLVRVMTPDLRERLENLRKKPENIPQPISNTSRANLNKLLTDYTEMKKAILHVYWEEFQKDPVGLMSRVAQPASKKIDQNKLKPEMDEKGNLTTAGFACSQCGQPLFVYKLEQVSEKGKAYTNYFGRCNVAEHEKLILLAQLKPEKDSDEAVTYSLGKFGQRALDFYSIHVTKESTHPVKPLAQIAGNRYASSPVGKALSDACMGTIASFLSKYQDIIIEHQKVVKGNQKRLESLRELAGKENLEYPSVTLPPQPHTKEGVDAYNEVIARVRMWVNLNLWQKLKLSRDDAKPLLRLKGFPSFPLVERQANEVDWWDMVCNVKKLINEKKEDGKVFWQNLAGYKRQEALRPYLSSEEDRKKGKKFARYQLGDLLLHLEKKHGEDWGKVYDEAWERIDKKVEGLSKHIKLEEERRSEDAQSKAALTDWLRAKASFVIEGLKEADKDEFCRCELKLQKWYGDLRGKPFAIEAENSILDISGFSKQYNCAFIWQKDGVKKLNLYLIINYFKGGKLRFKKIKPEAFEANRFYTVINKKSGEIVPMEVNFNFDDPNLIILPLAFGKRQGREFIWNDLLSLETGSLKLANGRVIEKTLYNRRTRQDEPALFVALTFERREVLDSSNIKPMNLIGVDRGENIPAVIALTDPEGCPLSRFKDSLGNPTHILRIGESYKEKQRTIQAKKEVEQRRAGGYSRKYASKAKNLADDMVRNTARDLLYYAVTQDAMLIFENLSRGFGRQGKRTFSAERQYTRMEDWLTAKLAYEGLPSKTYLSKTLAQYTSKTCSNCGFTITSADYDRVLEKLKKTATGWMTTINGKELKVEGQITYYNRYKRQNVVKDLSVELDRLSEESVNNDISSWTKGRSGEALSLLKKRFSHRPVQEKFVCLNCGFETHADEQAALNIARSWLFLRSQEYKKYQTNKTSTGNTDKRAFVETWQSFYRKKLKEVWKPAV

SEQ ID NO: 38284 - protein, 979 aa, synthetic construct
  REGION 1..979: note = engineered CasX variant
QEIKRINKIRRRLVKDSNTKKAGKTGPMKTLLVRVMTPDLRERLENLRKKPENIPQPISNTSRANLNKLLTDYTEMKKAILHVYWEEFQKDPVGLMSRVAQPASKKIDQNKLKPEMDEKGNLTTAGFACSQCGQPLFVYKLEQVSEKGKAYTNYFGRCNVAEHEKLILLAQLKPEKDSDEAVTYSLGKFGQRALDFYSIHVTKESTHPVKPLAQIAGNRYASTPVGKALSDACMGTIASFLSKYQDIIIEHQKVVKGNQKRLESLRELAGKENLEYPSVTLPPQPHTKEGVDAYNEVIARVRMWVNLNLWQKLKLSRDDAKPLLRLKGFPSFPLVERQANEVDWWDMVCNVKKLINEKKEDGKVFWQNLAGYKRQEALRPYLSSEEDRKKGKKFARYQLGDLLLHLEKKHGEDWGKVYDEAWERIDKKVEGLSKHIKLEEERRSEDAQSKAALTDWLRAKASFVIEGLKEADKDEFCRCELKLQKWYGDLRGKPFAIEAENSILDISGFSKQYNCAFIWQKDGVKKLNLYLIINYFKGGKLRFKKIKPEAFEANRFYTVINKKSGEIVPMEVNFNFDDPNLIILPLAFGKRQGREFIWNDLLSLETGSLKLANGRVIEKTLYNRRTRQDEPALFVALTFERREVLDSSNIKPMNLIGVDRGENIPAVIALTDPEGCPLSRFKDSLGNPTHILRIGESYKEKQRTIQAKKEVEQRRAGGYSRKYASKAKNLADDMVRNTARDLLYYAVTQDAMLIFENLSRGFGRQGKRTFSAERQYTRMEDWLTAKLAYEGLPSKTYLSKTLAQYTSKTCSNCGFTITSADYDRVLEKLKKTATGWMTTINGKELKVEGQITYYNRYKRQNVVKDLSVELDRLSEESVNNDISSWTKGRSGEALSLLKKRFSHRPVQEKFVCLNCGFETHADEQAALNIARSWLFLRSQEYKKYQTNKTSTGNTDKRAFVETWQSFYRKKLKEVWKPAV

SEQ ID NO: 38285 - protein, 979 aa, synthetic construct
  REGION 1..979: note = engineered CasX variant
QEIKRINKIRRRLVKDSNTKKAGKTGPMKTLLVRVMTPDLRERLENLRKKPENIPQPISNTSRANLNKLLTDYTEMKKAILHVYWEEFQKDPVGLMSRVAQPASKKIDQNKLKPEMDEKGNLTTAGFACSQCGQPLFVYKLEQVSEKGKAYTNYFGRCNVAEHEKLILLAQLKPEKDSDEAVTYSLGKFGQRALDFYSIHVTKESTHPVKPLAQIAGNRYASAPVGKALSDACMGTIASFLSKYQDIIIEHQKVVKGNQKRLESLRELAGKENLEYPSVTLPPQPHTKEGVDAYNEVIARVRMWVNLNLWQKLKLSRDDAKPLLRLKGFPSFPLVERQANEVDWWDMVCNVKKLINEKKEDGKVFWQNLAGYKRQEALRPYLSSEEDRKKGKKFARYQLGDLLLHLEKKHGEDWGKVYDEAWERIDKKVEGLSKHIKLEEERRSEDAQSKAALTDWLRAKASFVIEGLKEADKDEFCRCELKLQKWYGDLRGKPFAIEAENSILDISGFSKQYNCAFIWQKDGVKKLNLYLIINYFKGGKLRFKKIKPEAFEANRFYTVINKKSGEIVPMEVNFNFDDPNLIILPLAFGKRQGREFIWNDLLSLETGSLKLANGRVIEKTLYNRRTRQDEPALFVALTFERREVLDSSNIKPMNLIGVDRGENIPAVIALTDPEGCPLSRFKDSLGNPTHILRIGESYKEKQRTIQAKKEVEQRRAGGYSRKYASKAKNLADDMVRNTARDLLYYAVTQDAMLIFENLSRGFGRQGKRTFSAERQYTRMEDWLTAKLAYEGLPSKTYLSKTLAQYTSKTCSNCGFTITSADYDRVLEKLKKTATGWMTTINGKELKVEGQITYYNRYKRQNVVKDLSVELDRLSEESVNNDISSWTKGRSGEALSLLKKRFSHRPVQEKFVCLNCGFETHADEQAALNIARSWLFLRSQEYKKYQTNKTSTGNTDKRAFVETWQSFYRKKLKEVWKPAV

SEQ ID NO: 38286 - protein, 979 aa, synthetic construct
  REGION 1..979: note = engineered CasX variant
QEIKRINKIRRRLVKDSNTKKAGKTGPMKTLLVRVMTPDLRERLENLRKKPENIPQPISNTSRANLNKLLTDYTEMKKAILHVYWEEFQKDPVGLMSRVAQPASKKIDQNKLKPEMDEKGNLTTAGFACSQCGQPLFVYKLEQVSEKGKAYTNYFGRCNVAEHEKLILLAQLKPEKDSDEAVTYSLGKFGQRALDFYSIHVTKESTHPVKPLAQIAGNRYASVPVGKALSDACMGTIASFLSKYQDIIIEHQKVVKGNQKRLESLRELAGKENLEYPSVTLPPQPHTKEGVDAYNEVIARVRMWVNLNLWQKLKLSRDDAKPLLRLKGFPSFPLVERQANEVDWWDMVCNVKKLINEKKEDGKVFWQNLAGYKRQEALRPYLSSEEDRKKGKKFARYQLGDLLLHLEKKHGEDWGKVYDEAWERIDKKVEGLSKHIKLEEERRSEDAQSKAALTDWLRAKASFVIEGLKEADKDEFCRCELKLQKWYGDLRGKPFAIEAENSILDISGFSKQYNCAFIWQKDGVKKLNLYLIINYFKGGKLRFKKIKPEAFEANRFYTVINKKSGEIVPMEVNFNFDDPNLIILPLAFGKRQGREFIWNDLLSLETGSLKLANGRVIEKTLYNRRTRQDEPALFVALTFERREVLDSSNIKPMNLIGVDRGENIPAVIALTDPEGCPLSRFKDSLGNPTHILRIGESYKEKQRTIQAKKEVEQRRAGGYSRKYASKAKNLADDMVRNTARDLLYYAVTQDAMLIFENLSRGFGRQGKRTFSAERQYTRMEDWLTAKLAYEGLPSKTYLSKTLAQYTSKTCSNCGFTITSADYDRVLEKLKKTATGWMTTINGKELKVEGQITYYNRYKRQNVVKDLSVELDRLSEESVNNDISSWTKGRSGEALSLLKKRFSHRPVQEKFVCLNCGFETHADEQAALNIARSWLFLRSQEYKKYQTNKTSTGNTDKRAFVETWQSFYRKKLKEVWKPAV

SEQ ID NO: 38287 - protein, 979 aa, synthetic construct
  REGION 1..979: note = engineered CasX variant
QEIKRINKIRRRLVKDSNTKKAGKTGPMKTLLVRVMTPDLRERLENLRKKPENIPQPISNTSRANLNKLLTDYTEMKKAILHVYWEEFQKDPVGLMSRVAQPASKKIDQNKLKPEMDEKGNLTTAGFACSQCGQPLFVYKLEQVSEKGKAYTNYFGRCNVAEHEKLIKLAQLKPEKDSDEAVTYSLGKFGQRALDFYSIHVTKESTHPVKPLAQIAGNRYASGPVGKALSDACMGTIASFLSKYQDIIIEHQKVVKGNQKRLESLRELAGKENLEYPSVTLPPQPHTKEGVDAYNEVIARVRMWVNLNLWQKLKLSRDDAKPLLRLKGFPSFPLVERQANEVDWWDMVCNVKKLINEKKEDGKVFWQNLAGYKRQEALRPYLSSEEDRKKGKKFARYQLGDLLLHLEKKHGEDWGKVYDEAWERIDKKVEGLSKHIKLEEERRSEDAQSKAALTDWLRAKASFVIEGLKEADKDEFCRCELKLQKWYGDLRGKPFAIEAENSILDISGFSKQYNCAFIWQKDGVKKLNLYLIINYFKGGKLRFKKIKPEAFEANRFYTVINKKSGEIVPMEVNFNFDDPNLIILPLAFGKRQGREFIWNDLLSLETGSLKLANGRVIEKTLYNRRTRQDEPALFVALTFERREVLDSSNIKPMNLIGVDRGENIPAVIALTDPEGCPLSRFKDSLGNPTHILRIGESYKEKQRTIQAKKEVEQRRAGGYSRKYASKAKNLADDMVRNTARDLLYYAVTQDAMLIFENLSRGFGRQGKRTFSAERQYTRMEDWLTAKLAYEGLPSKTYLSKTLAQYTSKTCSNCGFTITSADYDRVLEKLKKTATGWMTTINGKELKVEGQITYYNRYKRQNVVKDLSVELDRLSEESVNNDISSWTKGRSGEALSLLKKRFSHRPVQEKFVCLNCGFETHADEQAALNIARSWLFLRSQEYKKYQTNKTSTGNTDKRAFVETWQSFYRKKLKEVWKPAV

SEQ ID NO: 38288 - protein, 978 aa, synthetic construct
  REGION 1..978: note = engineered CasX variant
QEIKRINKIRRRLVKDSNTKKAGKTGPMKTLLVRVMTPDLRERLENLRKKPENIPQPISNTSRANLNKLLTDYTEMKKAILHVYWEEFQKDPVGLMSRVAQPASKKIDQNKLKPEMDEKGNLTTAGFACSQCGQPLFVYKLEQVSEKGKAYTNYFGRCNVAEHEKLILLAQLKPEKDSDEAVTYSLGKFGQRALDFYSIHVTKESTHPVKPLAQIAGNRYASPVGKALSDACMGTIASFLSKYQDIIIEHQKVVKGNQKRLESLRELAGKENLEYPSVTLPPQPHTKEGVDAYNEVIARVRMWVNLNLWQKLKLSRDDAKPLLRLKGFPSFPLVERQANEVDWWDMVCNVKKLINEKKEDGKVFWQNLAGYKRQEALRPYLSSEEDRKKGKKFARYQLGDLLLHLEKKHGEDWGKVYDEAWERIDKKVEGLSKHIKLEEERRSEDAQSKAALTDWLRAKASFVIEGLKEADKDEFCRCELKLQKWYGDLRGKPFAIEAENSILDISGFSKQYNCAFIWQKDGVKKLNLYLIINYFKGGKLRFKKIKPEAFEANRFYTVINKKSGEIVPMEVNFNFDDPNLIILPLAFGKRQGREFIWNDLLSLETGSLKLANGRVIEKTLYNRRTRQDEPALFVALTFERREVLDSSNIKPMNLIGVDRGENIPAVIALTDPEGCPLSRFKDSLGNPTHILRIGESYKEKQRTIQAKKEVEQRRAGGYSRKYASKAKNLADDMVRNTARDLLYYAVTQDAMLIFENLSRGFGRQGKRTFSAERQYTRMEDWLTAKLAYEGLPSKTYLSKTLAQYTSKTCSNCGFTITSADYDRVLEKLKKTATGWMTTINGKELKVEGQITYYNRYKRQNVVKDLSVELDRLSEESVNNDISSWTKGRSGEALSLLKKRFSHRPVQEKFVCLNCGFETHADEQAALNIARSWLFLRSQEYKKYQTNKTSTGNTDKRAFVETWQSFYRKKLKEVWKPAV

SEQ ID NO: 38289 - protein, 979 aa, synthetic construct
  REGION 1..979: note = engineered CasX variant
QEIKRINKIRRRLVKDSNTKKAGKTGPMKTLLVRVMTPDLRERLENLRKKPENIPQPISNTSRANLNKLLTDYTEMKKAILHVYWEEFQKDPVGLMSRVAQPASKKIDQNKLKPEMDEKGNLTTAGFACSQCGQPLFVYKLEQVSEKGKAYTNYFGRCNVAEHEKLILLAQLKPEKDSDEAVTYSLGKFGQRALDFYSIHVTKESTHPVKPLAQIAGNRYASYPVGKALSDACMGTIASFLSKYQDIIIEHQKVVKGNQKRLESLRELAGKENLEYPSVTLPPQPHTKEGVDAYNEVIARVRMWVNLNLWQKLKLSRDDAKPLLRLKGFPSFPLVERQANEVDWWDMVCNVKKLINEKKEDGKVFWQNLAGYKRQEALRPYLSSEEDRKKGKKFARYQLGDLLLHLEKKHGEDWGKVYDEAWERIDKKVEGLSKHIKLEEERRSEDAQSKAALTDWLRAKASFVIEGLKEADKDEFCRCELKLQKWYGDLRGKPFAIEAENSILDISGFSKQYNCAFIWQKDGVKKLNLYLIINYFKGGKLRFKKIKPEAFEANRFYTVINKKSGEIVPMEVNFNFDDPNLIILPLAFGKRQGREFIWNDLLSLETGSLKLANGRVIEKTLYNRRTRQDEPALFVALTFERREVLDSSNIKPMNLIGVDRGENIPAVIALTDPEGCPLSRFKDSLGNPTHILRIGESYKEKQRTIQAKKEVEQRRAGGYSRKYASKAKNLADDMVRNTARDLLYYAVTQDAMLIFENLSRGFGRQGKRTFSAERQYTRMEDWLTAKLAYEGLPSKTYLSKTLAQYTSKTCSNCGFTITSADYDRVLEKLKKTATGWMTTINGKELKVEGQITYYNRYKRQNVVKDLSVELDRLSEESVNNDISSWTKGRSGEALSLLKKRFSHRPVQEKFVCLNCGFETHADEQAALNIARSWLFLRSQEYKKYQTNKTTGKNTDKRAFVETWQSFYRKKLKEVWKPAV

SEQ ID NO: 38290 - protein, 979 aa, synthetic construct
  REGION 1..979: note = engineered CasX variant
QEIKRINKIRRRLVKDSNTKKAGKTGPMKTLLVRVMTPDLRERLENLRKKPENIPQPISNTSRANLNKLLTDYTEMKKAILHVYWEEFQKDPVGLMSRVAQPASKKIDQNKLKPEMDEKGNLTTAGFACSQCGQPLFVYKLEQVSEKGKAYTNYFGRCNVAEHEKLILLAQLKPEKDSDEAVTYSLGKFGQRALDFYSIHVTKESTHPVKPLAQIAGNRYASHPVGKALSDACMGTIASFLSKYQDIIIEHQKVVKGNQKRLESLRELAGKENLEYPSVTLPPQPHTKEGVDAYNEVIARVRMWVNLNLWQKLKLSRDDAKPLLRLKGFPSFPLVERQANEVDWWDMVCNVKKLINEKKEDGKVFWQNLAGYKRQEALRPYLSSEEDRKKGKKFARYQLGDLLLHLEKKHGEDWGKVYDEAWERIDKKVEGLSKHIKLEEERRSEDAQSKAALTDWLRAKASFVIEGLKEADKDEFCRCELKLQKWYGDLRGKPFAIEAENSILDISGFSKQYNCAFIWQKDGVKKLNLYLIINYFKGGKLRFKKIKPEAFEANRFYTVINKKSGEIVPMEVNFNFDDPNLIILPLAFGKRQGREFIWNDLLSLETGSLKLANGRVIEKTLYNRRTRQDEPALFVALTFERREVLDSSNIKPMNLIGVDRGENIPAVIALTDPEGCPLSRFKDSLGNPTHILRIGESYKEKQRTIQAKKEVEQRRAGGYSRKYASKAKNLADDMVRNTARDLLYYAVTQDAMLIFENLSRGFGRQGKRTFSAERQYTRMEDWLTAKLAYEGLPSKTYLSKTLAQYTSKTCSNCGFTITSADYDRVLEKLKKTATGWMTTINGKELKVEGQITYYNRYKRQNVVKDLSVELDRLSEESVNNDISSWTKGRSGEALSLLKKRFSHRPVQEKFVCLNCGFETHADEQAALNIARSWLFLRSQEYKKYQTNKTTGKNTDKRAFVETWQSFYRKKLKEVWKPAV

SEQ ID NO: 38291 - protein, 979 aa, synthetic construct
  REGION 1..979: note = engineered CasX variant
QEIKRINKIRRRLVKDSNTKKAGKTGPMKTLLVRVMTPDLRERLENLRKKPENIPQPISNTSRANLNKLLTDYTEMKKAILHVYWEEFQKDPVGLMSRVAQPASKKIDQNKLKPEMDEKGNLTTAGFACSQCGQPLFVYKLEQVSEKGKAYTNYFGRCNVAEHEKLILLAQLKPEKDSDEAVTYSLGKFGQRALDFYSIHVTKESTHPVKPLAQIAGNRYASSPVGKALSDACMGTIASFLSKYQDIIIEHQKVVKGNQKRLESLRELAGKENLEYPSVTLPPQPHTKEGVDAYNEVIARVRMWVNLNLWQKLKLSRDDAKPLLRLKGFPSFPLVERQANEVDWWDMVCNVKKLINEKKEDGKVFWQNLAGYKRQEALRPYLSSEEDRKKGKKFARYQLGDLLLHLEKKHGEDWGKVYDEAWERIDKKVEGLSKHIKLEEERRSEDAQSKAALTDWLRAKASFVIEGLKEADKDEFCRCELKLQKWYGDLRGKPFAIEAENSILDISGFSKQYNCAFIWQKDGVKKLNLYLIINYFKGGKLRFKKIKPEAFEANRFYTVINKKSGEIVPMEVNFNFDDPNLIILPLAFGKRQGREFIWNDLLSLETGSLKLANGRVIEKTLYNRRTRQDEPALFVALTFERREVLDSSNIKPMNLIGVDRGENIPAVIALTDPEGCPLSRFKDSLGNPTHILRIGESYKEKQRTIQAKKEVEQRRAGGYSRKYASKAKNLADDMVRNTARDLLYYAVTQDAMLIFENLSRGFGRQGKRTFSAERQYTRMEDWLTAKLAYEGLPSKTYLSKTLAQYTSKTCSNCGFTITSADYDRVLEKLKKTATGWMTTINGKELKVEGQITYYNRYKRQNVVKDLSVELDRLSEESVNNDISSWTKGRSGEALSLLKKRFSHRPVQEKFVCLNCGFETHADEQAALNIARSWLFLRSQEYKKYQTNKTTGKNTDKRAFVETWQSFYRKKLKEVWKPAV

SEQ ID NO: 38292 - protein, 979 aa, synthetic construct
  REGION 1..979: note = engineered CasX variant
QEIKRINKIRRRLVKDSNTKKAGKTGPMKTLLVRVMTPDLRERLENLRKKPENIPQPISNTSRANLNKLLTDYTEMKKAILHVYWEEFQKDPVGLMSRVAQPASKKIDQNKLKPEMDEKGNLTTAGFACSQCGQPLFVYKLEQVSEKGKAYTNYFGRCNVAEHEKLILLAQLKPEKDSDEAVTYSLGKFGQRALDFYSIHVTKESTHPVKPLAQIAGNRYASTPVGKALSDACMGTIASFLSKYQDIIIEHQKVVKGNQKRLESLRELAGKENLEYPSVTLPPQPHTKEGVDAYNEVIARVRMWVNLNLWQKLKLSRDDAKPLLRLKGFPSFPLVERQANEVDWWDMVCNVKKLINEKKEDGKVFWQNLAGYKRQEALRPYLSSEEDRKKGKKFARYQLGDLLLHLEKKHGEDWGKVYDEAWERIDKKVEGLSKHIKLEEERRSEDAQSKAALTDWLRAKASFVIEGLKEADKDEFCRCELKLQKWYGDLRGKPFAIEAENSILDISGFSKQYNCAFIWQKDGVKKLNLYLIINYFKGGKLRFKKIKPEAFEANRFYTVINKKSGEIVPMEVNFNFDDPNLIILPLAFGKRQGREFIWNDLLSLETGSLKLANGRVIEKTLYNRRTRQDEPALFVALTFERREVLDSSNIKPMNLIGVDRGENIPAVIALTDPEGCPLSRFKDSLGNPTHILRIGESYKEKQRTIQAKKEVEQRRAGGYSRKYASKAKNLADDMVRNTARDLLYYAVTQDAMLIFENLSRGFGRQGKRTFSAERQYTRMEDWLTAKLAYEGLPSKTYLSKTLAQYTSKTCSNCGFTITSADYDRVLEKLKKTATGWMTTINGKELKVEGQITYYNRYKRQNVVKDLSVELDRLSEESVNNDISSWTKGRSGEALSLLKKRFSHRPVQEKFVCLNCGFETHADEQAALNIARSWLFLRSQEYKKYQTNKTTGKNTDKRAFVETWQSFYRKKLKEVWKPAV

SEQ ID NO: 38293 - protein, 979 aa, synthetic construct
  REGION 1..979: note = engineered CasX variant
QEIKRINKIRRRLVKDSNTKKAGKTGPMKTLLVRVMTPDLRERLENLRKKPENIPQPISNTSRANLNKLLTDYTEMKKAILHVYWEEFQKDPVGLMSRVAQPASKKIDQNKLKPEMDEKGNLTTAGFACSQCGQPLFVYKLEQVSEKGKAYTNYFGRCNVAEHEKLILLAQLKPEKDSDEAVTYSLGKFGQRALDFYSIHVTKESTHPVKPLAQIAGNRYASAPVGKALSDACMGTIASFLSKYQDIIIEHQKVVKGNQKRLESLRELAGKENLEYPSVTLPPQPHTKEGVDAYNEVIARVRMWVNLNLWQKLKLSRDDAKPLLRLKGFPSFPLVERQANEVDWWDMVCNVKKLINEKKEDGKVFWQNLAGYKRQEALRPYLSSEEDRKKGKKFARYQLGDLLLHLEKKHGEDWGKVYDEAWERIDKKVEGLSKHIKLEEERRSEDAQSKAALTDWLRAKASFVIEGLKEADKDEFCRCELKLQKWYGDLRGKPFAIEAENSILDISGFSKQYNCAFIWQKDGVKKLNLYLIINYFKGGKLRFKKIKPEAFEANRFYTVINKKSGEIVPMEVNFNFDDPNLIILPLAFGKRQGREFIWNDLLSLETGSLKLANGRVIEKTLYNRRTRQDEPALFVALTFERREVLDSSNIKPMNLIGVDRGENIPAVIALTDPEGCPLSRFKDSLGNPTHILRIGESYKEKQRTIQAKKEVEQRRAGGYSRKYASKAKNLADDMVRNTARDLLYYAVTQDAMLIFENLSRGFGRQGKRTFSAERQYTRMEDWLTAKLAYEGLPSKTYLSKTLAQYTSKTCSNCGFTITSADYDRVLEKLKKTATGWMTTINGKELKVEGQITYYNRYKRQNVVKDLSVELDRLSEESVNNDISSWTKGRSGEALSLLKKRFSHRPVQEKFVCLNCGFETHADEQAALNIARSWLFLRSQEYKKYQTNKTTGKNTDKRAFVETWQSFYRKKLKEVWKPAV

SEQ ID NO: 38294 - protein, 979 aa, synthetic construct
  REGION 1..979: note = engineered CasX variant
QEIKRINKIRRRLVKDSNTKKAGKTGPMKTLLVRVMTPDLRERLENLRKKPENIPQPISNTSRANLNKLLTDYTEMKKAILHVYWEEFQKDPVGLMSRVAQPASKKIDQNKLKPEMDEKGNLTTAGFACSQCGQPLFVYKLEQVSEKGKAYTNYFGRCNVAEHEKLILLAQLKPEKDSDEAVTYSLGKFGQRALDFYSIHVTKESTHPVKPLAQIAGNRYASVPVGKALSDACMGTIASFLSKYQDIIIEHQKVVKGNQKRLESLRELAGKENLEYPSVTLPPQPHTKEGVDAYNEVIARVRMWVNLNLWQKLKLSRDDAKPLLRLKGFPSFPLVERQANEVDWWDMVCNVKKLINEKKEDGKVFWQNLAGYKRQEALRPYLSSEEDRKKGKKFARYQLGDLLLHLEKKHGEDWGKVYDEAWERIDKKVEGLSKHIKLEEERRSEDAQSKAALTDWLRAKASFVIEGLKEADKDEFCRCELKLQKWYGDLRGKPFAIEAENSILDISGFSKQYNCAFIWQKDGVKKLNLYLIINYFKGGKLRFKKIKPEAFEANRFYTVINKKSGEIVPMEVNFNFDDPNLIILPLAFGKRQGREFIWNDLLSLETGSLKLANGRVIEKTLYNRRTRQDEPALFVALTFERREVLDSSNIKPMNLIGVDRGENIPAVIALTDPEGCPLSRFKDSLGNPTHILRIGESYKEKQRTIQAKKEVEQRRAGGYSRKYASKAKNLADDMVRNTARDLLYYAVTQDAMLIFENLSRGFGRQGKRTFSAERQYTRMEDWLTAKLAYEGLPSKTYLSKTLAQYTSKTCSNCGFTITSADYDRVLEKLKKTATGWMTTINGKELKVEGQITYYNRYKRQNVVKDLSVELDRLSEESVNNDISSWTKGRSGEALSLLKKRFSHRPVQEKFVCLNCGFETHADEQAALNIARSWLFLRSQEYKKYQTNKTTGKNTDKRAFVETWQSFYRKKLKEVWKPAV

SEQ ID NO: 38295 - protein, 979 aa, synthetic construct
  REGION 1..979: note = engineered CasX variant
QEIKRINKIRRRLVKDSNTKKAGKTGPMKTLLVRVMTPDLRERLENLRKKPENIPQPISNTSRANLNKLLTDYTEMKKAILHVYWEEFQKDPVGLMSRVAQPASKKIDQNKLKPEMDEKGNLTTAGFACSQCGQPLFVYKLEQVSEKGKAYTNYFGRCNVAEHEKLIKLAQLKPEKDSDEAVTYSLGKFGQRALDFYSIHVTKESTHPVKPLAQIAGNRYASGPVGKALSDACMGTIASFLSKYQDIIIEHQKVVKGNQKRLESLRELAGKENLEYPSVTLPPQPHTKEGVDAYNEVIARVRMWVNLNLWQKLKLSRDDAKPLLRLKGFPSFPLVERQANEVDWWDMVCNVKKLINEKKEDGKVFWQNLAGYKRQEALRPYLSSEEDRKKGKKFARYQLGDLLLHLEKKHGEDWGKVYDEAWERIDKKVEGLSKHIKLEEERRSEDAQSKAALTDWLRAKASFVIEGLKEADKDEFCRCELKLQKWYGDLRGKPFAIEAENSILDISGFSKQYNCAFIWQKDGVKKLNLYLIINYFKGGKLRFKKIKPEAFEANRFYTVINKKSGEIVPMEVNFNFDDPNLIILPLAFGKRQGREFIWNDLLSLETGSLKLANGRVIEKTLYNRRTRQDEPALFVALTFERREVLDSSNIKPMNLIGVDRGENIPAVIALTDPEGCPLSRFKDSLGNPTHILRIGESYKEKQRTIQAKKEVEQRRAGGYSRKYASKAKNLADDMVRNTARDLLYYAVTQDAMLIFENLSRGFGRQGKRTFSAERQYTRMEDWLTAKLAYEGLPSKTYLSKTLAQYTSKTCSNCGFTITSADYDRVLEKLKKTATGWMTTINGKELKVEGQITYYNRYKRQNVVKDLSVELDRLSEESVNNDISSWTKGRSGEALSLLKKRFSHRPVQEKFVCLNCGFETHADEQAALNIARSWLFLRSQEYKKYQTNKTTGKNTDKRAFVETWQSFYRKKLKEVWKPAV

SEQ ID NO: 38296 - protein, 978 aa, synthetic construct
  REGION 1..978: note = engineered CasX variant
QEIKRINKIRRRLVKDSNTKKAGKTGPMKTLLVRVMTPDLRERLENLRKKPENIPQPISNTSRANLNKLLTDYTEMKKAILHVYWEEFQKDPVGLMSRVAQPASKKIDQNKLKPEMDEKGNLTTAGFACSQCGQPLFVYKLEQVSEKGKAYTNYFGRCNVAEHEKLILLAQLKPEKDSDEAVTYSLGKFGQRALDFYSIHVTKESTHPVKPLAQIAGNRYASPVGKALSDACMGTIASFLSKYQDIIIEHQKVVKGNQKRLESLRELAGKENLEYPSVTLPPQPHTKEGVDAYNEVIARVRMWVNLNLWQKLKLSRDDAKPLLRLKGFPSFPLVERQANEVDWWDMVCNVKKLINEKKEDGKVFWQNLAGYKRQEALRPYLSSEEDRKKGKKFARYQLGDLLLHLEKKHGEDWGKVYDEAWERIDKKVEGLSKHIKLEEERRSEDAQSKAALTDWLRAKASFVIEGLKEADKDEFCRCELKLQKWYGDLRGKPFAIEAENSILDISGFSKQYNCAFIWQKDGVKKLNLYLIINYFKGGKLRFKKIKPEAFEANRFYTVINKKSGEIVPMEVNFNFDDPNLIILPLAFGKRQGREFIWNDLLSLETGSLKLANGRVIEKTLYNRRTRQDEPALFVALTFERREVLDSSNIKPMNLIGVDRGENIPAVIALTDPEGCPLSRFKDSLGNPTHILRIGESYKEKQRTIQAKKEVEQRRAGGYSRKYASKAKNLADDMVRNTARDLLYYAVTQDAMLIFENLSRGFGRQGKRTFSAERQYTRMEDWLTAKLAYEGLPSKTYLSKTLAQYTSKTCSNCGFTITSADYDRVLEKLKKTATGWMTTINGKELKVEGQITYYNRYKRQNVVKDLSVELDRLSEESVNNDISSWTKGRSGEALSLLKKRFSHRPVQEKFVCLNCGFETHADEQAALNIARSWLFLRSQEYKKYQTNKTTGKNTDKRAFVETWQSFYRKKLKEVWKPAV

SEQ ID NO: 38297 - protein, 978 aa, synthetic construct
  REGION 1..978: note = engineered CasX variant
QEIKRINKIRRRLVKDSNTKKAGKTGPMKTLLVRVMTPDLRERLENLRKKPENIPQPISNTSRANLNKLLTDYTEMKKAILHVYWEEFQKDPVGLMSRVAQPASKKIDQNKLKPEMDEKGNLTTAGFACSQCGQPLFVYKLEQVSEKGKAYTNYFGRCNVAEHEKLILLAQLKPEKDSDEAVTYSLGKFGQRALDFYSIHVTKESTHPVKPLAQIAGNRYASYPVGKALSDACMGTIASFLSKYQDIIIEHQKVVKGNQKRLESLRELAGKENLEYPSVTLPPQPHTKEGVDAYNEVIARVRMWVNLNLWQKLKLSRDDAKPLLRLKKFPSFPLVERQANEVDWWDMVCNVKKLINEKKEDGKVFWQNLAGYKRQEALRPYLSSEEDRKKGKKFARYQLGDLLLHLEKKHGEDWGKVYDEAWERIDKKVEGLSKHIKLEEERRSEDAQSKAALTDWLRAKASFVIEGLKEADKDEFCRCELKLQKWYGDLRGKPFAIEAENSILDISGFSKQYNCAFIWQKDGVKKLNLYLIINYFKGGKLRFKKIKPEAFEANRFYTVINKKSGEIVPMEVNFNFDDPNLIILPLAFGKRQGREFIWNDLLSLETGSLKLANGRVIEKTLYNRRTRQDEPALFVALTFERREVLDSSNIKPMNLIGVDRGENIPAVIALTDPEGCPLSRFKDSLGNPTHILRIGESYKEKQRTIQAKKEVEQRRAGGYSRKYASKAKNLADDMVRNTARDLLYYAVTQDAMLIFENLSRGFGRQGKRTFSAERQYTRMEDWLTAKLAYEGLPSKTYLSKTLAQYTSKTCSNCGFTITSADYDRVLEKLKKTATGWMTTINGKELKVEGQITYYNRYKRQNVVKDLSVELDRLSEESVNNDISSWTKGRSGEALSLLKKRFSHRPVQEKFVCLNCGFETHADEQAALNIARSWLFLRSQEYKKYQTNKTTGNTDKRAFVETWQSFYRKKLKEVWKPAV

SEQ ID NO: 38298 - protein, 978 aa, synthetic construct
  REGION 1..978: note = engineered CasX variant
QEIKRINKIRRRLVKDSNTKKAGKTGPMKTLLVRVMTPDLRERLENLRKKPENIPQPISNTSRANLNKLLTDYTEMKKAILHVYWEEFQKDPVGLMSRVAQPASKKIDQNKLKPEMDEKGNLTTAGFACSQCGQPLFVYKLEQVSEKGKAYTNYFGRCNVAEHEKLILLAQLKPEKDSDEAVTYSLGKFGQRALDFYSIHVTKESTHPVKPLAQIAGNRYASHPVGKALSDACMGTIASFLSKYQDIIIEHQKVVKGNQKRLESLRELAGKENLEYPSVTLPPQPHTKEGVDAYNEVIARVRMWVNLNLWQKLKLSRDDAKPLLRLKKFPSFPLVERQANEVDWWDMVCNVKKLINEKKEDGKVFWQNLAGYKRQEALRPYLSSEEDRKKGKKFARYQLGDLLLHLEKKHGEDWGKVYDEAWERIDKKVEGLSKHIKLEEERRSEDAQSKAALTDWLRAKASFVIEGLKEADKDEFCRCELKLQKWYGDLRGKPFAIEAENSILDISGFSKQYNCAFIWQKDGVKKLNLYLIINYFKGGKLRFKKIKPEAFEANRFYTVINKKSGEIVPMEVNFNFDDPNLIILPLAFGKRQGREFIWNDLLSLETGSLKLANGRVIEKTLYNRRTRQDEPALFVALTFERREVLDSSNIKPMNLIGVDRGENIPAVIALTDPEGCPLSRFKDSLGNPTHILRIGESYKEKQRTIQAKKEVEQRRAGGYSRKYASKAKNLADDMVRNTARDLLYYAVTQDAMLIFENLSRGFGRQGKRTFSAERQYTRMEDWLTAKLAYEGLPSKTYLSKTLAQYTSKTCSNCGFTITSADYDRVLEKLKKTATGWMTTINGKELKVEGQITYYNRYKRQNVVKDLSVELDRLSEESVNNDISSWTKGRSGEALSLLKKRFSHRPVQEKFVCLNCGFETHADEQAALNIARSWLFLRSQEYKKYQTNKTTGNTDKRAFVETWQSFYRKKLKEVWKPAV

SEQ ID NO: 38299 - protein, 978 aa, synthetic construct
  REGION 1..978: note = engineered CasX variant
QEIKRINKIRRRLVKDSNTKKAGKTGPMKTLLVRVMTPDLRERLENLRKKPENIPQPISNTSRANLNKLLTDYTEMKKAILHVYWEEFQKDPVGLMSRVAQPASKKIDQNKLKPEMDEKGNLTTAGFACSQCGQPLFVYKLEQVSEKGKAYTNYFGRCNVAEHEKLILLAQLKPEKDSDEAVTYSLGKFGQRALDFYSIHVTKESTHPVKPLAQIAGNRYASSPVGKALSDACMGTIASFLSKYQDIIIEHQKVVKGNQKRLESLRELAGKENLEYPSVTLPPQPHTKEGVDAYNEVIARVRMWVNLNLWQKLKLSRDDAKPLLRLKKFPSFPLVERQANEVDWWDMVCNVKKLINEKKEDGKVFWQNLAGYKRQEALRPYLSSEEDRKKGKKFARYQLGDLLLHLEKKHGEDWGKVYDEAWERIDKKVEGLSKHIKLEEERRSEDAQSKAALTDWLRAKASFVIEGLKEADKDEFCRCELKLQKWYGDLRGKPFAIEAENSILDISGFSKQYNCAFIWQKDGVKKLNLYLIINYFKGGKLRFKKIKPEAFEANRFYTVINKKSGEIVPMEVNFNFDDPNLIILPLAFGKRQGREFIWNDLLSLETGSLKLANGRVIEKTLYNRRTRQDEPALFVALTFERREVLDSSNIKPMNLIGVDRGENIPAVIALTDPEGCPLSRFKDSLGNPTHILRIGESYKEKQRTIQAKKEVEQRRAGGYSRKYASKAKNLADDMVRNTARDLLYYAVTQDAMLIFENLSRGFGRQGKRTFSAERQYTRMEDWLTAKLAYEGLPSKTYLSKTLAQYTSKTCSNCGFTITSADYDRVLEKLKKTATGWMTTINGKELKVEGQITYYNRYKRQNVVKDLSVELDRLSEESVNNDISSWTKGRSGEALSLLKKRFSHRPVQEKFVCLNCGFETHADEQAALNIARSWLFLRSQEYKKYQTNKTTGNTDKRAFVETWQSFYRKKLKEVWKPAV

SEQ ID NO: 38300 - protein, 978 aa, synthetic construct
  REGION 1..978: note = engineered CasX variant
QEIKRINKIRRRLVKDSNTKKAGKTGPMKTLLVRVMTPDLRERLENLRKKPENIPQPISNTSRANLNKLLTDYTEMKKAILHVYWEEFQKDPVGLMSRVAQPASKKIDQNKLKPEMDEKGNLTTAGFACSQCGQPLFVYKLEQVSEKGKAYTNYFGRCNVAEHEKLILLAQLKPEKDSDEAVTYSLGKFGQRALDFYSIHVTKESTHPVKPLAQIAGNRYASTPVGKALSDACMGTIASFLSKYQDIIIEHQKVVKGNQKRLESLRELAGKENLEYPSVTLPPQPHTKEGVDAYNEVIARVRMWVNLNLWQKLKLSRDDAKPLLRLKKFPSFPLVERQANEVDWWDMVCNVKKLINEKKEDGKVFWQNLAGYKRQEALRPYLSSEEDRKKGKKFARYQLGDLLLHLEKKHGEDWGKVYDEAWERIDKKVEGLSKHIKLEEERRSEDAQSKAALTDWLRAKASFVIEGLKEADKDEFCRCELKLQKWYGDLRGKPFAIEAENSILDISGFSKQYNCAFIWQKDGVKKLNLYLIINYFKGGKLRFKKIKPEAFEANRFYTVINKKSGEIVPMEVNFNFDDPNLIILPLAFGKRQGREFIWNDLLSLETGSLKLANGRVIEKTLYNRRTRQDEPALFVALTFERREVLDSSNIKPMNLIGVDRGENIPAVIALTDPEGCPLSRFKDSLGNPTHILRIGESYKEKQRTIQAKKEVEQRRAGGYSRKYASKAKNLADDMVRNTARDLLYYAVTQDAMLIFENLSRGFGRQGKRTFSAERQYTRMEDWLTAKLAYEGLPSKTYLSKTLAQYTSKTCSNCGFTITSADYDRVLEKLKKTATGWMTTINGKELKVEGQITYYNRYKRQNVVKDLSVELDRLSEESVNNDISSWTKGRSGEALSLLKKRFSHRPVQEKFVCLNCGFETHADEQAALNIARSWLFLRSQEYKKYQTNKTTGNTDKRAFVETWQSFYRKKLKEVWKPAV

SEQ ID NO: 38301 - protein, 978 aa, synthetic construct
  REGION 1..978: note = engineered CasX variant
QEIKRINKIRRRLVKDSNTKKAGKTGPMKTLLVRVMTPDLRERLENLRKKPENIPQPISNTSRANLNKLLTDYTEMKKAILHVYWEEFQKDPVGLMSRVAQPASKKIDQNKLKPEMDEKGNLTTAGFACSQCGQPLFVYKLEQVSEKGKAYTNYFGRCNVAEHEKLILLAQLKPEKDSDEAVTYSLGKFGQRALDFYSIHVTKESTHPVKPLAQIAGNRYASAPVGKALSDACMGTIASFLSKYQDIIIEHQKVVKGNQKRLESLRELAGKENLEYPSVTLPPQPHTKEGVDAYNEVIARVRMWVNLNLWQKLKLSRDDAKPLLRLKKFPSFPLVERQANEVDWWDMVCNVKKLINEKKEDGKVFWQNLAGYKRQEALRPYLSSEEDRKKGKKFARYQLGDLLLHLEKKHGEDWGKVYDEAWERIDKKVEGLSKHIKLEEERRSEDAQSKAALTDWLRAKASFVIEGLKEADKDEFCRCELKLQKWYGDLRGKPFAIEAENSILDISGFSKQYNCAFIWQKDGVKKLNLYLIINYFKGGKLRFKKIKPEAFEANRFYTVINKKSGEIVPMEVNFNFDDPNLIILPLAFGKRQGREFIWNDLLSLETGSLKLANGRVIEKTLYNRRTRQDEPALFVALTFERREVLDSSNIKPMNLIGVDRGENIPAVIALTDPEGCPLSRFKDSLGNPTHILRIGESYKEKQRTIQAKKEVEQRRAGGYSRKYASKAKNLADDMVRNTARDLLYYAVTQDAMLIFENLSRGFGRQGKRTFSAERQYTRMEDWLTAKLAYEGLPSKTYLSKTLAQYTSKTCSNCGFTITSADYDRVLEKLKKTATGWMTTINGKELKVEGQITYYNRYKRQNVVKDLSVELDRLSEESVNNDISSWTKGRSGEALSLLKKRFSHRPVQEKFVCLNCGFETHADEQAALNIARSWLFLRSQEYKKYQTNKTTGNTDKRAFVETWQSFYRKKLKEVWKPAV

SEQ ID NO: 38302 - protein, 978 aa, synthetic construct
  REGION 1..978: note = engineered CasX variant
QEIKRINKIRRRLVKDSNTKKAGKTGPMKTLLVRVMTPDLRERLENLRKKPENIPQPISNTSRANLNKLLTDYTEMKKAILHVYWEEFQKDPVGLMSRVAQPASKKIDQNKLKPEMDEKGNLTTAGFACSQCGQPLFVYKLEQVSEKGKAYTNYFGRCNVAEHEKLILLAQLKPEKDSDEAVTYSLGKFGQRALDFYSIHVTKESTHPVKPLAQIAGNRYASVPVGKALSDACMGTIASFLSKYQDIIIEHQKVVKGNQKRLESLRELAGKENLEYPSVTLPPQPHTKEGVDAYNEVIARVRMWVNLNLWQKLKLSRDDAKPLLRLKKFPSFPLVERQANEVDWWDMVCNVKKLINEKKEDGKVFWQNLAGYKRQEALRPYLSSEEDRKKGKKFARYQLGDLLLHLEKKHGEDWGKVYDEAWERIDKKVEGLSKHIKLEEERRSEDAQSKAALTDWLRAKASFVIEGLKEADKDEFCRCELKLQKWYGDLRGKPFAIEAENSILDISGFSKQYNCAFIWQKDGVKKLNLYLIINYFKGGKLRFKKIKPEAFEANRFYTVINKKSGEIVPMEVNFNFDDPNLIILPLAFGKRQGREFIWNDLLSLETGSLKLANGRVIEKTLYNRRTRQDEPALFVALTFERREVLDSSNIKPMNLIGVDRGENIPAVIALTDPEGCPLSRFKDSLGNPTHILRIGESYKEKQRTIQAKKEVEQRRAGGYSRKYASKAKNLADDMVRNTARDLLYYAVTQDAMLIFENLSRGFGRQGKRTFSAERQYTRMEDWLTAKLAYEGLPSKTYLSKTLAQYTSKTCSNCGFTITSADYDRVLEKLKKTATGWMTTINGKELKVEGQITYYNRYKRQNVVKDLSVELDRLSEESVNNDISSWTKGRSGEALSLLKKRFSHRPVQEKFVCLNCGFETHADEQAALNIARSWLFLRSQEYKKYQTNKTTGNTDKRAFVETWQSFYRKKLKEVWKPAV

SEQ ID NO: 38303 - protein, 978 aa, synthetic construct
  REGION 1..978: note = engineered CasX variant
QEIKRINKIRRRLVKDSNTKKAGKTGPMKTLLVRVMTPDLRERLENLRKKPENIPQPISNTSRANLNKLLTDYTEMKKAILHVYWEEFQKDPVGLMSRVAQPASKKIDQNKLKPEMDEKGNLTTAGFACSQCGQPLFVYKLEQVSEKGKAYTNYFGRCNVAEHEKLIKLAQLKPEKDSDEAVTYSLGKFGQRALDFYSIHVTKESTHPVKPLAQIAGNRYASGPVGKALSDACMGTIASFLSKYQDIIIEHQKVVKGNQKRLESLRELAGKENLEYPSVTLPPQPHTKEGVDAYNEVIARVRMWVNLNLWQKLKLSRDDAKPLLRLKKFPSFPLVERQANEVDWWDMVCNVKKLINEKKEDGKVFWQNLAGYKRQEALRPYLSSEEDRKKGKKFARYQLGDLLLHLEKKHGEDWGKVYDEAWERIDKKVEGLSKHIKLEEERRSEDAQSKAALTDWLRAKASFVIEGLKEADKDEFCRCELKLQKWYGDLRGKPFAIEAENSILDISGFSKQYNCAFIWQKDGVKKLNLYLIINYFKGGKLRFKKIKPEAFEANRFYTVINKKSGEIVPMEVNFNFDDPNLIILPLAFGKRQGREFIWNDLLSLETGSLKLANGRVIEKTLYNRRTRQDEPALFVALTFERREVLDSSNIKPMNLIGVDRGENIPAVIALTDPEGCPLSRFKDSLGNPTHILRIGESYKEKQRTIQAKKEVEQRRAGGYSRKYASKAKNLADDMVRNTARDLLYYAVTQDAMLIFENLSRGFGRQGKRTFSAERQYTRMEDWLTAKLAYEGLPSKTYLSKTLAQYTSKTCSNCGFTITSADYDRVLEKLKKTATGWMTTINGKELKVEGQITYYNRYKRQNVVKDLSVELDRLSEESVNNDISSWTKGRSGEALSLLKKRFSHRPVQEKFVCLNCGFETHADEQAALNIARSWLFLRSQEYKKYQTNKTTGNTDKRAFVETWQSFYRKKLKEVWKPAV

SEQ ID NO: 38304 - protein, 977 aa, synthetic construct
  REGION 1..977: note = engineered CasX variant
QEIKRINKIRRRLVKDSNTKKAGKTGPMKTLLVRVMTPDLRERLENLRKKPENIPQPISNTSRANLNKLLTDYTEMKKAILHVYWEEFQKDPVGLMSRVAQPASKKIDQNKLKPEMDEKGNLTTAGFACSQCGQPLFVYKLEQVSEKGKAYTNYFGRCNVAEHEKLILLAQLKPEKDSDEAVTYSLGKFGQRALDFYSIHVTKESTHPVKPLAQIAGNRYASPVGKALSDACMGTIASFLSKYQDIIIEHQKVVKGNQKRLESLRELAGKENLEYPSVTLPPQPHTKEGVDAYNEVIARVRMWVNLNLWQKLKLSRDDAKPLLRLKKFPSFPLVERQANEVDWWDMVCNVKKLINEKKEDGKVFWQNLAGYKRQEALRPYLSSEEDRKKGKKFARYQLGDLLLHLEKKHGEDWGKVYDEAWERIDKKVEGLSKHIKLEEERRSEDAQSKAALTDWLRAKASFVIEGLKEADKDEFCRCELKLQKWYGDLRGKPFAIEAENSILDISGFSKQYNCAFIWQKDGVKKLNLYLIINYFKGGKLRFKKIKPEAFEANRFYTVINKKSGEIVPMEVNFNFDDPNLIILPLAFGKRQGREFIWNDLLSLETGSLKLANGRVIEKTLYNRRTRQDEPALFVALTFERREVLDSSNIKPMNLIGVDRGENIPAVIALTDPEGCPLSRFKDSLGNPTHILRIGESYKEKQRTIQAKKEVEQRRAGGYSRKYASKAKNLADDMVRNTARDLLYYAVTQDAMLIFENLSRGFGRQGKRTFSAERQYTRMEDWLTAKLAYEGLPSKTYLSKTLAQYTSKTCSNCGFTITSADYDRVLEKLKKTATGWMTTINGKELKVEGQITYYNRYKRQNVVKDLSVELDRLSEESVNNDISSWTKGRSGEALSLLKKRFSHRPVQEKFVCLNCGFETHADEQAALNIARSWLFLRSQEYKKYQTNKTTGNTDKRAFVETWQSFYRKKLKEVWKPAV

SEQ ID NO: 38305 - protein, 978 aa, synthetic construct
  REGION 1..978: note = engineered CasX variant
QEIKRINKIRRRLVKDSNTKKAGKTGPMKTLLVRVMTPDLRERLENLRKKPENIPQPISNTSRANLNKLLTDYTEMKKAILHVYWEEFQKDPVGLMSRVAQPASKKIDQNKLKPEMDEKGNLTTAGFACSQCGQPLFVYKLEQVSEKGKAYTNYFGRCNVAEHEKLILLAQLKPEKDSDEAVTYSLGKFGQRALDFYSIHVTKESTHPVKPLAQIAGNRYASYPVGKALSDACMGTIASFLSKYQDIIIEHQKVVKGNQKRLESLRELAGKENLEYPSVTLPPQPHTKEGVDAYNEVIARVRMWVNLNLWQKLKLSRDDAKPLLRLKGFPSFPLVERQANEVDWWDMVCNVKKLINEKKEDGKVFWQNLAGYKRQEALRPYLSSEEDRKKGKKFARYQLGDLLLHLEKKHGEDWGKVYDEAWERIDKKVEGLSKHIKLEEERRSEDAQSKAALTDWLRAKASFVIEGLKEADKDEFCRCELKLQKWYGDLRGKPFAIEAENSILDISGFSKQYNCAFIWQKDGVKKLNLYLIINYFKGGKLRFKKIKPEAFEANRFYTVINKKSGEIVPMEVNFNFDDPNLIILPLAFGKRQGREFIWNDLLSLETGSLKLANGRVIEKTLYNRRTRQDEPALFVALTFERREVLDSSNIKPMNLIGVDRGENIPAVIALTDPEGCPLSRFKDSLGNPTHILRIGERYKEKQRTIQAKKEVEQRRAGGYSRKYASKAKNLADDMVRNTARDLLYYAVTQDAMLIFENLSRGFGRQGKRTFSAERQYTRMEDWLTAKLAYEGLPSKTYLSKTLAQYTSKTCSNCGFTITSADYDRVLEKLKKTATGWMTTINGKELKVEGQITYYNRYKRQNVVKDLSVELDRLSEESVNNDISSWTKGRSGEALSLLKKRFSHRPVQEKFVCLNCGFETHADEQAALNIARSWLFLRSQEYKKYQTNKTTGNTDKRAFVETWQSFYRKKLKEVWKPAV

SEQ ID NO: 38306 - protein, 978 aa, synthetic construct
  REGION 1..978: note = engineered CasX variant
QEIKRINKIRRRLVKDSNTKKAGKTGPMKTLLVRVMTPDLRERLENLRKKPENIPQPISNTSRANLNKLLTDYTEMKKAILHVYWEEFQKDPVGLMSRVAQPASKKIDQNKLKPEMDEKGNLTTAGFACSQCGQPLFVYKLEQVSEKGKAYTNYFGRCNVAEHEKLILLAQLKPEKDSDEAVTYSLGKFGQRALDFYSIHVTKESTHPVKPLAQIAGNRYASHPVGKALSDACMGTIASFLSKYQDIIIEHQKVVKGNQKRLESLRELAGKENLEYPSVTLPPQPHTKEGVDAYNEVIARVRMWVNLNLWQKLKLSRDDAKPLLRLKGFPSFPLVERQANEVDWWDMVCNVKKLINEKKEDGKVFWQNLAGYKRQEALRPYLSSEEDRKKGKKFARYQLGDLLLHLEKKHGEDWGKVYDEAWERIDKKVEGLSKHIKLEEERRSEDAQSKAALTDWLRAKASFVIEGLKEADKDEFCRCELKLQKWYGDLRGKPFAIEAENSILDISGFSKQYNCAFIWQKDGVKKLNLYLIINYFKGGKLRFKKIKPEAFEANRFYTVINKKSGEIVPMEVNFNFDDPNLIILPLAFGKRQGREFIWNDLLSLETGSLKLANGRVIEKTLYNRRTRQDEPALFVALTFERREVLDSSNIKPMNLIGVDRGENIPAVIALTDPEGCPLSRFKDSLGNPTHILRIGERYKEKQRTIQAKKEVEQRRAGGYSRKYASKAKNLADDMVRNTARDLLYYAVTQDAMLIFENLSRGFGRQGKRTFSAERQYTRMEDWLTAKLAYEGLPSKTYLSKTLAQYTSKTCSNCGFTITSADYDRVLEKLKKTATGWMTTINGKELKVEGQITYYNRYKRQNVVKDLSVELDRLSEESVNNDISSWTKGRSGEALSLLKKRFSHRPVQEKFVCLNCGFETHADEQAALNIARSWLFLRSQEYKKYQTNKTTGNTDKRAFVETWQSFYRKKLKEVWKPAV

SEQ ID NO: 38307 - protein, 978 aa, synthetic construct
  REGION 1..978: note = engineered CasX variant
QEIKRINKIRRRLVKDSNTKKAGKTGPMKTLLVRVMTPDLRERLENLRKKPENIPQPISNTSRANLNKLLTDYTEMKKAILHVYWEEFQKDPVGLMSRVAQPASKKIDQNKLKPEMDEKGNLTTAGFACSQCGQPLFVYKLEQVSEKGKAYTNYFGRCNVAEHEKLILLAQLKPEKDSDEAVTYSLGKFGQRALDFYSIHVTKESTHPVKPLAQIAGNRYASSPVGKALSDACMGTIASFLSKYQDIIIEHQKVVKGNQKRLESLRELAGKENLEYPSVTLPPQPHTKEGVDAYNEVIARVRMWVNLNLWQKLKLSRDDAKPLLRLKGFPSFPLVERQANEVDWWDMVCNVKKLINEKKEDGKVFWQNLAGYKRQEALRPYLSSEEDRKKGKKFARYQLGDLLLHLEKKHGEDWGKVYDEAWERIDKKVEGLSKHIKLEEERRSEDAQSKAALTDWLRAKASFVIEGLKEADKDEFCRCELKLQKWYGDLRGKPFAIEAENSILDISGFSKQYNCAFIWQKDGVKKLNLYLIINYFKGGKLRFKKIKPEAFEANRFYTVINKKSGEIVPMEVNFNFDDPNLIILPLAFGKRQGREFIWNDLLSLETGSLKLANGRVIEKTLYNRRTRQDEPALFVALTFERREVLDSSNIKPMNLIGVDRGENIPAVIALTDPEGCPLSRFKDSLGNPTHILRIGERYKEKQRTIQAKKEVEQRRAGGYSRKYASKAKNLADDMVRNTARDLLYYAVTQDAMLIFENLSRGFGRQGKRTFSAERQYTRMEDWLTAKLAYEGLPSKTYLSKTLAQYTSKTCSNCGFTITSADYDRVLEKLKKTATGWMTTINGKELKVEGQITYYNRYKRQNVVKDLSVELDRLSEESVNNDISSWTKGRSGEALSLLKKRFSHRPVQEKFVCLNCGFETHADEQAALNIARSWLFLRSQEYKKYQTNKTTGNTDKRAFVETWQSFYRKKLKEVWKPAV

SEQ ID NO: 38308 - protein, 978 aa, synthetic construct
  REGION 1..978: note = engineered CasX variant
QEIKRINKIRRRLVKDSNTKKAGKTGPMKTLLVRVMTPDLRERLENLRKKPENIPQPISNTSRANLNKLLTDYTEMKKAILHVYWEEFQKDPVGLMSRVAQPASKKIDQNKLKPEMDEKGNLTTAGFACSQCGQPLFVYKLEQVSEKGKAYTNYFGRCNVAEHEKLILLAQLKPEKDSDEAVTYSLGKFGQRALDFYSIHVTKESTHPVKPLAQIAGNRYASTPVGKALSDACMGTIASFLSKYQDIIIEHQKVVKGNQKRLESLRELAGKENLEYPSVTLPPQPHTKEGVDAYNEVIARVRMWVNLNLWQKLKLSRDDAKPLLRLKGFPSFPLVERQANEVDWWDMVCNVKKLINEKKEDGKVFWQNLAGYKRQEALRPYLSSEEDRKKGKKFARYQLGDLLLHLEKKHGEDWGKVYDEAWERIDKKVEGLSKHIKLEEERRSEDAQSKAALTDWLRAKASFVIEGLKEADKDEFCRCELKLQKWYGDLRGKPFAIEAENSILDISGFSKQYNCAFIWQKDGVKKLNLYLIINYFKGGKLRFKKIKPEAFEANRFYTVINKKSGEIVPMEVNFNFDDPNLIILPLAFGKRQGREFIWNDLLSLETGSLKLANGRVIEKTLYNRRTRQDEPALFVALTFERREVLDSSNIKPMNLIGVDRGENIPAVIALTDPEGCPLSRFKDSLGNPTHILRIGERYKEKQRTIQAKKEVEQRRAGGYSRKYASKAKNLADDMVRNTARDLLYYAVTQDAMLIFENLSRGFGRQGKRTFSAERQYTRMEDWLTAKLAYEGLPSKTYLSKTLAQYTSKTCSNCGFTITSADYDRVLEKLKKTATGWMTTINGKELKVEGQITYYNRYKRQNVVKDLSVELDRLSEESVNNDISSWTKGRSGEALSLLKKRFSHRPVQEKFVCLNCGFETHADEQAALNIARSWLFLRSQEYKKYQTNKTTGNTDKRAFVETWQSFYRKKLKEVWKPAV

SEQ ID NO: 38309 - protein, 978 aa, synthetic construct
  REGION 1..978: note = engineered CasX variant
QEIKRINKIRRRLVKDSNTKKAGKTGPMKTLLVRVMTPDLRERLENLRKKPENIPQPISNTSRANLNKLLTDYTEMKKAILHVYWEEFQKDPVGLMSRVAQPASKKIDQNKLKPEMDEKGNLTTAGFACSQCGQPLFVYKLEQVSEKGKAYTNYFGRCNVAEHEKLILLAQLKPEKDSDEAVTYSLGKFGQRALDFYSIHVTKESTHPVKPLAQIAGNRYASAPVGKALSDACMGTIASFLSKYQDIIIEHQKVVKGNQKRLESLRELAGKENLEYPSVTLPPQPHTKEGVDAYNEVIARVRMWVNLNLWQKLKLSRDDAKPLLRLKGFPSFPLVERQANEVDWWDMVCNVKKLINEKKEDGKVFWQNLAGYKRQEALRPYLSSEEDRKKGKKFARYQLGDLLLHLEKKHGEDWGKVYDEAWERIDKKVEGLSKHIKLEEERRSEDAQSKAALTDWLRAKASFVIEGLKEADKDEFCRCELKLQKWYGDLRGKPFAIEAENSILDISGFSKQYNCAFIWQKDGVKKLNLYLIINYFKGGKLRFKKIKPEAFEANRFYTVINKKSGEIVPMEVNFNFDDPNLIILPLAFGKRQGREFIWNDLLSLETGSLKLANGRVIEKTLYNRRTRQDEPALFVALTFERREVLDSSNIKPMNLIGVDRGENIPAVIALTDPEGCPLSRFKDSLGNPTHILRIGERYKEKQRTIQAKKEVEQRRAGGYSRKYASKAKNLADDMVRNTARDLLYYAVTQDAMLIFENLSRGFGRQGKRTFSAERQYTRMEDWLTAKLAYEGLPSKTYLSKTLAQYTSKTCSNCGFTITSADYDRVLEKLKKTATGWMTTINGKELKVEGQITYYNRYKRQNVVKDLSVELDRLSEESVNNDISSWTKGRSGEALSLLKKRFSHRPVQEKFVCLNCGFETHADEQAALNIARSWLFLRSQEYKKYQTNKTTGNTDKRAFVETWQSFYRKKLKEVWKPAV

SEQ ID NO: 38310 - protein, 978 aa, synthetic construct
  REGION 1..978: note = engineered CasX variant
QEIKRINKIRRRLVKDSNTKKAGKTGPMKTLLVRVMTPDLRERLENLRKKPENIPQPISNTSRANLNKLLTDYTEMKKAILHVYWEEFQKDPVGLMSRVAQPASKKIDQNKLKPEMDEKGNLTTAGFACSQCGQPLFVYKLEQVSEKGKAYTNYFGRCNVAEHEKLILLAQLKPEKDSDEAVTYSLGKFGQRALDFYSIHVTKESTHPVKPLAQIAGNRYASVPVGKALSDACMGTIASFLSKYQDIIIEHQKVVKGNQKRLESLRELAGKENLEYPSVTLPPQPHTKEGVDAYNEVIARVRMWVNLNLWQKLKLSRDDAKPLLRLKGFPSFPLVERQANEVDWWDMVCNVKKLINEKKEDGKVFWQNLAGYKRQEALRPYLSSEEDRKKGKKFARYQLGDLLLHLEKKHGEDWGKVYDEAWERIDKKVEGLSKHIKLEEERRSEDAQSKAALTDWLRAKASFVIEGLKEADKDEFCRCELKLQKWYGDLRGKPFAIEAENSILDISGFSKQYNCAFIWQKDGVKKLNLYLIINYFKGGKLRFKKIKPEAFEANRFYTVINKKSGEIVPMEVNFNFDDPNLIILPLAFGKRQGREFIWNDLLSLETGSLKLANGRVIEKTLYNRRTRQDEPALFVALTFERREVLDSSNIKPMNLIGVDRGENIPAVIALTDPEGCPLSRFKDSLGNPTHILRIGERYKEKQRTIQAKKEVEQRRAGGYSRKYASKAKNLADDMVRNTARDLLYYAVTQDAMLIFENLSRGFGRQGKRTFSAERQYTRMEDWLTAKLAYEGLPSKTYLSKTLAQYTSKTCSNCGFTITSADYDRVLEKLKKTATGWMTTINGKELKVEGQITYYNRYKRQNVVKDLSVELDRLSEESVNNDISSWTKGRSGEALSLLKKRFSHRPVQEKFVCLNCGFETHADEQAALNIARSWLFLRSQEYKKYQTNKTTGNTDKRAFVETWQSFYRKKLKEVWKPAV

SEQ ID NO: 38311 - protein, 978 aa, synthetic construct
  REGION 1..978: note = engineered CasX variant
QEIKRINKIRRRLVKDSNTKKAGKTGPMKTLLVRVMTPDLRERLENLRKKPENIPQPISNTSRANLNKLLTDYTEMKKAILHVYWEEFQKDPVGLMSRVAQPASKKIDQNKLKPEMDEKGNLTTAGFACSQCGQPLFVYKLEQVSEKGKAYTNYFGRCNVAEHEKLIKLAQLKPEKDSDEAVTYSLGKFGQRALDFYSIHVTKESTHPVKPLAQIAGNRYASGPVGKALSDACMGTIASFLSKYQDIIIEHQKVVKGNQKRLESLRELAGKENLEYPSVTLPPQPHTKEGVDAYNEVIARVRMWVNLNLWQKLKLSRDDAKPLLRLKGFPSFPLVERQANEVDWWDMVCNVKKLINEKKEDGKVFWQNLAGYKRQEALRPYLSSEEDRKKGKKFARYQLGDLLLHLEKKHGEDWGKVYDEAWERIDKKVEGLSKHIKLEEERRSEDAQSKAALTDWLRAKASFVIEGLKEADKDEFCRCELKLQKWYGDLRGKPFAIEAENSILDISGFSKQYNCAFIWQKDGVKKLNLYLIINYFKGGKLRFKKIKPEAFEANRFYTVINKKSGEIVPMEVNFNFDDPNLIILPLAFGKRQGREFIWNDLLSLETGSLKLANGRVIEKTLYNRRTRQDEPALFVALTFERREVLDSSNIKPMNLIGVDRGENIPAVIALTDPEGCPLSRFKDSLGNPTHILRIGERYKEKQRTIQAKKEVEQRRAGGYSRKYASKAKNLADDMVRNTARDLLYYAVTQDAMLIFENLSRGFGRQGKRTFSAERQYTRMEDWLTAKLAYEGLPSKTYLSKTLAQYTSKTCSNCGFTITSADYDRVLEKLKKTATGWMTTINGKELKVEGQITYYNRYKRQNVVKDLSVELDRLSEESVNNDISSWTKGRSGEALSLLKKRFSHRPVQEKFVCLNCGFETHADEQAALNIARSWLFLRSQEYKKYQTNKTTGNTDKRAFVETWQSFYRKKLKEVWKPAV

SEQ ID NO: 38312 - protein, 977 aa, synthetic construct
  REGION 1..977: note = engineered CasX variant
QEIKRINKIRRRLVKDSNTKKAGKTGPMKTLLVRVMTPDLRERLENLRKKPENIPQPISNTSRANLNKLLTDYTEMKKAILHVYWEEFQKDPVGLMSRVAQPASKKIDQNKLKPEMDEKGNLTTAGFACSQCGQPLFVYKLEQVSEKGKAYTNYFGRCNVAEHEKLILLAQLKPEKDSDEAVTYSLGKFGQRALDFYSIHVTKESTHPVKPLAQIAGNRYASPVGKALSDACMGTIASFLSKYQDIIIEHQKVVKGNQKRLESLRELAGKENLEYPSVTLPPQPHTKEGVDAYNEVIARVRMWVNLNLWQKLKLSRDDAKPLLRLKGFPSFPLVERQANEVDWWDMVCNVKKLINEKKEDGKVFWQNLAGYKRQEALRPYLSSEEDRKKGKKFARYQLGDLLLHLEKKHGEDWGKVYDEAWERIDKKVEGLSKHIKLEEERRSEDAQSKAALTDWLRAKASFVIEGLKEADKDEFCRCELKLQKWYGDLRGKPFAIEAENSILDISGFSKQYNCAFIWQKDGVKKLNLYLIINYFKGGKLRFKKIKPEAFEANRFYTVINKKSGEIVPMEVNFNFDDPNLIILPLAFGKRQGREFIWNDLLSLETGSLKLANGRVIEKTLYNRRTRQDEPALFVALTFERREVLDSSNIKPMNLIGVDRGENIPAVIALTDPEGCPLSRFKDSLGNPTHILRIGERYKEKQRTIQAKKEVEQRRAGGYSRKYASKAKNLADDMVRNTARDLLYYAVTQDAMLIFENLSRGFGRQGKRTFSAERQYTRMEDWLTAKLAYEGLPSKTYLSKTLAQYTSKTCSNCGFTITSADYDRVLEKLKKTATGWMTTINGKELKVEGQITYYNRYKRQNVVKDLSVELDRLSEESVNNDISSWTKGRSGEALSLLKKRFSHRPVQEKFVCLNCGFETHADEQAALNIARSWLFLRSQEYKKYQTNKTTGNTDKRAFVETWQSFYRKKLKEVWKPAV

SEQ ID NO: 38313 - protein, 978 aa, synthetic construct
  REGION 1..978: note = engineered CasX variant
QEIKRINKIRRRLVKDSNTKKAGKTGPMKTLLVRVMTPDLRERLENLRKKPENIPQPISNTSRANLNKLLTDYTEMKKAILHVYWEEFQKDPVGLMSRVAQPASKKIDQNKLKPEMDEKGNLTTAGFACSQCGQPLFVYKLEQVSEKGKAYTNYFGRCNVAEHEKLILLAQLKPEKDSDEAVTYSLGKFGQRALDFYSIHVTKESTHPVKPLAQIAGNRYASYPVGKALSDACMGTIASFLSKYQDIIIEHQKVVKGNQKRLESLRELAGKENLEYPSVTLPPQPHTKEGVDAYNEVIARVRMWVNLNLWQKLKLSRDDAKPLLRLKGFPSFPLVERQANEVDWWDMVCNVKKLINEKKEDGKVFWQNLAGYKRQEALRPYLSSEEDRKKGKKFARYQLGDLLLHLEKKHGEDWGKVYDEAWERIDKKVEGLSKHIKLEEERRSEDAQSKAALTDWLRAKASFVIEGLKEADKDEFCRCELKLQKWYGDLRGKPFAIEAENSILDISGFSKQYNCAFIWQKDGVKKLNLYLIINYFKGGKLRFKKIKPEAFEANRFYTVINKKSGEIVPMEVNFNFDDPNLIILPLAFGKRQGREFIWNDLLSLETGSLQLANGRVIEKTLYNRRTRQDEPALFVALTFERREVLDSSNIKPMNLIGVDRGENIPAVIALTDPEGCPLSRFKDSLGNPTHILRIGESYKEKQRTIQAKKEVEQRRAGGYSRKYASKAKNLADDMVRNTARDLLYYAVTQDAMLIFENLSRGFGRQGKRTFSAERQYTRMEDWLTAKLAYEGLPSKTYLSKTLAQYTSKTCSNCGFTITSADYDRVLEKLKKTATGWMTTINGKELKVEGQITYYNRYKRQNVVKDLSVELDRLSEESVNNDISSWTKGRSGEALSLLKKRFSHRPVQEKFVCLNCGFETHADEQAALNIARSWLFLRSQEYKKYQTNKTTGNTDKRAFVETWQSFYRKKLKEVWKPAV

SEQ ID NO: 38314 - protein, 978 aa, synthetic construct
  REGION 1..978: note = engineered CasX variant
QEIKRINKIRRRLVKDSNTKKAGKTGPMKTLLVRVMTPDLRERLENLRKKPENIPQPISNTSRANLNKLLTDYTEMKKAILHVYWEEFQKDPVGLMSRVAQPASKKIDQNKLKPEMDEKGNLTTAGFACSQCGQPLFVYKLEQVSEKGKAYTNYFGRCNVAEHEKLILLAQLKPEKDSDEAVTYSLGKFGQRALDFYSIHVTKESTHPVKPLAQIAGNRYASHPVGKALSDACMGTIASFLSKYQDIIIEHQKVVKGNQKRLESLRELAGKENLEYPSVTLPPQPHTKEGVDAYNEVIARVRMWVNLNLWQKLKLSRDDAKPLLRLKGFPSFPLVERQANEVDWWDMVCNVKKLINEKKEDGKVFWQNLAGYKRQEALRPYLSSEEDRKKGKKFARYQLGDLLLHLEKKHGEDWGKVYDEAWERIDKKVEGLSKHIKLEEERRSEDAQSKAALTDWLRAKASFVIEGLKEADKDEFCRCELKLQKWYGDLRGKPFAIEAENSILDISGFSKQYNCAFIWQKDGVKKLNLYLIINYFKGGKLRFKKIKPEAFEANRFYTVINKKSGEIVPMEVNFNFDDPNLIILPLAFGKRQGREFIWNDLLSLETGSLQLANGRVIEKTLYNRRTRQDEPALFVALTFERREVLDSSNIKPMNLIGVDRGENIPAVIALTDPEGCPLSRFKDSLGNPTHILRIGESYKEKQRTIQAKKEVEQRRAGGYSRKYASKAKNLADDMVRNTARDLLYYAVTQDAMLIFENLSRGFGRQGKRTFSAERQYTRMEDWLTAKLAYEGLPSKTYLSKTLAQYTSKTCSNCGFTITSADYDRVLEKLKKTATGWMTTINGKELKVEGQITYYNRYKRQNVVKDLSVELDRLSEESVNNDISSWTKGRSGEALSLLKKRFSHRPVQEKFVCLNCGFETHADEQAALNIARSWLFLRSQEYKKYQTNKTTGNTDKRAFVETWQSFYRKKLKEVWKPAV

SEQ ID NO: 38315 - protein, 978 aa, synthetic construct
  REGION 1..978: note = engineered CasX variant
QEIKRINKIRRRLVKDSNTKKAGKTGPMKTLLVRVMTPDLRERLENLRKKPENIPQPISNTSRANLNKLLTDYTEMKKAILHVYWEEFQKDPVGLMSRVAQPASKKIDQNKLKPEMDEKGNLTTAGFACSQCGQPLFVYKLEQVSEKGKAYTNYFGRCNVAEHEKLILLAQLKPEKDSDEAVTYSLGKFGQRALDFYSIHVTKESTHPVKPLAQIAGNRYASSPVGKALSDACMGTIASFLSKYQDIIIEHQKVVKGNQKRLESLRELAGKENLEYPSVTLPPQPHTKEGVDAYNEVIARVRMWVNLNLWQKLKLSRDDAKPLLRLKGFPSFPLVERQANEVDWWDMVCNVKKLINEKKEDGKVFWQNLAGYKRQEALRPYLSSEEDRKKGKKFARYQLGDLLLHLEKKHGEDWGKVYDEAWERIDKKVEGLSKHIKLEEERRSEDAQSKAALTDWLRAKASFVIEGLKEADKDEFCRCELKLQKWYGDLRGKPFAIEAENSILDISGFSKQYNCAFIWQKDGVKKLNLYLIINYFKGGKLRFKKIKPEAFEANRFYTVINKKSGEIVPMEVNFNFDDPNLIILPLAFGKRQGREFIWNDLLSLETGSLQLANGRVIEKTLYNRRTRQDEPALFVALTFERREVLDSSNIKPMNLIGVDRGENIPAVIALTDPEGCPLSRFKDSLGNPTHILRIGESYKEKQRTIQAKKEVEQRRAGGYSRKYASKAKNLADDMVRNTARDLLYYAVTQDAMLIFENLSRGFGRQGKRTFSAERQYTRMEDWLTAKLAYEGLPSKTYLSKTLAQYTSKTCSNCGFTITSADYDRVLEKLKKTATGWMTTINGKELKVEGQITYYNRYKRQNVVKDLSVELDRLSEESVNNDISSWTKGRSGEALSLLKKRFSHRPVQEKFVCLNCGFETHADEQAALNIARSWLFLRSQEYKKYQTNKTTGNTDKRAFVETWQSFYRKKLKEVWKPAV

SEQ ID NO: 38316 - protein, 978 aa, synthetic construct
  REGION 1..978: note = engineered CasX variant
QEIKRINKIRRRLVKDSNTKKAGKTGPMKTLLVRVMTPDLRERLENLRKKPENIPQPISNTSRANLNKLLTDYTEMKKAILHVYWEEFQKDPVGLMSRVAQPASKKIDQNKLKPEMDEKGNLTTAGFACSQCGQPLFVYKLEQVSEKGKAYTNYFGRCNVAEHEKLILLAQLKPEKDSDEAVTYSLGKFGQRALDFYSIHVTKESTHPVKPLAQIAGNRYASTPVGKALSDACMGTIASFLSKYQDIIIEHQKVVKGNQKRLESLRELAGKENLEYPSVTLPPQPHTKEGVDAYNEVIARVRMWVNLNLWQKLKLSRDDAKPLLRLKGFPSFPLVERQANEVDWWDMVCNVKKLINEKKEDGKVFWQNLAGYKRQEALRPYLSSEEDRKKGKKFARYQLGDLLLHLEKKHGEDWGKVYDEAWERIDKKVEGLSKHIKLEEERRSEDAQSKAALTDWLRAKASFVIEGLKEADKDEFCRCELKLQKWYGDLRGKPFAIEAENSILDISGFSKQYNCAFIWQKDGVKKLNLYLIINYFKGGKLRFKKIKPEAFEANRFYTVINKKSGEIVPMEVNFNFDDPNLIILPLAFGKRQGREFIWNDLLSLETGSLQLANGRVIEKTLYNRRTRQDEPALFVALTFERREVLDSSNIKPMNLIGVDRGENIPAVIALTDPEGCPLSRFKDSLGNPTHILRIGESYKEKQRTIQAKKEVEQRRAGGYSRKYASKAKNLADDMVRNTARDLLYYAVTQDAMLIFENLSRGFGRQGKRTFSAERQYTRMEDWLTAKLAYEGLPSKTYLSKTLAQYTSKTCSNCGFTITSADYDRVLEKLKKTATGWMTTINGKELKVEGQITYYNRYKRQNVVKDLSVELDRLSEESVNNDISSWTKGRSGEALSLLKKRFSHRPVQEKFVCLNCGFETHADEQAALNIARSWLFLRSQEYKKYQTNKTTGNTDKRAFVETWQSFYRKKLKEVWKPAV

SEQ ID NO: 38317 - protein, 978 aa, synthetic construct
  REGION 1..978: note = engineered CasX variant
QEIKRINKIRRRLVKDSNTKKAGKTGPMKTLLVRVMTPDLRERLENLRKKPENIPQPISNTSRANLNKLLTDYTEMKKAILHVYWEEFQKDPVGLMSRVAQPASKKIDQNKLKPEMDEKGNLTTAGFACSQCGQPLFVYKLEQVSEKGKAYTNYFGRCNVAEHEKLILLAQLKPEKDSDEAVTYSLGKFGQRALDFYSIHVTKESTHPVKPLAQIAGNRYASAPVGKALSDACMGTIASFLSKYQDIIIEHQKVVKGNQKRLESLRELAGKENLEYPSVTLPPQPHTKEGVDAYNEVIARVRMWVNLNLWQKLKLSRDDAKPLLRLKGFPSFPLVERQANEVDWWDMVCNVKKLINEKKEDGKVFWQNLAGYKRQEALRPYLSSEEDRKKGKKFARYQLGDLLLHLEKKHGEDWGKVYDEAWERIDKKVEGLSKHIKLEEERRSEDAQSKAALTDWLRAKASFVIEGLKEADKDEFCRCELKLQKWYGDLRGKPFAIEAENSILDISGFSKQYNCAFIWQKDGVKKLNLYLIINYFKGGKLRFKKIKPEAFEANRFYTVINKKSGEIVPMEVNFNFDDPNLIILPLAFGKRQGREFIWNDLLSLETGSLQLANGRVIEKTLYNRRTRQDEPALFVALTFERREVLDSSNIKPMNLIGVDRGENIPAVIALTDPEGCPLSRFKDSLGNPTHILRIGESYKEKQRTIQAKKEVEQRRAGGYSRKYASKAKNLADDMVRNTARDLLYYAVTQDAMLIFENLSRGFGRQGKRTFSAERQYTRMEDWLTAKLAYEGLPSKTYLSKTLAQYTSKTCSNCGFTITSADYDRVLEKLKKTATGWMTTINGKELKVEGQITYYNRYKRQNVVKDLSVELDRLSEESVNNDISSWTKGRSGEALSLLKKRFSHRPVQEKFVCLNCGFETHADEQAALNIARSWLFLRSQEYKKYQTNKTTGNTDKRAFVETWQSFYRKKLKEVWKPAV

SEQ ID NO: 38318 - protein, 978 aa, synthetic construct
  REGION 1..978: note = engineered CasX variant
QEIKRINKIRRRLVKDSNTKKAGKTGPMKTLLVRVMTPDLRERLENLRKKPENIPQPISNTSRANLNKLLTDYTEMKKAILHVYWEEFQKDPVGLMSRVAQPASKKIDQNKLKPEMDEKGNLTTAGFACSQCGQPLFVYKLEQVSEKGKAYTNYFGRCNVAEHEKLILLAQLKPEKDSDEAVTYSLGKFGQRALDFYSIHVTKESTHPVKPLAQIAGNRYASVPVGKALSDACMGTIASFLSKYQDIIIEHQKVVKGNQKRLESLRELAGKENLEYPSVTLPPQPHTKEGVDAYNEVIARVRMWVNLNLWQKLKLSRDDAKPLLRLKGFPSFPLVERQANEVDWWDMVCNVKKLINEKKEDGKVFWQNLAGYKRQEALRPYLSSEEDRKKGKKFARYQLGDLLLHLEKKHGEDWGKVYDEAWERIDKKVEGLSKHIKLEEERRSEDAQSKAALTDWLRAKASFVIEGLKEADKDEFCRCELKLQKWYGDLRGKPFAIEAENSILDISGFSKQYNCAFIWQKDGVKKLNLYLIINYFKGGKLRFKKIKPEAFEANRFYTVINKKSGEIVPMEVNFNFDDPNLIILPLAFGKRQGREFIWNDLLSLETGSLQLANGRVIEKTLYNRRTRQDEPALFVALTFERREVLDSSNIKPMNLIGVDRGENIPAVIALTDPEGCPLSRFKDSLGNPTHILRIGESYKEKQRTIQAKKEVEQRRAGGYSRKYASKAKNLADDMVRNTARDLLYYAVTQDAMLIFENLSRGFGRQGKRTFSAERQYTRMEDWLTAKLAYEGLPSKTYLSKTLAQYTSKTCSNCGFTITSADYDRVLEKLKKTATGWMTTINGKELKVEGQITYYNRYKRQNVVKDLSVELDRLSEESVNNDISSWTKGRSGEALSLLKKRFSHRPVQEKFVCLNCGFETHADEQAALNIARSWLFLRSQEYKKYQTNKTTGNTDKRAFVETWQSFYRKKLKEVWKPAV

SEQ ID NO: 38319 - protein, 978 aa, synthetic construct
  REGION 1..978: note = engineered CasX variant
QEIKRINKIRRRLVKDSNTKKAGKTGPMKTLLVRVMTPDLRERLENLRKKPENIPQPISNTSRANLNKLLTDYTEMKKAILHVYWEEFQKDPVGLMSRVAQPASKKIDQNKLKPEMDEKGNLTTAGFACSQCGQPLFVYKLEQVSEKGKAYTNYFGRCNVAEHEKLIKLAQLKPEKDSDEAVTYSLGKFGQRALDFYSIHVTKESTHPVKPLAQIAGNRYASGPVGKALSDACMGTIASFLSKYQDIIIEHQKVVKGNQKRLESLRELAGKENLEYPSVTLPPQPHTKEGVDAYNEVIARVRMWVNLNLWQKLKLSRDDAKPLLRLKGFPSFPLVERQANEVDWWDMVCNVKKLINEKKEDGKVFWQNLAGYKRQEALRPYLSSEEDRKKGKKFARYQLGDLLLHLEKKHGEDWGKVYDEAWERIDKKVEGLSKHIKLEEERRSEDAQSKAALTDWLRAKASFVIEGLKEADKDEFCRCELKLQKWYGDLRGKPFAIEAENSILDISGFSKQYNCAFIWQKDGVKKLNLYLIINYFKGGKLRFKKIKPEAFEANRFYTVINKKSGEIVPMEVNFNFDDPNLIILPLAFGKRQGREFIWNDLLSLETGSLQLANGRVIEKTLYNRRTRQDEPALFVALTFERREVLDSSNIKPMNLIGVDRGENIPAVIALTDPEGCPLSRFKDSLGNPTHILRIGESYKEKQRTIQAKKEVEQRRAGGYSRKYASKAKNLADDMVRNTARDLLYYAVTQDAMLIFENLSRGFGRQGKRTFSAERQYTRMEDWLTAKLAYEGLPSKTYLSKTLAQYTSKTCSNCGFTITSADYDRVLEKLKKTATGWMTTINGKELKVEGQITYYNRYKRQNVVKDLSVELDRLSEESVNNDISSWTKGRSGEALSLLKKRFSHRPVQEKFVCLNCGFETHADEQAALNIARSWLFLRSQEYKKYQTNKTTGNTDKRAFVETWQSFYRKKLKEVWKPAV

SEQ ID NO: 38320 - protein, 977 aa, synthetic construct
  REGION 1..977: note = engineered CasX variant
QEIKRINKIRRRLVKDSNTKKAGKTGPMKTLLVRVMTPDLRERLENLRKKPENIPQPISNTSRANLNKLLTDYTEMKKAILHVYWEEFQKDPVGLMSRVAQPASKKIDQNKLKPEMDEKGNLTTAGFACSQCGQPLFVYKLEQVSEKGKAYTNYFGRCNVAEHEKLILLAQLKPEKDSDEAVTYSLGKFGQRALDFYSIHVTKESTHPVKPLAQIAGNRYASPVGKALSDACMGTIASFLSKYQDIIIEHQKVVKGNQKRLESLRELAGKENLEYPSVTLPPQPHTKEGVDAYNEVIARVRMWVNLNLWQKLKLSRDDAKPLLRLKGFPSFPLVERQANEVDWWDMVCNVKKLINEKKEDGKVFWQNLAGYKRQEALRPYLSSEEDRKKGKKFARYQLGDLLLHLEKKHGEDWGKVYDEAWERIDKKVEGLSKHIKLEEERRSEDAQSKAALTDWLRAKASFVIEGLKEADKDEFCRCELKLQKWYGDLRGKPFAIEAENSILDISGFSKQYNCAFIWQKDGVKKLNLYLIINYFKGGKLRFKKIKPEAFEANRFYTVINKKSGEIVPMEVNFNFDDPNLIILPLAFGKRQGREFIWNDLLSLETGSLQLANGRVIEKTLYNRRTRQDEPALFVALTFERREVLDSSNIKPMNLIGVDRGENIPAVIALTDPEGCPLSRFKDSLGNPTHILRIGESYKEKQRTIQAKKEVEQRRAGGYSRKYASKAKNLADDMVRNTARDLLYYAVTQDAMLIFENLSRGFGRQGKRTFSAERQYTRMEDWLTAKLAYEGLPSKTYLSKTLAQYTSKTCSNCGFTITSADYDRVLEKLKKTATGWMTTINGKELKVEGQITYYNRYKRQNVVKDLSVELDRLSEESVNNDISSWTKGRSGEALSLLKKRFSHRPVQEKFVCLNCGFETHADEQAALNIARSWLFLRSQEYKKYQTNKTTGNTDKRAFVETWQSFYRKKLKEVWKPAV

SEQ ID NO: 38321 - protein, 978 aa, synthetic construct
  REGION 1..978: note = engineered CasX variant
QEIKRINKIRRRLVKDSNTKKAGKTGPMKTLLVRVMTPDLRERLENLRKKPENIPQPISNTSRANLNKLLTDYTEMKKAILHVYWEEFQVDPVGLMSRVAQPASKKIDQNKLKPEMDEKGNLTTAGFACSQCGQPLFVYKLEQVSEKGKAYTNYFGRCNVAEHEKLILLAQLKPEKDSDEAVTYSLGKFGQRALDFYSIHVTKESTHPVKPLAQIAGNRYASYPVGKALSDACMGTIASFLSKYQDIIIEHQKVVKGNQKRLESLRELAGKENLEYPSVTLPPQPHTKEGVDAYNEVIARVRMWVNLNLWQKLKLSRDDAKPLLRLKGFPSFPLVERQANEVDWWDMVCNVKKLINEKKEDGKVFWQNLAGYKRQEALRPYLSSEEDRKKGKKFARYQLGDLLLHLEKKHGEDWGKVYDEAWERIDKKVEGLSKHIKLEEERRSEDAQSKAALTDWLRAKASFVIEGLKEADKDEFCRCELKLQKWYGDLRGKPFAIEAENSILDISGFSKQYNCAFIWQKDGVKKLNLYLIINYFKGGKLRFKKIKPEAFEANRFYTVINKKSGEIVPMEVNFNFDDPNLIILPLAFGKRQGREFIWNDLLSLETGSLKLANGRVIEKTLYNRRTRQDEPALFVALTFERREVLDSSNIKPMNLIGVDRGENIPAVIALTDPEGCPLSRFKDSLGNPTHILRIGESYKEKQRTIQAKKEVEQRRAGGYSRKYASKAKNLADDMVRNTARDLLYYAVTQDAMLIFENLSRGFGRQGKRTFMAERQYTRMEDWLTAKLAYEGLPSKTYLSKTLAQYTSKTCSNCGFTITSADYDRVLEKLKKTATGWMTTINGKELKVEGQITYYNRYKRQNVVKDLSVELDRLSEESVNNDISSWDKGRSGEALSLLKKRFSHRPVQEKFVCLNCGFETHADEQAALNIARSWLFLRSQEYKKYQTNKTTGNTDKRAFVETWQSFYRKKLKEVWKPAV

SEQ ID NO: 38322 - protein, 978 aa, synthetic construct
  REGION 1..978: note = engineered CasX variant
QEIKRINKIRRRLVKDSNTKKAGKTGPMKTLLVRVMTPDLRERLENLRKKPENIPQPISNTSRANLNKLLTDYTEMKKAILHVYWEEFQVDPVGLMSRVAQPASKKIDQNKLKPEMDEKGNLTTAGFACSQCGQPLFVYKLEQVSEKGKAYTNYFGRCNVAEHEKLILLAQLKPEKDSDEAVTYSLGKFGQRALDFYSIHVTKESTHPVKPLAQIAGNRYASHPVGKALSDACMGTIASFLSKYQDIIIEHQKVVKGNQKRLESLRELAGKENLEYPSVTLPPQPHTKEGVDAYNEVIARVRMWVNLNLWQKLKLSRDDAKPLLRLKGFPSFPLVERQANEVDWWDMVCNVKKLINEKKEDGKVFWQNLAGYKRQEALRPYLSSEEDRKKGKKFARYQLGDLLLHLEKKHGEDWGKVYDEAWERIDKKVEGLSKHIKLEEERRSEDAQSKAALTDWLRAKASFVIEGLKEADKDEFCRCELKLQKWYGDLRGKPFAIEAENSILDISGFSKQYNCAFIWQKDGVKKLNLYLIINYFKGGKLRFKKIKPEAFEANRFYTVINKKSGEIVPMEVNFNFDDPNLIILPLAFGKRQGREFIWNDLLSLETGSLKLANGRVIEKTLYNRRTRQDEPALFVALTFERREVLDSSNIKPMNLIGVDRGENIPAVIALTDPEGCPLSRFKDSLGNPTHILRIGESYKEKQRTIQAKKEVEQRRAGGYSRKYASKAKNLADDMVRNTARDLLYYAVTQDAMLIFENLSRGFGRQGKRTFMAERQYTRMEDWLTAKLAYEGLPSKTYLSKTLAQYTSKTCSNCGFTITSADYDRVLEKLKKTATGWMTTINGKELKVEGQITYYNRYKRQNVVKDLSVELDRLSEESVNNDISSWDKGRSGEALSLLKKRFSHRPVQEKFVCLNCGFETHADEQAALNIARSWLFLRSQEYKKYQTNKTTGNTDKRAFVETWQSFYRKKLKEVWKPAV

SEQ ID NO: 38323 - protein, 978 aa, synthetic construct
  REGION 1..978: note = engineered CasX variant
QEIKRINKIRRRLVKDSNTKKAGKTGPMKTLLVRVMTPDLRERLENLRKKPENIPQPISNTSRANLNKLLTDYTEMKKAILHVYWEEFQVDPVGLMSRVAQPASKKIDQNKLKPEMDEKGNLTTAGFACSQCGQPLFVYKLEQVSEKGKAYTNYFGRCNVAEHEKLILLAQLKPEKDSDEAVTYSLGKFGQRALDFYSIHVTKESTHPVKPLAQIAGNRYASSPVGKALSDACMGTIASFLSKYQDIIIEHQKVVKGNQKRLESLRELAGKENLEYPSVTLPPQPHTKEGVDAYNEVIARVRMWVNLNLWQKLKLSRDDAKPLLRLKGFPSFPLVERQANEVDWWDMVCNVKKLINEKKEDGKVFWQNLAGYKRQEALRPYLSSEEDRKKGKKFARYQLGDLLLHLEKKHGEDWGKVYDEAWERIDKKVEGLSKHIKLEEERRSEDAQSKAALTDWLRAKASFVIEGLKEADKDEFCRCELKLQKWYGDLRGKPFAIEAENSILDISGFSKQYNCAFIWQKDGVKKLNLYLIINYFKGGKLRFKKIKPEAFEANRFYTVINKKSGEIVPMEVNFNFDDPNLIILPLAFGKRQGREFIWNDLLSLETGSLKLANGRVIEKTLYNRRTRQDEPALFVALTFERREVLDSSNIKPMNLIGVDRGENIPAVIALTDPEGCPLSRFKDSLGNPTHILRIGESYKEKQRTIQAKKEVEQRRAGGYSRKYASKAKNLADDMVRNTARDLLYYAVTQDAMLIFENLSRGFGRQGKRTFMAERQYTRMEDWLTAKLAYEGLPSKTYLSKTLAQYTSKTCSNCGFTITSADYDRVLEKLKKTATGWMTTINGKELKVEGQITYYNRYKRQNVVKDLSVELDRLSEESVNNDISSWDKGRSGEALSLLKKRFSHRPVQEKFVCLNCGFETHADEQAALNIARSWLFLRSQEYKKYQTNKTTGNTDKRAFVETWQSFYRKKLKEVWKPAV

SEQ ID NO: 38324 - protein, 978 aa, synthetic construct
  REGION 1..978: note = engineered CasX variant
QEIKRINKIRRRLVKDSNTKKAGKTGPMKTLLVRVMTPDLRERLENLRKKPENIPQPISNTSRANLNKLLTDYTEMKKAILHVYWEEFQVDPVGLMSRVAQPASKKIDQNKLKPEMDEKGNLTTAGFACSQCGQPLFVYKLEQVSEKGKAYTNYFGRCNVAEHEKLILLAQLKPEKDSDEAVTYSLGKFGQRALDFYSIHVTKESTHPVKPLAQIAGNRYASTPVGKALSDACMGTIASFLSKYQDIIIEHQKVVKGNQKRLESLRELAGKENLEYPSVTLPPQPHTKEGVDAYNEVIARVRMWVNLNLWQKLKLSRDDAKPLLRLKGFPSFPLVERQANEVDWWDMVCNVKKLINEKKEDGKVFWQNLAGYKRQEALRPYLSSEEDRKKGKKFARYQLGDLLLHLEKKHGEDWGKVYDEAWERIDKKVEGLSKHIKLEEERRSEDAQSKAALTDWLRAKASFVIEGLKEADKDEFCRCELKLQKWYGDLRGKPFAIEAENSILDISGFSKQYNCAFIWQKDGVKKLNLYLIINYFKGGKLRFKKIKPEAFEANRFYTVINKKSGEIVPMEVNFNFDDPNLIILPLAFGKRQGREFIWNDLLSLETGSLKLANGRVIEKTLYNRRTRQDEPALFVALTFERREVLDSSNIKPMNLIGVDRGENIPAVIALTDPEGCPLSRFKDSLGNPTHILRIGESYKEKQRTIQAKKEVEQRRAGGYSRKYASKAKNLADDMVRNTARDLLYYAVTQDAMLIFENLSRGFGRQGKRTFMAERQYTRMEDWLTAKLAYEGLPSKTYLSKTLAQYTSKTCSNCGFTITSADYDRVLEKLKKTATGWMTTINGKELKVEGQITYYNRYKRQNVVKDLSVELDRLSEESVNNDISSWDKGRSGEALSLLKKRFSHRPVQEKFVCLNCGFETHADEQAALNIARSWLFLRSQEYKKYQTNKTTGNTDKRAFVETWQSFYRKKLKEVWKPAV

SEQ ID NO: 38325 - protein, 978 aa, synthetic construct
  REGION 1..978: note = engineered CasX variant
QEIKRINKIRRRLVKDSNTKKAGKTGPMKTLLVRVMTPDLRERLENLRKKPENIPQPISNTSRANLNKLLTDYTEMKKAILHVYWEEFQVDPVGLMSRVAQPASKKIDQNKLKPEMDEKGNLTTAGFACSQCGQPLFVYKLEQVSEKGKAYTNYFGRCNVAEHEKLILLAQLKPEKDSDEAVTYSLGKFGQRALDFYSIHVTKESTHPVKPLAQIAGNRYASAPVGKALSDACMGTIASFLSKYQDIIIEHQKVVKGNQKRLESLRELAGKENLEYPSVTLPPQPHTKEGVDAYNEVIARVRMWVNLNLWQKLKLSRDDAKPLLRLKGFPSFPLVERQANEVDWWDMVCNVKKLINEKKEDGKVFWQNLAGYKRQEALRPYLSSEEDRKKGKKFARYQLGDLLLHLEKKHGEDWGKVYDEAWERIDKKVEGLSKHIKLEEERRSEDAQSKAALTDWLRAKASFVIEGLKEADKDEFCRCELKLQKWYGDLRGKPFAIEAENSILDISGFSKQYNCAFIWQKDGVKKLNLYLIINYFKGGKLRFKKIKPEAFEANRFYTVINKKSGEIVPMEVNFNFDDPNLIILPLAFGKRQGREFIWNDLLSLETGSLKLANGRVIEKTLYNRRTRQDEPALFVALTFERREVLDSSNIKPMNLIGVDRGENIPAVIALTDPEGCPLSRFKDSLGNPTHILRIGESYKEKQRTIQAKKEVEQRRAGGYSRKYASKAKNLADDMVRNTARDLLYYAVTQDAMLIFENLSRGFGRQGKRTFMAERQYTRMEDWLTAKLAYEGLPSKTYLSKTLAQYTSKTCSNCGFTITSADYDRVLEKLKKTATGWMTTINGKELKVEGQITYYNRYKRQNVVKDLSVELDRLSEESVNNDISSWDKGRSGEALSLLKKRFSHRPVQEKFVCLNCGFETHADEQAALNIARSWLFLRSQEYKKYQTNKTTGNTDKRAFVETWQSFYRKKLKEVWKPAV

SEQ ID NO: 38326 - protein, 978 aa, synthetic construct
  REGION 1..978: note = engineered CasX variant
QEIKRINKIRRRLVKDSNTKKAGKTGPMKTLLVRVMTPDLRERLENLRKKPENIPQPISNTSRANLNKLLTDYTEMKKAILHVYWEEFQVDPVGLMSRVAQPASKKIDQNKLKPEMDEKGNLTTAGFACSQCGQPLFVYKLEQVSEKGKAYTNYFGRCNVAEHEKLILLAQLKPEKDSDEAVTYSLGKFGQRALDFYSIHVTKESTHPVKPLAQIAGNRYASVPVGKALSDACMGTIASFLSKYQDIIIEHQKVVKGNQKRLESLRELAGKENLEYPSVTLPPQPHTKEGVDAYNEVIARVRMWVNLNLWQKLKLSRDDAKPLLRLKGFPSFPLVERQANEVDWWDMVCNVKKLINEKKEDGKVFWQNLAGYKRQEALRPYLSSEEDRKKGKKFARYQLGDLLLHLEKKHGEDWGKVYDEAWERIDKKVEGLSKHIKLEEERRSEDAQSKAALTDWLRAKASFVIEGLKEADKDEFCRCELKLQKWYGDLRGKPFAIEAENSILDISGFSKQYNCAFIWQKDGVKKLNLYLIINYFKGGKLRFKKIKPEAFEANRFYTVINKKSGEIVPMEVNFNFDDPNLIILPLAFGKRQGREFIWNDLLSLETGSLKLANGRVIEKTLYNRRTRQDEPALFVALTFERREVLDSSNIKPMNLIGVDRGENIPAVIALTDPEGCPLSRFKDSLGNPTHILRIGESYKEKQRTIQAKKEVEQRRAGGYSRKYASKAKNLADDMVRNTARDLLYYAVTQDAMLIFENLSRGFGRQGKRTFMAERQYTRMEDWLTAKLAYEGLPSKTYLSKTLAQYTSKTCSNCGFTITSADYDRVLEKLKKTATGWMTTINGKELKVEGQITYYNRYKRQNVVKDLSVELDRLSEESVNNDISSWDKGRSGEALSLLKKRFSHRPVQEKFVCLNCGFETHADEQAALNIARSWLFLRSQEYKKYQTNKTTGNTDKRAFVETWQSFYRKKLKEVWKPAV

SEQ ID NO: 38327 - protein, 978 aa, synthetic construct
  REGION 1..978: note = engineered CasX variant
QEIKRINKIRRRLVKDSNTKKAGKTGPMKTLLVRVMTPDLRERLENLRKKPENIPQPISNTSRANLNKLLTDYTEMKKAILHVYWEEFQVDPVGLMSRVAQPASKKIDQNKLKPEMDEKGNLTTAGFACSQCGQPLFVYKLEQVSEKGKAYTNYFGRCNVAEHEKLIKLAQLKPEKDSDEAVTYSLGKFGQRALDFYSIHVTKESTHPVKPLAQIAGNRYASGPVGKALSDACMGTIASFLSKYQDIIIEHQKVVKGNQKRLESLRELAGKENLEYPSVTLPPQPHTKEGVDAYNEVIARVRMWVNLNLWQKLKLSRDDAKPLLRLKGFPSFPLVERQANEVDWWDMVCNVKKLINEKKEDGKVFWQNLAGYKRQEALRPYLSSEEDRKKGKKFARYQLGDLLLHLEKKHGEDWGKVYDEAWERIDKKVEGLSKHIKLEEERRSEDAQSKAALTDWLRAKASFVIEGLKEADKDEFCRCELKLQKWYGDLRGKPFAIEAENSILDISGFSKQYNCAFIWQKDGVKKLNLYLIINYFKGGKLRFKKIKPEAFEANRFYTVINKKSGEIVPMEVNFNFDDPNLIILPLAFGKRQGREFIWNDLLSLETGSLKLANGRVIEKTLYNRRTRQDEPALFVALTFERREVLDSSNIKPMNLIGVDRGENIPAVIALTDPEGCPLSRFKDSLGNPTHILRIGESYKEKQRTIQAKKEVEQRRAGGYSRKYASKAKNLADDMVRNTARDLLYYAVTQDAMLIFENLSRGFGRQGKRTFMAERQYTRMEDWLTAKLAYEGLPSKTYLSKTLAQYTSKTCSNCGFTITSADYDRVLEKLKKTATGWMTTINGKELKVEGQITYYNRYKRQNVVKDLSVELDRLSEESVNNDISSWDKGRSGEALSLLKKRFSHRPVQEKFVCLNCGFETHADEQAALNIARSWLFLRSQEYKKYQTNKTTGNTDKRAFVETWQSFYRKKLKEVWKPAV

SEQ ID NO: 38328 - protein, 977 aa, synthetic construct
  REGION 1..977: note = engineered CasX variant
QEIKRINKIRRRLVKDSNTKKAGKTGPMKTLLVRVMTPDLRERLENLRKKPENIPQPISNTSRANLNKLLTDYTEMKKAILHVYWEEFQVDPVGLMSRVAQPASKKIDQNKLKPEMDEKGNLTTAGFACSQCGQPLFVYKLEQVSEKGKAYTNYFGRCNVAEHEKLILLAQLKPEKDSDEAVTYSLGKFGQRALDFYSIHVTKESTHPVKPLAQIAGNRYASPVGKALSDACMGTIASFLSKYQDIIIEHQKVVKGNQKRLESLRELAGKENLEYPSVTLPPQPHTKEGVDAYNEVIARVRMWVNLNLWQKLKLSRDDAKPLLRLKGFPSFPLVERQANEVDWWDMVCNVKKLINEKKEDGKVFWQNLAGYKRQEALRPYLSSEEDRKKGKKFARYQLGDLLLHLEKKHGEDWGKVYDEAWERIDKKVEGLSKHIKLEEERRSEDAQSKAALTDWLRAKASFVIEGLKEADKDEFCRCELKLQKWYGDLRGKPFAIEAENSILDISGFSKQYNCAFIWQKDGVKKLNLYLIINYFKGGKLRFKKIKPEAFEANRFYTVINKKSGEIVPMEVNFNFDDPNLIILPLAFGKRQGREFIWNDLLSLETGSLKLANGRVIEKTLYNRRTRQDEPALFVALTFERREVLDSSNIKPMNLIGVDRGENIPAVIALTDPEGCPLSRFKDSLGNPTHILRIGESYKEKQRTIQAKKEVEQRRAGGYSRKYASKAKNLADDMVRNTARDLLYYAVTQDAMLIFENLSRGFGRQGKRTFMAERQYTRMEDWLTAKLAYEGLPSKTYLSKTLAQYTSKTCSNCGFTITSADYDRVLEKLKKTATGWMTTINGKELKVEGQITYYNRYKRQNVVKDLSVELDRLSEESVNNDISSWDKGRSGEALSLLKKRFSHRPVQEKFVCLNCGFETHADEQAALNIARSWLFLRSQEYKKYQTNKTTGNTDKRAFVETWQSFYRKKLKEVWKPAV

SEQ ID NO: 38329 - protein, 978 aa, synthetic construct
  REGION 1..978: note = engineered CasX variant
QEIKRLNKIRRRLVKDSNTKKAGKTGPMKTLLVRVMTPDLRERLENLRKKPENIPQPISNTSRANLNKLLTDYTEMKKAILHVYWEEFQKDPVGLMSRVAQPASKKIDQNKLKPEMDEKGNLTTAGFACSQCGQPLFVYKLEQVSEKGKAYTNYFGRCNVAEHEKLILLAQLKPEKDSDEAVTYSLGKFGQRALDFYSIHVTKESTHPVKPLAQIAGNRYASYPVGKALSDACMGTIASFLSKYQDIIIEHQKVVKGNQKRLESLRELAGKENLEYPSVTLPPQPHTKEGVDAYNEVIARVRMWVNLNLWQKLKLSRDDAKPLLRLKGFPSFPLVERQANEVDWWDMVCNVKKLINEKKEDGKVFWQNLAGYKRQEALRPYLSSEEDRKKGKKFARYQLGDLLLHLEKKHGEDWGKVYDEAWERIDKKVEGLSKHIKLEEERRSEDAQSKAALTDWLRAKASFVIEGLKEADKDEFCRCELKLQKWYGDLRGKPFAIEAENSILDISGFSKQYNCAFIWQKDGVKKLNLYLIINYFKGGKLRFKKIKPEAFEANRFYTVINKKSGEIVPMEVNFNFDDPNLIILPLAFGKRQGREFIWNDLLSLETGSLKLANGRVIEKTLYNRRTRQDEPALFVALTFERREVLDSSNIKPMNLIGVDRGENIPAVIALTDPEGCPLSRFKDSLGNPTHILRIGESYKEKQRTIQAKKEVEQRRAGGYSRKYASKAKNLADDMVRNTARDLLYYAVTQDAMLIFENLSRGFGRQGKRTFMAERQYTRMEDWLTAKLAYEGLPSKTYLSKTLAQYTSKTCSNCGFTITSADYDRVLEKLKKTATGWMTTINGKELKVEGQITYYNRYKRQNVVKDLSVELDRLSEESVNNDISSWDKGRSGEALSLLKKRFSHRPVQEKFVCLNCGFETHADEQAALNIARSWLFLRSQEYKKYQTNKTTGNTDKRAFVETWQSFYRKKLKEVWKPAV

SEQ ID NO: 38330 - protein, 978 aa, synthetic construct
  REGION 1..978: note = engineered CasX variant
QEIKRLNKIRRRLVKDSNTKKAGKTGPMKTLLVRVMTPDLRERLENLRKKPENIPQPISNTSRANLNKLLTDYTEMKKAILHVYWEEFQKDPVGLMSRVAQPASKKIDQNKLKPEMDEKGNLTTAGFACSQCGQPLFVYKLEQVSEKGKAYTNYFGRCNVAEHEKLILLAQLKPEKDSDEAVTYSLGKFGQRALDFYSIHVTKESTHPVKPLAQIAGNRYASHPVGKALSDACMGTIASFLSKYQDIIIEHQKVVKGNQKRLESLRELAGKENLEYPSVTLPPQPHTKEGVDAYNEVIARVRMWVNLNLWQKLKLSRDDAKPLLRLKGFPSFPLVERQANEVDWWDMVCNVKKLINEKKEDGKVFWQNLAGYKRQEALRPYLSSEEDRKKGKKFARYQLGDLLLHLEKKHGEDWGKVYDEAWERIDKKVEGLSKHIKLEEERRSEDAQSKAALTDWLRAKASFVIEGLKEADKDEFCRCELKLQKWYGDLRGKPFAIEAENSILDISGFSKQYNCAFIWQKDGVKKLNLYLIINYFKGGKLRFKKIKPEAFEANRFYTVINKKSGEIVPMEVNFNFDDPNLIILPLAFGKRQGREFIWNDLLSLETGSLKLANGRVIEKTLYNRRTRQDEPALFVALTFERREVLDSSNIKPMNLIGVDRGENIPAVIALTDPEGCPLSRFKDSLGNPTHILRIGESYKEKQRTIQAKKEVEQRRAGGYSRKYASKAKNLADDMVRNTARDLLYYAVTQDAMLIFENLSRGFGRQGKRTFMAERQYTRMEDWLTAKLAYEGLPSKTYLSKTLAQYTSKTCSNCGFTITSADYDRVLEKLKKTATGWMTTINGKELKVEGQITYYNRYKRQNVVKDLSVELDRLSEESVNNDISSWDKGRSGEALSLLKKRFSHRPVQEKFVCLNCGFETHADEQAALNIARSWLFLRSQEYKKYQTNKTTGNTDKRAFVETWQSFYRKKLKEVWKPAV

SEQ ID NO: 38331 - protein, 978 aa, synthetic construct
  REGION 1..978: note = engineered CasX variant
QEIKRLNKIRRRLVKDSNTKKAGKTGPMKTLLVRVMTPDLRERLENLRKKPENIPQPISNTSRANLNKLLTDYTEMKKAILHVYWEEFQKDPVGLMSRVAQPASKKIDQNKLKPEMDEKGNLTTAGFACSQCGQPLFVYKLEQVSEKGKAYTNYFGRCNVAEHEKLILLAQLKPEKDSDEAVTYSLGKFGQRALDFYSIHVTKESTHPVKPLAQIAGNRYASSPVGKALSDACMGTIASFLSKYQDIIIEHQKVVKGNQKRLESLRELAGKENLEYPSVTLPPQPHTKEGVDAYNEVIARVRMWVNLNLWQKLKLSRDDAKPLLRLKGFPSFPLVERQANEVDWWDMVCNVKKLINEKKEDGKVFWQNLAGYKRQEALRPYLSSEEDRKKGKKFARYQLGDLLLHLEKKHGEDWGKVYDEAWERIDKKVEGLSKHIKLEEERRSEDAQSKAALTDWLRAKASFVIEGLKEADKDEFCRCELKLQKWYGDLRGKPFAIEAENSILDISGFSKQYNCAFIWQKDGVKKLNLYLIINYFKGGKLRFKKIKPEAFEANRFYTVINKKSGEIVPMEVNFNFDDPNLIILPLAFGKRQGREFIWNDLLSLETGSLKLANGRVIEKTLYNRRTRQDEPALFVALTFERREVLDSSNIKPMNLIGVDRGENIPAVIALTDPEGCPLSRFKDSLGNPTHILRIGESYKEKQRTIQAKKEVEQRRAGGYSRKYASKAKNLADDMVRNTARDLLYYAVTQDAMLIFENLSRGFGRQGKRTFMAERQYTRMEDWLTAKLAYEGLPSKTYLSKTLAQYTSKTCSNCGFTITSADYDRVLEKLKKTATGWMTTINGKELKVEGQITYYNRYKRQNVVKDLSVELDRLSEESVNNDISSWDKGRSGEALSLLKKRFSHRPVQEKFVCLNCGFETHADEQAALNIARSWLFLRSQEYKKYQTNKTTGNTDKRAFVETWQSFYRKKLKEVWKPAV

SEQ ID NO: 38332 - protein, 978 aa, synthetic construct
  REGION 1..978: note = engineered CasX variant
QEIKRLNKIRRRLVKDSNTKKAGKTGPMKTLLVRVMTPDLRERLENLRKKPENIPQPISNTSRANLNKLLTDYTEMKKAILHVYWEEFQKDPVGLMSRVAQPASKKIDQNKLKPEMDEKGNLTTAGFACSQCGQPLFVYKLEQVSEKGKAYTNYFGRCNVAEHEKLILLAQLKPEKDSDEAVTYSLGKFGQRALDFYSIHVTKESTHPVKPLAQIAGNRYASTPVGKALSDACMGTIASFLSKYQDIIIEHQKVVKGNQKRLESLRELAGKENLEYPSVTLPPQPHTKEGVDAYNEVIARVRMWVNLNLWQKLKLSRDDAKPLLRLKGFPSFPLVERQANEVDWWDMVCNVKKLINEKKEDGKVFWQNLAGYKRQEALRPYLSSEEDRKKGKKFARYQLGDLLLHLEKKHGEDWGKVYDEAWERIDKKVEGLSKHIKLEEERRSEDAQSKAALTDWLRAKASFVIEGLKEADKDEFCRCELKLQKWYGDLRGKPFAIEAENSILDISGFSKQYNCAFIWQKDGVKKLNLYLIINYFKGGKLRFKKIKPEAFEANRFYTVINKKSGEIVPMEVNFNFDDPNLIILPLAFGKRQGREFIWNDLLSLETGSLKLANGRVIEKTLYNRRTRQDEPALFVALTFERREVLDSSNIKPMNLIGVDRGENIPAVIALTDPEGCPLSRFKDSLGNPTHILRIGESYKEKQRTIQAKKEVEQRRAGGYSRKYASKAKNLADDMVRNTARDLLYYAVTQDAMLIFENLSRGFGRQGKRTFMAERQYTRMEDWLTAKLAYEGLPSKTYLSKTLAQYTSKTCSNCGFTITSADYDRVLEKLKKTATGWMTTINGKELKVEGQITYYNRYKRQNVVKDLSVELDRLSEESVNNDISSWDKGRSGEALSLLKKRFSHRPVQEKFVCLNCGFETHADEQAALNIARSWLFLRSQEYKKYQTNKTTGNTDKRAFVETWQSFYRKKLKEVWKPAV

SEQ ID NO: 38333 - protein, 978 aa, synthetic construct
  REGION 1..978: note = engineered CasX variant
QEIKRLNKIRRRLVKDSNTKKAGKTGPMKTLLVRVMTPDLRERLENLRKKPENIPQPISNTSRANLNKLLTDYTEMKKAILHVYWEEFQKDPVGLMSRVAQPASKKIDQNKLKPEMDEKGNLTTAGFACSQCGQPLFVYKLEQVSEKGKAYTNYFGRCNVAEHEKLILLAQLKPEKDSDEAVTYSLGKFGQRALDFYSIHVTKESTHPVKPLAQIAGNRYASAPVGKALSDACMGTIASFLSKYQDIIIEHQKVVKGNQKRLESLRELAGKENLEYPSVTLPPQPHTKEGVDAYNEVIARVRMWVNLNLWQKLKLSRDDAKPLLRLKGFPSFPLVERQANEVDWWDMVCNVKKLINEKKEDGKVFWQNLAGYKRQEALRPYLSSEEDRKKGKKFARYQLGDLLLHLEKKHGEDWGKVYDEAWERIDKKVEGLSKHIKLEEERRSEDAQSKAALTDWLRAKASFVIEGLKEADKDEFCRCELKLQKWYGDLRGKPFAIEAENSILDISGFSKQYNCAFIWQKDGVKKLNLYLIINYFKGGKLRFKKIKPEAFEANRFYTVINKKSGEIVPMEVNFNFDDPNLIILPLAFGKRQGREFIWNDLLSLETGSLKLANGRVIEKTLYNRRTRQDEPALFVALTFERREVLDSSNIKPMNLIGVDRGENIPAVIALTDPEGCPLSRFKDSLGNPTHILRIGESYKEKQRTIQAKKEVEQRRAGGYSRKYASKAKNLADDMVRNTARDLLYYAVTQDAMLIFENLSRGFGRQGKRTFMAERQYTRMEDWLTAKLAYEGLPSKTYLSKTLAQYTSKTCSNCGFTITSADYDRVLEKLKKTATGWMTTINGKELKVEGQITYYNRYKRQNVVKDLSVELDRLSEESVNNDISSWDKGRSGEALSLLKKRFSHRPVQEKFVCLNCGFETHADEQAALNIARSWLFLRSQEYKKYQTNKTTGNTDKRAFVETWQSFYRKKLKEVWKPAV

SEQ ID NO: 38334 - protein, 978 aa, synthetic construct
  REGION 1..978: note = engineered CasX variant
QEIKRLNKIRRRLVKDSNTKKAGKTGPMKTLLVRVMTPDLRERLENLRKKPENIPQPISNTSRANLNKLLTDYTEMKKAILHVYWEEFQKDPVGLMSRVAQPASKKIDQNKLKPEMDEKGNLTTAGFACSQCGQPLFVYKLEQVSEKGKAYTNYFGRCNVAEHEKLILLAQLKPEKDSDEAVTYSLGKFGQRALDFYSIHVTKESTHPVKPLAQIAGNRYASVPVGKALSDACMGTIASFLSKYQDIIIEHQKVVKGNQKRLESLRELAGKENLEYPSVTLPPQPHTKEGVDAYNEVIARVRMWVNLNLWQKLKLSRDDAKPLLRLKGFPSFPLVERQANEVDWWDMVCNVKKLINEKKEDGKVFWQNLAGYKRQEALRPYLSSEEDRKKGKKFARYQLGDLLLHLEKKHGEDWGKVYDEAWERIDKKVEGLSKHIKLEEERRSEDAQSKAALTDWLRAKASFVIEGLKEADKDEFCRCELKLQKWYGDLRGKPFAIEAENSILDISGFSKQYNCAFIWQKDGVKKLNLYLIINYFKGGKLRFKKIKPEAFEANRFYTVINKKSGEIVPMEVNFNFDDPNLIILPLAFGKRQGREFIWNDLLSLETGSLKLANGRVIEKTLYNRRTRQDEPALFVALTFERREVLDSSNIKPMNLIGVDRGENIPAVIALTDPEGCPLSRFKDSLGNPTHILRIGESYKEKQRTIQAKKEVEQRRAGGYSRKYASKAKNLADDMVRNTARDLLYYAVTQDAMLIFENLSRGFGRQGKRTFMAERQYTRMEDWLTAKLAYEGLPSKTYLSKTLAQYTSKTCSNCGFTITSADYDRVLEKLKKTATGWMTTINGKELKVEGQITYYNRYKRQNVVKDLSVELDRLSEESVNNDISSWDKGRSGEALSLLKKRFSHRPVQEKFVCLNCGFETHADEQAALNIARSWLFLRSQEYKKYQTNKTTGNTDKRAFVETWQSFYRKKLKEVWKPAV

SEQ ID NO: 38335 - protein, 978 aa, synthetic construct
  REGION 1..978: note = engineered CasX variant
QEIKRLNKIRRRLVKDSNTKKAGKTGPMKTLLVRVMTPDLRERLENLRKKPENIPQPISNTSRANLNKLLTDYTEMKKAILHVYWEEFQKDPVGLMSRVAQPASKKIDQNKLKPEMDEKGNLTTAGFACSQCGQPLFVYKLEQVSEKGKAYTNYFGRCNVAEHEKLIKLAQLKPEKDSDEAVTYSLGKFGQRALDFYSIHVTKESTHPVKPLAQIAGNRYASGPVGKALSDACMGTIASFLSKYQDIIIEHQKVVKGNQKRLESLRELAGKENLEYPSVTLPPQPHTKEGVDAYNEVIARVRMWVNLNLWQKLKLSRDDAKPLLRLKGFPSFPLVERQANEVDWWDMVCNVKKLINEKKEDGKVFWQNLAGYKRQEALRPYLSSEEDRKKGKKFARYQLGDLLLHLEKKHGEDWGKVYDEAWERIDKKVEGLSKHIKLEEERRSEDAQSKAALTDWLRAKASFVIEGLKEADKDEFCRCELKLQKWYGDLRGKPFAIEAENSILDISGFSKQYNCAFIWQKDGVKKLNLYLIINYFKGGKLRFKKIKPEAFEANRFYTVINKKSGEIVPMEVNFNFDDPNLIILPLAFGKRQGREFIWNDLLSLETGSLKLANGRVIEKTLYNRRTRQDEPALFVALTFERREVLDSSNIKPMNLIGVDRGENIPAVIALTDPEGCPLSRFKDSLGNPTHILRIGESYKEKQRTIQAKKEVEQRRAGGYSRKYASKAKNLADDMVRNTARDLLYYAVTQDAMLIFENLSRGFGRQGKRTFMAERQYTRMEDWLTAKLAYEGLPSKTYLSKTLAQYTSKTCSNCGFTITSADYDRVLEKLKKTATGWMTTINGKELKVEGQITYYNRYKRQNVVKDLSVELDRLSEESVNNDISSWDKGRSGEALSLLKKRFSHRPVQEKFVCLNCGFETHADEQAALNIARSWLFLRSQEYKKYQTNKTTGNTDKRAFVETWQSFYRKKLKEVWKPAV

SEQ ID NO: 38336 - protein, 977 aa, synthetic construct
  REGION 1..977: note = engineered CasX variant
QEIKRLNKIRRRLVKDSNTKKAGKTGPMKTLLVRVMTPDLRERLENLRKKPENIPQPISNTSRANLNKLLTDYTEMKKAILHVYWEEFQKDPVGLMSRVAQPASKKIDQNKLKPEMDEKGNLTTAGFACSQCGQPLFVYKLEQVSEKGKAYTNYFGRCNVAEHEKLILLAQLKPEKDSDEAVTYSLGKFGQRALDFYSIHVTKESTHPVKPLAQIAGNRYASPVGKALSDACMGTIASFLSKYQDIIIEHQKVVKGNQKRLESLRELAGKENLEYPSVTLPPQPHTKEGVDAYNEVIARVRMWVNLNLWQKLKLSRDDAKPLLRLKGFPSFPLVERQANEVDWWDMVCNVKKLINEKKEDGKVFWQNLAGYKRQEALRPYLSSEEDRKKGKKFARYQLGDLLLHLEKKHGEDWGKVYDEAWERIDKKVEGLSKHIKLEEERRSEDAQSKAALTDWLRAKASFVIEGLKEADKDEFCRCELKLQKWYGDLRGKPFAIEAENSILDISGFSKQYNCAFIWQKDGVKKLNLYLIINYFKGGKLRFKKIKPEAFEANRFYTVINKKSGEIVPMEVNFNFDDPNLIILPLAFGKRQGREFIWNDLLSLETGSLKLANGRVIEKTLYNRRTRQDEPALFVALTFERREVLDSSNIKPMNLIGVDRGENIPAVIALTDPEGCPLSRFKDSLGNPTHILRIGESYKEKQRTIQAKKEVEQRRAGGYSRKYASKAKNLADDMVRNTARDLLYYAVTQDAMLIFENLSRGFGRQGKRTFMAERQYTRMEDWLTAKLAYEGLPSKTYLSKTLAQYTSKTCSNCGFTITSADYDRVLEKLKKTATGWMTTINGKELKVEGQITYYNRYKRQNVVKDLSVELDRLSEESVNNDISSWDKGRSGEALSLLKKRFSHRPVQEKFVCLNCGFETHADEQAALNIARSWLFLRSQEYKKYQTNKTTGNTDKRAFVETWQSFYRKKLKEVWKPAV

SEQ ID NO: 38337 - protein, 978 aa, synthetic construct
  REGION 1..978: note = engineered CasX variant
QEIKRINKIRRRLVKDSNTKKAGKTGPMKTLLVRVMTPDLRERLENLRKKPENIPQPISNTSRANLNKLLTDYTEMKKAILHVYWEEFQKDPVGLMSRVAQPASKKIDQNKLKPEMDEKGNLTTAGFACSQCGQPLFVYKLEQVSEKGKAYTNYVGRCNVAEHEKLILLAQLKPEKDSDEAVTYSLGKFGQRALDFYSIHVTKESTHPVKPLAQIAGNRYASYPVGKALSDACMGTIASFLSKYQDIIIEHQKVVKGNQKRLESLRELAGKENLEYPSVTLPPQPHTKEGVDAYNEVIARVRMWVNLNLWQKLKLSRDDAKPLLRLKGFPSFPLVERQANEVDWWDMVCNVKKLINEKKEDGKVFWQNLAGYKRQEALRPYLSSEEDRKKGKKFARYQLGDLLLHLEKKHGEDWGKVYDEAWERIDKKVEGLSKHIKLEEERRSEDAQSKAALTDWLRAKASFVIEGLKEADKDEFCRCELKLQKWYGDLRGKPFAIEAENSILDISGFSKQYNCAFIWQKDGVKKLNLYLIINYFKGGKLRFKKIKPEAFEANRFYTVINKKSGEIVPMEVNFNFDDPNLIILPLAFGKRQGREFIWNDLLSLETGSLKLANGRVIEKTLYNRRTRQDEPALFVALTFERREVLDSSNIKPMNLIGVDRGENIPAVIALTDPEGCPLSRFKDSLGNPTHILRIGESYKEKQRTIQAKKEVEQRRAGGYSRKYASKAKNLADDMVRNTARDLLYYAVTQDAMLIFENLSRGFGRQGKRTFMAERQYTRMEDWLTAKLAYEGLPSKTYLSKTLAQYTSKTCSNCGFTITSADYDRVLEKLKKTATGWMTTINGKELKVEGQITYYNRYKRQNVVKDLSVELDRLSEESVNNDISSWDKGRSGEALSLLKKRFSHRPVQEKFVCLNCGFETHADEQAALNIARSWLFLRSQEYKKYQTNKTTGNTDKRAFVETWQSFYRKKLKEVWKPAV

SEQ ID NO: 38338 - protein, 978 aa, synthetic construct
  REGION 1..978: note = engineered CasX variant
QEIKRINKIRRRLVKDSNTKKAGKTGPMKTLLVRVMTPDLRERLENLRKKPENIPQPISNTSRANLNKLLTDYTEMKKAILHVYWEEFQKDPVGLMSRVAQPASKKIDQNKLKPEMDEKGNLTTAGFACSQCGQPLFVYKLEQVSEKGKAYTNYVGRCNVAEHEKLILLAQLKPEKDSDEAVTYSLGKFGQRALDFYSIHVTKESTHPVKPLAQIAGNRYASHPVGKALSDACMGTIASFLSKYQDIIIEHQKVVKGNQKRLESLRELAGKENLEYPSVTLPPQPHTKEGVDAYNEVIARVRMWVNLNLWQKLKLSRDDAKPLLRLKGFPSFPLVERQANEVDWWDMVCNVKKLINEKKEDGKVFWQNLAGYKRQEALRPYLSSEEDRKKGKKFARYQLGDLLLHLEKKHGEDWGKVYDEAWERIDKKVEGLSKHIKLEEERRSEDAQSKAALTDWLRAKASFVIEGLKEADKDEFCRCELKLQKWYGDLRGKPFAIEAENSILDISGFSKQYNCAFIWQKDGVKKLNLYLIINYFKGGKLRFKKIKPEAFEANRFYTVINKKSGEIVPMEVNFNFDDPNLIILPLAFGKRQGREFIWNDLLSLETGSLKLANGRVIEKTLYNRRTRQDEPALFVALTFERREVLDSSNIKPMNLIGVDRGENIPAVIALTDPEGCPLSRFKDSLGNPTHILRIGESYKEKQRTIQAKKEVEQRRAGGYSRKYASKAKNLADDMVRNTARDLLYYAVTQDAMLIFENLSRGFGRQGKRTFMAERQYTRMEDWLTAKLAYEGLPSKTYLSKTLAQYTSKTCSNCGFTITSADYDRVLEKLKKTATGWMTTINGKELKVEGQITYYNRYKRQNVVKDLSVELDRLSEESVNNDISSWDKGRSGEALSLLKKRFSHRPVQEKFVCLNCGFETHADEQAALNIARSWLFLRSQEYKKYQTNKTTGNTDKRAFVETWQSFYRKKLKEVWKPAV

SEQ ID NO: 38339 - protein, 978 aa, synthetic construct
  REGION 1..978: note = engineered CasX variant
QEIKRINKIRRRLVKDSNTKKAGKTGPMKTLLVRVMTPDLRERLENLRKKPENIPQPISNTSRANLNKLLTDYTEMKKAILHVYWEEFQKDPVGLMSRVAQPASKKIDQNKLKPEMDEKGNLTTAGFACSQCGQPLFVYKLEQVSEKGKAYTNYVGRCNVAEHEKLILLAQLKPEKDSDEAVTYSLGKFGQRALDFYSIHVTKESTHPVKPLAQIAGNRYASSPVGKALSDACMGTIASFLSKYQDIIIEHQKVVKGNQKRLESLRELAGKENLEYPSVTLPPQPHTKEGVDAYNEVIARVRMWVNLNLWQKLKLSRDDAKPLLRLKGFPSFPLVERQANEVDWWDMVCNVKKLINEKKEDGKVFWQNLAGYKRQEALRPYLSSEEDRKKGKKFARYQLGDLLLHLEKKHGEDWGKVYDEAWERIDKKVEGLSKHIKLEEERRSEDAQSKAALTDWLRAKASFVIEGLKEADKDEFCRCELKLQKWYGDLRGKPFAIEAENSILDISGFSKQYNCAFIWQKDGVKKLNLYLIINYFKGGKLRFKKIKPEAFEANRFYTVINKKSGEIVPMEVNFNFDDPNLIILPLAFGKRQGREFIWNDLLSLETGSLKLANGRVIEKTLYNRRTRQDEPALFVALTFERREVLDSSNIKPMNLIGVDRGENIPAVIALTDPEGCPLSRFKDSLGNPTHILRIGESYKEKQRTIQAKKEVEQRRAGGYSRKYASKAKNLADDMVRNTARDLLYYAVTQDAMLIFENLSRGFGRQGKRTFMAERQYTRMEDWLTAKLAYEGLPSKTYLSKTLAQYTSKTCSNCGFTITSADYDRVLEKLKKTATGWMTTINGKELKVEGQITYYNRYKRQNVVKDLSVELDRLSEESVNNDISSWDKGRSGEALSLLKKRFSHRPVQEKFVCLNCGFETHADEQAALNIARSWLFLRSQEYKKYQTNKTTGNTDKRAFVETWQSFYRKKLKEVWKPAV

SEQ ID NO: 38340 - protein, 978 aa, synthetic construct
  REGION 1..978: note = engineered CasX variant
QEIKRINKIRRRLVKDSNTKKAGKTGPMKTLLVRVMTPDLRERLENLRKKPENIPQPISNTSRANLNKLLTDYTEMKKAILHVYWEEFQKDPVGLMSRVAQPASKKIDQNKLKPEMDEKGNLTTAGFACSQCGQPLFVYKLEQVSEKGKAYTNYVGRCNVAEHEKLILLAQLKPEKDSDEAVTYSLGKFGQRALDFYSIHVTKESTHPVKPLAQIAGNRYASTPVGKALSDACMGTIASFLSKYQDIIIEHQKVVKGNQKRLESLRELAGKENLEYPSVTLPPQPHTKEGVDAYNEVIARVRMWVNLNLWQKLKLSRDDAKPLLRLKGFPSFPLVERQANEVDWWDMVCNVKKLINEKKEDGKVFWQNLAGYKRQEALRPYLSSEEDRKKGKKFARYQLGDLLLHLEKKHGEDWGKVYDEAWERIDKKVEGLSKHIKLEEERRSEDAQSKAALTDWLRAKASFVIEGLKEADKDEFCRCELKLQKWYGDLRGKPFAIEAENSILDISGFSKQYNCAFIWQKDGVKKLNLYLIINYFKGGKLRFKKIKPEAFEANRFYTVINKKSGEIVPMEVNFNFDDPNLIILPLAFGKRQGREFIWNDLLSLETGSLKLANGRVIEKTLYNRRTRQDEPALFVALTFERREVLDSSNIKPMNLIGVDRGENIPAVIALTDPEGCPLSRFKDSLGNPTHILRIGESYKEKQRTIQAKKEVEQRRAGGYSRKYASKAKNLADDMVRNTARDLLYYAVTQDAMLIFENLSRGFGRQGKRTFMAERQYTRMEDWLTAKLAYEGLPSKTYLSKTLAQYTSKTCSNCGFTITSADYDRVLEKLKKTATGWMTTINGKELKVEGQITYYNRYKRQNVVKDLSVELDRLSEESVNNDISSWDKGRSGEALSLLKKRFSHRPVQEKFVCLNCGFETHADEQAALNIARSWLFLRSQEYKKYQTNKTTGNTDKRAFVETWQSFYRKKLKEVWKPAV

SEQ ID NO: 38341 - protein, 978 aa, synthetic construct
  REGION 1..978: note = engineered CasX variant
QEIKRINKIRRRLVKDSNTKKAGKTGPMKTLLVRVMTPDLRERLENLRKKPENIPQPISNTSRANLNKLLTDYTEMKKAILHVYWEEFQKDPVGLMSRVAQPASKKIDQNKLKPEMDEKGNLTTAGFACSQCGQPLFVYKLEQVSEKGKAYTNYVGRCNVAEHEKLILLAQLKPEKDSDEAVTYSLGKFGQRALDFYSIHVTKESTHPVKPLAQIAGNRYASAPVGKALSDACMGTIASFLSKYQDIIIEHQKVVKGNQKRLESLRELAGKENLEYPSVTLPPQPHTKEGVDAYNEVIARVRMWVNLNLWQKLKLSRDDAKPLLRLKGFPSFPLVERQANEVDWWDMVCNVKKLINEKKEDGKVFWQNLAGYKRQEALRPYLSSEEDRKKGKKFARYQLGDLLLHLEKKHGEDWGKVYDEAWERIDKKVEGLSKHIKLEEERRSEDAQSKAALTDWLRAKASFVIEGLKEADKDEFCRCELKLQKWYGDLRGKPFAIEAENSILDISGFSKQYNCAFIWQKDGVKKLNLYLIINYFKGGKLRFKKIKPEAFEANRFYTVINKKSGEIVPMEVNFNFDDPNLIILPLAFGKRQGREFIWNDLLSLETGSLKLANGRVIEKTLYNRRTRQDEPALFVALTFERREVLDSSNIKPMNLIGVDRGENIPAVIALTDPEGCPLSRFKDSLGNPTHILRIGESYKEKQRTIQAKKEVEQRRAGGYSRKYASKAKNLADDMVRNTARDLLYYAVTQDAMLIFENLSRGFGRQGKRTFMAERQYTRMEDWLTAKLAYEGLPSKTYLSKTLAQYTSKTCSNCGFTITSADYDRVLEKLKKTATGWMTTINGKELKVEGQITYYNRYKRQNVVKDLSVELDRLSEESVNNDISSWDKGRSGEALSLLKKRFSHRPVQEKFVCLNCGFETHADEQAALNIARSWLFLRSQEYKKYQTNKTTGNTDKRAFVETWQSFYRKKLKEVWKPAV

SEQ ID NO: 38342 - protein, 978 aa, synthetic construct
  REGION 1..978: note = engineered CasX variant
QEIKRINKIRRRLVKDSNTKKAGKTGPMKTLLVRVMTPDLRERLENLRKKPENIPQPISNTSRANLNKLLTDYTEMKKAILHVYWEEFQKDPVGLMSRVAQPASKKIDQNKLKPEMDEKGNLTTAGFACSQCGQPLFVYKLEQVSEKGKAYTNYVGRCNVAEHEKLILLAQLKPEKDSDEAVTYSLGKFGQRALDFYSIHVTKESTHPVKPLAQIAGNRYASVPVGKALSDACMGTIASFLSKYQDIIIEHQKVVKGNQKRLESLRELAGKENLEYPSVTLPPQPHTKEGVDAYNEVIARVRMWVNLNLWQKLKLSRDDAKPLLRLKGFPSFPLVERQANEVDWWDMVCNVKKLINEKKEDGKVFWQNLAGYKRQEALRPYLSSEEDRKKGKKFARYQLGDLLLHLEKKHGEDWGKVYDEAWERIDKKVEGLSKHIKLEEERRSEDAQSKAALTDWLRAKASFVIEGLKEADKDEFCRCELKLQKWYGDLRGKPFAIEAENSILDISGFSKQYNCAFIWQKDGVKKLNLYLIINYFKGGKLRFKKIKPEAFEANRFYTVINKKSGEIVPMEVNFNFDDPNLIILPLAFGKRQGREFIWNDLLSLETGSLKLANGRVIEKTLYNRRTRQDEPALFVALTFERREVLDSSNIKPMNLIGVDRGENIPAVIALTDPEGCPLSRFKDSLGNPTHILRIGESYKEKQRTIQAKKEVEQRRAGGYSRKYASKAKNLADDMVRNTARDLLYYAVTQDAMLIFENLSRGFGRQGKRTFMAERQYTRMEDWLTAKLAYEGLPSKTYLSKTLAQYTSKTCSNCGFTITSADYDRVLEKLKKTATGWMTTINGKELKVEGQITYYNRYKRQNVVKDLSVELDRLSEESVNNDISSWDKGRSGEALSLLKKRFSHRPVQEKFVCLNCGFETHADEQAALNIARSWLFLRSQEYKKYQTNKTTGNTDKRAFVETWQSFYRKKLKEVWKPAV

SEQ ID NO: 38343 - protein, 978 aa, synthetic construct
  REGION 1..978: note = engineered CasX variant
QEIKRINKIRRRLVKDSNTKKAGKTGPMKTLLVRVMTPDLRERLENLRKKPENIPQPISNTSRANLNKLLTDYTEMKKAILHVYWEEFQKDPVGLMSRVAQPASKKIDQNKLKPEMDEKGNLTTAGFACSQCGQPLFVYKLEQVSEKGKAYTNYVGRCNVAEHEKLIKLAQLKPEKDSDEAVTYSLGKFGQRALDFYSIHVTKESTHPVKPLAQIAGNRYASGPVGKALSDACMGTIASFLSKYQDIIIEHQKVVKGNQKRLESLRELAGKENLEYPSVTLPPQPHTKEGVDAYNEVIARVRMWVNLNLWQKLKLSRDDAKPLLRLKGFPSFPLVERQANEVDWWDMVCNVKKLINEKKEDGKVFWQNLAGYKRQEALRPYLSSEEDRKKGKKFARYQLGDLLLHLEKKHGEDWGKVYDEAWERIDKKVEGLSKHIKLEEERRSEDAQSKAALTDWLRAKASFVIEGLKEADKDEFCRCELKLQKWYGDLRGKPFAIEAENSILDISGFSKQYNCAFIWQKDGVKKLNLYLIINYFKGGKLRFKKIKPEAFEANRFYTVINKKSGEIVPMEVNFNFDDPNLIILPLAFGKRQGREFIWNDLLSLETGSLKLANGRVIEKTLYNRRTRQDEPALFVALTFERREVLDSSNIKPMNLIGVDRGENIPAVIALTDPEGCPLSRFKDSLGNPTHILRIGESYKEKQRTIQAKKEVEQRRAGGYSRKYASKAKNLADDMVRNTARDLLYYAVTQDAMLIFENLSRGFGRQGKRTFMAERQYTRMEDWLTAKLAYEGLPSKTYLSKTLAQYTSKTCSNCGFTITSADYDRVLEKLKKTATGWMTTINGKELKVEGQITYYNRYKRQNVVKDLSVELDRLSEESVNNDISSWDKGRSGEALSLLKKRFSHRPVQEKFVCLNCGFETHADEQAALNIARSWLFLRSQEYKKYQTNKTTGNTDKRAFVETWQSFYRKKLKEVWKPAV

SEQ ID NO: 38344 - protein, 977 aa, synthetic construct
  REGION 1..977: note = engineered CasX variant
QEIKRINKIRRRLVKDSNTKKAGKTGPMKTLLVRVMTPDLRERLENLRKKPENIPQPISNTSRANLNKLLTDYTEMKKAILHVYWEEFQKDPVGLMSRVAQPASKKIDQNKLKPEMDEKGNLTTAGFACSQCGQPLFVYKLEQVSEKGKAYTNYVGRCNVAEHEKLILLAQLKPEKDSDEAVTYSLGKFGQRALDFYSIHVTKESTHPVKPLAQIAGNRYASPVGKALSDACMGTIASFLSKYQDIIIEHQKVVKGNQKRLESLRELAGKENLEYPSVTLPPQPHTKEGVDAYNEVIARVRMWVNLNLWQKLKLSRDDAKPLLRLKGFPSFPLVERQANEVDWWDMVCNVKKLINEKKEDGKVFWQNLAGYKRQEALRPYLSSEEDRKKGKKFARYQLGDLLLHLEKKHGEDWGKVYDEAWERIDKKVEGLSKHIKLEEERRSEDAQSKAALTDWLRAKASFVIEGLKEADKDEFCRCELKLQKWYGDLRGKPFAIEAENSILDISGFSKQYNCAFIWQKDGVKKLNLYLIINYFKGGKLRFKKIKPEAFEANRFYTVINKKSGEIVPMEVNFNFDDPNLIILPLAFGKRQGREFIWNDLLSLETGSLKLANGRVIEKTLYNRRTRQDEPALFVALTFERREVLDSSNIKPMNLIGVDRGENIPAVIALTDPEGCPLSRFKDSLGNPTHILRIGESYKEKQRTIQAKKEVEQRRAGGYSRKYASKAKNLADDMVRNTARDLLYYAVTQDAMLIFENLSRGFGRQGKRTFMAERQYTRMEDWLTAKLAYEGLPSKTYLSKTLAQYTSKTCSNCGFTITSADYDRVLEKLKKTATGWMTTINGKELKVEGQITYYNRYKRQNVVKDLSVELDRLSEESVNNDISSWDKGRSGEALSLLKKRFSHRPVQEKFVCLNCGFETHADEQAALNIARSWLFLRSQEYKKYQTNKTTGNTDKRAFVETWQSFYRKKLKEVWKPAV

SEQ ID NO: 38345 - protein, 978 aa, synthetic construct
  REGION 1..978: note = engineered CasX variant
QEIKRINKIRRRLVKDSNTKKAGKTGPMKTLLVRVMTPDLRERLENLRKKPENIPQPISNTSRANLNKLLTDYTEMKKAILHVYWEEFQKDPVGLMSRVAQPASKKIDQNKLKPEMDEKGNLTTAGFACSQCGQPLFVYKLEQVSEKGKAYTNYFGRCNVAEHEKLILLAQLKPEKDSDEAVTYSLGKFGQRALDFYSIHVTKESTHPVKPLAQIAGNRYASYPVGKALSDACMGTIASFLSKYQDIIIEHQKVVKGNQKRLESLRELAGKENLEYPSVTLPPQPHTKEGVDAYNEVIARVRMWVNLNLWQKLKLSRDDAKPLLRLKGFPSFPLVERQANEVDWWDMVCNVKKLINEKKEDGKVFWQNLAGYKRQEALRPYLSSEEDRKKGKKFARYQLGDLLLHLEKKHGEDWGKVYDEAWERIDKKVEGLSKHIKLEEERRSEDAQSKAALTDWLRAKASFVIEGLKEADKDEFCRCELKLQKWYGDLRGKPFAIEAENSILDISGFSKQYNCAFIWQKDGVKKLNLYLIINYFKGGKLRFKKIKPEAFEANRFYTVINKKSGEIVPMEVNFNFDDPNLIILPLAFGKRQGREFIWNDLLSLETGSLKLANGRVIEKTLYNRRTRQDEPALFVALTFERREVLDSSNIKPMNLIGVDRGENIPAVIALTDPEGCPLSRFKDSLGNPTHILRIGESYKEKQRTIQAKKEVEQRRAGGYSRKYASKAKNLADDMVRNTARDLLYYAVTQDAMLIFENLSRGFGRQGKRTFMAERQYTRMEDWLTAKLAYEGLASKTYLSKTLAQYTSKTCSNCGFTITSADYDRVLEKLKKTATGWMTTINGKELKVEGQITYYNRYKRQNVVKDLSVELDRLSEESVNNDISSWDKGRSGEALSLLKKRFSHRPVQEKFVCLNCGFETHADEQAALNIARSWLFLRSQEYKKYQTNKTTGNTDKRAFVETWQSFYRKKLKEVWKPAV

SEQ ID NO: 38346 - protein, 978 aa, synthetic construct
  REGION 1..978: note = engineered CasX variant
QEIKRINKIRRRLVKDSNTKKAGKTGPMKTLLVRVMTPDLRERLENLRKKPENIPQPISNTSRANLNKLLTDYTEMKKAILHVYWEEFQKDPVGLMSRVAQPASKKIDQNKLKPEMDEKGNLTTAGFACSQCGQPLFVYKLEQVSEKGKAYTNYFGRCNVAEHEKLILLAQLKPEKDSDEAVTYSLGKFGQRALDFYSIHVTKESTHPVKPLAQIAGNRYASHPVGKALSDACMGTIASFLSKYQDIIIEHQKVVKGNQKRLESLRELAGKENLEYPSVTLPPQPHTKEGVDAYNEVIARVRMWVNLNLWQKLKLSRDDAKPLLRLKGFPSFPLVERQANEVDWWDMVCNVKKLINEKKEDGKVFWQNLAGYKRQEALRPYLSSEEDRKKGKKFARYQLGDLLLHLEKKHGEDWGKVYDEAWERIDKKVEGLSKHIKLEEERRSEDAQSKAALTDWLRAKASFVIEGLKEADKDEFCRCELKLQKWYGDLRGKPFAIEAENSILDISGFSKQYNCAFIWQKDGVKKLNLYLIINYFKGGKLRFKKIKPEAFEANRFYTVINKKSGEIVPMEVNFNFDDPNLIILPLAFGKRQGREFIWNDLLSLETGSLKLANGRVIEKTLYNRRTRQDEPALFVALTFERREVLDSSNIKPMNLIGVDRGENIPAVIALTDPEGCPLSRFKDSLGNPTHILRIGESYKEKQRTIQAKKEVEQRRAGGYSRKYASKAKNLADDMVRNTARDLLYYAVTQDAMLIFENLSRGFGRQGKRTFMAERQYTRMEDWLTAKLAYEGLASKTYLSKTLAQYTSKTCSNCGFTITSADYDRVLEKLKKTATGWMTTINGKELKVEGQITYYNRYKRQNVVKDLSVELDRLSEESVNNDISSWDKGRSGEALSLLKKRFSHRPVQEKFVCLNCGFETHADEQAALNIARSWLFLRSQEYKKYQTNKTTGNTDKRAFVETWQSFYRKKLKEVWKPAV

SEQ ID NO: 38347 - protein, 978 aa, synthetic construct
  REGION 1..978: note = engineered CasX variant
QEIKRINKIRRRLVKDSNTKKAGKTGPMKTLLVRVMTPDLRERLENLRKKPENIPQPISNTSRANLNKLLTDYTEMKKAILHVYWEEFQKDPVGLMSRVAQPASKKIDQNKLKPEMDEKGNLTTAGFACSQCGQPLFVYKLEQVSEKGKAYTNYFGRCNVAEHEKLILLAQLKPEKDSDEAVTYSLGKFGQRALDFYSIHVTKESTHPVKPLAQIAGNRYASSPVGKALSDACMGTIASFLSKYQDIIIEHQKVVKGNQKRLESLRELAGKENLEYPSVTLPPQPHTKEGVDAYNEVIARVRMWVNLNLWQKLKLSRDDAKPLLRLKGFPSFPLVERQANEVDWWDMVCNVKKLINEKKEDGKVFWQNLAGYKRQEALRPYLSSEEDRKKGKKFARYQLGDLLLHLEKKHGEDWGKVYDEAWERIDKKVEGLSKHIKLEEERRSEDAQSKAALTDWLRAKASFVIEGLKEADKDEFCRCELKLQKWYGDLRGKPFAIEAENSILDISGFSKQYNCAFIWQKDGVKKLNLYLIINYFKGGKLRFKKIKPEAFEANRFYTVINKKSGEIVPMEVNFNFDDPNLIILPLAFGKRQGREFIWNDLLSLETGSLKLANGRVIEKTLYNRRTRQDEPALFVALTFERREVLDSSNIKPMNLIGVDRGENIPAVIALTDPEGCPLSRFKDSLGNPTHILRIGESYKEKQRTIQAKKEVEQRRAGGYSRKYASKAKNLADDMVRNTARDLLYYAVTQDAMLIFENLSRGFGRQGKRTFMAERQYTRMEDWLTAKLAYEGLASKTYLSKTLAQYTSKTCSNCGFTITSADYDRVLEKLKKTATGWMTTINGKELKVEGQITYYNRYKRQNVVKDLSVELDRLSEESVNNDISSWDKGRSGEALSLLKKRFSHRPVQEKFVCLNCGFETHADEQAALNIARSWLFLRSQEYKKYQTNKTTGNTDKRAFVETWQSFYRKKLKEVWKPAV

SEQ ID NO: 38348 - protein, 978 aa, synthetic construct
  REGION 1..978: note = engineered CasX variant
QEIKRINKIRRRLVKDSNTKKAGKTGPMKTLLVRVMTPDLRERLENLRKKPENIPQPISNTSRANLNKLLTDYTEMKKAILHVYWEEFQKDPVGLMSRVAQPASKKIDQNKLKPEMDEKGNLTTAGFACSQCGQPLFVYKLEQVSEKGKAYTNYFGRCNVAEHEKLILLAQLKPEKDSDEAVTYSLGKFGQRALDFYSIHVTKESTHPVKPLAQIAGNRYASTPVGKALSDACMGTIASFLSKYQDIIIEHQKVVKGNQKRLESLRELAGKENLEYPSVTLPPQPHTKEGVDAYNEVIARVRMWVNLNLWQKLKLSRDDAKPLLRLKGFPSFPLVERQANEVDWWDMVCNVKKLINEKKEDGKVFWQNLAGYKRQEALRPYLSSEEDRKKGKKFARYQLGDLLLHLEKKHGEDWGKVYDEAWERIDKKVEGLSKHIKLEEERRSEDAQSKAALTDWLRAKASFVIEGLKEADKDEFCRCELKLQKWYGDLRGKPFAIEAENSILDISGFSKQYNCAFIWQKDGVKKLNLYLIINYFKGGKLRFKKIKPEAFEANRFYTVINKKSGEIVPMEVNFNFDDPNLIILPLAFGKRQGREFIWNDLLSLETGSLKLANGRVIEKTLYNRRTRQDEPALFVALTFERREVLDSSNIKPMNLIGVDRGENIPAVIALTDPEGCPLSRFKDSLGNPTHILRIGESYKEKQRTIQAKKEVEQRRAGGYSRKYASKAKNLADDMVRNTARDLLYYAVTQDAMLIFENLSRGFGRQGKRTFMAERQYTRMEDWLTAKLAYEGLASKTYLSKTLAQYTSKTCSNCGFTITSADYDRVLEKLKKTATGWMTTINGKELKVEGQITYYNRYKRQNVVKDLSVELDRLSEESVNNDISSWDKGRSGEALSLLKKRFSHRPVQEKFVCLNCGFETHADEQAALNIARSWLFLRSQEYKKYQTNKTTGNTDKRAFVETWQSFYRKKLKEVWKPAV

SEQ ID NO: 38349 - protein, 978 aa, synthetic construct
  REGION 1..978: note = engineered CasX variant
QEIKRINKIRRRLVKDSNTKKAGKTGPMKTLLVRVMTPDLRERLENLRKKPENIPQPISNTSRANLNKLLTDYTEMKKAILHVYWEEFQKDPVGLMSRVAQPASKKIDQNKLKPEMDEKGNLTTAGFACSQCGQPLFVYKLEQVSEKGKAYTNYFGRCNVAEHEKLILLAQLKPEKDSDEAVTYSLGKFGQRALDFYSIHVTKESTHPVKPLAQIAGNRYASAPVGKALSDACMGTIASFLSKYQDIIIEHQKVVKGNQKRLESLRELAGKENLEYPSVTLPPQPHTKEGVDAYNEVIARVRMWVNLNLWQKLKLSRDDAKPLLRLKGFPSFPLVERQANEVDWWDMVCNVKKLINEKKEDGKVFWQNLAGYKRQEALRPYLSSEEDRKKGKKFARYQLGDLLLHLEKKHGEDWGKVYDEAWERIDKKVEGLSKHIKLEEERRSEDAQSKAALTDWLRAKASFVIEGLKEADKDEFCRCELKLQKWYGDLRGKPFAIEAENSILDISGFSKQYNCAFIWQKDGVKKLNLYLIINYFKGGKLRFKKIKPEAFEANRFYTVINKKSGEIVPMEVNFNFDDPNLIILPLAFGKRQGREFIWNDLLSLETGSLKLANGRVIEKTLYNRRTRQDEPALFVALTFERREVLDSSNIKPMNLIGVDRGENIPAVIALTDPEGCPLSRFKDSLGNPTHILRIGESYKEKQRTIQAKKEVEQRRAGGYSRKYASKAKNLADDMVRNTARDLLYYAVTQDAMLIFENLSRGFGRQGKRTFMAERQYTRMEDWLTAKLAYEGLASKTYLSKTLAQYTSKTCSNCGFTITSADYDRVLEKLKKTATGWMTTINGKELKVEGQITYYNRYKRQNVVKDLSVELDRLSEESVNNDISSWDKGRSGEALSLLKKRFSHRPVQEKFVCLNCGFETHADEQAALNIARSWLFLRSQEYKKYQTNKTTGNTDKRAFVETWQSFYRKKLKEVWKPAV

SEQ ID NO: 38350 - protein, 978 aa, synthetic construct
  REGION 1..978: note = engineered CasX variant
QEIKRINKIRRRLVKDSNTKKAGKTGPMKTLLVRVMTPDLRERLENLRKKPENIPQPISNTSRANLNKLLTDYTEMKKAILHVYWEEFQKDPVGLMSRVAQPASKKIDQNKLKPEMDEKGNLTTAGFACSQCGQPLFVYKLEQVSEKGKAYTNYFGRCNVAEHEKLILLAQLKPEKDSDEAVTYSLGKFGQRALDFYSIHVTKESTHPVKPLAQIAGNRYASVPVGKALSDACMGTIASFLSKYQDIIIEHQKVVKGNQKRLESLRELAGKENLEYPSVTLPPQPHTKEGVDAYNEVIARVRMWVNLNLWQKLKLSRDDAKPLLRLKGFPSFPLVERQANEVDWWDMVCNVKKLINEKKEDGKVFWQNLAGYKRQEALRPYLSSEEDRKKGKKFARYQLGDLLLHLEKKHGEDWGKVYDEAWERIDKKVEGLSKHIKLEEERRSEDAQSKAALTDWLRAKASFVIEGLKEADKDEFCRCELKLQKWYGDLRGKPFAIEAENSILDISGFSKQYNCAFIWQKDGVKKLNLYLIINYFKGGKLRFKKIKPEAFEANRFYTVINKKSGEIVPMEVNFNFDDPNLIILPLAFGKRQGREFIWNDLLSLETGSLKLANGRVIEKTLYNRRTRQDEPALFVALTFERREVLDSSNIKPMNLIGVDRGENIPAVIALTDPEGCPLSRFKDSLGNPTHILRIGESYKEKQRTIQAKKEVEQRRAGGYSRKYASKAKNLADDMVRNTARDLLYYAVTQDAMLIFENLSRGFGRQGKRTFMAERQYTRMEDWLTAKLAYEGLASKTYLSKTLAQYTSKTCSNCGFTITSADYDRVLEKLKKTATGWMTTINGKELKVEGQITYYNRYKRQNVVKDLSVELDRLSEESVNNDISSWDKGRSGEALSLLKKRFSHRPVQEKFVCLNCGFETHADEQAALNIARSWLFLRSQEYKKYQTNKTTGNTDKRAFVETWQSFYRKKLKEVWKPAV

SEQ ID NO: 38351 - protein, 978 aa, synthetic construct
  REGION 1..978: note = engineered CasX variant
QEIKRINKIRRRLVKDSNTKKAGKTGPMKTLLVRVMTPDLRERLENLRKKPENIPQPISNTSRANLNKLLTDYTEMKKAILHVYWEEFQKDPVGLMSRVAQPASKKIDQNKLKPEMDEKGNLTTAGFACSQCGQPLFVYKLEQVSEKGKAYTNYFGRCNVAEHEKLIKLAQLKPEKDSDEAVTYSLGKFGQRALDFYSIHVTKESTHPVKPLAQIAGNRYASGPVGKALSDACMGTIASFLSKYQDIIIEHQKVVKGNQKRLESLRELAGKENLEYPSVTLPPQPHTKEGVDAYNEVIARVRMWVNLNLWQKLKLSRDDAKPLLRLKGFPSFPLVERQANEVDWWDMVCNVKKLINEKKEDGKVFWQNLAGYKRQEALRPYLSSEEDRKKGKKFARYQLGDLLLHLEKKHGEDWGKVYDEAWERIDKKVEGLSKHIKLEEERRSEDAQSKAALTDWLRAKASFVIEGLKEADKDEFCRCELKLQKWYGDLRGKPFAIEAENSILDISGFSKQYNCAFIWQKDGVKKLNLYLIINYFKGGKLRFKKIKPEAFEANRFYTVINKKSGEIVPMEVNFNFDDPNLIILPLAFGKRQGREFIWNDLLSLETGSLKLANGRVIEKTLYNRRTRQDEPALFVALTFERREVLDSSNIKPMNLIGVDRGENIPAVIALTDPEGCPLSRFKDSLGNPTHILRIGESYKEKQRTIQAKKEVEQRRAGGYSRKYASKAKNLADDMVRNTARDLLYYAVTQDAMLIFENLSRGFGRQGKRTFMAERQYTRMEDWLTAKLAYEGLASKTYLSKTLAQYTSKTCSNCGFTITSADYDRVLEKLKKTATGWMTTINGKELKVEGQITYYNRYKRQNVVKDLSVELDRLSEESVNNDISSWDKGRSGEALSLLKKRFSHRPVQEKFVCLNCGFETHADEQAALNIARSWLFLRSQEYKKYQTNKTTGNTDKRAFVETWQSFYRKKLKEVWKPAV

SEQ ID NO: 38352 - protein, 977 aa, synthetic construct
  REGION 1..977: note = engineered CasX variant
QEIKRINKIRRRLVKDSNTKKAGKTGPMKTLLVRVMTPDLRERLENLRKKPENIPQPISNTSRANLNKLLTDYTEMKKAILHVYWEEFQKDPVGLMSRVAQPASKKIDQNKLKPEMDEKGNLTTAGFACSQCGQPLFVYKLEQVSEKGKAYTNYFGRCNVAEHEKLILLAQLKPEKDSDEAVTYSLGKFGQRALDFYSIHVTKESTHPVKPLAQIAGNRYASPVGKALSDACMGTIASFLSKYQDIIIEHQKVVKGNQKRLESLRELAGKENLEYPSVTLPPQPHTKEGVDAYNEVIARVRMWVNLNLWQKLKLSRDDAKPLLRLKGFPSFPLVERQANEVDWWDMVCNVKKLINEKKEDGKVFWQNLAGYKRQEALRPYLSSEEDRKKGKKFARYQLGDLLLHLEKKHGEDWGKVYDEAWERIDKKVEGLSKHIKLEEERRSEDAQSKAALTDWLRAKASFVIEGLKEADKDEFCRCELKLQKWYGDLRGKPFAIEAENSILDISGFSKQYNCAFIWQKDGVKKLNLYLIINYFKGGKLRFKKIKPEAFEANRFYTVINKKSGEIVPMEVNFNFDDPNLIILPLAFGKRQGREFIWNDLLSLETGSLKLANGRVIEKTLYNRRTRQDEPALFVALTFERREVLDSSNIKPMNLIGVDRGENIPAVIALTDPEGCPLSRFKDSLGNPTHILRIGESYKEKQRTIQAKKEVEQRRAGGYSRKYASKAKNLADDMVRNTARDLLYYAVTQDAMLIFENLSRGFGRQGKRTFMAERQYTRMEDWLTAKLAYEGLASKTYLSKTLAQYTSKTCSNCGFTITSADYDRVLEKLKKTATGWMTTINGKELKVEGQITYYNRYKRQNVVKDLSVELDRLSEESVNNDISSWDKGRSGEALSLLKKRFSHRPVQEKFVCLNCGFETHADEQAALNIARSWLFLRSQEYKKYQTNKTTGNTDKRAFVETWQSFYRKKLKEVWKPAV

SEQ ID NO: 38353 - protein, 978 aa, synthetic construct
  REGION 1..978: note = engineered CasX variant
QEIKRINKIRRRLVKDSNTKKAGKTGPMKTLLVRVMTPDLRERLENLRKKPENIPQPISNTSRANLNKLLTDYTEMKKAILHVYWEEFQKDPVGLMSRVAQPASKKIDQNKLKPEMDEKGNLTTAGFACSQCGQPLFVYKLEQVSEKGKAYTNYFGRCNVAEHEKLILLAQLKPEKDSDEAVTYSLGKFGQRALDFYSIHVTKESTHPVKPLAQIAGNRYASYPVGKALSDACMGTIASFLSKYQDIIIEHQKVVKGNQKRLESLRELAGKENLEYPSVTLPPQPHTKEGVDAYNEVIARVRMWVNLNLWQKLKLSRDDAKPLLRLKGFPSFPLVERQANEVDWWDMVCNVKKLINEKKEDGKVFWQNLAGYKRQEALRPYLSSEEDRKKGKKFARYQLGDLLLHLEKKHGEDWGKVYDEAWERIDKKVEGLSKHIKLEEERRSEDAQSKAALTDWLRAKASFVIEGLKEADKDEFCRCELKLQKWYGDLRGKPFAIEAENSILDISGFSKQYNCAFIWQKDGVKKLNLYLIINYFKGGKLRFKKIKPEAFEANRFYTVINKKSGEIVPMEVNFNFDDPNLIILPLAFGKRQGREFIWNDLLSLETGSLKLANGRVIEKTLYNRRTRQDEPALFVALTFERREVLDSSNIKPMNLIGVDRGENIPAVIALTDPEGCPLSRFKDSLGNPTHILRIGESYKEKQRTIQAKKEVEQRRAGGYSRKYASKAKNLADDMVRNTARDLLYYAVTQDAMLIFENLSRGFGRQGKRTFMAERQYTRMEDWLTAKLAYEGLPSKVYLSKTLAQYTSKTCSNCGFTITSADYDRVLEKLKKTATGWMTTINGKELKVEGQITYYNRYKRQNVVKDLSVELDRLSEESVNNDISSWDKGRSGEALSLLKKRFSHRPVQEKFVCLNCGFETHADEQAALNIARSWLFLRSQEYKKYQTNKTTGNTDKRAFVETWQSFYRKKLKEVWKPAV

SEQ ID NO: 38354 - protein, 978 aa, synthetic construct
  REGION 1..978: note = engineered CasX variant
QEIKRINKIRRRLVKDSNTKKAGKTGPMKTLLVRVMTPDLRERLENLRKKPENIPQPISNTSRANLNKLLTDYTEMKKAILHVYWEEFQKDPVGLMSRVAQPASKKIDQNKLKPEMDEKGNLTTAGFACSQCGQPLFVYKLEQVSEKGKAYTNYFGRCNVAEHEKLILLAQLKPEKDSDEAVTYSLGKFGQRALDFYSIHVTKESTHPVKPLAQIAGNRYASHPVGKALSDACMGTIASFLSKYQDIIIEHQKVVKGNQKRLESLRELAGKENLEYPSVTLPPQPHTKEGVDAYNEVIARVRMWVNLNLWQKLKLSRDDAKPLLRLKGFPSFPLVERQANEVDWWDMVCNVKKLINEKKEDGKVFWQNLAGYKRQEALRPYLSSEEDRKKGKKFARYQLGDLLLHLEKKHGEDWGKVYDEAWERIDKKVEGLSKHIKLEEERRSEDAQSKAALTDWLRAKASFVIEGLKEADKDEFCRCELKLQKWYGDLRGKPFAIEAENSILDISGFSKQYNCAFIWQKDGVKKLNLYLIINYFKGGKLRFKKIKPEAFEANRFYTVINKKSGEIVPMEVNFNFDDPNLIILPLAFGKRQGREFIWNDLLSLETGSLKLANGRVIEKTLYNRRTRQDEPALFVALTFERREVLDSSNIKPMNLIGVDRGENIPAVIALTDPEGCPLSRFKDSLGNPTHILRIGESYKEKQRTIQAKKEVEQRRAGGYSRKYASKAKNLADDMVRNTARDLLYYAVTQDAMLIFENLSRGFGRQGKRTFMAERQYTRMEDWLTAKLAYEGLPSKVYLSKTLAQYTSKTCSNCGFTITSADYDRVLEKLKKTATGWMTTINGKELKVEGQITYYNRYKRQNVVKDLSVELDRLSEESVNNDISSWDKGRSGEALSLLKKRFSHRPVQEKFVCLNCGFETHADEQAALNIARSWLFLRSQEYKKYQTNKTTGNTDKRAFVETWQSFYRKKLKEVWKPAV

SEQ ID NO: 38355 - protein, 978 aa, synthetic construct
  REGION 1..978: note = engineered CasX variant
QEIKRINKIRRRLVKDSNTKKAGKTGPMKTLLVRVMTPDLRERLENLRKKPENIPQPISNTSRANLNKLLTDYTEMKKAILHVYWEEFQKDPVGLMSRVAQPASKKIDQNKLKPEMDEKGNLTTAGFACSQCGQPLFVYKLEQVSEKGKAYTNYFGRCNVAEHEKLILLAQLKPEKDSDEAVTYSLGKFGQRALDFYSIHVTKESTHPVKPLAQIAGNRYASSPVGKALSDACMGTIASFLSKYQDIIIEHQKVVKGNQKRLESLRELAGKENLEYPSVTLPPQPHTKEGVDAYNEVIARVRMWVNLNLWQKLKLSRDDAKPLLRLKGFPSFPLVERQANEVDWWDMVCNVKKLINEKKEDGKVFWQNLAGYKRQEALRPYLSSEEDRKKGKKFARYQLGDLLLHLEKKHGEDWGKVYDEAWERIDKKVEGLSKHIKLEEERRSEDAQSKAALTDWLRAKASFVIEGLKEADKDEFCRCELKLQKWYGDLRGKPFAIEAENSILDISGFSKQYNCAFIWQKDGVKKLNLYLIINYFKGGKLRFKKIKPEAFEANRFYTVINKKSGEIVPMEVNFNFDDPNLIILPLAFGKRQGREFIWNDLLSLETGSLKLANGRVIEKTLYNRRTRQDEPALFVALTFERREVLDSSNIKPMNLIGVDRGENIPAVIALTDPEGCPLSRFKDSLGNPTHILRIGESYKEKQRTIQAKKEVEQRRAGGYSRKYASKAKNLADDMVRNTARDLLYYAVTQDAMLIFENLSRGFGRQGKRTFMAERQYTRMEDWLTAKLAYEGLPSKVYLSKTLAQYTSKTCSNCGFTITSADYDRVLEKLKKTATGWMTTINGKELKVEGQITYYNRYKRQNVVKDLSVELDRLSEESVNNDISSWDKGRSGEALSLLKKRFSHRPVQEKFVCLNCGFETHADEQAALNIARSWLFLRSQEYKKYQTNKTTGNTDKRAFVETWQSFYRKKLKEVWKPAV

SEQ ID NO: 38356 - protein, 978 aa, synthetic construct
  REGION 1..978: note = engineered CasX variant
QEIKRINKIRRRLVKDSNTKKAGKTGPMKTLLVRVMTPDLRERLENLRKKPENIPQPISNTSRANLNKLLTDYTEMKKAILHVYWEEFQKDPVGLMSRVAQPASKKIDQNKLKPEMDEKGNLTTAGFACSQCGQPLFVYKLEQVSEKGKAYTNYFGRCNVAEHEKLILLAQLKPEKDSDEAVTYSLGKFGQRALDFYSIHVTKESTHPVKPLAQIAGNRYASTPVGKALSDACMGTIASFLSKYQDIIIEHQKVVKGNQKRLESLRELAGKENLEYPSVTLPPQPHTKEGVDAYNEVIARVRMWVNLNLWQKLKLSRDDAKPLLRLKGFPSFPLVERQANEVDWWDMVCNVKKLINEKKEDGKVFWQNLAGYKRQEALRPYLSSEEDRKKGKKFARYQLGDLLLHLEKKHGEDWGKVYDEAWERIDKKVEGLSKHIKLEEERRSEDAQSKAALTDWLRAKASFVIEGLKEADKDEFCRCELKLQKWYGDLRGKPFAIEAENSILDISGFSKQYNCAFIWQKDGVKKLNLYLIINYFKGGKLRFKKIKPEAFEANRFYTVINKKSGEIVPMEVNFNFDDPNLIILPLAFGKRQGREFIWNDLLSLETGSLKLANGRVIEKTLYNRRTRQDEPALFVALTFERREVLDSSNIKPMNLIGVDRGENIPAVIALTDPEGCPLSRFKDSLGNPTHILRIGESYKEKQRTIQAKKEVEQRRAGGYSRKYASKAKNLADDMVRNTARDLLYYAVTQDAMLIFENLSRGFGRQGKRTFMAERQYTRMEDWLTAKLAYEGLPSKVYLSKTLAQYTSKTCSNCGFTITSADYDRVLEKLKKTATGWMTTINGKELKVEGQITYYNRYKRQNVVKDLSVELDRLSEESVNNDISSWDKGRSGEALSLLKKRFSHRPVQEKFVCLNCGFETHADEQAALNIARSWLFLRSQEYKKYQTNKTTGNTDKRAFVETWQSFYRKKLKEVWKPAV

SEQ ID NO: 38357 - protein, 978 aa, synthetic construct
  REGION 1..978: note = engineered CasX variant
QEIKRINKIRRRLVKDSNTKKAGKTGPMKTLLVRVMTPDLRERLENLRKKPENIPQPISNTSRANLNKLLTDYTEMKKAILHVYWEEFQKDPVGLMSRVAQPASKKIDQNKLKPEMDEKGNLTTAGFACSQCGQPLFVYKLEQVSEKGKAYTNYFGRCNVAEHEKLILLAQLKPEKDSDEAVTYSLGKFGQRALDFYSIHVTKESTHPVKPLAQIAGNRYASAPVGKALSDACMGTIASFLSKYQDIIIEHQKVVKGNQKRLESLRELAGKENLEYPSVTLPPQPHTKEGVDAYNEVIARVRMWVNLNLWQKLKLSRDDAKPLLRLKGFPSFPLVERQANEVDWWDMVCNVKKLINEKKEDGKVFWQNLAGYKRQEALRPYLSSEEDRKKGKKFARYQLGDLLLHLEKKHGEDWGKVYDEAWERIDKKVEGLSKHIKLEEERRSEDAQSKAALTDWLRAKASFVIEGLKEADKDEFCRCELKLQKWYGDLRGKPFAIEAENSILDISGFSKQYNCAFIWQKDGVKKLNLYLIINYFKGGKLRFKKIKPEAFEANRFYTVINKKSGEIVPMEVNFNFDDPNLIILPLAFGKRQGREFIWNDLLSLETGSLKLANGRVIEKTLYNRRTRQDEPALFVALTFERREVLDSSNIKPMNLIGVDRGENIPAVIALTDPEGCPLSRFKDSLGNPTHILRIGESYKEKQRTIQAKKEVEQRRAGGYSRKYASKAKNLADDMVRNTARDLLYYAVTQDAMLIFENLSRGFGRQGKRTFMAERQYTRMEDWLTAKLAYEGLPSKVYLSKTLAQYTSKTCSNCGFTITSADYDRVLEKLKKTATGWMTTINGKELKVEGQITYYNRYKRQNVVKDLSVELDRLSEESVNNDISSWDKGRSGEALSLLKKRFSHRPVQEKFVCLNCGFETHADEQAALNIARSWLFLRSQEYKKYQTNKTTGNTDKRAFVETWQSFYRKKLKEVWKPAV

SEQ ID NO: 38358 - protein, 978 aa, synthetic construct
  REGION 1..978: note = engineered CasX variant
QEIKRINKIRRRLVKDSNTKKAGKTGPMKTLLVRVMTPDLRERLENLRKKPENIPQPISNTSRANLNKLLTDYTEMKKAILHVYWEEFQKDPVGLMSRVAQPASKKIDQNKLKPEMDEKGNLTTAGFACSQCGQPLFVYKLEQVSEKGKAYTNYFGRCNVAEHEKLILLAQLKPEKDSDEAVTYSLGKFGQRALDFYSIHVTKESTHPVKPLAQIAGNRYASVPVGKALSDACMGTIASFLSKYQDIIIEHQKVVKGNQKRLESLRELAGKENLEYPSVTLPPQPHTKEGVDAYNEVIARVRMWVNLNLWQKLKLSRDDAKPLLRLKGFPSFPLVERQANEVDWWDMVCNVKKLINEKKEDGKVFWQNLAGYKRQEALRPYLSSEEDRKKGKKFARYQLGDLLLHLEKKHGEDWGKVYDEAWERIDKKVEGLSKHIKLEEERRSEDAQSKAALTDWLRAKASFVIEGLKEADKDEFCRCELKLQKWYGDLRGKPFAIEAENSILDISGFSKQYNCAFIWQKDGVKKLNLYLIINYFKGGKLRFKKIKPEAFEANRFYTVINKKSGEIVPMEVNFNFDDPNLIILPLAFGKRQGREFIWNDLLSLETGSLKLANGRVIEKTLYNRRTRQDEPALFVALTFERREVLDSSNIKPMNLIGVDRGENIPAVIALTDPEGCPLSRFKDSLGNPTHILRIGESYKEKQRTIQAKKEVEQRRAGGYSRKYASKAKNLADDMVRNTARDLLYYAVTQDAMLIFENLSRGFGRQGKRTFMAERQYTRMEDWLTAKLAYEGLPSKVYLSKTLAQYTSKTCSNCGFTITSADYDRVLEKLKKTATGWMTTINGKELKVEGQITYYNRYKRQNVVKDLSVELDRLSEESVNNDISSWDKGRSGEALSLLKKRFSHRPVQEKFVCLNCGFETHADEQAALNIARSWLFLRSQEYKKYQTNKTTGNTDKRAFVETWQSFYRKKLKEVWKPAV

SEQ ID NO: 38359 - protein, 978 aa, synthetic construct
  REGION 1..978: note = engineered CasX variant
QEIKRINKIRRRLVKDSNTKKAGKTGPMKTLLVRVMTPDLRERLENLRKKPENIPQPISNTSRANLNKLLTDYTEMKKAILHVYWEEFQKDPVGLMSRVAQPASKKIDQNKLKPEMDEKGNLTTAGFACSQCGQPLFVYKLEQVSEKGKAYTNYFGRCNVAEHEKLIKLAQLKPEKDSDEAVTYSLGKFGQRALDFYSIHVTKESTHPVKPLAQIAGNRYASGPVGKALSDACMGTIASFLSKYQDIIIEHQKVVKGNQKRLESLRELAGKENLEYPSVTLPPQPHTKEGVDAYNEVIARVRMWVNLNLWQKLKLSRDDAKPLLRLKGFPSFPLVERQANEVDWWDMVCNVKKLINEKKEDGKVFWQNLAGYKRQEALRPYLSSEEDRKKGKKFARYQLGDLLLHLEKKHGEDWGKVYDEAWERIDKKVEGLSKHIKLEEERRSEDAQSKAALTDWLRAKASFVIEGLKEADKDEFCRCELKLQKWYGDLRGKPFAIEAENSILDISGFSKQYNCAFIWQKDGVKKLNLYLIINYFKGGKLRFKKIKPEAFEANRFYTVINKKSGEIVPMEVNFNFDDPNLIILPLAFGKRQGREFIWNDLLSLETGSLKLANGRVIEKTLYNRRTRQDEPALFVALTFERREVLDSSNIKPMNLIGVDRGENIPAVIALTDPEGCPLSRFKDSLGNPTHILRIGESYKEKQRTIQAKKEVEQRRAGGYSRKYASKAKNLADDMVRNTARDLLYYAVTQDAMLIFENLSRGFGRQGKRTFMAERQYTRMEDWLTAKLAYEGLPSKVYLSKTLAQYTSKTCSNCGFTITSADYDRVLEKLKKTATGWMTTINGKELKVEGQITYYNRYKRQNVVKDLSVELDRLSEESVNNDISSWDKGRSGEALSLLKKRFSHRPVQEKFVCLNCGFETHADEQAALNIARSWLFLRSQEYKKYQTNKTTGNTDKRAFVETWQSFYRKKLKEVWKPAV

SEQ ID NO: 38360 - protein, 977 aa, synthetic construct
  REGION 1..977: note = engineered CasX variant
QEIKRINKIRRRLVKDSNTKKAGKTGPMKTLLVRVMTPDLRERLENLRKKPENIPQPISNTSRANLNKLLTDYTEMKKAILHVYWEEFQKDPVGLMSRVAQPASKKIDQNKLKPEMDEKGNLTTAGFACSQCGQPLFVYKLEQVSEKGKAYTNYFGRCNVAEHEKLILLAQLKPEKDSDEAVTYSLGKFGQRALDFYSIHVTKESTHPVKPLAQIAGNRYASPVGKALSDACMGTIASFLSKYQDIIIEHQKVVKGNQKRLESLRELAGKENLEYPSVTLPPQPHTKEGVDAYNEVIARVRMWVNLNLWQKLKLSRDDAKPLLRLKGFPSFPLVERQANEVDWWDMVCNVKKLINEKKEDGKVFWQNLAGYKRQEALRPYLSSEEDRKKGKKFARYQLGDLLLHLEKKHGEDWGKVYDEAWERIDKKVEGLSKHIKLEEERRSEDAQSKAALTDWLRAKASFVIEGLKEADKDEFCRCELKLQKWYGDLRGKPFAIEAENSILDISGFSKQYNCAFIWQKDGVKKLNLYLIINYFKGGKLRFKKIKPEAFEANRFYTVINKKSGEIVPMEVNFNFDDPNLIILPLAFGKRQGREFIWNDLLSLETGSLKLANGRVIEKTLYNRRTRQDEPALFVALTFERREVLDSSNIKPMNLIGVDRGENIPAVIALTDPEGCPLSRFKDSLGNPTHILRIGESYKEKQRTIQAKKEVEQRRAGGYSRKYASKAKNLADDMVRNTARDLLYYAVTQDAMLIFENLSRGFGRQGKRTFMAERQYTRMEDWLTAKLAYEGLPSKVYLSKTLAQYTSKTCSNCGFTITSADYDRVLEKLKKTATGWMTTINGKELKVEGQITYYNRYKRQNVVKDLSVELDRLSEESVNNDISSWDKGRSGEALSLLKKRFSHRPVQEKFVCLNCGFETHADEQAALNIARSWLFLRSQEYKKYQTNKTTGNTDKRAFVETWQSFYRKKLKEVWKPAV

SEQ ID NO: 38361 - protein, 979 aa, synthetic construct
  REGION 1..979: note = engineered CasX variant
QEIKRINKIRRRLVKDSNTKKAGKTGPMKTLLVRVMTPDLRERLENLRKKPENIPQPISNTSRANLNKLLTDYTEMKKAILHVYWEEFQKDPVGLMSRVAQPASKKIDQNKLKPEMDEKGNLTTAGFACSQCGQPLFVYKLEQVSEKGKAYTNYFGRCNVAEHEKLILLAQLKPEKDSDEAVTYSLGKFGQRALDFYSIHVTKESTHPVKPLAQIAGNRYASYPVGKALSDACMGTIASFLSKYQDIIIEHQKVVKGNQKRLESLRELAGKENLEYPSVTLPPQPHTKEGVDAYNEVIARVRMWVNLNLWQKLKLSRDDAKPLLRLKGFPSFPLVERQANEVDWWDMVCNVKKLINEKKEDGKVFWQNLAGYKRQEALRPYLSSEEDRKKGKKFARYQLGDLLLHLEKKHGEDWGKVYDEAWERIDKKVEGLSKHIKLEEERRSEDAQSKAALTDWLRAKASFVIEGLKEADKDEFCRCELKLQKWYGDLRGKPFAIEAENSILDISGFSKQYNCAFIWQKDGVKKLNLYLIINYFKGGKLRFKKIKPEAFEANRFYTVINKKSGEIVPMEVNFNFDDPNLIILPLAFGKRQGREFIWNDLLSLETGSLKLANGRVIEKTLYNRRTRQDEPALFVALTFERREVLDSSNIKPMNLIGVDRGENIPAVIALTDPEGCPLSRFKDSLGNPTHILRIGESYKEKQRTIQAKKEVEQRRAGGYSRKYASKAKNLADDMVRNTARDLLYYAVTQDAMLIFENLSRGFGRQGKRTFMAERQYTRMEDWLTAKLAYEGPLPSKTYLSKTLAQYTSKTCSNCGFTITSADYDRVLEKLKKTATGWMTTINGKELKVEGQITYYNRYKRQNVVKDLSVELDRLSEESVNNDISSWDKGRSGEALSLLKKRFSHRPVQEKFVCLNCGFETHADEQAALNIARSWLFLRSQEYKKYQTNKTTGNTDKRAFVETWQSFYRKKLKEVWKPAV

SEQ ID NO: 38362 - protein, 979 aa, synthetic construct
  REGION 1..979: note = engineered CasX variant
QEIKRINKIRRRLVKDSNTKKAGKTGPMKTLLVRVMTPDLRERLENLRKKPENIPQPISNTSRANLNKLLTDYTEMKKAILHVYWEEFQKDPVGLMSRVAQPASKKIDQNKLKPEMDEKGNLTTAGFACSQCGQPLFVYKLEQVSEKGKAYTNYFGRCNVAEHEKLILLAQLKPEKDSDEAVTYSLGKFGQRALDFYSIHVTKESTHPVKPLAQIAGNRYASHPVGKALSDACMGTIASFLSKYQDIIIEHQKVVKGNQKRLESLRELAGKENLEYPSVTLPPQPHTKEGVDAYNEVIARVRMWVNLNLWQKLKLSRDDAKPLLRLKGFPSFPLVERQANEVDWWDMVCNVKKLINEKKEDGKVFWQNLAGYKRQEALRPYLSSEEDRKKGKKFARYQLGDLLLHLEKKHGEDWGKVYDEAWERIDKKVEGLSKHIKLEEERRSEDAQSKAALTDWLRAKASFVIEGLKEADKDEFCRCELKLQKWYGDLRGKPFAIEAENSILDISGFSKQYNCAFIWQKDGVKKLNLYLIINYFKGGKLRFKKIKPEAFEANRFYTVINKKSGEIVPMEVNFNFDDPNLIILPLAFGKRQGREFIWNDLLSLETGSLKLANGRVIEKTLYNRRTRQDEPALFVALTFERREVLDSSNIKPMNLIGVDRGENIPAVIALTDPEGCPLSRFKDSLGNPTHILRIGESYKEKQRTIQAKKEVEQRRAGGYSRKYASKAKNLADDMVRNTARDLLYYAVTQDAMLIFENLSRGFGRQGKRTFMAERQYTRMEDWLTAKLAYEGPLPSKTYLSKTLAQYTSKTCSNCGFTITSADYDRVLEKLKKTATGWMTTINGKELKVEGQITYYNRYKRQNVVKDLSVELDRLSEESVNNDISSWDKGRSGEALSLLKKRFSHRPVQEKFVCLNCGFETHADEQAALNIARSWLFLRSQEYKKYQTNKTTGNTDKRAFVETWQSFYRKKLKEVWKPAV

SEQ ID NO: 38363 - protein, 979 aa, synthetic construct
  REGION 1..979: note = engineered CasX variant
QEIKRINKIRRRLVKDSNTKKAGKTGPMKTLLVRVMTPDLRERLENLRKKPENIPQPISNTSRANLNKLLTDYTEMKKAILHVYWEEFQKDPVGLMSRVAQPASKKIDQNKLKPEMDEKGNLTTAGFACSQCGQPLFVYKLEQVSEKGKAYTNYFGRCNVAEHEKLILLAQLKPEKDSDEAVTYSLGKFGQRALDFYSIHVTKESTHPVKPLAQIAGNRYASSPVGKALSDACMGTIASFLSKYQDIIIEHQKVVKGNQKRLESLRELAGKENLEYPSVTLPPQPHTKEGVDAYNEVIARVRMWVNLNLWQKLKLSRDDAKPLLRLKGFPSFPLVERQANEVDWWDMVCNVKKLINEKKEDGKVFWQNLAGYKRQEALRPYLSSEEDRKKGKKFARYQLGDLLLHLEKKHGEDWGKVYDEAWERIDKKVEGLSKHIKLEEERRSEDAQSKAALTDWLRAKASFVIEGLKEADKDEFCRCELKLQKWYGDLRGKPFAIEAENSILDISGFSKQYNCAFIWQKDGVKKLNLYLIINYFKGGKLRFKKIKPEAFEANRFYTVINKKSGEIVPMEVNFNFDDPNLIILPLAFGKRQGREFIWNDLLSLETGSLKLANGRVIEKTLYNRRTRQDEPALFVALTFERREVLDSSNIKPMNLIGVDRGENIPAVIALTDPEGCPLSRFKDSLGNPTHILRIGESYKEKQRTIQAKKEVEQRRAGGYSRKYASKAKNLADDMVRNTARDLLYYAVTQDAMLIFENLSRGFGRQGKRTFMAERQYTRMEDWLTAKLAYEGPLPSKTYLSKTLAQYTSKTCSNCGFTITSADYDRVLEKLKKTATGWMTTINGKELKVEGQITYYNRYKRQNVVKDLSVELDRLSEESVNNDISSWDKGRSGEALSLLKKRFSHRPVQEKFVCLNCGFETHADEQAALNIARSWLFLRSQEYKKYQTNKTTGNTDKRAFVETWQSFYRKKLKEVWKPAV

SEQ ID NO: 38364 - protein, 979 aa, synthetic construct
  REGION 1..979: note = engineered CasX variant
QEIKRINKIRRRLVKDSNTKKAGKTGPMKTLLVRVMTPDLRERLENLRKKPENIPQPISNTSRANLNKLLTDYTEMKKAILHVYWEEFQKDPVGLMSRVAQPASKKIDQNKLKPEMDEKGNLTTAGFACSQCGQPLFVYKLEQVSEKGKAYTNYFGRCNVAEHEKLILLAQLKPEKDSDEAVTYSLGKFGQRALDFYSIHVTKESTHPVKPLAQIAGNRYASTPVGKALSDACMGTIASFLSKYQDIIIEHQKVVKGNQKRLESLRELAGKENLEYPSVTLPPQPHTKEGVDAYNEVIARVRMWVNLNLWQKLKLSRDDAKPLLRLKGFPSFPLVERQANEVDWWDMVCNVKKLINEKKEDGKVFWQNLAGYKRQEALRPYLSSEEDRKKGKKFARYQLGDLLLHLEKKHGEDWGKVYDEAWERIDKKVEGLSKHIKLEEERRSEDAQSKAALTDWLRAKASFVIEGLKEADKDEFCRCELKLQKWYGDLRGKPFAIEAENSILDISGFSKQYNCAFIWQKDGVKKLNLYLIINYFKGGKLRFKKIKPEAFEANRFYTVINKKSGEIVPMEVNFNFDDPNLIILPLAFGKRQGREFIWNDLLSLETGSLKLANGRVIEKTLYNRRTRQDEPALFVALTFERREVLDSSNIKPMNLIGVDRGENIPAVIALTDPEGCPLSRFKDSLGNPTHILRIGESYKEKQRTIQAKKEVEQRRAGGYSRKYASKAKNLADDMVRNTARDLLYYAVTQDAMLIFENLSRGFGRQGKRTFMAERQYTRMEDWLTAKLAYEGPLPSKTYLSKTLAQYTSKTCSNCGFTITSADYDRVLEKLKKTATGWMTTINGKELKVEGQITYYNRYKRQNVVKDLSVELDRLSEESVNNDISSWDKGRSGEALSLLKKRFSHRPVQEKFVCLNCGFETHADEQAALNIARSWLFLRSQEYKKYQTNKTTGNTDKRAFVETWQSFYRKKLKEVWKPAV

SEQ ID NO: 38365 - protein, 979 aa, synthetic construct
  REGION 1..979: note = engineered CasX variant
QEIKRINKIRRRLVKDSNTKKAGKTGPMKTLLVRVMTPDLRERLENLRKKPENIPQPISNTSRANLNKLLTDYTEMKKAILHVYWEEFQKDPVGLMSRVAQPASKKIDQNKLKPEMDEKGNLTTAGFACSQCGQPLFVYKLEQVSEKGKAYTNYFGRCNVAEHEKLILLAQLKPEKDSDEAVTYSLGKFGQRALDFYSIHVTKESTHPVKPLAQIAGNRYASAPVGKALSDACMGTIASFLSKYQDIIIEHQKVVKGNQKRLESLRELAGKENLEYPSVTLPPQPHTKEGVDAYNEVIARVRMWVNLNLWQKLKLSRDDAKPLLRLKGFPSFPLVERQANEVDWWDMVCNVKKLINEKKEDGKVFWQNLAGYKRQEALRPYLSSEEDRKKGKKFARYQLGDLLLHLEKKHGEDWGKVYDEAWERIDKKVEGLSKHIKLEEERRSEDAQSKAALTDWLRAKASFVIEGLKEADKDEFCRCELKLQKWYGDLRGKPFAIEAENSILDISGFSKQYNCAFIWQKDGVKKLNLYLIINYFKGGKLRFKKIKPEAFEANRFYTVINKKSGEIVPMEVNFNFDDPNLIILPLAFGKRQGREFIWNDLLSLETGSLKLANGRVIEKTLYNRRTRQDEPALFVALTFERREVLDSSNIKPMNLIGVDRGENIPAVIALTDPEGCPLSRFKDSLGNPTHILRIGESYKEKQRTIQAKKEVEQRRAGGYSRKYASKAKNLADDMVRNTARDLLYYAVTQDAMLIFENLSRGFGRQGKRTFMAERQYTRMEDWLTAKLAYEGPLPSKTYLSKTLAQYTSKTCSNCGFTITSADYDRVLEKLKKTATGWMTTINGKELKVEGQITYYNRYKRQNVVKDLSVELDRLSEESVNNDISSWDKGRSGEALSLLKKRFSHRPVQEKFVCLNCGFETHADEQAALNIARSWLFLRSQEYKKYQTNKTTGNTDKRAFVETWQSFYRKKLKEVWKPAV

SEQ ID NO: 38366 - protein, 979 aa, synthetic construct
  REGION 1..979: note = engineered CasX variant
QEIKRINKIRRRLVKDSNTKKAGKTGPMKTLLVRVMTPDLRERLENLRKKPENIPQPISNTSRANLNKLLTDYTEMKKAILHVYWEEFQKDPVGLMSRVAQPASKKIDQNKLKPEMDEKGNLTTAGFACSQCGQPLFVYKLEQVSEKGKAYTNYFGRCNVAEHEKLILLAQLKPEKDSDEAVTYSLGKFGQRALDFYSIHVTKESTHPVKPLAQIAGNRYASVPVGKALSDACMGTIASFLSKYQDIIIEHQKVVKGNQKRLESLRELAGKENLEYPSVTLPPQPHTKEGVDAYNEVIARVRMWVNLNLWQKLKLSRDDAKPLLRLKGFPSFPLVERQANEVDWWDMVCNVKKLINEKKEDGKVFWQNLAGYKRQEALRPYLSSEEDRKKGKKFARYQLGDLLLHLEKKHGEDWGKVYDEAWERIDKKVEGLSKHIKLEEERRSEDAQSKAALTDWLRAKASFVIEGLKEADKDEFCRCELKLQKWYGDLRGKPFAIEAENSILDISGFSKQYNCAFIWQKDGVKKLNLYLIINYFKGGKLRFKKIKPEAFEANRFYTVINKKSGEIVPMEVNFNFDDPNLIILPLAFGKRQGREFIWNDLLSLETGSLKLANGRVIEKTLYNRRTRQDEPALFVALTFERREVLDSSNIKPMNLIGVDRGENIPAVIALTDPEGCPLSRFKDSLGNPTHILRIGESYKEKQRTIQAKKEVEQRRAGGYSRKYASKAKNLADDMVRNTARDLLYYAVTQDAMLIFENLSRGFGRQGKRTFMAERQYTRMEDWLTAKLAYEGPLPSKTYLSKTLAQYTSKTCSNCGFTITSADYDRVLEKLKKTATGWMTTINGKELKVEGQITYYNRYKRQNVVKDLSVELDRLSEESVNNDISSWDKGRSGEALSLLKKRFSHRPVQEKFVCLNCGFETHADEQAALNIARSWLFLRSQEYKKYQTNKTTGNTDKRAFVETWQSFYRKKLKEVWKPAV

SEQ ID NO: 38367 - protein, 979 aa, synthetic construct
  REGION 1..979: note = engineered CasX variant
QEIKRINKIRRRLVKDSNTKKAGKTGPMKTLLVRVMTPDLRERLENLRKKPENIPQPISNTSRANLNKLLTDYTEMKKAILHVYWEEFQKDPVGLMSRVAQPASKKIDQNKLKPEMDEKGNLTTAGFACSQCGQPLFVYKLEQVSEKGKAYTNYFGRCNVAEHEKLIKLAQLKPEKDSDEAVTYSLGKFGQRALDFYSIHVTKESTHPVKPLAQIAGNRYASGPVGKALSDACMGTIASFLSKYQDIIIEHQKVVKGNQKRLESLRELAGKENLEYPSVTLPPQPHTKEGVDAYNEVIARVRMWVNLNLWQKLKLSRDDAKPLLRLKGFPSFPLVERQANEVDWWDMVCNVKKLINEKKEDGKVFWQNLAGYKRQEALRPYLSSEEDRKKGKKFARYQLGDLLLHLEKKHGEDWGKVYDEAWERIDKKVEGLSKHIKLEEERRSEDAQSKAALTDWLRAKASFVIEGLKEADKDEFCRCELKLQKWYGDLRGKPFAIEAENSILDISGFSKQYNCAFIWQKDGVKKLNLYLIINYFKGGKLRFKKIKPEAFEANRFYTVINKKSGEIVPMEVNFNFDDPNLIILPLAFGKRQGREFIWNDLLSLETGSLKLANGRVIEKTLYNRRTRQDEPALFVALTFERREVLDSSNIKPMNLIGVDRGENIPAVIALTDPEGCPLSRFKDSLGNPTHILRIGESYKEKQRTIQAKKEVEQRRAGGYSRKYASKAKNLADDMVRNTARDLLYYAVTQDAMLIFENLSRGFGRQGKRTFMAERQYTRMEDWLTAKLAYEGPLPSKTYLSKTLAQYTSKTCSNCGFTITSADYDRVLEKLKKTATGWMTTINGKELKVEGQITYYNRYKRQNVVKDLSVELDRLSEESVNNDISSWDKGRSGEALSLLKKRFSHRPVQEKFVCLNCGFETHADEQAALNIARSWLFLRSQEYKKYQTNKTTGNTDKRAFVETWQSFYRKKLKEVWKPAV

SEQ ID NO: 38368 - protein, 978 aa, synthetic construct
  REGION 1..978: note = engineered CasX variant
QEIKRINKIRRRLVKDSNTKKAGKTGPMKTLLVRVMTPDLRERLENLRKKPENIPQPISNTSRANLNKLLTDYTEMKKAILHVYWEEFQKDPVGLMSRVAQPASKKIDQNKLKPEMDEKGNLTTAGFACSQCGQPLFVYKLEQVSEKGKAYTNYFGRCNVAEHEKLILLAQLKPEKDSDEAVTYSLGKFGQRALDFYSIHVTKESTHPVKPLAQIAGNRYASPVGKALSDACMGTIASFLSKYQDIIIEHQKVVKGNQKRLESLRELAGKENLEYPSVTLPPQPHTKEGVDAYNEVIARVRMWVNLNLWQKLKLSRDDAKPLLRLKGFPSFPLVERQANEVDWWDMVCNVKKLINEKKEDGKVFWQNLAGYKRQEALRPYLSSEEDRKKGKKFARYQLGDLLLHLEKKHGEDWGKVYDEAWERIDKKVEGLSKHIKLEEERRSEDAQSKAALTDWLRAKASFVIEGLKEADKDEFCRCELKLQKWYGDLRGKPFAIEAENSILDISGFSKQYNCAFIWQKDGVKKLNLYLIINYFKGGKLRFKKIKPEAFEANRFYTVINKKSGEIVPMEVNFNFDDPNLIILPLAFGKRQGREFIWNDLLSLETGSLKLANGRVIEKTLYNRRTRQDEPALFVALTFERREVLDSSNIKPMNLIGVDRGENIPAVIALTDPEGCPLSRFKDSLGNPTHILRIGESYKEKQRTIQAKKEVEQRRAGGYSRKYASKAKNLADDMVRNTARDLLYYAVTQDAMLIFENLSRGFGRQGKRTFMAERQYTRMEDWLTAKLAYEGPLPSKTYLSKTLAQYTSKTCSNCGFTITSADYDRVLEKLKKTATGWMTTINGKELKVEGQITYYNRYKRQNVVKDLSVELDRLSEESVNNDISSWDKGRSGEALSLLKKRFSHRPVQEKFVCLNCGFETHADEQAALNIARSWLFLRSQEYKKYQTNKTTGNTDKRAFVETWQSFYRKKLKEVWKPAV

SEQ ID NO: 38369 - protein, 979 aa, synthetic construct
  REGION 1..979: note = engineered CasX variant
QEIKRINKIRRRLVKDSNTKKAGKTGPMKTLLVRVMTPDLRERLENLRKKPENIPQPISNTSRANLNKLLTDYTEMKKAILHVYWEEFQKDPVGLMSRVAQPASKKIDQNKLKPEMDEKGNLTTAGFACSQCGQPLFVYKLEQVSEKGKAYTNYFGRCNVAEHEKLILLAQLKPEKDSDEAVTYSLGKFGQRALDFYSIHVTKESTHPVKPLAQIAGNRYASYPVGKALSDACMGTIASFLSKYQDIIIEHQKVVKGNQKRLESLRELAGKENLEYPSVTLPPQPHTKEGVDAYNEVIARVRMWVNLNLWQKLKLSRDDAKPLLRLKGFPSFPLVERQANEVDWWDMVCNVKKLINEKKEDGKVFWQNLAGYKRQEALRPYLSSEEDVRKKGKKFARYQLGDLLLHLEKKHGEDWGKVYDEAWERIDKKVEGLSKHIKLEEERRSEDAQSKAALTDWLRAKASFVIEGLKEADKDEFCRCELKLQKWYGDLRGKPFAIEAENSILDISGFSKQYNCAFIWQKDGVKKLNLYLIINYFKGGKLRFKKIKPEAFEANRFYTVINKKSGEIVPMEVNFNFDDPNLIILPLAFGKRQGREFIWNDLLSLETGSLKLANGRVIEKTLYNRRTRQDEPALFVALTFERREVLDSSNIKPMNLIGVDRGENIPAVIALTDPEGCPLSRFKDSLGNPTHILRIGESYKEKQRTIQAKKEVEQRRAGGYSRKYASKAKNLADDMVRNTARDLLYYAVTQDAMLIFENLSRGFGRQGKRTFMAERQYTRMEDWLTAKLAYEGLPSKTYLSKTLAQYTSKTCSNCGFTITSADYDRVLEKLKKTATGWMTTINGKELKVEGQITYYNRYKRQNVVKDLSVELDRLSEESVNNDISSWDKGRSGEALSLLKKRFSHRPVQEKFVCLNCGFETHADEQAALNIARSWLFLRSQEYKKYQTNKTTGNTDKRAFVETWQSFYRKKLKEVWKPAV

SEQ ID NO: 38370 - protein, 979 aa, synthetic construct
  REGION 1..979: note = engineered CasX variant
QEIKRINKIRRRLVKDSNTKKAGKTGPMKTLLVRVMTPDLRERLENLRKKPENIPQPISNTSRANLNKLLTDYTEMKKAILHVYWEEFQKDPVGLMSRVAQPASKKIDQNKLKPEMDEKGNLTTAGFACSQCGQPLFVYKLEQVSEKGKAYTNYFGRCNVAEHEKLILLAQLKPEKDSDEAVTYSLGKFGQRALDFYSIHVTKESTHPVKPLAQIAGNRYASHPVGKALSDACMGTIASFLSKYQDIIIEHQKVVKGNQKRLESLRELAGKENLEYPSVTLPPQPHTKEGVDAYNEVIARVRMWVNLNLWQKLKLSRDDAKPLLRLKGFPSFPLVERQANEVDWWDMVCNVKKLINEKKEDGKVFWQNLAGYKRQEALRPYLSSEEDVRKKGKKFARYQLGDLLLHLEKKHGEDWGKVYDEAWERIDKKVEGLSKHIKLEEERRSEDAQSKAALTDWLRAKASFVIEGLKEADKDEFCRCELKLQKWYGDLRGKPFAIEAENSILDISGFSKQYNCAFIWQKDGVKKLNLYLIINYFKGGKLRFKKIKPEAFEANRFYTVINKKSGEIVPMEVNFNFDDPNLIILPLAFGKRQGREFIWNDLLSLETGSLKLANGRVIEKTLYNRRTRQDEPALFVALTFERREVLDSSNIKPMNLIGVDRGENIPAVIALTDPEGCPLSRFKDSLGNPTHILRIGESYKEKQRTIQAKKEVEQRRAGGYSRKYASKAKNLADDMVRNTARDLLYYAVTQDAMLIFENLSRGFGRQGKRTFMAERQYTRMEDWLTAKLAYEGLPSKTYLSKTLAQYTSKTCSNCGFTITSADYDRVLEKLKKTATGWMTTINGKELKVEGQITYYNRYKRQNVVKDLSVELDRLSEESVNNDISSWDKGRSGEALSLLKKRFSHRPVQEKFVCLNCGFETHADEQAALNIARSWLFLRSQEYKKYQTNKTTGNTDKRAFVETWQSFYRKKLKEVWKPAV

SEQ ID NO: 38371 - protein, 979 aa, synthetic construct
  REGION 1..979: note = engineered CasX variant
QEIKRINKIRRRLVKDSNTKKAGKTGPMKTLLVRVMTPDLRERLENLRKKPENIPQPISNTSRANLNKLLTDYTEMKKAILHVYWEEFQKDPVGLMSRVAQPASKKIDQNKLKPEMDEKGNLTTAGFACSQCGQPLFVYKLEQVSEKGKAYTNYFGRCNVAEHEKLILLAQLKPEKDSDEAVTYSLGKFGQRALDFYSIHVTKESTHPVKPLAQIAGNRYASSPVGKALSDACMGTIASFLSKYQDIIIEHQKVVKGNQKRLESLRELAGKENLEYPSVTLPPQPHTKEGVDAYNEVIARVRMWVNLNLWQKLKLSRDDAKPLLRLKGFPSFPLVERQANEVDWWDMVCNVKKLINEKKEDGKVFWQNLAGYKRQEALRPYLSSEEDVRKKGKKFARYQLGDLLLHLEKKHGEDWGKVYDEAWERIDKKVEGLSKHIKLEEERRSEDAQSKAALTDWLRAKASFVIEGLKEADKDEFCRCELKLQKWYGDLRGKPFAIEAENSILDISGFSKQYNCAFIWQKDGVKKLNLYLIINYFKGGKLRFKKIKPEAFEANRFYTVINKKSGEIVPMEVNFNFDDPNLIILPLAFGKRQGREFIWNDLLSLETGSLKLANGRVIEKTLYNRRTRQDEPALFVALTFERREVLDSSNIKPMNLIGVDRGENIPAVIALTDPEGCPLSRFKDSLGNPTHILRIGESYKEKQRTIQAKKEVEQRRAGGYSRKYASKAKNLADDMVRNTARDLLYYAVTQDAMLIFENLSRGFGRQGKRTFMAERQYTRMEDWLTAKLAYEGLPSKTYLSKTLAQYTSKTCSNCGFTITSADYDRVLEKLKKTATGWMTTINGKELKVEGQITYYNRYKRQNVVKDLSVELDRLSEESVNNDISSWDKGRSGEALSLLKKRFSHRPVQEKFVCLNCGFETHADEQAALNIARSWLFLRSQEYKKYQTNKTTGNTDKRAFVETWQSFYRKKLKEVWKPAV

SEQ ID NO: 38372 - protein, 979 aa, synthetic construct
  REGION 1..979: note = engineered CasX variant
QEIKRINKIRRRLVKDSNTKKAGKTGPMKTLLVRVMTPDLRERLENLRKKPENIPQPISNTSRANLNKLLTDYTEMKKAILHVYWEEFQKDPVGLMSRVAQPASKKIDQNKLKPEMDEKGNLTTAGFACSQCGQPLFVYKLEQVSEKGKAYTNYFGRCNVAEHEKLILLAQLKPEKDSDEAVTYSLGKFGQRALDFYSIHVTKESTHPVKPLAQIAGNRYASTPVGKALSDACMGTIASFLSKYQDIIIEHQKVVKGNQKRLESLRELAGKENLEYPSVTLPPQPHTKEGVDAYNEVIARVRMWVNLNLWQKLKLSRDDAKPLLRLKGFPSFPLVERQANEVDWWDMVCNVKKLINEKKEDGKVFWQNLAGYKRQEALRPYLSSEEDVRKKGKKFARYQLGDLLLHLEKKHGEDWGKVYDEAWERIDKKVEGLSKHIKLEEERRSEDAQSKAALTDWLRAKASFVIEGLKEADKDEFCRCELKLQKWYGDLRGKPFAIEAENSILDISGFSKQYNCAFIWQKDGVKKLNLYLIINYFKGGKLRFKKIKPEAFEANRFYTVINKKSGEIVPMEVNFNFDDPNLIILPLAFGKRQGREFIWNDLLSLETGSLKLANGRVIEKTLYNRRTRQDEPALFVALTFERREVLDSSNIKPMNLIGVDRGENIPAVIALTDPEGCPLSRFKDSLGNPTHILRIGESYKEKQRTIQAKKEVEQRRAGGYSRKYASKAKNLADDMVRNTARDLLYYAVTQDAMLIFENLSRGFGRQGKRTFMAERQYTRMEDWLTAKLAYEGLPSKTYLSKTLAQYTSKTCSNCGFTITSADYDRVLEKLKKTATGWMTTINGKELKVEGQITYYNRYKRQNVVKDLSVELDRLSEESVNNDISSWDKGRSGEALSLLKKRFSHRPVQEKFVCLNCGFETHADEQAALNIARSWLFLRSQEYKKYQTNKTTGNTDKRAFVETWQSFYRKKLKEVWKPAV

SEQ ID NO: 38373 - protein, 979 aa, synthetic construct
  REGION 1..979: note = engineered CasX variant
QEIKRINKIRRRLVKDSNTKKAGKTGPMKTLLVRVMTPDLRERLENLRKKPENIPQPISNTSRANLNKLLTDYTEMKKAILHVYWEEFQKDPVGLMSRVAQPASKKIDQNKLKPEMDEKGNLTTAGFACSQCGQPLFVYKLEQVSEKGKAYTNYFGRCNVAEHEKLILLAQLKPEKDSDEAVTYSLGKFGQRALDFYSIHVTKESTHPVKPLAQIAGNRYASAPVGKALSDACMGTIASFLSKYQDIIIEHQKVVKGNQKRLESLRELAGKENLEYPSVTLPPQPHTKEGVDAYNEVIARVRMWVNLNLWQKLKLSRDDAKPLLRLKGFPSFPLVERQANEVDWWDMVCNVKKLINEKKEDGKVFWQNLAGYKRQEALRPYLSSEEDVRKKGKKFARYQLGDLLLHLEKKHGEDWGKVYDEAWERIDKKVEGLSKHIKLEEERRSEDAQSKAALTDWLRAKASFVIEGLKEADKDEFCRCELKLQKWYGDLRGKPFAIEAENSILDISGFSKQYNCAFIWQKDGVKKLNLYLIINYFKGGKLRFKKIKPEAFEANRFYTVINKKSGEIVPMEVNFNFDDPNLIILPLAFGKRQGREFIWNDLLSLETGSLKLANGRVIEKTLYNRRTRQDEPALFVALTFERREVLDSSNIKPMNLIGVDRGENIPAVIALTDPEGCPLSRFKDSLGNPTHILRIGESYKEKQRTIQAKKEVEQRRAGGYSRKYASKAKNLADDMVRNTARDLLYYAVTQDAMLIFENLSRGFGRQGKRTFMAERQYTRMEDWLTAKLAYEGLPSKTYLSKTLAQYTSKTCSNCGFTITSADYDRVLEKLKKTATGWMTTINGKELKVEGQITYYNRYKRQNVVKDLSVELDRLSEESVNNDISSWDKGRSGEALSLLKKRFSHRPVQEKFVCLNCGFETHADEQAALNIARSWLFLRSQEYKKYQTNKTTGNTDKRAFVETWQSFYRKKLKEVWKPAV

SEQ ID NO: 38374 - protein, 979 aa, synthetic construct
  REGION 1..979: note = engineered CasX variant
QEIKRINKIRRRLVKDSNTKKAGKTGPMKTLLVRVMTPDLRERLENLRKKPENIPQPISNTSRANLNKLLTDYTEMKKAILHVYWEEFQKDPVGLMSRVAQPASKKIDQNKLKPEMDEKGNLTTAGFACSQCGQPLFVYKLEQVSEKGKAYTNYFGRCNVAEHEKLILLAQLKPEKDSDEAVTYSLGKFGQRALDFYSIHVTKESTHPVKPLAQIAGNRYASVPVGKALSDACMGTIASFLSKYQDIIIEHQKVVKGNQKRLESLRELAGKENLEYPSVTLPPQPHTKEGVDAYNEVIARVRMWVNLNLWQKLKLSRDDAKPLLRLKGFPSFPLVERQANEVDWWDMVCNVKKLINEKKEDGKVFWQNLAGYKRQEALRPYLSSEEDVRKKGKKFARYQLGDLLLHLEKKHGEDWGKVYDEAWERIDKKVEGLSKHIKLEEERRSEDAQSKAALTDWLRAKASFVIEGLKEADKDEFCRCELKLQKWYGDLRGKPFAIEAENSILDISGFSKQYNCAFIWQKDGVKKLNLYLIINYFKGGKLRFKKIKPEAFEANRFYTVINKKSGEIVPMEVNFNFDDPNLIILPLAFGKRQGREFIWNDLLSLETGSLKLANGRVIEKTLYNRRTRQDEPALFVALTFERREVLDSSNIKPMNLIGVDRGENIPAVIALTDPEGCPLSRFKDSLGNPTHILRIGESYKEKQRTIQAKKEVEQRRAGGYSRKYASKAKNLADDMVRNTARDLLYYAVTQDAMLIFENLSRGFGRQGKRTFMAERQYTRMEDWLTAKLAYEGLPSKTYLSKTLAQYTSKTCSNCGFTITSADYDRVLEKLKKTATGWMTTINGKELKVEGQITYYNRYKRQNVVKDLSVELDRLSEESVNNDISSWDKGRSGEALSLLKKRFSHRPVQEKFVCLNCGFETHADEQAALNIARSWLFLRSQEYKKYQTNKTTGNTDKRAFVETWQSFYRKKLKEVWKPAV

SEQ ID NO: 38375 - protein, 979 aa, synthetic construct
  REGION 1..979: note = engineered CasX variant
QEIKRINKIRRRLVKDSNTKKAGKTGPMKTLLVRVMTPDLRERLENLRKKPENIPQPISNTSRANLNKLLTDYTEMKKAILHVYWEEFQKDPVGLMSRVAQPASKKIDQNKLKPEMDEKGNLTTAGFACSQCGQPLFVYKLEQVSEKGKAYTNYFGRCNVAEHEKLIKLAQLKPEKDSDEAVTYSLGKFGQRALDFYSIHVTKESTHPVKPLAQIAGNRYASGPVGKALSDACMGTIASFLSKYQDIIIEHQKVVKGNQKRLESLRELAGKENLEYPSVTLPPQPHTKEGVDAYNEVIARVRMWVNLNLWQKLKLSRDDAKPLLRLKGFPSFPLVERQANEVDWWDMVCNVKKLINEKKEDGKVFWQNLAGYKRQEALRPYLSSEEDVRKKGKKFARYQLGDLLLHLEKKHGEDWGKVYDEAWERIDKKVEGLSKHIKLEEERRSEDAQSKAALTDWLRAKASFVIEGLKEADKDEFCRCELKLQKWYGDLRGKPFAIEAENSILDISGFSKQYNCAFIWQKDGVKKLNLYLIINYFKGGKLRFKKIKPEAFEANRFYTVINKKSGEIVPMEVNFNFDDPNLIILPLAFGKRQGREFIWNDLLSLETGSLKLANGRVIEKTLYNRRTRQDEPALFVALTFERREVLDSSNIKPMNLIGVDRGENIPAVIALTDPEGCPLSRFKDSLGNPTHILRIGESYKEKQRTIQAKKEVEQRRAGGYSRKYASKAKNLADDMVRNTARDLLYYAVTQDAMLIFENLSRGFGRQGKRTFMAERQYTRMEDWLTAKLAYEGLPSKTYLSKTLAQYTSKTCSNCGFTITSADYDRVLEKLKKTATGWMTTINGKELKVEGQITYYNRYKRQNVVKDLSVELDRLSEESVNNDISSWDKGRSGEALSLLKKRFSHRPVQEKFVCLNCGFETHADEQAALNIARSWLFLRSQEYKKYQTNKTTGNTDKRAFVETWQSFYRKKLKEVWKPAV

SEQ ID NO: 38376 - protein, 978 aa, synthetic construct
  REGION 1..978: note = engineered CasX variant
QEIKRINKIRRRLVKDSNTKKAGKTGPMKTLLVRVMTPDLRERLENLRKKPENIPQPISNTSRANLNKLLTDYTEMKKAILHVYWEEFQKDPVGLMSRVAQPASKKIDQNKLKPEMDEKGNLTTAGFACSQCGQPLFVYKLEQVSEKGKAYTNYFGRCNVAEHEKLILLAQLKPEKDSDEAVTYSLGKFGQRALDFYSIHVTKESTHPVKPLAQIAGNRYASPVGKALSDACMGTIASFLSKYQDIIIEHQKVVKGNQKRLESLRELAGKENLEYPSVTLPPQPHTKEGVDAYNEVIARVRMWVNLNLWQKLKLSRDDAKPLLRLKGFPSFPLVERQANEVDWWDMVCNVKKLINEKKEDGKVFWQNLAGYKRQEALRPYLSSEEDVRKKGKKFARYQLGDLLLHLEKKHGEDWGKVYDEAWERIDKKVEGLSKHIKLEEERRSEDAQSKAALTDWLRAKASFVIEGLKEADKDEFCRCELKLQKWYGDLRGKPFAIEAENSILDISGFSKQYNCAFIWQKDGVKKLNLYLIINYFKGGKLRFKKIKPEAFEANRFYTVINKKSGEIVPMEVNFNFDDPNLIILPLAFGKRQGREFIWNDLLSLETGSLKLANGRVIEKTLYNRRTRQDEPALFVALTFERREVLDSSNIKPMNLIGVDRGENIPAVIALTDPEGCPLSRFKDSLGNPTHILRIGESYKEKQRTIQAKKEVEQRRAGGYSRKYASKAKNLADDMVRNTARDLLYYAVTQDAMLIFENLSRGFGRQGKRTFMAERQYTRMEDWLTAKLAYEGLPSKTYLSKTLAQYTSKTCSNCGFTITSADYDRVLEKLKKTATGWMTTINGKELKVEGQITYYNRYKRQNVVKDLSVELDRLSEESVNNDISSWDKGRSGEALSLLKKRFSHRPVQEKFVCLNCGFETHADEQAALNIARSWLFLRSQEYKKYQTNKTTGNTDKRAFVETWQSFYRKKLKEVWKPAV

SEQ ID NO: 38377 - protein, 978 aa, synthetic construct
  REGION 1..978: note = engineered CasX variant
QEIKRINKIRRRLVKDSNTKKAGKTGPMKTLLVRVMTPDLRERLENLRKKPENIPQPISNTSRANLNKLLTDYTEMKKAILHVYWEEFQKDPVGLMSRVAQPASKKIDQNKLKPEMDEKGNLTTAGFACSQCGQPLFVYKLEQVSEKGKAYTNYFGRCNVAEHEKLILLAQLKPEKDSDEAVTYSLGKFGQRALDFYSIHVTKESTHPVKPLAQIAGNRYASYPVGKALSDACMGTIASFLSKYQDIIIEHQKVVKGNQKRLESLRELAGKENLEYPSVTLPPQPHTKEGVDAYNEVIARVRMWVNLNLWQKLKLSRDDAKPLLRLKGFPSFPLVERQANEVDWWDMVCNVKKLINEKKEDGKVFWQNLAGYKRQEALRPYLSSEEDRKKGKKFARYQLGDLLLHLEKKHGEDWGKVYDEAWERIDKKVEGLSKHIKLEEERRSEDAQSKAALTDWLRAKASFVIEGLKEADKDEFCRCELKLQKWYGDLRGKPFAIEAENSILDISGFSKQYNCAFIWQKDGVKKLNLYLIINYFKGGKLRFKKIKPEAFEANRFYTVINKKSGEIVPMEVNFNFDDPNLIILPLAFGKRQGREFIWNDLLSLETGSLKLANGRVIEKTLYNRRTRQDEPALFVALTFERREVLDSSNIKPMNLIGVDRGENIPAVIALTDPEGCPLSRFKDSLGNPTHILRIGESYKEKQRTIQAKKEVEQRRAGGYSRKYASKAKNLADDMVRNTARDLLYYAVTQDAMLIFENLSRGFGRQGKRTFMAERQYTRMEDWLTAKLAYEGLPSKTYLSKTLAQYTSKTCSNCGFTITSADYDRMLEKLKKTATGWMTTINGKELKVEGQITYYNRYKRQNVVKDLSVELDRLSEESVNNDISSWDKGRSGEALSLLKKRFSHRPVQEKFVCLNCGFETHADEQAALNIARSWLFLRSQEYKKYQTNKTTGNTDKRAFVETWQSFYRKKLKEVWKPAV

SEQ ID NO: 38378 - protein, 978 aa, synthetic construct
  REGION 1..978: note = engineered CasX variant
QEIKRINKIRRRLVKDSNTKKAGKTGPMKTLLVRVMTPDLRERLENLRKKPENIPQPISNTSRANLNKLLTDYTEMKKAILHVYWEEFQKDPVGLMSRVAQPASKKIDQNKLKPEMDEKGNLTTAGFACSQCGQPLFVYKLEQVSEKGKAYTNYFGRCNVAEHEKLILLAQLKPEKDSDEAVTYSLGKFGQRALDFYSIHVTKESTHPVKPLAQIAGNRYASHPVGKALSDACMGTIASFLSKYQDIIIEHQKVVKGNQKRLESLRELAGKENLEYPSVTLPPQPHTKEGVDAYNEVIARVRMWVNLNLWQKLKLSRDDAKPLLRLKGFPSFPLVERQANEVDWWDMVCNVKKLINEKKEDGKVFWQNLAGYKRQEALRPYLSSEEDRKKGKKFARYQLGDLLLHLEKKHGEDWGKVYDEAWERIDKKVEGLSKHIKLEEERRSEDAQSKAALTDWLRAKASFVIEGLKEADKDEFCRCELKLQKWYGDLRGKPFAIEAENSILDISGFSKQYNCAFIWQKDGVKKLNLYLIINYFKGGKLRFKKIKPEAFEANRFYTVINKKSGEIVPMEVNFNFDDPNLIILPLAFGKRQGREFIWNDLLSLETGSLKLANGRVIEKTLYNRRTRQDEPALFVALTFERREVLDSSNIKPMNLIGVDRGENIPAVIALTDPEGCPLSRFKDSLGNPTHILRIGESYKEKQRTIQAKKEVEQRRAGGYSRKYASKAKNLADDMVRNTARDLLYYAVTQDAMLIFENLSRGFGRQGKRTFMAERQYTRMEDWLTAKLAYEGLPSKTYLSKTLAQYTSKTCSNCGFTITSADYDRMLEKLKKTATGWMTTINGKELKVEGQITYYNRYKRQNVVKDLSVELDRLSEESVNNDISSWDKGRSGEALSLLKKRFSHRPVQEKFVCLNCGFETHADEQAALNIARSWLFLRSQEYKKYQTNKTTGNTDKRAFVETWQSFYRKKLKEVWKPAV

SEQ ID NO: 38379 - protein, 978 aa, synthetic construct
  REGION 1..978: note = engineered CasX variant
QEIKRINKIRRRLVKDSNTKKAGKTGPMKTLLVRVMTPDLRERLENLRKKPENIPQPISNTSRANLNKLLTDYTEMKKAILHVYWEEFQKDPVGLMSRVAQPASKKIDQNKLKPEMDEKGNLTTAGFACSQCGQPLFVYKLEQVSEKGKAYTNYFGRCNVAEHEKLILLAQLKPEKDSDEAVTYSLGKFGQRALDFYSIHVTKESTHPVKPLAQIAGNRYASSPVGKALSDACMGTIASFLSKYQDIIIEHQKVVKGNQKRLESLRELAGKENLEYPSVTLPPQPHTKEGVDAYNEVIARVRMWVNLNLWQKLKLSRDDAKPLLRLKGFPSFPLVERQANEVDWWDMVCNVKKLINEKKEDGKVFWQNLAGYKRQEALRPYLSSEEDRKKGKKFARYQLGDLLLHLEKKHGEDWGKVYDEAWERIDKKVEGLSKHIKLEEERRSEDAQSKAALTDWLRAKASFVIEGLKEADKDEFCRCELKLQKWYGDLRGKPFAIEAENSILDISGFSKQYNCAFIWQKDGVKKLNLYLIINYFKGGKLRFKKIKPEAFEANRFYTVINKKSGEIVPMEVNFNFDDPNLIILPLAFGKRQGREFIWNDLLSLETGSLKLANGRVIEKTLYNRRTRQDEPALFVALTFERREVLDSSNIKPMNLIGVDRGENIPAVIALTDPEGCPLSRFKDSLGNPTHILRIGESYKEKQRTIQAKKEVEQRRAGGYSRKYASKAKNLADDMVRNTARDLLYYAVTQDAMLIFENLSRGFGRQGKRTFMAERQYTRMEDWLTAKLAYEGLPSKTYLSKTLAQYTSKTCSNCGFTITSADYDRMLEKLKKTATGWMTTINGKELKVEGQITYYNRYKRQNVVKDLSVELDRLSEESVNNDISSWDKGRSGEALSLLKKRFSHRPVQEKFVCLNCGFETHADEQAALNIARSWLFLRSQEYKKYQTNKTTGNTDKRAFVETWQSFYRKKLKEVWKPAV

SEQ ID NO: 38380 - protein, 978 aa, synthetic construct
  REGION 1..978: note = engineered CasX variant
QEIKRINKIRRRLVKDSNTKKAGKTGPMKTLLVRVMTPDLRERLENLRKKPENIPQPISNTSRANLNKLLTDYTEMKKAILHVYWEEFQKDPVGLMSRVAQPASKKIDQNKLKPEMDEKGNLTTAGFACSQCGQPLFVYKLEQVSEKGKAYTNYFGRCNVAEHEKLILLAQLKPEKDSDEAVTYSLGKFGQRALDFYSIHVTKESTHPVKPLAQIAGNRYASTPVGKALSDACMGTIASFLSKYQDIIIEHQKVVKGNQKRLESLRELAGKENLEYPSVTLPPQPHTKEGVDAYNEVIARVRMWVNLNLWQKLKLSRDDAKPLLRLKGFPSFPLVERQANEVDWWDMVCNVKKLINEKKEDGKVFWQNLAGYKRQEALRPYLSSEEDRKKGKKFARYQLGDLLLHLEKKHGEDWGKVYDEAWERIDKKVEGLSKHIKLEEERRSEDAQSKAALTDWLRAKASFVIEGLKEADKDEFCRCELKLQKWYGDLRGKPFAIEAENSILDISGFSKQYNCAFIWQKDGVKKLNLYLIINYFKGGKLRFKKIKPEAFEANRFYTVINKKSGEIVPMEVNFNFDDPNLIILPLAFGKRQGREFIWNDLLSLETGSLKLANGRVIEKTLYNRRTRQDEPALFVALTFERREVLDSSNIKPMNLIGVDRGENIPAVIALTDPEGCPLSRFKDSLGNPTHILRIGESYKEKQRTIQAKKEVEQRRAGGYSRKYASKAKNLADDMVRNTARDLLYYAVTQDAMLIFENLSRGFGRQGKRTFMAERQYTRMEDWLTAKLAYEGLPSKTYLSKTLAQYTSKTCSNCGFTITSADYDRMLEKLKKTATGWMTTINGKELKVEGQITYYNRYKRQNVVKDLSVELDRLSEESVNNDISSWDKGRSGEALSLLKKRFSHRPVQEKFVCLNCGFETHADEQAALNIARSWLFLRSQEYKKYQTNKTTGNTDKRAFVETWQSFYRKKLKEVWKPAV

SEQ ID NO: 38381 - protein, 978 aa, synthetic construct
  REGION 1..978: note = engineered CasX variant
QEIKRINKIRRRLVKDSNTKKAGKTGPMKTLLVRVMTPDLRERLENLRKKPENIPQPISNTSRANLNKLLTDYTEMKKAILHVYWEEFQKDPVGLMSRVAQPASKKIDQNKLKPEMDEKGNLTTAGFACSQCGQPLFVYKLEQVSEKGKAYTNYFGRCNVAEHEKLILLAQLKPEKDSDEAVTYSLGKFGQRALDFYSIHVTKESTHPVKPLAQIAGNRYASAPVGKALSDACMGTIASFLSKYQDIIIEHQKVVKGNQKRLESLRELAGKENLEYPSVTLPPQPHTKEGVDAYNEVIARVRMWVNLNLWQKLKLSRDDAKPLLRLKGFPSFPLVERQANEVDWWDMVCNVKKLINEKKEDGKVFWQNLAGYKRQEALRPYLSSEEDRKKGKKFARYQLGDLLLHLEKKHGEDWGKVYDEAWERIDKKVEGLSKHIKLEEERRSEDAQSKAALTDWLRAKASFVIEGLKEADKDEFCRCELKLQKWYGDLRGKPFAIEAENSILDISGFSKQYNCAFIWQKDGVKKLNLYLIINYFKGGKLRFKKIKPEAFEANRFYTVINKKSGEIVPMEVNFNFDDPNLIILPLAFGKRQGREFIWNDLLSLETGSLKLANGRVIEKTLYNRRTRQDEPALFVALTFERREVLDSSNIKPMNLIGVDRGENIPAVIALTDPEGCPLSRFKDSLGNPTHILRIGESYKEKQRTIQAKKEVEQRRAGGYSRKYASKAKNLADDMVRNTARDLLYYAVTQDAMLIFENLSRGFGRQGKRTFMAERQYTRMEDWLTAKLAYEGLPSKTYLSKTLAQYTSKTCSNCGFTITSADYDRMLEKLKKTATGWMTTINGKELKVEGQITYYNRYKRQNVVKDLSVELDRLSEESVNNDISSWDKGRSGEALSLLKKRFSHRPVQEKFVCLNCGFETHADEQAALNIARSWLFLRSQEYKKYQTNKTTGNTDKRAFVETWQSFYRKKLKEVWKPAV

SEQ ID NO: 38382 - protein, 978 aa, synthetic construct
  REGION 1..978: note = engineered CasX variant
QEIKRINKIRRRLVKDSNTKKAGKTGPMKTLLVRVMTPDLRERLENLRKKPENIPQPISNTSRANLNKLLTDYTEMKKAILHVYWEEFQKDPVGLMSRVAQPASKKIDQNKLKPEMDEKGNLTTAGFACSQCGQPLFVYKLEQVSEKGKAYTNYFGRCNVAEHEKLILLAQLKPEKDSDEAVTYSLGKFGQRALDFYSIHVTKESTHPVKPLAQIAGNRYASVPVGKALSDACMGTIASFLSKYQDIIIEHQKVVKGNQKRLESLRELAGKENLEYPSVTLPPQPHTKEGVDAYNEVIARVRMWVNLNLWQKLKLSRDDAKPLLRLKGFPSFPLVERQANEVDWWDMVCNVKKLINEKKEDGKVFWQNLAGYKRQEALRPYLSSEEDRKKGKKFARYQLGDLLLHLEKKHGEDWGKVYDEAWERIDKKVEGLSKHIKLEEERRSEDAQSKAALTDWLRAKASFVIEGLKEADKDEFCRCELKLQKWYGDLRGKPFAIEAENSILDISGFSKQYNCAFIWQKDGVKKLNLYLIINYFKGGKLRFKKIKPEAFEANRFYTVINKKSGEIVPMEVNFNFDDPNLIILPLAFGKRQGREFIWNDLLSLETGSLKLANGRVIEKTLYNRRTRQDEPALFVALTFERREVLDSSNIKPMNLIGVDRGENIPAVIALTDPEGCPLSRFKDSLGNPTHILRIGESYKEKQRTIQAKKEVEQRRAGGYSRKYASKAKNLADDMVRNTARDLLYYAVTQDAMLIFENLSRGFGRQGKRTFMAERQYTRMEDWLTAKLAYEGLPSKTYLSKTLAQYTSKTCSNCGFTITSADYDRMLEKLKKTATGWMTTINGKELKVEGQITYYNRYKRQNVVKDLSVELDRLSEESVNNDISSWDKGRSGEALSLLKKRFSHRPVQEKFVCLNCGFETHADEQAALNIARSWLFLRSQEYKKYQTNKTTGNTDKRAFVETWQSFYRKKLKEVWKPAV

SEQ ID NO: 38383 - protein, 978 aa, synthetic construct
  REGION 1..978: note = engineered CasX variant
QEIKRINKIRRRLVKDSNTKKAGKTGPMKTLLVRVMTPDLRERLENLRKKPENIPQPISNTSRANLNKLLTDYTEMKKAILHVYWEEFQKDPVGLMSRVAQPASKKIDQNKLKPEMDEKGNLTTAGFACSQCGQPLFVYKLEQVSEKGKAYTNYFGRCNVAEHEKLIKLAQLKPEKDSDEAVTYSLGKFGQRALDFYSIHVTKESTHPVKPLAQIAGNRYASGPVGKALSDACMGTIASFLSKYQDIIIEHQKVVKGNQKRLESLRELAGKENLEYPSVTLPPQPHTKEGVDAYNEVIARVRMWVNLNLWQKLKLSRDDAKPLLRLKGFPSFPLVERQANEVDWWDMVCNVKKLINEKKEDGKVFWQNLAGYKRQEALRPYLSSEEDRKKGKKFARYQLGDLLLHLEKKHGEDWGKVYDEAWERIDKKVEGLSKHIKLEEERRSEDAQSKAALTDWLRAKASFVIEGLKEADKDEFCRCELKLQKWYGDLRGKPFAIEAENSILDISGFSKQYNCAFIWQKDGVKKLNLYLIINYFKGGKLRFKKIKPEAFEANRFYTVINKKSGEIVPMEVNFNFDDPNLIILPLAFGKRQGREFIWNDLLSLETGSLKLANGRVIEKTLYNRRTRQDEPALFVALTFERREVLDSSNIKPMNLIGVDRGENIPAVIALTDPEGCPLSRFKDSLGNPTHILRIGESYKEKQRTIQAKKEVEQRRAGGYSRKYASKAKNLADDMVRNTARDLLYYAVTQDAMLIFENLSRGFGRQGKRTFMAERQYTRMEDWLTAKLAYEGLPSKTYLSKTLAQYTSKTCSNCGFTITSADYDRMLEKLKKTATGWMTTINGKELKVEGQITYYNRYKRQNVVKDLSVELDRLSEESVNNDISSWDKGRSGEALSLLKKRFSHRPVQEKFVCLNCGFETHADEQAALNIARSWLFLRSQEYKKYQTNKTTGNTDKRAFVETWQSFYRKKLKEVWKPAV

SEQ ID NO: 38384 - protein, 977 aa, synthetic construct
  REGION 1..977: note = engineered CasX variant
QEIKRINKIRRRLVKDSNTKKAGKTGPMKTLLVRVMTPDLRERLENLRKKPENIPQPISNTSRANLNKLLTDYTEMKKAILHVYWEEFQKDPVGLMSRVAQPASKKIDQNKLKPEMDEKGNLTTAGFACSQCGQPLFVYKLEQVSEKGKAYTNYFGRCNVAEHEKLILLAQLKPEKDSDEAVTYSLGKFGQRALDFYSIHVTKESTHPVKPLAQIAGNRYASPVGKALSDACMGTIASFLSKYQDIIIEHQKVVKGNQKRLESLRELAGKENLEYPSVTLPPQPHTKEGVDAYNEVIARVRMWVNLNLWQKLKLSRDDAKPLLRLKGFPSFPLVERQANEVDWWDMVCNVKKLINEKKEDGKVFWQNLAGYKRQEALRPYLSSEEDRKKGKKFARYQLGDLLLHLEKKHGEDWGKVYDEAWERIDKKVEGLSKHIKLEEERRSEDAQSKAALTDWLRAKASFVIEGLKEADKDEFCRCELKLQKWYGDLRGKPFAIEAENSILDISGFSKQYNCAFIWQKDGVKKLNLYLIINYFKGGKLRFKKIKPEAFEANRFYTVINKKSGEIVPMEVNFNFDDPNLIILPLAFGKRQGREFIWNDLLSLETGSLKLANGRVIEKTLYNRRTRQDEPALFVALTFERREVLDSSNIKPMNLIGVDRGENIPAVIALTDPEGCPLSRFKDSLGNPTHILRIGESYKEKQRTIQAKKEVEQRRAGGYSRKYASKAKNLADDMVRNTARDLLYYAVTQDAMLIFENLSRGFGRQGKRTFMAERQYTRMEDWLTAKLAYEGLPSKTYLSKTLAQYTSKTCSNCGFTITSADYDRMLEKLKKTATGWMTTINGKELKVEGQITYYNRYKRQNVVKDLSVELDRLSEESVNNDISSWDKGRSGEALSLLKKRFSHRPVQEKFVCLNCGFETHADEQAALNIARSWLFLRSQEYKKYQTNKTTGNTDKRAFVETWQSFYRKKLKEVWKPAV

SEQ ID NO: 38385 - protein, 978 aa, synthetic construct
  REGION 1..978: note = engineered CasX variant
QEIKRINKIRRRLVKDSNTKKAGKTGPMKTLLVRVMTPDLRERLENLRKKPENIPQPISNTSRANLNKLLTDYTEMKKAILHVYWEEFQKDPVGLMSRVAQPASKKIDQNKLKPEMDEKGNLTTAGFACSQCGQPLFVYKLEQVSEKGKAYTNYFGRCNVAEHEKLILLAQLKPEKDSDEAVTYSLGKFGQRALDFYSIHVTKESTHPVKPLAQIAGNRYASYPVGKALSDACMGTIASFLSKYQDIIIEHQKVVKGNQKRLESLRELAGKENLEYPSVTLPPQPHTKEGVDAYNEVIARVRMWVNLNLWQKLKLSRDDAKPLLRLKGFPSFPLVERQANEVDWWDMVCNVKKLINEKKEDGKVFWQNLAGYKRQEALRPYLSSEEDRKKGKKFARYQLGDLLLHLEKKHGEDWGKVYDEAWERIDKKVEGLSKHIKLEEERRSEDAQSKAALTDWLRAKASFVIEGLKEADKDEFCRCELKLQKWYGDLRGKPFAIEAENSILDISGFSKQYNCAFIWQKDGVKKLNLYLIINYFKGGKLRFKKIKPEAFEANRFYTVINKKSGEIVPMEVNFNFDDPNLIILPLAFGKRQGREFIWNDLLSLETGSLKLANGRVIEKTLYNRRTRQDEPALFVALTFERREVLDSSNIKPMNLIGVDRGENIPAVIALTDPEGCPLSRFKDSLGNPTHILRIGESYKEKQRTIQAKKEVEQRRAGGYSRKYASKAKNLADDMVRNTARDLLYYAVTQDAMLIFENLSRGFGRQGKRTFMAERQYTRMEDWLTAKLAYEGLPSKTYLSKTLAQYTSKTCSNCGFTITSADYDRVLEKLKKTATGWMTTINGKELKVEGQITYYNRYKRQNVVKDLSVELDRLSEESVNNDISSWDKGRQGEALSLLKKRFSHRPVQEKFVCLNCGFETHADEQAALNIARSWLFLRSQEYKKYQTNKTTGNTDKRAFVETWQSFYRKKLKEVWKPAV

SEQ ID NO: 38386 - protein, 978 aa, synthetic construct
  REGION 1..978: note = engineered CasX variant
QEIKRINKIRRRLVKDSNTKKAGKTGPMKTLLVRVMTPDLRERLENLRKKPENIPQPISNTSRANLNKLLTDYTEMKKAILHVYWEEFQKDPVGLMSRVAQPASKKIDQNKLKPEMDEKGNLTTAGFACSQCGQPLFVYKLEQVSEKGKAYTNYFGRCNVAEHEKLILLAQLKPEKDSDEAVTYSLGKFGQRALDFYSIHVTKESTHPVKPLAQIAGNRYASHPVGKALSDACMGTIASFLSKYQDIIIEHQKVVKGNQKRLESLRELAGKENLEYPSVTLPPQPHTKEGVDAYNEVIARVRMWVNLNLWQKLKLSRDDAKPLLRLKGFPSFPLVERQANEVDWWDMVCNVKKLINEKKEDGKVFWQNLAGYKRQEALRPYLSSEEDRKKGKKFARYQLGDLLLHLEKKHGEDWGKVYDEAWERIDKKVEGLSKHIKLEEERRSEDAQSKAALTDWLRAKASFVIEGLKEADKDEFCRCELKLQKWYGDLRGKPFAIEAENSILDISGFSKQYNCAFIWQKDGVKKLNLYLIINYFKGGKLRFKKIKPEAFEANRFYTVINKKSGEIVPMEVNFNFDDPNLIILPLAFGKRQGREFIWNDLLSLETGSLKLANGRVIEKTLYNRRTRQDEPALFVALTFERREVLDSSNIKPMNLIGVDRGENIPAVIALTDPEGCPLSRFKDSLGNPTHILRIGESYKEKQRTIQAKKEVEQRRAGGYSRKYASKAKNLADDMVRNTARDLLYYAVTQDAMLIFENLSRGFGRQGKRTFMAERQYTRMEDWLTAKLAYEGLPSKTYLSKTLAQYTSKTCSNCGFTITSADYDRVLEKLKKTATGWMTTINGKELKVEGQITYYNRYKRQNVVKDLSVELDRLSEESVNNDISSWDKGRQGEALSLLKKRFSHRPVQEKFVCLNCGFETHADEQAALNIARSWLFLRSQEYKKYQTNKTTGNTDKRAFVETWQSFYRKKLKEVWKPAV

SEQ ID NO: 38387 - protein, 978 aa, synthetic construct
  REGION 1..978: note = engineered CasX variant
QEIKRINKIRRRLVKDSNTKKAGKTGPMKTLLVRVMTPDLRERLENLRKKPENIPQPISNTSRANLNKLLTDYTEMKKAILHVYWEEFQKDPVGLMSRVAQPASKKIDQNKLKPEMDEKGNLTTAGFACSQCGQPLFVYKLEQVSEKGKAYTNYFGRCNVAEHEKLILLAQLKPEKDSDEAVTYSLGKFGQRALDFYSIHVTKESTHPVKPLAQIAGNRYASSPVGKALSDACMGTIASFLSKYQDIIIEHQKVVKGNQKRLESLRELAGKENLEYPSVTLPPQPHTKEGVDAYNEVIARVRMWVNLNLWQKLKLSRDDAKPLLRLKGFPSFPLVERQANEVDWWDMVCNVKKLINEKKEDGKVFWQNLAGYKRQEALRPYLSSEEDRKKGKKFARYQLGDLLLHLEKKHGEDWGKVYDEAWERIDKKVEGLSKHIKLEEERRSEDAQSKAALTDWLRAKASFVIEGLKEADKDEFCRCELKLQKWYGDLRGKPFAIEAENSILDISGFSKQYNCAFIWQKDGVKKLNLYLIINYFKGGKLRFKKIKPEAFEANRFYTVINKKSGEIVPMEVNFNFDDPNLIILPLAFGKRQGREFIWNDLLSLETGSLKLANGRVIEKTLYNRRTRQDEPALFVALTFERREVLDSSNIKPMNLIGVDRGENIPAVIALTDPEGCPLSRFKDSLGNPTHILRIGESYKEKQRTIQAKKEVEQRRAGGYSRKYASKAKNLADDMVRNTARDLLYYAVTQDAMLIFENLSRGFGRQGKRTFMAERQYTRMEDWLTAKLAYEGLPSKTYLSKTLAQYTSKTCSNCGFTITSADYDRVLEKLKKTATGWMTTINGKELKVEGQITYYNRYKRQNVVKDLSVELDRLSEESVNNDISSWDKGRQGEALSLLKKRFSHRPVQEKFVCLNCGFETHADEQAALNIARSWLFLRSQEYKKYQTNKTTGNTDKRAFVETWQSFYRKKLKEVWKPAV

SEQ ID NO: 38388 - protein, 978 aa, synthetic construct
  REGION 1..978: note = engineered CasX variant
QEIKRINKIRRRLVKDSNTKKAGKTGPMKTLLVRVMTPDLRERLENLRKKPENIPQPISNTSRANLNKLLTDYTEMKKAILHVYWEEFQKDPVGLMSRVAQPASKKIDQNKLKPEMDEKGNLTTAGFACSQCGQPLFVYKLEQVSEKGKAYTNYFGRCNVAEHEKLILLAQLKPEKDSDEAVTYSLGKFGQRALDFYSIHVTKESTHPVKPLAQIAGNRYASTPVGKALSDACMGTIASFLSKYQDIIIEHQKVVKGNQKRLESLRELAGKENLEYPSVTLPPQPHTKEGVDAYNEVIARVRMWVNLNLWQKLKLSRDDAKPLLRLKGFPSFPLVERQANEVDWWDMVCNVKKLINEKKEDGKVFWQNLAGYKRQEALRPYLSSEEDRKKGKKFARYQLGDLLLHLEKKHGEDWGKVYDEAWERIDKKVEGLSKHIKLEEERRSEDAQSKAALTDWLRAKASFVIEGLKEADKDEFCRCELKLQKWYGDLRGKPFAIEAENSILDISGFSKQYNCAFIWQKDGVKKLNLYLIINYFKGGKLRFKKIKPEAFEANRFYTVINKKSGEIVPMEVNFNFDDPNLIILPLAFGKRQGREFIWNDLLSLETGSLKLANGRVIEKTLYNRRTRQDEPALFVALTFERREVLDSSNIKPMNLIGVDRGENIPAVIALTDPEGCPLSRFKDSLGNPTHILRIGESYKEKQRTIQAKKEVEQRRAGGYSRKYASKAKNLADDMVRNTARDLLYYAVTQDAMLIFENLSRGFGRQGKRTFMAERQYTRMEDWLTAKLAYEGLPSKTYLSKTLAQYTSKTCSNCGFTITSADYDRVLEKLKKTATGWMTTINGKELKVEGQITYYNRYKRQNVVKDLSVELDRLSEESVNNDISSWDKGRQGEALSLLKKRFSHRPVQEKFVCLNCGFETHADEQAALNIARSWLFLRSQEYKKYQTNKTTGNTDKRAFVETWQSFYRKKLKEVWKPAV

SEQ ID NO: 38389 - protein, 978 aa, synthetic construct
  REGION 1..978: note = engineered CasX variant
QEIKRINKIRRRLVKDSNTKKAGKTGPMKTLLVRVMTPDLRERLENLRKKPENIPQPISNTSRANLNKLLTDYTEMKKAILHVYWEEFQKDPVGLMSRVAQPASKKIDQNKLKPEMDEKGNLTTAGFACSQCGQPLFVYKLEQVSEKGKAYTNYFGRCNVAEHEKLILLAQLKPEKDSDEAVTYSLGKFGQRALDFYSIHVTKESTHPVKPLAQIAGNRYASAPVGKALSDACMGTIASFLSKYQDIIIEHQKVVKGNQKRLESLRELAGKENLEYPSVTLPPQPHTKEGVDAYNEVIARVRMWVNLNLWQKLKLSRDDAKPLLRLKGFPSFPLVERQANEVDWWDMVCNVKKLINEKKEDGKVFWQNLAGYKRQEALRPYLSSEEDRKKGKKFARYQLGDLLLHLEKKHGEDWGKVYDEAWERIDKKVEGLSKHIKLEEERRSEDAQSKAALTDWLRAKASFVIEGLKEADKDEFCRCELKLQKWYGDLRGKPFAIEAENSILDISGFSKQYNCAFIWQKDGVKKLNLYLIINYFKGGKLRFKKIKPEAFEANRFYTVINKKSGEIVPMEVNFNFDDPNLIILPLAFGKRQGREFIWNDLLSLETGSLKLANGRVIEKTLYNRRTRQDEPALFVALTFERREVLDSSNIKPMNLIGVDRGENIPAVIALTDPEGCPLSRFKDSLGNPTHILRIGESYKEKQRTIQAKKEVEQRRAGGYSRKYASKAKNLADDMVRNTARDLLYYAVTQDAMLIFENLSRGFGRQGKRTFMAERQYTRMEDWLTAKLAYEGLPSKTYLSKTLAQYTSKTCSNCGFTITSADYDRVLEKLKKTATGWMTTINGKELKVEGQITYYNRYKRQNVVKDLSVELDRLSEESVNNDISSWDKGRQGEALSLLKKRFSHRPVQEKFVCLNCGFETHADEQAALNIARSWLFLRSQEYKKYQTNKTTGNTDKRAFVETWQSFYRKKLKEVWKPAV

SEQ ID NO: 38390 - protein, 978 aa, synthetic construct
  REGION 1..978: note = engineered CasX variant
QEIKRINKIRRRLVKDSNTKKAGKTGPMKTLLVRVMTPDLRERLENLRKKPENIPQPISNTSRANLNKLLTDYTEMKKAILHVYWEEFQKDPVGLMSRVAQPASKKIDQNKLKPEMDEKGNLTTAGFACSQCGQPLFVYKLEQVSEKGKAYTNYFGRCNVAEHEKLILLAQLKPEKDSDEAVTYSLGKFGQRALDFYSIHVTKESTHPVKPLAQIAGNRYASVPVGKALSDACMGTIASFLSKYQDIIIEHQKVVKGNQKRLESLRELAGKENLEYPSVTLPPQPHTKEGVDAYNEVIARVRMWVNLNLWQKLKLSRDDAKPLLRLKGFPSFPLVERQANEVDWWDMVCNVKKLINEKKEDGKVFWQNLAGYKRQEALRPYLSSEEDRKKGKKFARYQLGDLLLHLEKKHGEDWGKVYDEAWERIDKKVEGLSKHIKLEEERRSEDAQSKAALTDWLRAKASFVIEGLKEADKDEFCRCELKLQKWYGDLRGKPFAIEAENSILDISGFSKQYNCAFIWQKDGVKKLNLYLIINYFKGGKLRFKKIKPEAFEANRFYTVINKKSGEIVPMEVNFNFDDPNLIILPLAFGKRQGREFIWNDLLSLETGSLKLANGRVIEKTLYNRRTRQDEPALFVALTFERREVLDSSNIKPMNLIGVDRGENIPAVIALTDPEGCPLSRFKDSLGNPTHILRIGESYKEKQRTIQAKKEVEQRRAGGYSRKYASKAKNLADDMVRNTARDLLYYAVTQDAMLIFENLSRGFGRQGKRTFMAERQYTRMEDWLTAKLAYEGLPSKTYLSKTLAQYTSKTCSNCGFTITSADYDRVLEKLKKTATGWMTTINGKELKVEGQITYYNRYKRQNVVKDLSVELDRLSEESVNNDISSWDKGRQGEALSLLKKRFSHRPVQEKFVCLNCGFETHADEQAALNIARSWLFLRSQEYKKYQTNKTTGNTDKRAFVETWQSFYRKKLKEVWKPAV

SEQ ID NO: 38391 - protein, 978 aa, synthetic construct
  REGION 1..978: note = engineered CasX variant
QEIKRINKIRRRLVKDSNTKKAGKTGPMKTLLVRVMTPDLRERLENLRKKPENIPQPISNTSRANLNKLLTDYTEMKKAILHVYWEEFQKDPVGLMSRVAQPASKKIDQNKLKPEMDEKGNLTTAGFACSQCGQPLFVYKLEQVSEKGKAYTNYFGRCNVAEHEKLIKLAQLKPEKDSDEAVTYSLGKFGQRALDFYSIHVTKESTHPVKPLAQIAGNRYASGPVGKALSDACMGTIASFLSKYQDIIIEHQKVVKGNQKRLESLRELAGKENLEYPSVTLPPQPHTKEGVDAYNEVIARVRMWVNLNLWQKLKLSRDDAKPLLRLKGFPSFPLVERQANEVDWWDMVCNVKKLINEKKEDGKVFWQNLAGYKRQEALRPYLSSEEDRKKGKKFARYQLGDLLLHLEKKHGEDWGKVYDEAWERIDKKVEGLSKHIKLEEERRSEDAQSKAALTDWLRAKASFVIEGLKEADKDEFCRCELKLQKWYGDLRGKPFAIEAENSILDISGFSKQYNCAFIWQKDGVKKLNLYLIINYFKGGKLRFKKIKPEAFEANRFYTVINKKSGEIVPMEVNFNFDDPNLIILPLAFGKRQGREFIWNDLLSLETGSLKLANGRVIEKTLYNRRTRQDEPALFVALTFERREVLDSSNIKPMNLIGVDRGENIPAVIALTDPEGCPLSRFKDSLGNPTHILRIGESYKEKQRTIQAKKEVEQRRAGGYSRKYASKAKNLADDMVRNTARDLLYYAVTQDAMLIFENLSRGFGRQGKRTFMAERQYTRMEDWLTAKLAYEGLPSKTYLSKTLAQYTSKTCSNCGFTITSADYDRVLEKLKKTATGWMTTINGKELKVEGQITYYNRYKRQNVVKDLSVELDRLSEESVNNDISSWDKGRQGEALSLLKKRFSHRPVQEKFVCLNCGFETHADEQAALNIARSWLFLRSQEYKKYQTNKTTGNTDKRAFVETWQSFYRKKLKEVWKPAV

SEQ ID NO: 38392 - protein, 977 aa, synthetic construct
  REGION 1..977: note = engineered CasX variant
QEIKRINKIRRRLVKDSNTKKAGKTGPMKTLLVRVMTPDLRERLENLRKKPENIPQPISNTSRANLNKLLTDYTEMKKAILHVYWEEFQKDPVGLMSRVAQPASKKIDQNKLKPEMDEKGNLTTAGFACSQCGQPLFVYKLEQVSEKGKAYTNYFGRCNVAEHEKLILLAQLKPEKDSDEAVTYSLGKFGQRALDFYSIHVTKESTHPVKPLAQIAGNRYASPVGKALSDACMGTIASFLSKYQDIIIEHQKVVKGNQKRLESLRELAGKENLEYPSVTLPPQPHTKEGVDAYNEVIARVRMWVNLNLWQKLKLSRDDAKPLLRLKGFPSFPLVERQANEVDWWDMVCNVKKLINEKKEDGKVFWQNLAGYKRQEALRPYLSSEEDRKKGKKFARYQLGDLLLHLEKKHGEDWGKVYDEAWERIDKKVEGLSKHIKLEEERRSEDAQSKAALTDWLRAKASFVIEGLKEADKDEFCRCELKLQKWYGDLRGKPFAIEAENSILDISGFSKQYNCAFIWQKDGVKKLNLYLIINYFKGGKLRFKKIKPEAFEANRFYTVINKKSGEIVPMEVNFNFDDPNLIILPLAFGKRQGREFIWNDLLSLETGSLKLANGRVIEKTLYNRRTRQDEPALFVALTFERREVLDSSNIKPMNLIGVDRGENIPAVIALTDPEGCPLSRFKDSLGNPTHILRIGESYKEKQRTIQAKKEVEQRRAGGYSRKYASKAKNLADDMVRNTARDLLYYAVTQDAMLIFENLSRGFGRQGKRTFMAERQYTRMEDWLTAKLAYEGLPSKTYLSKTLAQYTSKTCSNCGFTITSADYDRVLEKLKKTATGWMTTINGKELKVEGQITYYNRYKRQNVVKDLSVELDRLSEESVNNDISSWDKGRQGEALSLLKKRFSHRPVQEKFVCLNCGFETHADEQAALNIARSWLFLRSQEYKKYQTNKTTGNTDKRAFVETWQSFYRKKLKEVWKPAV

SEQ ID NO: 38393 - protein, 978 aa, synthetic construct
  REGION 1..978: note = engineered CasX variant
QEIKRINKIRRRLVKDSNTKKAGKTGPMKTLLVRVMTPDLRERLENLRKKPENIPQPISNTSRANLNKLLTDYTEMKKAILHVYWEEFQKDPVGLMSRVAQPASKKIDQNKLKPEMDEKGNLTTAGFACSQCGQPLFVYKLEQVSEKGKAYTNYFGRCNVAEHEKLILLAQLKPEKDSDEAVTYSLGKFGQRALDFYSIHVTKESTHPVKPLAQIAGNRYASYPVGKALSDACMGTIASFLSKYQDIIIEHQKVVKGNQKRLESLRELAGKENLEYPSVTLPPQPHTKEGVDAYNEVIARVRMWVNLNLWQKLKLSRDDAKPLLRLKGFPSFPLVERQANEVDWWDMVCNVKKLINEKKEDGKVFWQNLAGYKRQEALRPYLSSEEDRKKGKKFARYQLGDLLLHLEKKHGEDWGKVYDEAWERIDKKVEGLSKHIKLEEERRSEDAQSKAALTDWLRAKASFVIEGLKEADKDEFCRCELKLQKWYGDLRGKPFAIEAENSILDISGFSKQYNCAFIWQKDGVKKLNLYLIINYFKGGKLRFKKIKPEAFEANRFYTVINKKSGEIVPMEVNFNFDDPNLIILPLAFGKRQGREFIWNDLLSLETGSLKLANGRVIEKTLYNRRTRQDEPALFVALTFERREVLDSSNIKPMNLIGVDRGENIPAVIALTDPEGCPLSRFKDSLGNPTHILRIGESYKEKQRTIQAKKEVEQRRAGGYSRKYASKAKNLADDMVRNTARDLLYYAVTQDAMLIFENLSRGFGRQGKRTFMAERQYTRMEDWLTAKLAYEGLPSKTYLSKTLAQYTSKTCSNCGFTITSADYDRVLEKLKKTATGWMTTINGKELKVEGQITYYNRYKRQNVVKDLSVELDRLSEESVNNDISSWDKGRSGEALSLLKKRFSHRPVQEKFVCLNCEFETHADEQAALNIARSWLFLRSQEYKKYQTNKTTGNTDKRAFVETWQSFYRKKLKEVWKPAV

SEQ ID NO: 38394 - protein, 978 aa, synthetic construct
  REGION 1..978: note = engineered CasX variant
QEIKRINKIRRRLVKDSNTKKAGKTGPMKTLLVRVMTPDLRERLENLRKKPENIPQPISNTSRANLNKLLTDYTEMKKAILHVYWEEFQKDPVGLMSRVAQPASKKIDQNKLKPEMDEKGNLTTAGFACSQCGQPLFVYKLEQVSEKGKAYTNYFGRCNVAEHEKLILLAQLKPEKDSDEAVTYSLGKFGQRALDFYSIHVTKESTHPVKPLAQIAGNRYASHPVGKALSDACMGTIASFLSKYQDIIIEHQKVVKGNQKRLESLRELAGKENLEYPSVTLPPQPHTKEGVDAYNEVIARVRMWVNLNLWQKLKLSRDDAKPLLRLKGFPSFPLVERQANEVDWWDMVCNVKKLINEKKEDGKVFWQNLAGYKRQEALRPYLSSEEDRKKGKKFARYQLGDLLLHLEKKHGEDWGKVYDEAWERIDKKVEGLSKHIKLEEERRSEDAQSKAALTDWLRAKASFVIEGLKEADKDEFCRCELKLQKWYGDLRGKPFAIEAENSILDISGFSKQYNCAFIWQKDGVKKLNLYLIINYFKGGKLRFKKIKPEAFEANRFYTVINKKSGEIVPMEVNFNFDDPNLIILPLAFGKRQGREFIWNDLLSLETGSLKLANGRVIEKTLYNRRTRQDEPALFVALTFERREVLDSSNIKPMNLIGVDRGENIPAVIALTDPEGCPLSRFKDSLGNPTHILRIGESYKEKQRTIQAKKEVEQRRAGGYSRKYASKAKNLADDMVRNTARDLLYYAVTQDAMLIFENLSRGFGRQGKRTFMAERQYTRMEDWLTAKLAYEGLPSKTYLSKTLAQYTSKTCSNCGFTITSADYDRVLEKLKKTATGWMTTINGKELKVEGQITYYNRYKRQNVVKDLSVELDRLSEESVNNDISSWDKGRSGEALSLLKKRFSHRPVQEKFVCLNCEFETHADEQAALNIARSWLFLRSQEYKKYQTNKTTGNTDKRAFVETWQSFYRKKLKEVWKPAV

SEQ ID NO: 38395 - protein, 978 aa, synthetic construct
  REGION 1..978: note = engineered CasX variant
QEIKRINKIRRRLVKDSNTKKAGKTGPMKTLLVRVMTPDLRERLENLRKKPENIPQPISNTSRANLNKLLTDYTEMKKAILHVYWEEFQKDPVGLMSRVAQPASKKIDQNKLKPEMDEKGNLTTAGFACSQCGQPLFVYKLEQVSEKGKAYTNYFGRCNVAEHEKLILLAQLKPEKDSDEAVTYSLGKFGQRALDFYSIHVTKESTHPVKPLAQIAGNRYASSPVGKALSDACMGTIASFLSKYQDIIIEHQKVVKGNQKRLESLRELAGKENLEYPSVTLPPQPHTKEGVDAYNEVIARVRMWVNLNLWQKLKLSRDDAKPLLRLKGFPSFPLVERQANEVDWWDMVCNVKKLINEKKEDGKVFWQNLAGYKRQEALRPYLSSEEDRKKGKKFARYQLGDLLLHLEKKHGEDWGKVYDEAWERIDKKVEGLSKHIKLEEERRSEDAQSKAALTDWLRAKASFVIEGLKEADKDEFCRCELKLQKWYGDLRGKPFAIEAENSILDISGFSKQYNCAFIWQKDGVKKLNLYLIINYFKGGKLRFKKIKPEAFEANRFYTVINKKSGEIVPMEVNFNFDDPNLIILPLAFGKRQGREFIWNDLLSLETGSLKLANGRVIEKTLYNRRTRQDEPALFVALTFERREVLDSSNIKPMNLIGVDRGENIPAVIALTDPEGCPLSRFKDSLGNPTHILRIGESYKEKQRTIQAKKEVEQRRAGGYSRKYASKAKNLADDMVRNTARDLLYYAVTQDAMLIFENLSRGFGRQGKRTFMAERQYTRMEDWLTAKLAYEGLPSKTYLSKTLAQYTSKTCSNCGFTITSADYDRVLEKLKKTATGWMTTINGKELKVEGQITYYNRYKRQNVVKDLSVELDRLSEESVNNDISSWDKGRSGEALSLLKKRFSHRPVQEKFVCLNCEFETHADEQAALNIARSWLFLRSQEYKKYQTNKTTGNTDKRAFVETWQSFYRKKLKEVWKPAV

SEQ ID NO: 38396 - protein, 978 aa, synthetic construct
  REGION 1..978: note = engineered CasX variant
QEIKRINKIRRRLVKDSNTKKAGKTGPMKTLLVRVMTPDLRERLENLRKKPENIPQPISNTSRANLNKLLTDYTEMKKAILHVYWEEFQKDPVGLMSRVAQPASKKIDQNKLKPEMDEKGNLTTAGFACSQCGQPLFVYKLEQVSEKGKAYTNYFGRCNVAEHEKLILLAQLKPEKDSDEAVTYSLGKFGQRALDFYSIHVTKESTHPVKPLAQIAGNRYASTPVGKALSDACMGTIASFLSKYQDIIIEHQKVVKGNQKRLESLRELAGKENLEYPSVTLPPQPHTKEGVDAYNEVIARVRMWVNLNLWQKLKLSRDDAKPLLRLKGFPSFPLVERQANEVDWWDMVCNVKKLINEKKEDGKVFWQNLAGYKRQEALRPYLSSEEDRKKGKKFARYQLGDLLLHLEKKHGEDWGKVYDEAWERIDKKVEGLSKHIKLEEERRSEDAQSKAALTDWLRAKASFVIEGLKEADKDEFCRCELKLQKWYGDLRGKPFAIEAENSILDISGFSKQYNCAFIWQKDGVKKLNLYLIINYFKGGKLRFKKIKPEAFEANRFYTVINKKSGEIVPMEVNFNFDDPNLIILPLAFGKRQGREFIWNDLLSLETGSLKLANGRVIEKTLYNRRTRQDEPALFVALTFERREVLDSSNIKPMNLIGVDRGENIPAVIALTDPEGCPLSRFKDSLGNPTHILRIGESYKEKQRTIQAKKEVEQRRAGGYSRKYASKAKNLADDMVRNTARDLLYYAVTQDAMLIFENLSRGFGRQGKRTFMAERQYTRMEDWLTAKLAYEGLPSKTYLSKTLAQYTSKTCSNCGFTITSADYDRVLEKLKKTATGWMTTINGKELKVEGQITYYNRYKRQNVVKDLSVELDRLSEESVNNDISSWDKGRSGEALSLLKKRFSHRPVQEKFVCLNCEFETHADEQAALNIARSWLFLRSQEYKKYQTNKTTGNTDKRAFVETWQSFYRKKLKEVWKPAV

SEQ ID NO: 38397 - protein, 978 aa, synthetic construct
  REGION 1..978: note = engineered CasX variant
QEIKRINKIRRRLVKDSNTKKAGKTGPMKTLLVRVMTPDLRERLENLRKKPENIPQPISNTSRANLNKLLTDYTEMKKAILHVYWEEFQKDPVGLMSRVAQPASKKIDQNKLKPEMDEKGNLTTAGFACSQCGQPLFVYKLEQVSEKGKAYTNYFGRCNVAEHEKLILLAQLKPEKDSDEAVTYSLGKFGQRALDFYSIHVTKESTHPVKPLAQIAGNRYASAPVGKALSDACMGTIASFLSKYQDIIIEHQKVVKGNQKRLESLRELAGKENLEYPSVTLPPQPHTKEGVDAYNEVIARVRMWVNLNLWQKLKLSRDDAKPLLRLKGFPSFPLVERQANEVDWWDMVCNVKKLINEKKEDGKVFWQNLAGYKRQEALRPYLSSEEDRKKGKKFARYQLGDLLLHLEKKHGEDWGKVYDEAWERIDKKVEGLSKHIKLEEERRSEDAQSKAALTDWLRAKASFVIEGLKEADKDEFCRCELKLQKWYGDLRGKPFAIEAENSILDISGFSKQYNCAFIWQKDGVKKLNLYLIINYFKGGKLRFKKIKPEAFEANRFYTVINKKSGEIVPMEVNFNFDDPNLIILPLAFGKRQGREFIWNDLLSLETGSLKLANGRVIEKTLYNRRTRQDEPALFVALTFERREVLDSSNIKPMNLIGVDRGENIPAVIALTDPEGCPLSRFKDSLGNPTHILRIGESYKEKQRTIQAKKEVEQRRAGGYSRKYASKAKNLADDMVRNTARDLLYYAVTQDAMLIFENLSRGFGRQGKRTFMAERQYTRMEDWLTAKLAYEGLPSKTYLSKTLAQYTSKTCSNCGFTITSADYDRVLEKLKKTATGWMTTINGKELKVEGQITYYNRYKRQNVVKDLSVELDRLSEESVNNDISSWDKGRSGEALSLLKKRFSHRPVQEKFVCLNCEFETHADEQAALNIARSWLFLRSQEYKKYQTNKTTGNTDKRAFVETWQSFYRKKLKEVWKPAV

SEQ ID NO: 38398 - protein, 978 aa, synthetic construct
  REGION 1..978: note = engineered CasX variant
QEIKRINKIRRRLVKDSNTKKAGKTGPMKTLLVRVMTPDLRERLENLRKKPENIPQPISNTSRANLNKLLTDYTEMKKAILHVYWEEFQKDPVGLMSRVAQPASKKIDQNKLKPEMDEKGNLTTAGFACSQCGQPLFVYKLEQVSEKGKAYTNYFGRCNVAEHEKLILLAQLKPEKDSDEAVTYSLGKFGQRALDFYSIHVTKESTHPVKPLAQIAGNRYASVPVGKALSDACMGTIASFLSKYQDIIIEHQKVVKGNQKRLESLRELAGKENLEYPSVTLPPQPHTKEGVDAYNEVIARVRMWVNLNLWQKLKLSRDDAKPLLRLKGFPSFPLVERQANEVDWWDMVCNVKKLINEKKEDGKVFWQNLAGYKRQEALRPYLSSEEDRKKGKKFARYQLGDLLLHLEKKHGEDWGKVYDEAWERIDKKVEGLSKHIKLEEERRSEDAQSKAALTDWLRAKASFVIEGLKEADKDEFCRCELKLQKWYGDLRGKPFAIEAENSILDISGFSKQYNCAFIWQKDGVKKLNLYLIINYFKGGKLRFKKIKPEAFEANRFYTVINKKSGEIVPMEVNFNFDDPNLIILPLAFGKRQGREFIWNDLLSLETGSLKLANGRVIEKTLYNRRTRQDEPALFVALTFERREVLDSSNIKPMNLIGVDRGENIPAVIALTDPEGCPLSRFKDSLGNPTHILRIGESYKEKQRTIQAKKEVEQRRAGGYSRKYASKAKNLADDMVRNTARDLLYYAVTQDAMLIFENLSRGFGRQGKRTFMAERQYTRMEDWLTAKLAYEGLPSKTYLSKTLAQYTSKTCSNCGFTITSADYDRVLEKLKKTATGWMTTINGKELKVEGQITYYNRYKRQNVVKDLSVELDRLSEESVNNDISSWDKGRSGEALSLLKKRFSHRPVQEKFVCLNCEFETHADEQAALNIARSWLFLRSQEYKKYQTNKTTGNTDKRAFVETWQSFYRKKLKEVWKPAV

SEQ ID NO: 38399 - protein, 978 aa, synthetic construct
  REGION 1..978: note = engineered CasX variant
QEIKRINKIRRRLVKDSNTKKAGKTGPMKTLLVRVMTPDLRERLENLRKKPENIPQPISNTSRANLNKLLTDYTEMKKAILHVYWEEFQKDPVGLMSRVAQPASKKIDQNKLKPEMDEKGNLTTAGFACSQCGQPLFVYKLEQVSEKGKAYTNYFGRCNVAEHEKLIKLAQLKPEKDSDEAVTYSLGKFGQRALDFYSIHVTKESTHPVKPLAQIAGNRYASGPVGKALSDACMGTIASFLSKYQDIIIEHQKVVKGNQKRLESLRELAGKENLEYPSVTLPPQPHTKEGVDAYNEVIARVRMWVNLNLWQKLKLSRDDAKPLLRLKGFPSFPLVERQANEVDWWDMVCNVKKLINEKKEDGKVFWQNLAGYKRQEALRPYLSSEEDRKKGKKFARYQLGDLLLHLEKKHGEDWGKVYDEAWERIDKKVEGLSKHIKLEEERRSEDAQSKAALTDWLRAKASFVIEGLKEADKDEFCRCELKLQKWYGDLRGKPFAIEAENSILDISGFSKQYNCAFIWQKDGVKKLNLYLIINYFKGGKLRFKKIKPEAFEANRFYTVINKKSGEIVPMEVNFNFDDPNLIILPLAFGKRQGREFIWNDLLSLETGSLKLANGRVIEKTLYNRRTRQDEPALFVALTFERREVLDSSNIKPMNLIGVDRGENIPAVIALTDPEGCPLSRFKDSLGNPTHILRIGESYKEKQRTIQAKKEVEQRRAGGYSRKYASKAKNLADDMVRNTARDLLYYAVTQDAMLIFENLSRGFGRQGKRTFMAERQYTRMEDWLTAKLAYEGLPSKTYLSKTLAQYTSKTCSNCGFTITSADYDRVLEKLKKTATGWMTTINGKELKVEGQITYYNRYKRQNVVKDLSVELDRLSEESVNNDISSWDKGRSGEALSLLKKRFSHRPVQEKFVCLNCEFETHADEQAALNIARSWLFLRSQEYKKYQTNKTTGNTDKRAFVETWQSFYRKKLKEVWKPAV

SEQ ID NO: 38400 - protein, 977 aa, synthetic construct
  REGION 1..977: note = engineered CasX variant
QEIKRINKIRRRLVKDSNTKKAGKTGPMKTLLVRVMTPDLRERLENLRKKPENIPQPISNTSRANLNKLLTDYTEMKKAILHVYWEEFQKDPVGLMSRVAQPASKKIDQNKLKPEMDEKGNLTTAGFACSQCGQPLFVYKLEQVSEKGKAYTNYFGRCNVAEHEKLILLAQLKPEKDSDEAVTYSLGKFGQRALDFYSIHVTKESTHPVKPLAQIAGNRYASPVGKALSDACMGTIASFLSKYQDIIIEHQKVVKGNQKRLESLRELAGKENLEYPSVTLPPQPHTKEGVDAYNEVIARVRMWVNLNLWQKLKLSRDDAKPLLRLKGFPSFPLVERQANEVDWWDMVCNVKKLINEKKEDGKVFWQNLAGYKRQEALRPYLSSEEDRKKGKKFARYQLGDLLLHLEKKHGEDWGKVYDEAWERIDKKVEGLSKHIKLEEERRSEDAQSKAALTDWLRAKASFVIEGLKEADKDEFCRCELKLQKWYGDLRGKPFAIEAENSILDISGFSKQYNCAFIWQKDGVKKLNLYLIINYFKGGKLRFKKIKPEAFEANRFYTVINKKSGEIVPMEVNFNFDDPNLIILPLAFGKRQGREFIWNDLLSLETGSLKLANGRVIEKTLYNRRTRQDEPALFVALTFERREVLDSSNIKPMNLIGVDRGENIPAVIALTDPEGCPLSRFKDSLGNPTHILRIGESYKEKQRTIQAKKEVEQRRAGGYSRKYASKAKNLADDMVRNTARDLLYYAVTQDAMLIFENLSRGFGRQGKRTFMAERQYTRMEDWLTAKLAYEGLPSKTYLSKTLAQYTSKTCSNCGFTITSADYDRVLEKLKKTATGWMTTINGKELKVEGQITYYNRYKRQNVVKDLSVELDRLSEESVNNDISSWDKGRSGEALSLLKKRFSHRPVQEKFVCLNCEFETHADEQAALNIARSWLFLRSQEYKKYQTNKTTGNTDKRAFVETWQSFYRKKLKEVWKPAV

SEQ ID NO: 38401 - protein, 979 aa, synthetic construct
  REGION 1..979: note = engineered CasX variant
QEIKRINKIRRRLVKDSNTKKAGKTGPMKTLLVRVMTPDLRERLENLRKKPENIPQPISNTSRANLNKLLTDYTEMKKAILHVYWEEFQKDPVGLMSRVAQPASKKIDQNKLKPEMDEKGNLTTAGFACSQCGQPLFVYKLEQVSEKGKAYTNYFGRCNVAEHEKLILLAQLKPEKDSDEAVTYSLGKFGQRALDFYSIHVTKESTHPVKPLAQIAGNRYASYPVGKALSDACMGTIASFLSKYQDIIIEHQKVVKGNQKRLESLRELAGKENLEYPSVTLPPQPHTKEGVDAYNEVIARVRMWVNLNLWQKLKLSRDDAKPLLRLKGFPSFPLVERQANEVDWWDMVCNVKKLINEKKEDGKVFWQNLAGYKRQEALRPYLSSEEDRKKGKKFARYQLGDLLLHLEKKHGEDWGKVYDEAWERIDKKVEGLSKHIKLEEERRSEDAQSKAALTDWLRAKASFVIEGLKEADKDEFCRCELKLQKWYGDLRGKPFAIEAENSILDISGFSKQYNCAFIWQKDGVKKLNLYLIINYFKGGKLRFKKIKPEAFEANRFYTVINKKSGEIVPMEVNFNFDDPNLIILPLAFGKRQGREFIWNDLLSLETGSLKLANGRVIEKTLYNRRTRQDEPALFVALTFERREVLDSSNIKPMNLIGVDRGENIPAVIALTDPEGCPLSRFKDSLGNPTHILRIGESYKEKQRTIQAKKEVEQRRAGGYSRKYASKAKNLADDMVRNTARDLLYYAVTQDAMLIFENLSRGFGRQGKRTFMAERQYTRMEDWLTAKLAYEGLPSKTYLSKTLAQYTSKTCSNCGFTITSADYDRVLEKLKKTATGWMTTINGKELKVEGQITYYNRYKRQNVVKDLSVELDRLSEESVNNDISSWDKGRSGEALSLLKKRFSHRPVQEKFVCLNCGFETHADEQAALNIARSWLFLRSQEYKKYQTNKTSTGNTDKRAFVETWQSFYRKKLKEVWKPAV

SEQ ID NO: 38402 - protein, 979 aa, synthetic construct
  REGION 1..979: note = engineered CasX variant
QEIKRINKIRRRLVKDSNTKKAGKTGPMKTLLVRVMTPDLRERLENLRKKPENIPQPISNTSRANLNKLLTDYTEMKKAILHVYWEEFQKDPVGLMSRVAQPASKKIDQNKLKPEMDEKGNLTTAGFACSQCGQPLFVYKLEQVSEKGKAYTNYFGRCNVAEHEKLILLAQLKPEKDSDEAVTYSLGKFGQRALDFYSIHVTKESTHPVKPLAQIAGNRYASHPVGKALSDACMGTIASFLSKYQDIIIEHQKVVKGNQKRLESLRELAGKENLEYPSVTLPPQPHTKEGVDAYNEVIARVRMWVNLNLWQKLKLSRDDAKPLLRLKGFPSFPLVERQANEVDWWDMVCNVKKLINEKKEDGKVFWQNLAGYKRQEALRPYLSSEEDRKKGKKFARYQLGDLLLHLEKKHGEDWGKVYDEAWERIDKKVEGLSKHIKLEEERRSEDAQSKAALTDWLRAKASFVIEGLKEADKDEFCRCELKLQKWYGDLRGKPFAIEAENSILDISGFSKQYNCAFIWQKDGVKKLNLYLIINYFKGGKLRFKKIKPEAFEANRFYTVINKKSGEIVPMEVNFNFDDPNLIILPLAFGKRQGREFIWNDLLSLETGSLKLANGRVIEKTLYNRRTRQDEPALFVALTFERREVLDSSNIKPMNLIGVDRGENIPAVIALTDPEGCPLSRFKDSLGNPTHILRIGESYKEKQRTIQAKKEVEQRRAGGYSRKYASKAKNLADDMVRNTARDLLYYAVTQDAMLIFENLSRGFGRQGKRTFMAERQYTRMEDWLTAKLAYEGLPSKTYLSKTLAQYTSKTCSNCGFTITSADYDRVLEKLKKTATGWMTTINGKELKVEGQITYYNRYKRQNVVKDLSVELDRLSEESVNNDISSWDKGRSGEALSLLKKRFSHRPVQEKFVCLNCGFETHADEQAALNIARSWLFLRSQEYKKYQTNKTSTGNTDKRAFVETWQSFYRKKLKEVWKPAV

SEQ ID NO: 38403 - protein, 979 aa, synthetic construct
  REGION 1..979: note = engineered CasX variant
QEIKRINKIRRRLVKDSNTKKAGKTGPMKTLLVRVMTPDLRERLENLRKKPENIPQPISNTSRANLNKLLTDYTEMKKAILHVYWEEFQKDPVGLMSRVAQPASKKIDQNKLKPEMDEKGNLTTAGFACSQCGQPLFVYKLEQVSEKGKAYTNYFGRCNVAEHEKLILLAQLKPEKDSDEAVTYSLGKFGQRALDFYSIHVTKESTHPVKPLAQIAGNRYASSPVGKALSDACMGTIASFLSKYQDIIIEHQKVVKGNQKRLESLRELAGKENLEYPSVTLPPQPHTKEGVDAYNEVIARVRMWVNLNLWQKLKLSRDDAKPLLRLKGFPSFPLVERQANEVDWWDMVCNVKKLINEKKEDGKVFWQNLAGYKRQEALRPYLSSEEDRKKGKKFARYQLGDLLLHLEKKHGEDWGKVYDEAWERIDKKVEGLSKHIKLEEERRSEDAQSKAALTDWLRAKASFVIEGLKEADKDEFCRCELKLQKWYGDLRGKPFAIEAENSILDISGFSKQYNCAFIWQKDGVKKLNLYLIINYFKGGKLRFKKIKPEAFEANRFYTVINKKSGEIVPMEVNFNFDDPNLIILPLAFGKRQGREFIWNDLLSLETGSLKLANGRVIEKTLYNRRTRQDEPALFVALTFERREVLDSSNIKPMNLIGVDRGENIPAVIALTDPEGCPLSRFKDSLGNPTHILRIGESYKEKQRTIQAKKEVEQRRAGGYSRKYASKAKNLADDMVRNTARDLLYYAVTQDAMLIFENLSRGFGRQGKRTFMAERQYTRMEDWLTAKLAYEGLPSKTYLSKTLAQYTSKTCSNCGFTITSADYDRVLEKLKKTATGWMTTINGKELKVEGQITYYNRYKRQNVVKDLSVELDRLSEESVNNDISSWDKGRSGEALSLLKKRFSHRPVQEKFVCLNCGFETHADEQAALNIARSWLFLRSQEYKKYQTNKTSTGNTDKRAFVETWQSFYRKKLKEVWKPAV

SEQ ID NO: 38404 - protein, 979 aa, synthetic construct
  REGION 1..979: note = engineered CasX variant
QEIKRINKIRRRLVKDSNTKKAGKTGPMKTLLVRVMTPDLRERLENLRKKPENIPQPISNTSRANLNKLLTDYTEMKKAILHVYWEEFQKDPVGLMSRVAQPASKKIDQNKLKPEMDEKGNLTTAGFACSQCGQPLFVYKLEQVSEKGKAYTNYFGRCNVAEHEKLILLAQLKPEKDSDEAVTYSLGKFGQRALDFYSIHVTKESTHPVKPLAQIAGNRYASTPVGKALSDACMGTIASFLSKYQDIIIEHQKVVKGNQKRLESLRELAGKENLEYPSVTLPPQPHTKEGVDAYNEVIARVRMWVNLNLWQKLKLSRDDAKPLLRLKGFPSFPLVERQANEVDWWDMVCNVKKLINEKKEDGKVFWQNLAGYKRQEALRPYLSSEEDRKKGKKFARYQLGDLLLHLEKKHGEDWGKVYDEAWERIDKKVEGLSKHIKLEEERRSEDAQSKAALTDWLRAKASFVIEGLKEADKDEFCRCELKLQKWYGDLRGKPFAIEAENSILDISGFSKQYNCAFIWQKDGVKKLNLYLIINYFKGGKLRFKKIKPEAFEANRFYTVINKKSGEIVPMEVNFNFDDPNLIILPLAFGKRQGREFIWNDLLSLETGSLKLANGRVIEKTLYNRRTRQDEPALFVALTFERREVLDSSNIKPMNLIGVDRGENIPAVIALTDPEGCPLSRFKDSLGNPTHILRIGESYKEKQRTIQAKKEVEQRRAGGYSRKYASKAKNLADDMVRNTARDLLYYAVTQDAMLIFENLSRGFGRQGKRTFMAERQYTRMEDWLTAKLAYEGLPSKTYLSKTLAQYTSKTCSNCGFTITSADYDRVLEKLKKTATGWMTTINGKELKVEGQITYYNRYKRQNVVKDLSVELDRLSEESVNNDISSWDKGRSGEALSLLKKRFSHRPVQEKFVCLNCGFETHADEQAALNIARSWLFLRSQEYKKYQTNKTSTGNTDKRAFVETWQSFYRKKLKEVWKPAV

SEQ ID NO: 38405 - protein, 979 aa, synthetic construct
  REGION 1..979: note = engineered CasX variant
QEIKRINKIRRRLVKDSNTKKAGKTGPMKTLLVRVMTPDLRERLENLRKKPENIPQPISNTSRANLNKLLTDYTEMKKAILHVYWEEFQKDPVGLMSRVAQPASKKIDQNKLKPEMDEKGNLTTAGFACSQCGQPLFVYKLEQVSEKGKAYTNYFGRCNVAEHEKLILLAQLKPEKDSDEAVTYSLGKFGQRALDFYSIHVTKESTHPVKPLAQIAGNRYASAPVGKALSDACMGTIASFLSKYQDIIIEHQKVVKGNQKRLESLRELAGKENLEYPSVTLPPQPHTKEGVDAYNEVIARVRMWVNLNLWQKLKLSRDDAKPLLRLKGFPSFPLVERQANEVDWWDMVCNVKKLINEKKEDGKVFWQNLAGYKRQEALRPYLSSEEDRKKGKKFARYQLGDLLLHLEKKHGEDWGKVYDEAWERIDKKVEGLSKHIKLEEERRSEDAQSKAALTDWLRAKASFVIEGLKEADKDEFCRCELKLQKWYGDLRGKPFAIEAENSILDISGFSKQYNCAFIWQKDGVKKLNLYLIINYFKGGKLRFKKIKPEAFEANRFYTVINKKSGEIVPMEVNFNFDDPNLIILPLAFGKRQGREFIWNDLLSLETGSLKLANGRVIEKTLYNRRTRQDEPALFVALTFERREVLDSSNIKPMNLIGVDRGENIPAVIALTDPEGCPLSRFKDSLGNPTHILRIGESYKEKQRTIQAKKEVEQRRAGGYSRKYASKAKNLADDMVRNTARDLLYYAVTQDAMLIFENLSRGFGRQGKRTFMAERQYTRMEDWLTAKLAYEGLPSKTYLSKTLAQYTSKTCSNCGFTITSADYDRVLEKLKKTATGWMTTINGKELKVEGQITYYNRYKRQNVVKDLSVELDRLSEESVNNDISSWDKGRSGEALSLLKKRFSHRPVQEKFVCLNCGFETHADEQAALNIARSWLFLRSQEYKKYQTNKTSTGNTDKRAFVETWQSFYRKKLKEVWKPAV

SEQ ID NO: 38406 - protein, 979 aa, synthetic construct
  REGION 1..979: note = engineered CasX variant
QEIKRINKIRRRLVKDSNTKKAGKTGPMKTLLVRVMTPDLRERLENLRKKPENIPQPISNTSRANLNKLLTDYTEMKKAILHVYWEEFQKDPVGLMSRVAQPASKKIDQNKLKPEMDEKGNLTTAGFACSQCGQPLFVYKLEQVSEKGKAYTNYFGRCNVAEHEKLILLAQLKPEKDSDEAVTYSLGKFGQRALDFYSIHVTKESTHPVKPLAQIAGNRYASVPVGKALSDACMGTIASFLSKYQDIIIEHQKVVKGNQKRLESLRELAGKENLEYPSVTLPPQPHTKEGVDAYNEVIARVRMWVNLNLWQKLKLSRDDAKPLLRLKGFPSFPLVERQANEVDWWDMVCNVKKLINEKKEDGKVFWQNLAGYKRQEALRPYLSSEEDRKKGKKFARYQLGDLLLHLEKKHGEDWGKVYDEAWERIDKKVEGLSKHIKLEEERRSEDAQSKAALTDWLRAKASFVIEGLKEADKDEFCRCELKLQKWYGDLRGKPFAIEAENSILDISGFSKQYNCAFIWQKDGVKKLNLYLIINYFKGGKLRFKKIKPEAFEANRFYTVINKKSGEIVPMEVNFNFDDPNLIILPLAFGKRQGREFIWNDLLSLETGSLKLANGRVIEKTLYNRRTRQDEPALFVALTFERREVLDSSNIKPMNLIGVDRGENIPAVIALTDPEGCPLSRFKDSLGNPTHILRIGESYKEKQRTIQAKKEVEQRRAGGYSRKYASKAKNLADDMVRNTARDLLYYAVTQDAMLIFENLSRGFGRQGKRTFMAERQYTRMEDWLTAKLAYEGLPSKTYLSKTLAQYTSKTCSNCGFTITSADYDRVLEKLKKTATGWMTTINGKELKVEGQITYYNRYKRQNVVKDLSVELDRLSEESVNNDISSWDKGRSGEALSLLKKRFSHRPVQEKFVCLNCGFETHADEQAALNIARSWLFLRSQEYKKYQTNKTSTGNTDKRAFVETWQSFYRKKLKEVWKPAV

SEQ ID NO: 38407 - protein, 979 aa, synthetic construct
  REGION 1..979: note = engineered CasX variant
QEIKRINKIRRRLVKDSNTKKAGKTGPMKTLLVRVMTPDLRERLENLRKKPENIPQPISNTSRANLNKLLTDYTEMKKAILHVYWEEFQKDPVGLMSRVAQPASKKIDQNKLKPEMDEKGNLTTAGFACSQCGQPLFVYKLEQVSEKGKAYTNYFGRCNVAEHEKLIKLAQLKPEKDSDEAVTYSLGKFGQRALDFYSIHVTKESTHPVKPLAQIAGNRYASGPVGKALSDACMGTIASFLSKYQDIIIEHQKVVKGNQKRLESLRELAGKENLEYPSVTLPPQPHTKEGVDAYNEVIARVRMWVNLNLWQKLKLSRDDAKPLLRLKGFPSFPLVERQANEVDWWDMVCNVKKLINEKKEDGKVFWQNLAGYKRQEALRPYLSSEEDRKKGKKFARYQLGDLLLHLEKKHGEDWGKVYDEAWERIDKKVEGLSKHIKLEEERRSEDAQSKAALTDWLRAKASFVIEGLKEADKDEFCRCELKLQKWYGDLRGKPFAIEAENSILDISGFSKQYNCAFIWQKDGVKKLNLYLIINYFKGGKLRFKKIKPEAFEANRFYTVINKKSGEIVPMEVNFNFDDPNLIILPLAFGKRQGREFIWNDLLSLETGSLKLANGRVIEKTLYNRRTRQDEPALFVALTFERREVLDSSNIKPMNLIGVDRGENIPAVIALTDPEGCPLSRFKDSLGNPTHILRIGESYKEKQRTIQAKKEVEQRRAGGYSRKYASKAKNLADDMVRNTARDLLYYAVTQDAMLIFENLSRGFGRQGKRTFMAERQYTRMEDWLTAKLAYEGLPSKTYLSKTLAQYTSKTCSNCGFTITSADYDRVLEKLKKTATGWMTTINGKELKVEGQITYYNRYKRQNVVKDLSVELDRLSEESVNNDISSWDKGRSGEALSLLKKRFSHRPVQEKFVCLNCGFETHADEQAALNIARSWLFLRSQEYKKYQTNKTSTGNTDKRAFVETWQSFYRKKLKEVWKPAV

SEQ ID NO: 38408 - protein, 978 aa, synthetic construct
  REGION 1..978: note = engineered CasX variant
QEIKRINKIRRRLVKDSNTKKAGKTGPMKTLLVRVMTPDLRERLENLRKKPENIPQPISNTSRANLNKLLTDYTEMKKAILHVYWEEFQKDPVGLMSRVAQPASKKIDQNKLKPEMDEKGNLTTAGFACSQCGQPLFVYKLEQVSEKGKAYTNYFGRCNVAEHEKLILLAQLKPEKDSDEAVTYSLGKFGQRALDFYSIHVTKESTHPVKPLAQIAGNRYASPVGKALSDACMGTIASFLSKYQDIIIEHQKVVKGNQKRLESLRELAGKENLEYPSVTLPPQPHTKEGVDAYNEVIARVRMWVNLNLWQKLKLSRDDAKPLLRLKGFPSFPLVERQANEVDWWDMVCNVKKLINEKKEDGKVFWQNLAGYKRQEALRPYLSSEEDRKKGKKFARYQLGDLLLHLEKKHGEDWGKVYDEAWERIDKKVEGLSKHIKLEEERRSEDAQSKAALTDWLRAKASFVIEGLKEADKDEFCRCELKLQKWYGDLRGKPFAIEAENSILDISGFSKQYNCAFIWQKDGVKKLNLYLIINYFKGGKLRFKKIKPEAFEANRFYTVINKKSGEIVPMEVNFNFDDPNLIILPLAFGKRQGREFIWNDLLSLETGSLKLANGRVIEKTLYNRRTRQDEPALFVALTFERREVLDSSNIKPMNLIGVDRGENIPAVIALTDPEGCPLSRFKDSLGNPTHILRIGESYKEKQRTIQAKKEVEQRRAGGYSRKYASKAKNLADDMVRNTARDLLYYAVTQDAMLIFENLSRGFGRQGKRTFMAERQYTRMEDWLTAKLAYEGLPSKTYLSKTLAQYTSKTCSNCGFTITSADYDRVLEKLKKTATGWMTTINGKELKVEGQITYYNRYKRQNVVKDLSVELDRLSEESVNNDISSWDKGRSGEALSLLKKRFSHRPVQEKFVCLNCGFETHADEQAALNIARSWLFLRSQEYKKYQTNKTSTGNTDKRAFVETWQSFYRKKLKEVWKPAV

SEQ ID NO: 38409 - protein, 979 aa, synthetic construct
  REGION 1..979: note = engineered CasX variant
QEIKRINKIRRRLVKDSNTKKAGKTGPMKTLLVRVMTPDLRERLENLRKKPENIPQPISNTSRANLNKLLTDYTEMKKAILHVYWEEFQKDPVGLMSRVAQPASKKIDQNKLKPEMDEKGNLTTAGFACSQCGQPLFVYKLEQVSEKGKAYTNYFGRCNVAEHEKLILLAQLKPEKDSDEAVTYSLGKFGQRALDFYSIHVTKESTHPVKPLAQIAGNRYASYPVGKALSDACMGTIASFLSKYQDIIIEHQKVVKGNQKRLESLRELAGKENLEYPSVTLPPQPHTKEGVDAYNEVIARVRMWVNLNLWQKLKLSRDDAKPLLRLKGFPSFPLVERQANEVDWWDMVCNVKKLINEKKEDGKVFWQNLAGYKRQEALRPYLSSEEDRKKGKKFARYQLGDLLLHLEKKHGEDWGKVYDEAWERIDKKVEGLSKHIKLEEERRSEDAQSKAALTDWLRAKASFVIEGLKEADKDEFCRCELKLQKWYGDLRGKPFAIEAENSILDISGFSKQYNCAFIWQKDGVKKLNLYLIINYFKGGKLRFKKIKPEAFEANRFYTVINKKSGEIVPMEVNFNFDDPNLIILPLAFGKRQGREFIWNDLLSLETGSLKLANGRVIEKTLYNRRTRQDEPALFVALTFERREVLDSSNIKPMNLIGVDRGENIPAVIALTDPEGCPLSRFKDSLGNPTHILRIGESYKEKQRTIQAKKEVEQRRAGGYSRKYASKAKNLADDMVRNTARDLLYYAVTQDAMLIFENLSRGFGRQGKRTFMAERQYTRMEDWLTAKLAYEGLPSKTYLSKTLAQYTSKTCSNCGFTITSADYDRVLEKLKKTATGWMTTINGKELKVEGQITYYNRYKRQNVVKDLSVELDRLSEESVNNDISSWDKGRSGEALSLLKKRFSHRPVQEKFVCLNCGFETHADEQAALNIARSWLFLRSQEYKKYQTNKTTGKNTDKRAFVETWQSFYRKKLKEVWKPAV

SEQ ID NO: 38410 - protein, 979 aa, synthetic construct
  REGION 1..979: note = engineered CasX variant
QEIKRINKIRRRLVKDSNTKKAGKTGPMKTLLVRVMTPDLRERLENLRKKPENIPQPISNTSRANLNKLLTDYTEMKKAILHVYWEEFQKDPVGLMSRVAQPASKKIDQNKLKPEMDEKGNLTTAGFACSQCGQPLFVYKLEQVSEKGKAYTNYFGRCNVAEHEKLILLAQLKPEKDSDEAVTYSLGKFGQRALDFYSIHVTKESTHPVKPLAQIAGNRYASHPVGKALSDACMGTIASFLSKYQDIIIEHQKVVKGNQKRLESLRELAGKENLEYPSVTLPPQPHTKEGVDAYNEVIARVRMWVNLNLWQKLKLSRDDAKPLLRLKGFPSFPLVERQANEVDWWDMVCNVKKLINEKKEDGKVFWQNLAGYKRQEALRPYLSSEEDRKKGKKFARYQLGDLLLHLEKKHGEDWGKVYDEAWERIDKKVEGLSKHIKLEEERRSEDAQSKAALTDWLRAKASFVIEGLKEADKDEFCRCELKLQKWYGDLRGKPFAIEAENSILDISGFSKQYNCAFIWQKDGVKKLNLYLIINYFKGGKLRFKKIKPEAFEANRFYTVINKKSGEIVPMEVNFNFDDPNLIILPLAFGKRQGREFIWNDLLSLETGSLKLANGRVIEKTLYNRRTRQDEPALFVALTFERREVLDSSNIKPMNLIGVDRGENIPAVIALTDPEGCPLSRFKDSLGNPTHILRIGESYKEKQRTIQAKKEVEQRRAGGYSRKYASKAKNLADDMVRNTARDLLYYAVTQDAMLIFENLSRGFGRQGKRTFMAERQYTRMEDWLTAKLAYEGLPSKTYLSKTLAQYTSKTCSNCGFTITSADYDRVLEKLKKTATGWMTTINGKELKVEGQITYYNRYKRQNVVKDLSVELDRLSEESVNNDISSWDKGRSGEALSLLKKRFSHRPVQEKFVCLNCGFETHADEQAALNIARSWLFLRSQEYKKYQTNKTTGKNTDKRAFVETWQSFYRKKLKEVWKPAV

SEQ ID NO: 38411 - protein, 979 aa, synthetic construct
  REGION 1..979: note = engineered CasX variant
QEIKRINKIRRRLVKDSNTKKAGKTGPMKTLLVRVMTPDLRERLENLRKKPENIPQPISNTSRANLNKLLTDYTEMKKAILHVYWEEFQKDPVGLMSRVAQPASKKIDQNKLKPEMDEKGNLTTAGFACSQCGQPLFVYKLEQVSEKGKAYTNYFGRCNVAEHEKLILLAQLKPEKDSDEAVTYSLGKFGQRALDFYSIHVTKESTHPVKPLAQIAGNRYASSPVGKALSDACMGTIASFLSKYQDIIIEHQKVVKGNQKRLESLRELAGKENLEYPSVTLPPQPHTKEGVDAYNEVIARVRMWVNLNLWQKLKLSRDDAKPLLRLKGFPSFPLVERQANEVDWWDMVCNVKKLINEKKEDGKVFWQNLAGYKRQEALRPYLSSEEDRKKGKKFARYQLGDLLLHLEKKHGEDWGKVYDEAWERIDKKVEGLSKHIKLEEERRSEDAQSKAALTDWLRAKASFVIEGLKEADKDEFCRCELKLQKWYGDLRGKPFAIEAENSILDISGFSKQYNCAFIWQKDGVKKLNLYLIINYFKGGKLRFKKIKPEAFEANRFYTVINKKSGEIVPMEVNFNFDDPNLIILPLAFGKRQGREFIWNDLLSLETGSLKLANGRVIEKTLYNRRTRQDEPALFVALTFERREVLDSSNIKPMNLIGVDRGENIPAVIALTDPEGCPLSRFKDSLGNPTHILRIGESYKEKQRTIQAKKEVEQRRAGGYSRKYASKAKNLADDMVRNTARDLLYYAVTQDAMLIFENLSRGFGRQGKRTFMAERQYTRMEDWLTAKLAYEGLPSKTYLSKTLAQYTSKTCSNCGFTITSADYDRVLEKLKKTATGWMTTINGKELKVEGQITYYNRYKRQNVVKDLSVELDRLSEESVNNDISSWDKGRSGEALSLLKKRFSHRPVQEKFVCLNCGFETHADEQAALNIARSWLFLRSQEYKKYQTNKTTGKNTDKRAFVETWQSFYRKKLKEVWKPAV

SEQ ID NO: 38412 - protein, 979 aa, synthetic construct
  REGION 1..979: note = engineered CasX variant
QEIKRINKIRRRLVKDSNTKKAGKTGPMKTLLVRVMTPDLRERLENLRKKPENIPQPISNTSRANLNKLLTDYTEMKKAILHVYWEEFQKDPVGLMSRVAQPASKKIDQNKLKPEMDEKGNLTTAGFACSQCGQPLFVYKLEQVSEKGKAYTNYFGRCNVAEHEKLILLAQLKPEKDSDEAVTYSLGKFGQRALDFYSIHVTKESTHPVKPLAQIAGNRYASTPVGKALSDACMGTIASFLSKYQDIIIEHQKVVKGNQKRLESLRELAGKENLEYPSVTLPPQPHTKEGVDAYNEVIARVRMWVNLNLWQKLKLSRDDAKPLLRLKGFPSFPLVERQANEVDWWDMVCNVKKLINEKKEDGKVFWQNLAGYKRQEALRPYLSSEEDRKKGKKFARYQLGDLLLHLEKKHGEDWGKVYDEAWERIDKKVEGLSKHIKLEEERRSEDAQSKAALTDWLRAKASFVIEGLKEADKDEFCRCELKLQKWYGDLRGKPFAIEAENSILDISGFSKQYNCAFIWQKDGVKKLNLYLIINYFKGGKLRFKKIKPEAFEANRFYTVINKKSGEIVPMEVNFNFDDPNLIILPLAFGKRQGREFIWNDLLSLETGSLKLANGRVIEKTLYNRRTRQDEPALFVALTFERREVLDSSNIKPMNLIGVDRGENIPAVIALTDPEGCPLSRFKDSLGNPTHILRIGESYKEKQRTIQAKKEVEQRRAGGYSRKYASKAKNLADDMVRNTARDLLYYAVTQDAMLIFENLSRGFGRQGKRTFMAERQYTRMEDWLTAKLAYEGLPSKTYLSKTLAQYTSKTCSNCGFTITSADYDRVLEKLKKTATGWMTTINGKELKVEGQITYYNRYKRQNVVKDLSVELDRLSEESVNNDISSWDKGRSGEALSLLKKRFSHRPVQEKFVCLNCGFETHADEQAALNIARSWLFLRSQEYKKYQTNKTTGKNTDKRAFVETWQSFYRKKLKEVWKPAV

SEQ ID NO: 38413 - protein, 979 aa, synthetic construct
  REGION 1..979: note = engineered CasX variant
QEIKRINKIRRRLVKDSNTKKAGKTGPMKTLLVRVMTPDLRERLENLRKKPENIPQPISNTSRANLNKLLTDYTEMKKAILHVYWEEFQKDPVGLMSRVAQPASKKIDQNKLKPEMDEKGNLTTAGFACSQCGQPLFVYKLEQVSEKGKAYTNYFGRCNVAEHEKLILLAQLKPEKDSDEAVTYSLGKFGQRALDFYSIHVTKESTHPVKPLAQIAGNRYASAPVGKALSDACMGTIASFLSKYQDIIIEHQKVVKGNQKRLESLRELAGKENLEYPSVTLPPQPHTKEGVDAYNEVIARVRMWVNLNLWQKLKLSRDDAKPLLRLKGFPSFPLVERQANEVDWWDMVCNVKKLINEKKEDGKVFWQNLAGYKRQEALRPYLSSEEDRKKGKKFARYQLGDLLLHLEKKHGEDWGKVYDEAWERIDKKVEGLSKHIKLEEERRSEDAQSKAALTDWLRAKASFVIEGLKEADKDEFCRCELKLQKWYGDLRGKPFAIEAENSILDISGFSKQYNCAFIWQKDGVKKLNLYLIINYFKGGKLRFKKIKPEAFEANRFYTVINKKSGEIVPMEVNFNFDDPNLIILPLAFGKRQGREFIWNDLLSLETGSLKLANGRVIEKTLYNRRTRQDEPALFVALTFERREVLDSSNIKPMNLIGVDRGENIPAVIALTDPEGCPLSRFKDSLGNPTHILRIGESYKEKQRTIQAKKEVEQRRAGGYSRKYASKAKNLADDMVRNTARDLLYYAVTQDAMLIFENLSRGFGRQGKRTFMAERQYTRMEDWLTAKLAYEGLPSKTYLSKTLAQYTSKTCSNCGFTITSADYDRVLEKLKKTATGWMTTINGKELKVEGQITYYNRYKRQNVVKDLSVELDRLSEESVNNDISSWDKGRSGEALSLLKKRFSHRPVQEKFVCLNCGFETHADEQAALNIARSWLFLRSQEYKKYQTNKTTGKNTDKRAFVETWQSFYRKKLKEVWKPAV

SEQ ID NO: 38414 - protein, 979 aa, synthetic construct
  REGION 1..979: note = engineered CasX variant
QEIKRINKIRRRLVKDSNTKKAGKTGPMKTLLVRVMTPDLRERLENLRKKPENIPQPISNTSRANLNKLLTDYTEMKKAILHVYWEEFQKDPVGLMSRVAQPASKKIDQNKLKPEMDEKGNLTTAGFACSQCGQPLFVYKLEQVSEKGKAYTNYFGRCNVAEHEKLILLAQLKPEKDSDEAVTYSLGKFGQRALDFYSIHVTKESTHPVKPLAQIAGNRYASVPVGKALSDACMGTIASFLSKYQDIIIEHQKVVKGNQKRLESLRELAGKENLEYPSVTLPPQPHTKEGVDAYNEVIARVRMWVNLNLWQKLKLSRDDAKPLLRLKGFPSFPLVERQANEVDWWDMVCNVKKLINEKKEDGKVFWQNLAGYKRQEALRPYLSSEEDRKKGKKFARYQLGDLLLHLEKKHGEDWGKVYDEAWERIDKKVEGLSKHIKLEEERRSEDAQSKAALTDWLRAKASFVIEGLKEADKDEFCRCELKLQKWYGDLRGKPFAIEAENSILDISGFSKQYNCAFIWQKDGVKKLNLYLIINYFKGGKLRFKKIKPEAFEANRFYTVINKKSGEIVPMEVNFNFDDPNLIILPLAFGKRQGREFIWNDLLSLETGSLKLANGRVIEKTLYNRRTRQDEPALFVALTFERREVLDSSNIKPMNLIGVDRGENIPAVIALTDPEGCPLSRFKDSLGNPTHILRIGESYKEKQRTIQAKKEVEQRRAGGYSRKYASKAKNLADDMVRNTARDLLYYAVTQDAMLIFENLSRGFGRQGKRTFMAERQYTRMEDWLTAKLAYEGLPSKTYLSKTLAQYTSKTCSNCGFTITSADYDRVLEKLKKTATGWMTTINGKELKVEGQITYYNRYKRQNVVKDLSVELDRLSEESVNNDISSWDKGRSGEALSLLKKRFSHRPVQEKFVCLNCGFETHADEQAALNIARSWLFLRSQEYKKYQTNKTTGKNTDKRAFVETWQSFYRKKLKEVWKPAV

SEQ ID NO: 38415 - protein, 979 aa, synthetic construct
  REGION 1..979: note = engineered CasX variant
QEIKRINKIRRRLVKDSNTKKAGKTGPMKTLLVRVMTPDLRERLENLRKKPENIPQPISNTSRANLNKLLTDYTEMKKAILHVYWEEFQKDPVGLMSRVAQPASKKIDQNKLKPEMDEKGNLTTAGFACSQCGQPLFVYKLEQVSEKGKAYTNYFGRCNVAEHEKLIKLAQLKPEKDSDEAVTYSLGKFGQRALDFYSIHVTKESTHPVKPLAQIAGNRYASGPVGKALSDACMGTIASFLSKYQDIIIEHQKVVKGNQKRLESLRELAGKENLEYPSVTLPPQPHTKEGVDAYNEVIARVRMWVNLNLWQKLKLSRDDAKPLLRLKGFPSFPLVERQANEVDWWDMVCNVKKLINEKKEDGKVFWQNLAGYKRQEALRPYLSSEEDRKKGKKFARYQLGDLLLHLEKKHGEDWGKVYDEAWERIDKKVEGLSKHIKLEEERRSEDAQSKAALTDWLRAKASFVIEGLKEADKDEFCRCELKLQKWYGDLRGKPFAIEAENSILDISGFSKQYNCAFIWQKDGVKKLNLYLIINYFKGGKLRFKKIKPEAFEANRFYTVINKKSGEIVPMEVNFNFDDPNLIILPLAFGKRQGREFIWNDLLSLETGSLKLANGRVIEKTLYNRRTRQDEPALFVALTFERREVLDSSNIKPMNLIGVDRGENIPAVIALTDPEGCPLSRFKDSLGNPTHILRIGESYKEKQRTIQAKKEVEQRRAGGYSRKYASKAKNLADDMVRNTARDLLYYAVTQDAMLIFENLSRGFGRQGKRTFMAERQYTRMEDWLTAKLAYEGLPSKTYLSKTLAQYTSKTCSNCGFTITSADYDRVLEKLKKTATGWMTTINGKELKVEGQITYYNRYKRQNVVKDLSVELDRLSEESVNNDISSWDKGRSGEALSLLKKRFSHRPVQEKFVCLNCGFETHADEQAALNIARSWLFLRSQEYKKYQTNKTTGKNTDKRAFVETWQSFYRKKLKEVWKPAV

SEQ ID NO: 38416 - protein, 978 aa, synthetic construct
  REGION 1..978: note = engineered CasX variant
QEIKRINKIRRRLVKDSNTKKAGKTGPMKTLLVRVMTPDLRERLENLRKKPENIPQPISNTSRANLNKLLTDYTEMKKAILHVYWEEFQKDPVGLMSRVAQPASKKIDQNKLKPEMDEKGNLTTAGFACSQCGQPLFVYKLEQVSEKGKAYTNYFGRCNVAEHEKLILLAQLKPEKDSDEAVTYSLGKFGQRALDFYSIHVTKESTHPVKPLAQIAGNRYASPVGKALSDACMGTIASFLSKYQDIIIEHQKVVKGNQKRLESLRELAGKENLEYPSVTLPPQPHTKEGVDAYNEVIARVRMWVNLNLWQKLKLSRDDAKPLLRLKGFPSFPLVERQANEVDWWDMVCNVKKLINEKKEDGKVFWQNLAGYKRQEALRPYLSSEEDRKKGKKFARYQLGDLLLHLEKKHGEDWGKVYDEAWERIDKKVEGLSKHIKLEEERRSEDAQSKAALTDWLRAKASFVIEGLKEADKDEFCRCELKLQKWYGDLRGKPFAIEAENSILDISGFSKQYNCAFIWQKDGVKKLNLYLIINYFKGGKLRFKKIKPEAFEANRFYTVINKKSGEIVPMEVNFNFDDPNLIILPLAFGKRQGREFIWNDLLSLETGSLKLANGRVIEKTLYNRRTRQDEPALFVALTFERREVLDSSNIKPMNLIGVDRGENIPAVIALTDPEGCPLSRFKDSLGNPTHILRIGESYKEKQRTIQAKKEVEQRRAGGYSRKYASKAKNLADDMVRNTARDLLYYAVTQDAMLIFENLSRGFGRQGKRTFMAERQYTRMEDWLTAKLAYEGLPSKTYLSKTLAQYTSKTCSNCGFTITSADYDRVLEKLKKTATGWMTTINGKELKVEGQITYYNRYKRQNVVKDLSVELDRLSEESVNNDISSWDKGRSGEALSLLKKRFSHRPVQEKFVCLNCGFETHADEQAALNIARSWLFLRSQEYKKYQTNKTTGKNTDKRAFVETWQSFYRKKLKEVWKPAV

SEQ ID NO: 38417 - protein, 978 aa, synthetic construct
  REGION 1..978: note = engineered CasX variant
QEIKRINKIRRRLVKDSNTKKAGKTGPMKTLLVRVMTPDLRERLENLRKKPENIPQPISNTSRANLNKLLTDYTEMKKAILHVYWEEFQKDPVGLMSRVAQPASKKIDQNKLKPEMDEKGNLTTAGFACSQCGQPLFVYKLEQVSEKGKAYTNYFGRCNVAEHEKLILLAQLKPEKDSDEAVTYSLGKFGQRALDFYSIHVTKESTHPVKPLAQIAGNRYASYPVGKALSDACMGTIASFLSKYQDIIIEHQKVVKGNQKRLESLRELAGKENLEYPSVTLPPQPHTKEGVDAYNEVIARVRMWVNLNLWQKLKLSRDDAKPLLRLKKFPSFPLVERQANEVDWWDMVCNVKKLINEKKEDGKVFWQNLAGYKRQEALRPYLSSEEDRKKGKKFARYQLGDLLLHLEKKHGEDWGKVYDEAWERIDKKVEGLSKHIKLEEERRSEDAQSKAALTDWLRAKASFVIEGLKEADKDEFCRCELKLQKWYGDLRGKPFAIEAENSILDISGFSKQYNCAFIWQKDGVKKLNLYLIINYFKGGKLRFKKIKPEAFEANRFYTVINKKSGEIVPMEVNFNFDDPNLIILPLAFGKRQGREFIWNDLLSLETGSLKLANGRVIEKTLYNRRTRQDEPALFVALTFERREVLDSSNIKPMNLIGVDRGENIPAVIALTDPEGCPLSRFKDSLGNPTHILRIGESYKEKQRTIQAKKEVEQRRAGGYSRKYASKAKNLADDMVRNTARDLLYYAVTQDAMLIFENLSRGFGRQGKRTFMAERQYTRMEDWLTAKLAYEGLPSKTYLSKTLAQYTSKTCSNCGFTITSADYDRVLEKLKKTATGWMTTINGKELKVEGQITYYNRYKRQNVVKDLSVELDRLSEESVNNDISSWDKGRSGEALSLLKKRFSHRPVQEKFVCLNCGFETHADEQAALNIARSWLFLRSQEYKKYQTNKTTGNTDKRAFVETWQSFYRKKLKEVWKPAV

SEQ ID NO: 38418 - protein, 978 aa, synthetic construct
  REGION 1..978: note = engineered CasX variant
QEIKRINKIRRRLVKDSNTKKAGKTGPMKTLLVRVMTPDLRERLENLRKKPENIPQPISNTSRANLNKLLTDYTEMKKAILHVYWEEFQKDPVGLMSRVAQPASKKIDQNKLKPEMDEKGNLTTAGFACSQCGQPLFVYKLEQVSEKGKAYTNYFGRCNVAEHEKLILLAQLKPEKDSDEAVTYSLGKFGQRALDFYSIHVTKESTHPVKPLAQIAGNRYASHPVGKALSDACMGTIASFLSKYQDIIIEHQKVVKGNQKRLESLRELAGKENLEYPSVTLPPQPHTKEGVDAYNEVIARVRMWVNLNLWQKLKLSRDDAKPLLRLKKFPSFPLVERQANEVDWWDMVCNVKKLINEKKEDGKVFWQNLAGYKRQEALRPYLSSEEDRKKGKKFARYQLGDLLLHLEKKHGEDWGKVYDEAWERIDKKVEGLSKHIKLEEERRSEDAQSKAALTDWLRAKASFVIEGLKEADKDEFCRCELKLQKWYGDLRGKPFAIEAENSILDISGFSKQYNCAFIWQKDGVKKLNLYLIINYFKGGKLRFKKIKPEAFEANRFYTVINKKSGEIVPMEVNFNFDDPNLIILPLAFGKRQGREFIWNDLLSLETGSLKLANGRVIEKTLYNRRTRQDEPALFVALTFERREVLDSSNIKPMNLIGVDRGENIPAVIALTDPEGCPLSRFKDSLGNPTHILRIGESYKEKQRTIQAKKEVEQRRAGGYSRKYASKAKNLADDMVRNTARDLLYYAVTQDAMLIFENLSRGFGRQGKRTFMAERQYTRMEDWLTAKLAYEGLPSKTYLSKTLAQYTSKTCSNCGFTITSADYDRVLEKLKKTATGWMTTINGKELKVEGQITYYNRYKRQNVVKDLSVELDRLSEESVNNDISSWDKGRSGEALSLLKKRFSHRPVQEKFVCLNCGFETHADEQAALNIARSWLFLRSQEYKKYQTNKTTGNTDKRAFVETWQSFYRKKLKEVWKPAV

SEQ ID NO: 38419 - protein, 978 aa, synthetic construct
  REGION 1..978: note = engineered CasX variant
QEIKRINKIRRRLVKDSNTKKAGKTGPMKTLLVRVMTPDLRERLENLRKKPENIPQPISNTSRANLNKLLTDYTEMKKAILHVYWEEFQKDPVGLMSRVAQPASKKIDQNKLKPEMDEKGNLTTAGFACSQCGQPLFVYKLEQVSEKGKAYTNYFGRCNVAEHEKLILLAQLKPEKDSDEAVTYSLGKFGQRALDFYSIHVTKESTHPVKPLAQIAGNRYASSPVGKALSDACMGTIASFLSKYQDIIIEHQKVVKGNQKRLESLRELAGKENLEYPSVTLPPQPHTKEGVDAYNEVIARVRMWVNLNLWQKLKLSRDDAKPLLRLKKFPSFPLVERQANEVDWWDMVCNVKKLINEKKEDGKVFWQNLAGYKRQEALRPYLSSEEDRKKGKKFARYQLGDLLLHLEKKHGEDWGKVYDEAWERIDKKVEGLSKHIKLEEERRSEDAQSKAALTDWLRAKASFVIEGLKEADKDEFCRCELKLQKWYGDLRGKPFAIEAENSILDISGFSKQYNCAFIWQKDGVKKLNLYLIINYFKGGKLRFKKIKPEAFEANRFYTVINKKSGEIVPMEVNFNFDDPNLIILPLAFGKRQGREFIWNDLLSLETGSLKLANGRVIEKTLYNRRTRQDEPALFVALTFERREVLDSSNIKPMNLIGVDRGENIPAVIALTDPEGCPLSRFKDSLGNPTHILRIGESYKEKQRTIQAKKEVEQRRAGGYSRKYASKAKNLADDMVRNTARDLLYYAVTQDAMLIFENLSRGFGRQGKRTFMAERQYTRMEDWLTAKLAYEGLPSKTYLSKTLAQYTSKTCSNCGFTITSADYDRVLEKLKKTATGWMTTINGKELKVEGQITYYNRYKRQNVVKDLSVELDRLSEESVNNDISSWDKGRSGEALSLLKKRFSHRPVQEKFVCLNCGFETHADEQAALNIARSWLFLRSQEYKKYQTNKTTGNTDKRAFVETWQSFYRKKLKEVWKPAV

SEQ ID NO: 38420 - protein, 978 aa, synthetic construct
  REGION 1..978: note = engineered CasX variant
QEIKRINKIRRRLVKDSNTKKAGKTGPMKTLLVRVMTPDLRERLENLRKKPENIPQPISNTSRANLNKLLTDYTEMKKAILHVYWEEFQKDPVGLMSRVAQPASKKIDQNKLKPEMDEKGNLTTAGFACSQCGQPLFVYKLEQVSEKGKAYTNYFGRCNVAEHEKLILLAQLKPEKDSDEAVTYSLGKFGQRALDFYSIHVTKESTHPVKPLAQIAGNRYASTPVGKALSDACMGTIASFLSKYQDIIIEHQKVVKGNQKRLESLRELAGKENLEYPSVTLPPQPHTKEGVDAYNEVIARVRMWVNLNLWQKLKLSRDDAKPLLRLKKFPSFPLVERQANEVDWWDMVCNVKKLINEKKEDGKVFWQNLAGYKRQEALRPYLSSEEDRKKGKKFARYQLGDLLLHLEKKHGEDWGKVYDEAWERIDKKVEGLSKHIKLEEERRSEDAQSKAALTDWLRAKASFVIEGLKEADKDEFCRCELKLQKWYGDLRGKPFAIEAENSILDISGFSKQYNCAFIWQKDGVKKLNLYLIINYFKGGKLRFKKIKPEAFEANRFYTVINKKSGEIVPMEVNFNFDDPNLIILPLAFGKRQGREFIWNDLLSLETGSLKLANGRVIEKTLYNRRTRQDEPALFVALTFERREVLDSSNIKPMNLIGVDRGENIPAVIALTDPEGCPLSRFKDSLGNPTHILRIGESYKEKQRTIQAKKEVEQRRAGGYSRKYASKAKNLADDMVRNTARDLLYYAVTQDAMLIFENLSRGFGRQGKRTFMAERQYTRMEDWLTAKLAYEGLPSKTYLSKTLAQYTSKTCSNCGFTITSADYDRVLEKLKKTATGWMTTINGKELKVEGQITYYNRYKRQNVVKDLSVELDRLSEESVNNDISSWDKGRSGEALSLLKKRFSHRPVQEKFVCLNCGFETHADEQAALNIARSWLFLRSQEYKKYQTNKTTGNTDKRAFVETWQSFYRKKLKEVWKPAV

SEQ ID NO: 38421 - protein, 978 aa, synthetic construct
  REGION 1..978: note = engineered CasX variant
QEIKRINKIRRRLVKDSNTKKAGKTGPMKTLLVRVMTPDLRERLENLRKKPENIPQPISNTSRANLNKLLTDYTEMKKAILHVYWEEFQKDPVGLMSRVAQPASKKIDQNKLKPEMDEKGNLTTAGFACSQCGQPLFVYKLEQVSEKGKAYTNYFGRCNVAEHEKLILLAQLKPEKDSDEAVTYSLGKFGQRALDFYSIHVTKESTHPVKPLAQIAGNRYASAPVGKALSDACMGTIASFLSKYQDIIIEHQKVVKGNQKRLESLRELAGKENLEYPSVTLPPQPHTKEGVDAYNEVIARVRMWVNLNLWQKLKLSRDDAKPLLRLKKFPSFPLVERQANEVDWWDMVCNVKKLINEKKEDGKVFWQNLAGYKRQEALRPYLSSEEDRKKGKKFARYQLGDLLLHLEKKHGEDWGKVYDEAWERIDKKVEGLSKHIKLEEERRSEDAQSKAALTDWLRAKASFVIEGLKEADKDEFCRCELKLQKWYGDLRGKPFAIEAENSILDISGFSKQYNCAFIWQKDGVKKLNLYLIINYFKGGKLRFKKIKPEAFEANRFYTVINKKSGEIVPMEVNFNFDDPNLIILPLAFGKRQGREFIWNDLLSLETGSLKLANGRVIEKTLYNRRTRQDEPALFVALTFERREVLDSSNIKPMNLIGVDRGENIPAVIALTDPEGCPLSRFKDSLGNPTHILRIGESYKEKQRTIQAKKEVEQRRAGGYSRKYASKAKNLADDMVRNTARDLLYYAVTQDAMLIFENLSRGFGRQGKRTFMAERQYTRMEDWLTAKLAYEGLPSKTYLSKTLAQYTSKTCSNCGFTITSADYDRVLEKLKKTATGWMTTINGKELKVEGQITYYNRYKRQNVVKDLSVELDRLSEESVNNDISSWDKGRSGEALSLLKKRFSHRPVQEKFVCLNCGFETHADEQAALNIARSWLFLRSQEYKKYQTNKTTGNTDKRAFVETWQSFYRKKLKEVWKPAV

SEQ ID NO: 38422 - protein, 978 aa, synthetic construct
  REGION 1..978: note = engineered CasX variant
QEIKRINKIRRRLVKDSNTKKAGKTGPMKTLLVRVMTPDLRERLENLRKKPENIPQPISNTSRANLNKLLTDYTEMKKAILHVYWEEFQKDPVGLMSRVAQPASKKIDQNKLKPEMDEKGNLTTAGFACSQCGQPLFVYKLEQVSEKGKAYTNYFGRCNVAEHEKLILLAQLKPEKDSDEAVTYSLGKFGQRALDFYSIHVTKESTHPVKPLAQIAGNRYASVPVGKALSDACMGTIASFLSKYQDIIIEHQKVVKGNQKRLESLRELAGKENLEYPSVTLPPQPHTKEGVDAYNEVIARVRMWVNLNLWQKLKLSRDDAKPLLRLKKFPSFPLVERQANEVDWWDMVCNVKKLINEKKEDGKVFWQNLAGYKRQEALRPYLSSEEDRKKGKKFARYQLGDLLLHLEKKHGEDWGKVYDEAWERIDKKVEGLSKHIKLEEERRSEDAQSKAALTDWLRAKASFVIEGLKEADKDEFCRCELKLQKWYGDLRGKPFAIEAENSILDISGFSKQYNCAFIWQKDGVKKLNLYLIINYFKGGKLRFKKIKPEAFEANRFYTVINKKSGEIVPMEVNFNFDDPNLIILPLAFGKRQGREFIWNDLLSLETGSLKLANGRVIEKTLYNRRTRQDEPALFVALTFERREVLDSSNIKPMNLIGVDRGENIPAVIALTDPEGCPLSRFKDSLGNPTHILRIGESYKEKQRTIQAKKEVEQRRAGGYSRKYASKAKNLADDMVRNTARDLLYYAVTQDAMLIFENLSRGFGRQGKRTFMAERQYTRMEDWLTAKLAYEGLPSKTYLSKTLAQYTSKTCSNCGFTITSADYDRVLEKLKKTATGWMTTINGKELKVEGQITYYNRYKRQNVVKDLSVELDRLSEESVNNDISSWDKGRSGEALSLLKKRFSHRPVQEKFVCLNCGFETHADEQAALNIARSWLFLRSQEYKKYQTNKTTGNTDKRAFVETWQSFYRKKLKEVWKPAV

SEQ ID NO: 38423 - protein, 978 aa, synthetic construct
  REGION 1..978: note = engineered CasX variant
QEIKRINKIRRRLVKDSNTKKAGKTGPMKTLLVRVMTPDLRERLENLRKKPENIPQPISNTSRANLNKLLTDYTEMKKAILHVYWEEFQKDPVGLMSRVAQPASKKIDQNKLKPEMDEKGNLTTAGFACSQCGQPLFVYKLEQVSEKGKAYTNYFGRCNVAEHEKLIKLAQLKPEKDSDEAVTYSLGKFGQRALDFYSIHVTKESTHPVKPLAQIAGNRYASGPVGKALSDACMGTIASFLSKYQDIIIEHQKVVKGNQKRLESLRELAGKENLEYPSVTLPPQPHTKEGVDAYNEVIARVRMWVNLNLWQKLKLSRDDAKPLLRLKKFPSFPLVERQANEVDWWDMVCNVKKLINEKKEDGKVFWQNLAGYKRQEALRPYLSSEEDRKKGKKFARYQLGDLLLHLEKKHGEDWGKVYDEAWERIDKKVEGLSKHIKLEEERRSEDAQSKAALTDWLRAKASFVIEGLKEADKDEFCRCELKLQKWYGDLRGKPFAIEAENSILDISGFSKQYNCAFIWQKDGVKKLNLYLIINYFKGGKLRFKKIKPEAFEANRFYTVINKKSGEIVPMEVNFNFDDPNLIILPLAFGKRQGREFIWNDLLSLETGSLKLANGRVIEKTLYNRRTRQDEPALFVALTFERREVLDSSNIKPMNLIGVDRGENIPAVIALTDPEGCPLSRFKDSLGNPTHILRIGESYKEKQRTIQAKKEVEQRRAGGYSRKYASKAKNLADDMVRNTARDLLYYAVTQDAMLIFENLSRGFGRQGKRTFMAERQYTRMEDWLTAKLAYEGLPSKTYLSKTLAQYTSKTCSNCGFTITSADYDRVLEKLKKTATGWMTTINGKELKVEGQITYYNRYKRQNVVKDLSVELDRLSEESVNNDISSWDKGRSGEALSLLKKRFSHRPVQEKFVCLNCGFETHADEQAALNIARSWLFLRSQEYKKYQTNKTTGNTDKRAFVETWQSFYRKKLKEVWKPAV

SEQ ID NO: 38424 - protein, 977 aa, synthetic construct
  REGION 1..977: note = engineered CasX variant
QEIKRINKIRRRLVKDSNTKKAGKTGPMKTLLVRVMTPDLRERLENLRKKPENIPQPISNTSRANLNKLLTDYTEMKKAILHVYWEEFQKDPVGLMSRVAQPASKKIDQNKLKPEMDEKGNLTTAGFACSQCGQPLFVYKLEQVSEKGKAYTNYFGRCNVAEHEKLILLAQLKPEKDSDEAVTYSLGKFGQRALDFYSIHVTKESTHPVKPLAQIAGNRYASPVGKALSDACMGTIASFLSKYQDIIIEHQKVVKGNQKRLESLRELAGKENLEYPSVTLPPQPHTKEGVDAYNEVIARVRMWVNLNLWQKLKLSRDDAKPLLRLKKFPSFPLVERQANEVDWWDMVCNVKKLINEKKEDGKVFWQNLAGYKRQEALRPYLSSEEDRKKGKKFARYQLGDLLLHLEKKHGEDWGKVYDEAWERIDKKVEGLSKHIKLEEERRSEDAQSKAALTDWLRAKASFVIEGLKEADKDEFCRCELKLQKWYGDLRGKPFAIEAENSILDISGFSKQYNCAFIWQKDGVKKLNLYLIINYFKGGKLRFKKIKPEAFEANRFYTVINKKSGEIVPMEVNFNFDDPNLIILPLAFGKRQGREFIWNDLLSLETGSLKLANGRVIEKTLYNRRTRQDEPALFVALTFERREVLDSSNIKPMNLIGVDRGENIPAVIALTDPEGCPLSRFKDSLGNPTHILRIGESYKEKQRTIQAKKEVEQRRAGGYSRKYASKAKNLADDMVRNTARDLLYYAVTQDAMLIFENLSRGFGRQGKRTFMAERQYTRMEDWLTAKLAYEGLPSKTYLSKTLAQYTSKTCSNCGFTITSADYDRVLEKLKKTATGWMTTINGKELKVEGQITYYNRYKRQNVVKDLSVELDRLSEESVNNDISSWDKGRSGEALSLLKKRFSHRPVQEKFVCLNCGFETHADEQAALNIARSWLFLRSQEYKKYQTNKTTGNTDKRAFVETWQSFYRKKLKEVWKPAV

SEQ ID NO: 38425 - protein, 978 aa, synthetic construct
  REGION 1..978: note = engineered CasX variant
QEIKRINKIRRRLVKDSNTKKAGKTGPMKTLLVRVMTPDLRERLENLRKKPENIPQPISNTSRANLNKLLTDYTEMKKAILHVYWEEFQKDPVGLMSRVAQPASKKIDQNKLKPEMDEKGNLTTAGFACSQCGQPLFVYKLEQVSEKGKAYTNYFGRCNVAEHEKLILLAQLKPEKDSDEAVTYSLGKFGQRALDFYSIHVTKESTHPVKPLAQIAGNRYASYPVGKALSDACMGTIASFLSKYQDIIIEHQKVVKGNQKRLESLRELAGKENLEYPSVTLPPQPHTKEGVDAYNEVIARVRMWVNLNLWQKLKLSRDDAKPLLRLKGFPSFPLVERQANEVDWWDMVCNVKKLINEKKEDGKVFWQNLAGYKRQEALRPYLSSEEDRKKGKKFARYQLGDLLLHLEKKHGEDWGKVYDEAWERIDKKVEGLSKHIKLEEERRSEDAQSKAALTDWLRAKASFVIEGLKEADKDEFCRCELKLQKWYGDLRGKPFAIEAENSILDISGFSKQYNCAFIWQKDGVKKLNLYLIINYFKGGKLRFKKIKPEAFEANRFYTVINKKSGEIVPMEVNFNFDDPNLIILPLAFGKRQGREFIWNDLLSLETGSLKLANGRVIEKTLYNRRTRQDEPALFVALTFERREVLDSSNIKPMNLIGVDRGENIPAVIALTDPEGCPLSRFKDSLGNPTHILRIGERYKEKQRTIQAKKEVEQRRAGGYSRKYASKAKNLADDMVRNTARDLLYYAVTQDAMLIFENLSRGFGRQGKRTFMAERQYTRMEDWLTAKLAYEGLPSKTYLSKTLAQYTSKTCSNCGFTITSADYDRVLEKLKKTATGWMTTINGKELKVEGQITYYNRYKRQNVVKDLSVELDRLSEESVNNDISSWDKGRSGEALSLLKKRFSHRPVQEKFVCLNCGFETHADEQAALNIARSWLFLRSQEYKKYQTNKTTGNTDKRAFVETWQSFYRKKLKEVWKPAV

SEQ ID NO: 38426 - protein, 978 aa, synthetic construct
  REGION 1..978: note = engineered CasX variant
QEIKRINKIRRRLVKDSNTKKAGKTGPMKTLLVRVMTPDLRERLENLRKKPENIPQPISNTSRANLNKLLTDYTEMKKAILHVYWEEFQKDPVGLMSRVAQPASKKIDQNKLKPEMDEKGNLTTAGFACSQCGQPLFVYKLEQVSEKGKAYTNYFGRCNVAEHEKLILLAQLKPEKDSDEAVTYSLGKFGQRALDFYSIHVTKESTHPVKPLAQIAGNRYASHPVGKALSDACMGTIASFLSKYQDIIIEHQKVVKGNQKRLESLRELAGKENLEYPSVTLPPQPHTKEGVDAYNEVIARVRMWVNLNLWQKLKLSRDDAKPLLRLKGFPSFPLVERQANEVDWWDMVCNVKKLINEKKEDGKVFWQNLAGYKRQEALRPYLSSEEDRKKGKKFARYQLGDLLLHLEKKHGEDWGKVYDEAWERIDKKVEGLSKHIKLEEERRSEDAQSKAALTDWLRAKASFVIEGLKEADKDEFCRCELKLQKWYGDLRGKPFAIEAENSILDISGFSKQYNCAFIWQKDGVKKLNLYLIINYFKGGKLRFKKIKPEAFEANRFYTVINKKSGEIVPMEVNFNFDDPNLIILPLAFGKRQGREFIWNDLLSLETGSLKLANGRVIEKTLYNRRTRQDEPALFVALTFERREVLDSSNIKPMNLIGVDRGENIPAVIALTDPEGCPLSRFKDSLGNPTHILRIGERYKEKQRTIQAKKEVEQRRAGGYSRKYASKAKNLADDMVRNTARDLLYYAVTQDAMLIFENLSRGFGRQGKRTFMAERQYTRMEDWLTAKLAYEGLPSKTYLSKTLAQYTSKTCSNCGFTITSADYDRVLEKLKKTATGWMTTINGKELKVEGQITYYNRYKRQNVVKDLSVELDRLSEESVNNDISSWDKGRSGEALSLLKKRFSHRPVQEKFVCLNCGFETHADEQAALNIARSWLFLRSQEYKKYQTNKTTGNTDKRAFVETWQSFYRKKLKEVWKPAV

SEQ ID NO: 38427 - protein, 978 aa, synthetic construct
  REGION 1..978: note = engineered CasX variant
QEIKRINKIRRRLVKDSNTKKAGKTGPMKTLLVRVMTPDLRERLENLRKKPENIPQPISNTSRANLNKLLTDYTEMKKAILHVYWEEFQKDPVGLMSRVAQPASKKIDQNKLKPEMDEKGNLTTAGFACSQCGQPLFVYKLEQVSEKGKAYTNYFGRCNVAEHEKLILLAQLKPEKDSDEAVTYSLGKFGQRALDFYSIHVTKESTHPVKPLAQIAGNRYASSPVGKALSDACMGTIASFLSKYQDIIIEHQKVVKGNQKRLESLRELAGKENLEYPSVTLPPQPHTKEGVDAYNEVIARVRMWVNLNLWQKLKLSRDDAKPLLRLKGFPSFPLVERQANEVDWWDMVCNVKKLINEKKEDGKVFWQNLAGYKRQEALRPYLSSEEDRKKGKKFARYQLGDLLLHLEKKHGEDWGKVYDEAWERIDKKVEGLSKHIKLEEERRSEDAQSKAALTDWLRAKASFVIEGLKEADKDEFCRCELKLQKWYGDLRGKPFAIEAENSILDISGFSKQYNCAFIWQKDGVKKLNLYLIINYFKGGKLRFKKIKPEAFEANRFYTVINKKSGEIVPMEVNFNFDDPNLIILPLAFGKRQGREFIWNDLLSLETGSLKLANGRVIEKTLYNRRTRQDEPALFVALTFERREVLDSSNIKPMNLIGVDRGENIPAVIALTDPEGCPLSRFKDSLGNPTHILRIGERYKEKQRTIQAKKEVEQRRAGGYSRKYASKAKNLADDMVRNTARDLLYYAVTQDAMLIFENLSRGFGRQGKRTFMAERQYTRMEDWLTAKLAYEGLPSKTYLSKTLAQYTSKTCSNCGFTITSADYDRVLEKLKKTATGWMTTINGKELKVEGQITYYNRYKRQNVVKDLSVELDRLSEESVNNDISSWDKGRSGEALSLLKKRFSHRPVQEKFVCLNCGFETHADEQAALNIARSWLFLRSQEYKKYQTNKTTGNTDKRAFVETWQSFYRKKLKEVWKPAV

SEQ ID NO: 38428 - protein, 978 aa, synthetic construct
  REGION 1..978: note = engineered CasX variant
QEIKRINKIRRRLVKDSNTKKAGKTGPMKTLLVRVMTPDLRERLENLRKKPENIPQPISNTSRANLNKLLTDYTEMKKAILHVYWEEFQKDPVGLMSRVAQPASKKIDQNKLKPEMDEKGNLTTAGFACSQCGQPLFVYKLEQVSEKGKAYTNYFGRCNVAEHEKLILLAQLKPEKDSDEAVTYSLGKFGQRALDFYSIHVTKESTHPVKPLAQIAGNRYASTPVGKALSDACMGTIASFLSKYQDIIIEHQKVVKGNQKRLESLRELAGKENLEYPSVTLPPQPHTKEGVDAYNEVIARVRMWVNLNLWQKLKLSRDDAKPLLRLKGFPSFPLVERQANEVDWWDMVCNVKKLINEKKEDGKVFWQNLAGYKRQEALRPYLSSEEDRKKGKKFARYQLGDLLLHLEKKHGEDWGKVYDEAWERIDKKVEGLSKHIKLEEERRSEDAQSKAALTDWLRAKASFVIEGLKEADKDEFCRCELKLQKWYGDLRGKPFAIEAENSILDISGFSKQYNCAFIWQKDGVKKLNLYLIINYFKGGKLRFKKIKPEAFEANRFYTVINKKSGEIVPMEVNFNFDDPNLIILPLAFGKRQGREFIWNDLLSLETGSLKLANGRVIEKTLYNRRTRQDEPALFVALTFERREVLDSSNIKPMNLIGVDRGENIPAVIALTDPEGCPLSRFKDSLGNPTHILRIGERYKEKQRTIQAKKEVEQRRAGGYSRKYASKAKNLADDMVRNTARDLLYYAVTQDAMLIFENLSRGFGRQGKRTFMAERQYTRMEDWLTAKLAYEGLPSKTYLSKTLAQYTSKTCSNCGFTITSADYDRVLEKLKKTATGWMTTINGKELKVEGQITYYNRYKRQNVVKDLSVELDRLSEESVNNDISSWDKGRSGEALSLLKKRFSHRPVQEKFVCLNCGFETHADEQAALNIARSWLFLRSQEYKKYQTNKTTGNTDKRAFVETWQSFYRKKLKEVWKPAV

SEQ ID NO: 38429 - protein, 978 aa, synthetic construct
  REGION 1..978: note = engineered CasX variant
QEIKRINKIRRRLVKDSNTKKAGKTGPMKTLLVRVMTPDLRERLENLRKKPENIPQPISNTSRANLNKLLTDYTEMKKAILHVYWEEFQKDPVGLMSRVAQPASKKIDQNKLKPEMDEKGNLTTAGFACSQCGQPLFVYKLEQVSEKGKAYTNYFGRCNVAEHEKLILLAQLKPEKDSDEAVTYSLGKFGQRALDFYSIHVTKESTHPVKPLAQIAGNRYASAPVGKALSDACMGTIASFLSKYQDIIIEHQKVVKGNQKRLESLRELAGKENLEYPSVTLPPQPHTKEGVDAYNEVIARVRMWVNLNLWQKLKLSRDDAKPLLRLKGFPSFPLVERQANEVDWWDMVCNVKKLINEKKEDGKVFWQNLAGYKRQEALRPYLSSEEDRKKGKKFARYQLGDLLLHLEKKHGEDWGKVYDEAWERIDKKVEGLSKHIKLEEERRSEDAQSKAALTDWLRAKASFVIEGLKEADKDEFCRCELKLQKWYGDLRGKPFAIEAENSILDISGFSKQYNCAFIWQKDGVKKLNLYLIINYFKGGKLRFKKIKPEAFEANRFYTVINKKSGEIVPMEVNFNFDDPNLIILPLAFGKRQGREFIWNDLLSLETGSLKLANGRVIEKTLYNRRTRQDEPALFVALTFERREVLDSSNIKPMNLIGVDRGENIPAVIALTDPEGCPLSRFKDSLGNPTHILRIGERYKEKQRTIQAKKEVEQRRAGGYSRKYASKAKNLADDMVRNTARDLLYYAVTQDAMLIFENLSRGFGRQGKRTFMAERQYTRMEDWLTAKLAYEGLPSKTYLSKTLAQYTSKTCSNCGFTITSADYDRVLEKLKKTATGWMTTINGKELKVEGQITYYNRYKRQNVVKDLSVELDRLSEESVNNDISSWDKGRSGEALSLLKKRFSHRPVQEKFVCLNCGFETHADEQAALNIARSWLFLRSQEYKKYQTNKTTGNTDKRAFVETWQSFYRKKLKEVWKPAV

SEQ ID NO: 38430 - protein, 978 aa, synthetic construct
  REGION 1..978: note = engineered CasX variant
QEIKRINKIRRRLVKDSNTKKAGKTGPMKTLLVRVMTPDLRERLENLRKKPENIPQPISNTSRANLNKLLTDYTEMKKAILHVYWEEFQKDPVGLMSRVAQPASKKIDQNKLKPEMDEKGNLTTAGFACSQCGQPLFVYKLEQVSEKGKAYTNYFGRCNVAEHEKLILLAQLKPEKDSDEAVTYSLGKFGQRALDFYSIHVTKESTHPVKPLAQIAGNRYASVPVGKALSDACMGTIASFLSKYQDIIIEHQKVVKGNQKRLESLRELAGKENLEYPSVTLPPQPHTKEGVDAYNEVIARVRMWVNLNLWQKLKLSRDDAKPLLRLKGFPSFPLVERQANEVDWWDMVCNVKKLINEKKEDGKVFWQNLAGYKRQEALRPYLSSEEDRKKGKKFARYQLGDLLLHLEKKHGEDWGKVYDEAWERIDKKVEGLSKHIKLEEERRSEDAQSKAALTDWLRAKASFVIEGLKEADKDEFCRCELKLQKWYGDLRGKPFAIEAENSILDISGFSKQYNCAFIWQKDGVKKLNLYLIINYFKGGKLRFKKIKPEAFEANRFYTVINKKSGEIVPMEVNFNFDDPNLIILPLAFGKRQGREFIWNDLLSLETGSLKLANGRVIEKTLYNRRTRQDEPALFVALTFERREVLDSSNIKPMNLIGVDRGENIPAVIALTDPEGCPLSRFKDSLGNPTHILRIGERYKEKQRTIQAKKEVEQRRAGGYSRKYASKAKNLADDMVRNTARDLLYYAVTQDAMLIFENLSRGFGRQGKRTFMAERQYTRMEDWLTAKLAYEGLPSKTYLSKTLAQYTSKTCSNCGFTITSADYDRVLEKLKKTATGWMTTINGKELKVEGQITYYNRYKRQNVVKDLSVELDRLSEESVNNDISSWDKGRSGEALSLLKKRFSHRPVQEKFVCLNCGFETHADEQAALNIARSWLFLRSQEYKKYQTNKTTGNTDKRAFVETWQSFYRKKLKEVWKPAV

SEQ ID NO: 38431 - protein, 978 aa, synthetic construct
  REGION 1..978: note = engineered CasX variant
QEIKRINKIRRRLVKDSNTKKAGKTGPMKTLLVRVMTPDLRERLENLRKKPENIPQPISNTSRANLNKLLTDYTEMKKAILHVYWEEFQKDPVGLMSRVAQPASKKIDQNKLKPEMDEKGNLTTAGFACSQCGQPLFVYKLEQVSEKGKAYTNYFGRCNVAEHEKLIKLAQLKPEKDSDEAVTYSLGKFGQRALDFYSIHVTKESTHPVKPLAQIAGNRYASGPVGKALSDACMGTIASFLSKYQDIIIEHQKVVKGNQKRLESLRELAGKENLEYPSVTLPPQPHTKEGVDAYNEVIARVRMWVNLNLWQKLKLSRDDAKPLLRLKGFPSFPLVERQANEVDWWDMVCNVKKLINEKKEDGKVFWQNLAGYKRQEALRPYLSSEEDRKKGKKFARYQLGDLLLHLEKKHGEDWGKVYDEAWERIDKKVEGLSKHIKLEEERRSEDAQSKAALTDWLRAKASFVIEGLKEADKDEFCRCELKLQKWYGDLRGKPFAIEAENSILDISGFSKQYNCAFIWQKDGVKKLNLYLIINYFKGGKLRFKKIKPEAFEANRFYTVINKKSGEIVPMEVNFNFDDPNLIILPLAFGKRQGREFIWNDLLSLETGSLKLANGRVIEKTLYNRRTRQDEPALFVALTFERREVLDSSNIKPMNLIGVDRGENIPAVIALTDPEGCPLSRFKDSLGNPTHILRIGERYKEKQRTIQAKKEVEQRRAGGYSRKYASKAKNLADDMVRNTARDLLYYAVTQDAMLIFENLSRGFGRQGKRTFMAERQYTRMEDWLTAKLAYEGLPSKTYLSKTLAQYTSKTCSNCGFTITSADYDRVLEKLKKTATGWMTTINGKELKVEGQITYYNRYKRQNVVKDLSVELDRLSEESVNNDISSWDKGRSGEALSLLKKRFSHRPVQEKFVCLNCGFETHADEQAALNIARSWLFLRSQEYKKYQTNKTTGNTDKRAFVETWQSFYRKKLKEVWKPAV

SEQ ID NO: 38432 - protein, 977 aa, synthetic construct
  REGION 1..977: note = engineered CasX variant
QEIKRINKIRRRLVKDSNTKKAGKTGPMKTLLVRVMTPDLRERLENLRKKPENIPQPISNTSRANLNKLLTDYTEMKKAILHVYWEEFQKDPVGLMSRVAQPASKKIDQNKLKPEMDEKGNLTTAGFACSQCGQPLFVYKLEQVSEKGKAYTNYFGRCNVAEHEKLILLAQLKPEKDSDEAVTYSLGKFGQRALDFYSIHVTKESTHPVKPLAQIAGNRYASPVGKALSDACMGTIASFLSKYQDIIIEHQKVVKGNQKRLESLRELAGKENLEYPSVTLPPQPHTKEGVDAYNEVIARVRMWVNLNLWQKLKLSRDDAKPLLRLKGFPSFPLVERQANEVDWWDMVCNVKKLINEKKEDGKVFWQNLAGYKRQEALRPYLSSEEDRKKGKKFARYQLGDLLLHLEKKHGEDWGKVYDEAWERIDKKVEGLSKHIKLEEERRSEDAQSKAALTDWLRAKASFVIEGLKEADKDEFCRCELKLQKWYGDLRGKPFAIEAENSILDISGFSKQYNCAFIWQKDGVKKLNLYLIINYFKGGKLRFKKIKPEAFEANRFYTVINKKSGEIVPMEVNFNFDDPNLIILPLAFGKRQGREFIWNDLLSLETGSLKLANGRVIEKTLYNRRTRQDEPALFVALTFERREVLDSSNIKPMNLIGVDRGENIPAVIALTDPEGCPLSRFKDSLGNPTHILRIGERYKEKQRTIQAKKEVEQRRAGGYSRKYASKAKNLADDMVRNTARDLLYYAVTQDAMLIFENLSRGFGRQGKRTFMAERQYTRMEDWLTAKLAYEGLPSKTYLSKTLAQYTSKTCSNCGFTITSADYDRVLEKLKKTATGWMTTINGKELKVEGQITYYNRYKRQNVVKDLSVELDRLSEESVNNDISSWDKGRSGEALSLLKKRFSHRPVQEKFVCLNCGFETHADEQAALNIARSWLFLRSQEYKKYQTNKTTGNTDKRAFVETWQSFYRKKLKEVWKPAV

SEQ ID NO: 38433 - protein, 978 aa, synthetic construct
  REGION 1..978: note = engineered CasX variant
QEIKRINKIRRRLVKDSNTKKAGKTGPMKTLLVRVMTPDLRERLENLRKKPENIPQPISNTSRANLNKLLTDYTEMKKAILHVYWEEFQKDPVGLMSRVAQPASKKIDQNKLKPEMDEKGNLTTAGFACSQCGQPLFVYKLEQVSEKGKAYTNYFGRCNVAEHEKLILLAQLKPEKDSDEAVTYSLGKFGQRALDFYSIHVTKESTHPVKPLAQIAGNRYASYPVGKALSDACMGTIASFLSKYQDIIIEHQKVVKGNQKRLESLRELAGKENLEYPSVTLPPQPHTKEGVDAYNEVIARVRMWVNLNLWQKLKLSRDDAKPLLRLKGFPSFPLVERQANEVDWWDMVCNVKKLINEKKEDGKVFWQNLAGYKRQEALRPYLSSEEDRKKGKKFARYQLGDLLLHLEKKHGEDWGKVYDEAWERIDKKVEGLSKHIKLEEERRSEDAQSKAALTDWLRAKASFVIEGLKEADKDEFCRCELKLQKWYGDLRGKPFAIEAENSILDISGFSKQYNCAFIWQKDGVKKLNLYLIINYFKGGKLRFKKIKPEAFEANRFYTVINKKSGEIVPMEVNFNFDDPNLIILPLAFGKRQGREFIWNDLLSLETGSLQLANGRVIEKTLYNRRTRQDEPALFVALTFERREVLDSSNIKPMNLIGVDRGENIPAVIALTDPEGCPLSRFKDSLGNPTHILRIGESYKEKQRTIQAKKEVEQRRAGGYSRKYASKAKNLADDMVRNTARDLLYYAVTQDAMLIFENLSRGFGRQGKRTFMAERQYTRMEDWLTAKLAYEGLPSKTYLSKTLAQYTSKTCSNCGFTITSADYDRVLEKLKKTATGWMTTINGKELKVEGQITYYNRYKRQNVVKDLSVELDRLSEESVNNDISSWDKGRSGEALSLLKKRFSHRPVQEKFVCLNCGFETHADEQAALNIARSWLFLRSQEYKKYQTNKTTGNTDKRAFVETWQSFYRKKLKEVWKPAV

SEQ ID NO: 38434 - protein, 978 aa, synthetic construct
  REGION 1..978: note = engineered CasX variant
QEIKRINKIRRRLVKDSNTKKAGKTGPMKTLLVRVMTPDLRERLENLRKKPENIPQPISNTSRANLNKLLTDYTEMKKAILHVYWEEFQKDPVGLMSRVAQPASKKIDQNKLKPEMDEKGNLTTAGFACSQCGQPLFVYKLEQVSEKGKAYTNYFGRCNVAEHEKLILLAQLKPEKDSDEAVTYSLGKFGQRALDFYSIHVTKESTHPVKPLAQIAGNRYASHPVGKALSDACMGTIASFLSKYQDIIIEHQKVVKGNQKRLESLRELAGKENLEYPSVTLPPQPHTKEGVDAYNEVIARVRMWVNLNLWQKLKLSRDDAKPLLRLKGFPSFPLVERQANEVDWWDMVCNVKKLINEKKEDGKVFWQNLAGYKRQEALRPYLSSEEDRKKGKKFARYQLGDLLLHLEKKHGEDWGKVYDEAWERIDKKVEGLSKHIKLEEERRSEDAQSKAALTDWLRAKASFVIEGLKEADKDEFCRCELKLQKWYGDLRGKPFAIEAENSILDISGFSKQYNCAFIWQKDGVKKLNLYLIINYFKGGKLRFKKIKPEAFEANRFYTVINKKSGEIVPMEVNFNFDDPNLIILPLAFGKRQGREFIWNDLLSLETGSLQLANGRVIEKTLYNRRTRQDEPALFVALTFERREVLDSSNIKPMNLIGVDRGENIPAVIALTDPEGCPLSRFKDSLGNPTHILRIGESYKEKQRTIQAKKEVEQRRAGGYSRKYASKAKNLADDMVRNTARDLLYYAVTQDAMLIFENLSRGFGRQGKRTFMAERQYTRMEDWLTAKLAYEGLPSKTYLSKTLAQYTSKTCSNCGFTITSADYDRVLEKLKKTATGWMTTINGKELKVEGQITYYNRYKRQNVVKDLSVELDRLSEESVNNDISSWDKGRSGEALSLLKKRFSHRPVQEKFVCLNCGFETHADEQAALNIARSWLFLRSQEYKKYQTNKTTGNTDKRAFVETWQSFYRKKLKEVWKPAV

SEQ ID NO: 38435 - protein, 978 aa, synthetic construct
  REGION 1..978: note = engineered CasX variant
QEIKRINKIRRRLVKDSNTKKAGKTGPMKTLLVRVMTPDLRERLENLRKKPENIPQPISNTSRANLNKLLTDYTEMKKAILHVYWEEFQKDPVGLMSRVAQPASKKIDQNKLKPEMDEKGNLTTAGFACSQCGQPLFVYKLEQVSEKGKAYTNYFGRCNVAEHEKLILLAQLKPEKDSDEAVTYSLGKFGQRALDFYSIHVTKESTHPVKPLAQIAGNRYASSPVGKALSDACMGTIASFLSKYQDIIIEHQKVVKGNQKRLESLRELAGKENLEYPSVTLPPQPHTKEGVDAYNEVIARVRMWVNLNLWQKLKLSRDDAKPLLRLKGFPSFPLVERQANEVDWWDMVCNVKKLINEKKEDGKVFWQNLAGYKRQEALRPYLSSEEDRKKGKKFARYQLGDLLLHLEKKHGEDWGKVYDEAWERIDKKVEGLSKHIKLEEERRSEDAQSKAALTDWLRAKASFVIEGLKEADKDEFCRCELKLQKWYGDLRGKPFAIEAENSILDISGFSKQYNCAFIWQKDGVKKLNLYLIINYFKGGKLRFKKIKPEAFEANRFYTVINKKSGEIVPMEVNFNFDDPNLIILPLAFGKRQGREFIWNDLLSLETGSLQLANGRVIEKTLYNRRTRQDEPALFVALTFERREVLDSSNIKPMNLIGVDRGENIPAVIALTDPEGCPLSRFKDSLGNPTHILRIGESYKEKQRTIQAKKEVEQRRAGGYSRKYASKAKNLADDMVRNTARDLLYYAVTQDAMLIFENLSRGFGRQGKRTFMAERQYTRMEDWLTAKLAYEGLPSKTYLSKTLAQYTSKTCSNCGFTITSADYDRVLEKLKKTATGWMTTINGKELKVEGQITYYNRYKRQNVVKDLSVELDRLSEESVNNDISSWDKGRSGEALSLLKKRFSHRPVQEKFVCLNCGFETHADEQAALNIARSWLFLRSQEYKKYQTNKTTGNTDKRAFVETWQSFYRKKLKEVWKPAV

SEQ ID NO: 38436 - protein, 978 aa, synthetic construct
  REGION 1..978: note = engineered CasX variant
QEIKRINKIRRRLVKDSNTKKAGKTGPMKTLLVRVMTPDLRERLENLRKKPENIPQPISNTSRANLNKLLTDYTEMKKAILHVYWEEFQKDPVGLMSRVAQPASKKIDQNKLKPEMDEKGNLTTAGFACSQCGQPLFVYKLEQVSEKGKAYTNYFGRCNVAEHEKLILLAQLKPEKDSDEAVTYSLGKFGQRALDFYSIHVTKESTHPVKPLAQIAGNRYASTPVGKALSDACMGTIASFLSKYQDIIIEHQKVVKGNQKRLESLRELAGKENLEYPSVTLPPQPHTKEGVDAYNEVIARVRMWVNLNLWQKLKLSRDDAKPLLRLKGFPSFPLVERQANEVDWWDMVCNVKKLINEKKEDGKVFWQNLAGYKRQEALRPYLSSEEDRKKGKKFARYQLGDLLLHLEKKHGEDWGKVYDEAWERIDKKVEGLSKHIKLEEERRSEDAQSKAALTDWLRAKASFVIEGLKEADKDEFCRCELKLQKWYGDLRGKPFAIEAENSILDISGFSKQYNCAFIWQKDGVKKLNLYLIINYFKGGKLRFKKIKPEAFEANRFYTVINKKSGEIVPMEVNFNFDDPNLIILPLAFGKRQGREFIWNDLLSLETGSLQLANGRVIEKTLYNRRTRQDEPALFVALTFERREVLDSSNIKPMNLIGVDRGENIPAVIALTDPEGCPLSRFKDSLGNPTHILRIGESYKEKQRTIQAKKEVEQRRAGGYSRKYASKAKNLADDMVRNTARDLLYYAVTQDAMLIFENLSRGFGRQGKRTFMAERQYTRMEDWLTAKLAYEGLPSKTYLSKTLAQYTSKTCSNCGFTITSADYDRVLEKLKKTATGWMTTINGKELKVEGQITYYNRYKRQNVVKDLSVELDRLSEESVNNDISSWDKGRSGEALSLLKKRFSHRPVQEKFVCLNCGFETHADEQAALNIARSWLFLRSQEYKKYQTNKTTGNTDKRAFVETWQSFYRKKLKEVWKPAV

SEQ ID NO: 38437 - protein, 978 aa, synthetic construct
  REGION 1..978: note = engineered CasX variant
QEIKRINKIRRRLVKDSNTKKAGKTGPMKTLLVRVMTPDLRERLENLRKKPENIPQPISNTSRANLNKLLTDYTEMKKAILHVYWEEFQKDPVGLMSRVAQPASKKIDQNKLKPEMDEKGNLTTAGFACSQCGQPLFVYKLEQVSEKGKAYTNYFGRCNVAEHEKLILLAQLKPEKDSDEAVTYSLGKFGQRALDFYSIHVTKESTHPVKPLAQIAGNRYASAPVGKALSDACMGTIASFLSKYQDIIIEHQKVVKGNQKRLESLRELAGKENLEYPSVTLPPQPHTKEGVDAYNEVIARVRMWVNLNLWQKLKLSRDDAKPLLRLKGFPSFPLVERQANEVDWWDMVCNVKKLINEKKEDGKVFWQNLAGYKRQEALRPYLSSEEDRKKGKKFARYQLGDLLLHLEKKHGEDWGKVYDEAWERIDKKVEGLSKHIKLEEERRSEDAQSKAALTDWLRAKASFVIEGLKEADKDEFCRCELKLQKWYGDLRGKPFAIEAENSILDISGFSKQYNCAFIWQKDGVKKLNLYLIINYFKGGKLRFKKIKPEAFEANRFYTVINKKSGEIVPMEVNFNFDDPNLIILPLAFGKRQGREFIWNDLLSLETGSLQLANGRVIEKTLYNRRTRQDEPALFVALTFERREVLDSSNIKPMNLIGVDRGENIPAVIALTDPEGCPLSRFKDSLGNPTHILRIGESYKEKQRTIQAKKEVEQRRAGGYSRKYASKAKNLADDMVRNTARDLLYYAVTQDAMLIFENLSRGFGRQGKRTFMAERQYTRMEDWLTAKLAYEGLPSKTYLSKTLAQYTSKTCSNCGFTITSADYDRVLEKLKKTATGWMTTINGKELKVEGQITYYNRYKRQNVVKDLSVELDRLSEESVNNDISSWDKGRSGEALSLLKKRFSHRPVQEKFVCLNCGFETHADEQAALNIARSWLFLRSQEYKKYQTNKTTGNTDKRAFVETWQSFYRKKLKEVWKPAV

SEQ ID NO: 38438 - protein, 978 aa, synthetic construct
  REGION 1..978: note = engineered CasX variant
QEIKRINKIRRRLVKDSNTKKAGKTGPMKTLLVRVMTPDLRERLENLRKKPENIPQPISNTSRANLNKLLTDYTEMKKAILHVYWEEFQKDPVGLMSRVAQPASKKIDQNKLKPEMDEKGNLTTAGFACSQCGQPLFVYKLEQVSEKGKAYTNYFGRCNVAEHEKLILLAQLKPEKDSDEAVTYSLGKFGQRALDFYSIHVTKESTHPVKPLAQIAGNRYASVPVGKALSDACMGTIASFLSKYQDIIIEHQKVVKGNQKRLESLRELAGKENLEYPSVTLPPQPHTKEGVDAYNEVIARVRMWVNLNLWQKLKLSRDDAKPLLRLKGFPSFPLVERQANEVDWWDMVCNVKKLINEKKEDGKVFWQNLAGYKRQEALRPYLSSEEDRKKGKKFARYQLGDLLLHLEKKHGEDWGKVYDEAWERIDKKVEGLSKHIKLEEERRSEDAQSKAALTDWLRAKASFVIEGLKEADKDEFCRCELKLQKWYGDLRGKPFAIEAENSILDISGFSKQYNCAFIWQKDGVKKLNLYLIINYFKGGKLRFKKIKPEAFEANRFYTVINKKSGEIVPMEVNFNFDDPNLIILPLAFGKRQGREFIWNDLLSLETGSLQLANGRVIEKTLYNRRTRQDEPALFVALTFERREVLDSSNIKPMNLIGVDRGENIPAVIALTDPEGCPLSRFKDSLGNPTHILRIGESYKEKQRTIQAKKEVEQRRAGGYSRKYASKAKNLADDMVRNTARDLLYYAVTQDAMLIFENLSRGFGRQGKRTFMAERQYTRMEDWLTAKLAYEGLPSKTYLSKTLAQYTSKTCSNCGFTITSADYDRVLEKLKKTATGWMTTINGKELKVEGQITYYNRYKRQNVVKDLSVELDRLSEESVNNDISSWDKGRSGEALSLLKKRFSHRPVQEKFVCLNCGFETHADEQAALNIARSWLFLRSQEYKKYQTNKTTGNTDKRAFVETWQSFYRKKLKEVWKPAV

SEQ ID NO: 38439 - protein, 978 aa, synthetic construct
  REGION 1..978: note = engineered CasX variant
QEIKRINKIRRRLVKDSNTKKAGKTGPMKTLLVRVMTPDLRERLENLRKKPENIPQPISNTSRANLNKLLTDYTEMKKAILHVYWEEFQKDPVGLMSRVAQPASKKIDQNKLKPEMDEKGNLTTAGFACSQCGQPLFVYKLEQVSEKGKAYTNYFGRCNVAEHEKLIKLAQLKPEKDSDEAVTYSLGKFGQRALDFYSIHVTKESTHPVKPLAQIAGNRYASGPVGKALSDACMGTIASFLSKYQDIIIEHQKVVKGNQKRLESLRELAGKENLEYPSVTLPPQPHTKEGVDAYNEVIARVRMWVNLNLWQKLKLSRDDAKPLLRLKGFPSFPLVERQANEVDWWDMVCNVKKLINEKKEDGKVFWQNLAGYKRQEALRPYLSSEEDRKKGKKFARYQLGDLLLHLEKKHGEDWGKVYDEAWERIDKKVEGLSKHIKLEEERRSEDAQSKAALTDWLRAKASFVIEGLKEADKDEFCRCELKLQKWYGDLRGKPFAIEAENSILDISGFSKQYNCAFIWQKDGVKKLNLYLIINYFKGGKLRFKKIKPEAFEANRFYTVINKKSGEIVPMEVNFNFDDPNLIILPLAFGKRQGREFIWNDLLSLETGSLQLANGRVIEKTLYNRRTRQDEPALFVALTFERREVLDSSNIKPMNLIGVDRGENIPAVIALTDPEGCPLSRFKDSLGNPTHILRIGESYKEKQRTIQAKKEVEQRRAGGYSRKYASKAKNLADDMVRNTARDLLYYAVTQDAMLIFENLSRGFGRQGKRTFMAERQYTRMEDWLTAKLAYEGLPSKTYLSKTLAQYTSKTCSNCGFTITSADYDRVLEKLKKTATGWMTTINGKELKVEGQITYYNRYKRQNVVKDLSVELDRLSEESVNNDISSWDKGRSGEALSLLKKRFSHRPVQEKFVCLNCGFETHADEQAALNIARSWLFLRSQEYKKYQTNKTTGNTDKRAFVETWQSFYRKKLKEVWKPAV

SEQ ID NO: 38440 - protein, 977 aa, synthetic construct
  REGION 1..977: note = engineered CasX variant
QEIKRINKIRRRLVKDSNTKKAGKTGPMKTLLVRVMTPDLRERLENLRKKPENIPQPISNTSRANLNKLLTDYTEMKKAILHVYWEEFQKDPVGLMSRVAQPASKKIDQNKLKPEMDEKGNLTTAGFACSQCGQPLFVYKLEQVSEKGKAYTNYFGRCNVAEHEKLILLAQLKPEKDSDEAVTYSLGKFGQRALDFYSIHVTKESTHPVKPLAQIAGNRYASPVGKALSDACMGTIASFLSKYQDIIIEHQKVVKGNQKRLESLRELAGKENLEYPSVTLPPQPHTKEGVDAYNEVIARVRMWVNLNLWQKLKLSRDDAKPLLRLKGFPSFPLVERQANEVDWWDMVCNVKKLINEKKEDGKVFWQNLAGYKRQEALRPYLSSEEDRKKGKKFARYQLGDLLLHLEKKHGEDWGKVYDEAWERIDKKVEGLSKHIKLEEERRSEDAQSKAALTDWLRAKASFVIEGLKEADKDEFCRCELKLQKWYGDLRGKPFAIEAENSILDISGFSKQYNCAFIWQKDGVKKLNLYLIINYFKGGKLRFKKIKPEAFEANRFYTVINKKSGEIVPMEVNFNFDDPNLIILPLAFGKRQGREFIWNDLLSLETGSLQLANGRVIEKTLYNRRTRQDEPALFVALTFERREVLDSSNIKPMNLIGVDRGENIPAVIALTDPEGCPLSRFKDSLGNPTHILRIGESYKEKQRTIQAKKEVEQRRAGGYSRKYASKAKNLADDMVRNTARDLLYYAVTQDAMLIFENLSRGFGRQGKRTFMAERQYTRMEDWLTAKLAYEGLPSKTYLSKTLAQYTSKTCSNCGFTITSADYDRVLEKLKKTATGWMTTINGKELKVEGQITYYNRYKRQNVVKDLSVELDRLSEESVNNDISSWDKGRSGEALSLLKKRFSHRPVQEKFVCLNCGFETHADEQAALNIARSWLFLRSQEYKKYQTNKTTGNTDKRAFVETWQSFYRKKLKEVWKPAV

SEQ ID NO: 38441 - protein, 978 aa, synthetic construct
  REGION 1..978: note = engineered CasX variant
QEIKRLNKIRRRLVKDSNTKKAGKTGPMKTLLVRVMTPDLRERLENLRKKPENIPQPISNTSRANLNKLLTDYTEMKKAILHVYWEEFQVDPVGLMSRVAQPASKKIDQNKLKPEMDEKGNLTTAGFACSQCGQPLFVYKLEQVSEKGKAYTNYFGRCNVAEHEKLILLAQLKPEKDSDEAVTYSLGKFGQRALDFYSIHVTKESTHPVKPLAQIAGNRYASYPVGKALSDACMGTIASFLSKYQDIIIEHQKVVKGNQKRLESLRELAGKENLEYPSVTLPPQPHTKEGVDAYNEVIARVRMWVNLNLWQKLKLSRDDAKPLLRLKGFPSFPLVERQANEVDWWDMVCNVKKLINEKKEDGKVFWQNLAGYKRQEALRPYLSSEEDRKKGKKFARYQLGDLLLHLEKKHGEDWGKVYDEAWERIDKKVEGLSKHIKLEEERRSEDAQSKAALTDWLRAKASFVIEGLKEADKDEFCRCELKLQKWYGDLRGKPFAIEAENSILDISGFSKQYNCAFIWQKDGVKKLNLYLIINYFKGGKLRFKKIKPEAFEANRFYTVINKKSGEIVPMEVNFNFDDPNLIILPLAFGKRQGREFIWNDLLSLETGSLKLANGRVIEKTLYNRRTRQDEPALFVALTFERREVLDSSNIKPMNLIGVDRGENIPAVIALTDPEGCPLSRFKDSLGNPTHILRIGESYKEKQRTIQAKKEVEQRRAGGYSRKYASKAKNLADDMVRNTARDLLYYAVTQDAMLIFENLSRGFGRQGKRTFMAERQYTRMEDWLTAKLAYEGLPSKTYLSKTLAQYTSKTCSNCGFTITSADYDRVLEKLKKTATGWMTTINGKELKVEGQITYYNRYKRQNVVKDLSVELDRLSEESVNNDISSWTKGRSGEALSLLKKRFSHRPVQEKFVCLNCGFETHADEQAALNIARSWLFLRSQEYKKYQTNKTTGNTDKRAFVETWQSFYRKKLKEVWKPAV

SEQ ID NO: 38442 - protein, 978 aa, synthetic construct
  REGION 1..978: note = engineered CasX variant
QEIKRLNKIRRRLVKDSNTKKAGKTGPMKTLLVRVMTPDLRERLENLRKKPENIPQPISNTSRANLNKLLTDYTEMKKAILHVYWEEFQVDPVGLMSRVAQPASKKIDQNKLKPEMDEKGNLTTAGFACSQCGQPLFVYKLEQVSEKGKAYTNYFGRCNVAEHEKLILLAQLKPEKDSDEAVTYSLGKFGQRALDFYSIHVTKESTHPVKPLAQIAGNRYASHPVGKALSDACMGTIASFLSKYQDIIIEHQKVVKGNQKRLESLRELAGKENLEYPSVTLPPQPHTKEGVDAYNEVIARVRMWVNLNLWQKLKLSRDDAKPLLRLKGFPSFPLVERQANEVDWWDMVCNVKKLINEKKEDGKVFWQNLAGYKRQEALRPYLSSEEDRKKGKKFARYQLGDLLLHLEKKHGEDWGKVYDEAWERIDKKVEGLSKHIKLEEERRSEDAQSKAALTDWLRAKASFVIEGLKEADKDEFCRCELKLQKWYGDLRGKPFAIEAENSILDISGFSKQYNCAFIWQKDGVKKLNLYLIINYFKGGKLRFKKIKPEAFEANRFYTVINKKSGEIVPMEVNFNFDDPNLIILPLAFGKRQGREFIWNDLLSLETGSLKLANGRVIEKTLYNRRTRQDEPALFVALTFERREVLDSSNIKPMNLIGVDRGENIPAVIALTDPEGCPLSRFKDSLGNPTHILRIGESYKEKQRTIQAKKEVEQRRAGGYSRKYASKAKNLADDMVRNTARDLLYYAVTQDAMLIFENLSRGFGRQGKRTFMAERQYTRMEDWLTAKLAYEGLPSKTYLSKTLAQYTSKTCSNCGFTITSADYDRVLEKLKKTATGWMTTINGKELKVEGQITYYNRYKRQNVVKDLSVELDRLSEESVNNDISSWTKGRSGEALSLLKKRFSHRPVQEKFVCLNCGFETHADEQAALNIARSWLFLRSQEYKKYQTNKTTGNTDKRAFVETWQSFYRKKLKEVWKPAV

SEQ ID NO: 38443 - protein, 978 aa, synthetic construct
  REGION 1..978: note = engineered CasX variant
QEIKRLNKIRRRLVKDSNTKKAGKTGPMKTLLVRVMTPDLRERLENLRKKPENIPQPISNTSRANLNKLLTDYTEMKKAILHVYWEEFQVDPVGLMSRVAQPASKKIDQNKLKPEMDEKGNLTTAGFACSQCGQPLFVYKLEQVSEKGKAYTNYFGRCNVAEHEKLILLAQLKPEKDSDEAVTYSLGKFGQRALDFYSIHVTKESTHPVKPLAQIAGNRYASSPVGKALSDACMGTIASFLSKYQDIIIEHQKVVKGNQKRLESLRELAGKENLEYPSVTLPPQPHTKEGVDAYNEVIARVRMWVNLNLWQKLKLSRDDAKPLLRLKGFPSFPLVERQANEVDWWDMVCNVKKLINEKKEDGKVFWQNLAGYKRQEALRPYLSSEEDRKKGKKFARYQLGDLLLHLEKKHGEDWGKVYDEAWERIDKKVEGLSKHIKLEEERRSEDAQSKAALTDWLRAKASFVIEGLKEADKDEFCRCELKLQKWYGDLRGKPFAIEAENSILDISGFSKQYNCAFIWQKDGVKKLNLYLIINYFKGGKLRFKKIKPEAFEANRFYTVINKKSGEIVPMEVNFNFDDPNLIILPLAFGKRQGREFIWNDLLSLETGSLKLANGRVIEKTLYNRRTRQDEPALFVALTFERREVLDSSNIKPMNLIGVDRGENIPAVIALTDPEGCPLSRFKDSLGNPTHILRIGESYKEKQRTIQAKKEVEQRRAGGYSRKYASKAKNLADDMVRNTARDLLYYAVTQDAMLIFENLSRGFGRQGKRTFMAERQYTRMEDWLTAKLAYEGLPSKTYLSKTLAQYTSKTCSNCGFTITSADYDRVLEKLKKTATGWMTTINGKELKVEGQITYYNRYKRQNVVKDLSVELDRLSEESVNNDISSWTKGRSGEALSLLKKRFSHRPVQEKFVCLNCGFETHADEQAALNIARSWLFLRSQEYKKYQTNKTTGNTDKRAFVETWQSFYRKKLKEVWKPAV

SEQ ID NO: 38444 - protein, 978 aa, synthetic construct
  REGION 1..978: note = engineered CasX variant
QEIKRLNKIRRRLVKDSNTKKAGKTGPMKTLLVRVMTPDLRERLENLRKKPENIPQPISNTSRANLNKLLTDYTEMKKAILHVYWEEFQVDPVGLMSRVAQPASKKIDQNKLKPEMDEKGNLTTAGFACSQCGQPLFVYKLEQVSEKGKAYTNYFGRCNVAEHEKLILLAQLKPEKDSDEAVTYSLGKFGQRALDFYSIHVTKESTHPVKPLAQIAGNRYASTPVGKALSDACMGTIASFLSKYQDIIIEHQKVVKGNQKRLESLRELAGKENLEYPSVTLPPQPHTKEGVDAYNEVIARVRMWVNLNLWQKLKLSRDDAKPLLRLKGFPSFPLVERQANEVDWWDMVCNVKKLINEKKEDGKVFWQNLAGYKRQEALRPYLSSEEDRKKGKKFARYQLGDLLLHLEKKHGEDWGKVYDEAWERIDKKVEGLSKHIKLEEERRSEDAQSKAALTDWLRAKASFVIEGLKEADKDEFCRCELKLQKWYGDLRGKPFAIEAENSILDISGFSKQYNCAFIWQKDGVKKLNLYLIINYFKGGKLRFKKIKPEAFEANRFYTVINKKSGEIVPMEVNFNFDDPNLIILPLAFGKRQGREFIWNDLLSLETGSLKLANGRVIEKTLYNRRTRQDEPALFVALTFERREVLDSSNIKPMNLIGVDRGENIPAVIALTDPEGCPLSRFKDSLGNPTHILRIGESYKEKQRTIQAKKEVEQRRAGGYSRKYASKAKNLADDMVRNTARDLLYYAVTQDAMLIFENLSRGFGRQGKRTFMAERQYTRMEDWLTAKLAYEGLPSKTYLSKTLAQYTSKTCSNCGFTITSADYDRVLEKLKKTATGWMTTINGKELKVEGQITYYNRYKRQNVVKDLSVELDRLSEESVNNDISSWTKGRSGEALSLLKKRFSHRPVQEKFVCLNCGFETHADEQAALNIARSWLFLRSQEYKKYQTNKTTGNTDKRAFVETWQSFYRKKLKEVWKPAV

SEQ ID NO: 38445 - protein, 978 aa, synthetic construct
  REGION 1..978: note = engineered CasX variant
QEIKRLNKIRRRLVKDSNTKKAGKTGPMKTLLVRVMTPDLRERLENLRKKPENIPQPISNTSRANLNKLLTDYTEMKKAILHVYWEEFQVDPVGLMSRVAQPASKKIDQNKLKPEMDEKGNLTTAGFACSQCGQPLFVYKLEQVSEKGKAYTNYFGRCNVAEHEKLILLAQLKPEKDSDEAVTYSLGKFGQRALDFYSIHVTKESTHPVKPLAQIAGNRYASAPVGKALSDACMGTIASFLSKYQDIIIEHQKVVKGNQKRLESLRELAGKENLEYPSVTLPPQPHTKEGVDAYNEVIARVRMWVNLNLWQKLKLSRDDAKPLLRLKGFPSFPLVERQANEVDWWDMVCNVKKLINEKKEDGKVFWQNLAGYKRQEALRPYLSSEEDRKKGKKFARYQLGDLLLHLEKKHGEDWGKVYDEAWERIDKKVEGLSKHIKLEEERRSEDAQSKAALTDWLRAKASFVIEGLKEADKDEFCRCELKLQKWYGDLRGKPFAIEAENSILDISGFSKQYNCAFIWQKDGVKKLNLYLIINYFKGGKLRFKKIKPEAFEANRFYTVINKKSGEIVPMEVNFNFDDPNLIILPLAFGKRQGREFIWNDLLSLETGSLKLANGRVIEKTLYNRRTRQDEPALFVALTFERREVLDSSNIKPMNLIGVDRGENIPAVIALTDPEGCPLSRFKDSLGNPTHILRIGESYKEKQRTIQAKKEVEQRRAGGYSRKYASKAKNLADDMVRNTARDLLYYAVTQDAMLIFENLSRGFGRQGKRTFMAERQYTRMEDWLTAKLAYEGLPSKTYLSKTLAQYTSKTCSNCGFTITSADYDRVLEKLKKTATGWMTTINGKELKVEGQITYYNRYKRQNVVKDLSVELDRLSEESVNNDISSWTKGRSGEALSLLKKRFSHRPVQEKFVCLNCGFETHADEQAALNIARSWLFLRSQEYKKYQTNKTTGNTDKRAFVETWQSFYRKKLKEVWKPAV

SEQ ID NO: 38446 - protein, 978 aa, synthetic construct
  REGION 1..978: note = engineered CasX variant
QEIKRLNKIRRRLVKDSNTKKAGKTGPMKTLLVRVMTPDLRERLENLRKKPENIPQPISNTSRANLNKLLTDYTEMKKAILHVYWEEFQVDPVGLMSRVAQPASKKIDQNKLKPEMDEKGNLTTAGFACSQCGQPLFVYKLEQVSEKGKAYTNYFGRCNVAEHEKLILLAQLKPEKDSDEAVTYSLGKFGQRALDFYSIHVTKESTHPVKPLAQIAGNRYASVPVGKALSDACMGTIASFLSKYQDIIIEHQKVVKGNQKRLESLRELAGKENLEYPSVTLPPQPHTKEGVDAYNEVIARVRMWVNLNLWQKLKLSRDDAKPLLRLKGFPSFPLVERQANEVDWWDMVCNVKKLINEKKEDGKVFWQNLAGYKRQEALRPYLSSEEDRKKGKKFARYQLGDLLLHLEKKHGEDWGKVYDEAWERIDKKVEGLSKHIKLEEERRSEDAQSKAALTDWLRAKASFVIEGLKEADKDEFCRCELKLQKWYGDLRGKPFAIEAENSILDISGFSKQYNCAFIWQKDGVKKLNLYLIINYFKGGKLRFKKIKPEAFEANRFYTVINKKSGEIVPMEVNFNFDDPNLIILPLAFGKRQGREFIWNDLLSLETGSLKLANGRVIEKTLYNRRTRQDEPALFVALTFERREVLDSSNIKPMNLIGVDRGENIPAVIALTDPEGCPLSRFKDSLGNPTHILRIGESYKEKQRTIQAKKEVEQRRAGGYSRKYASKAKNLADDMVRNTARDLLYYAVTQDAMLIFENLSRGFGRQGKRTFMAERQYTRMEDWLTAKLAYEGLPSKTYLSKTLAQYTSKTCSNCGFTITSADYDRVLEKLKKTATGWMTTINGKELKVEGQITYYNRYKRQNVVKDLSVELDRLSEESVNNDISSWTKGRSGEALSLLKKRFSHRPVQEKFVCLNCGFETHADEQAALNIARSWLFLRSQEYKKYQTNKTTGNTDKRAFVETWQSFYRKKLKEVWKPAV

SEQ ID NO: 38447 - protein, 978 aa, synthetic construct
  REGION 1..978: note = engineered CasX variant
QEIKRLNKIRRRLVKDSNTKKAGKTGPMKTLLVRVMTPDLRERLENLRKKPENIPQPISNTSRANLNKLLTDYTEMKKAILHVYWEEFQVDPVGLMSRVAQPASKKIDQNKLKPEMDEKGNLTTAGFACSQCGQPLFVYKLEQVSEKGKAYTNYFGRCNVAEHEKLIKLAQLKPEKDSDEAVTYSLGKFGQRALDFYSIHVTKESTHPVKPLAQIAGNRYASGPVGKALSDACMGTIASFLSKYQDIIIEHQKVVKGNQKRLESLRELAGKENLEYPSVTLPPQPHTKEGVDAYNEVIARVRMWVNLNLWQKLKLSRDDAKPLLRLKGFPSFPLVERQANEVDWWDMVCNVKKLINEKKEDGKVFWQNLAGYKRQEALRPYLSSEEDRKKGKKFARYQLGDLLLHLEKKHGEDWGKVYDEAWERIDKKVEGLSKHIKLEEERRSEDAQSKAALTDWLRAKASFVIEGLKEADKDEFCRCELKLQKWYGDLRGKPFAIEAENSILDISGFSKQYNCAFIWQKDGVKKLNLYLIINYFKGGKLRFKKIKPEAFEANRFYTVINKKSGEIVPMEVNFNFDDPNLIILPLAFGKRQGREFIWNDLLSLETGSLKLANGRVIEKTLYNRRTRQDEPALFVALTFERREVLDSSNIKPMNLIGVDRGENIPAVIALTDPEGCPLSRFKDSLGNPTHILRIGESYKEKQRTIQAKKEVEQRRAGGYSRKYASKAKNLADDMVRNTARDLLYYAVTQDAMLIFENLSRGFGRQGKRTFMAERQYTRMEDWLTAKLAYEGLPSKTYLSKTLAQYTSKTCSNCGFTITSADYDRVLEKLKKTATGWMTTINGKELKVEGQITYYNRYKRQNVVKDLSVELDRLSEESVNNDISSWTKGRSGEALSLLKKRFSHRPVQEKFVCLNCGFETHADEQAALNIARSWLFLRSQEYKKYQTNKTTGNTDKRAFVETWQSFYRKKLKEVWKPAV

SEQ ID NO: 38448 - protein, 977 aa, synthetic construct
  REGION 1..977: note = engineered CasX variant
QEIKRLNKIRRRLVKDSNTKKAGKTGPMKTLLVRVMTPDLRERLENLRKKPENIPQPISNTSRANLNKLLTDYTEMKKAILHVYWEEFQVDPVGLMSRVAQPASKKIDQNKLKPEMDEKGNLTTAGFACSQCGQPLFVYKLEQVSEKGKAYTNYFGRCNVAEHEKLILLAQLKPEKDSDEAVTYSLGKFGQRALDFYSIHVTKESTHPVKPLAQIAGNRYASPVGKALSDACMGTIASFLSKYQDIIIEHQKVVKGNQKRLESLRELAGKENLEYPSVTLPPQPHTKEGVDAYNEVIARVRMWVNLNLWQKLKLSRDDAKPLLRLKGFPSFPLVERQANEVDWWDMVCNVKKLINEKKEDGKVFWQNLAGYKRQEALRPYLSSEEDRKKGKKFARYQLGDLLLHLEKKHGEDWGKVYDEAWERIDKKVEGLSKHIKLEEERRSEDAQSKAALTDWLRAKASFVIEGLKEADKDEFCRCELKLQKWYGDLRGKPFAIEAENSILDISGFSKQYNCAFIWQKDGVKKLNLYLIINYFKGGKLRFKKIKPEAFEANRFYTVINKKSGEIVPMEVNFNFDDPNLIILPLAFGKRQGREFIWNDLLSLETGSLKLANGRVIEKTLYNRRTRQDEPALFVALTFERREVLDSSNIKPMNLIGVDRGENIPAVIALTDPEGCPLSRFKDSLGNPTHILRIGESYKEKQRTIQAKKEVEQRRAGGYSRKYASKAKNLADDMVRNTARDLLYYAVTQDAMLIFENLSRGFGRQGKRTFMAERQYTRMEDWLTAKLAYEGLPSKTYLSKTLAQYTSKTCSNCGFTITSADYDRVLEKLKKTATGWMTTINGKELKVEGQITYYNRYKRQNVVKDLSVELDRLSEESVNNDISSWTKGRSGEALSLLKKRFSHRPVQEKFVCLNCGFETHADEQAALNIARSWLFLRSQEYKKYQTNKTTGNTDKRAFVETWQSFYRKKLKEVWKPAV

SEQ ID NO: 38449 - protein, 978 aa, synthetic construct
  REGION 1..978: note = engineered CasX variant
QEIKRINKIRRRLVKDSNTKKAGKTGPMKTLLVRVMTPDLRERLENLRKKPENIPQPISNTSRANLNKLLTDYTEMKKAILHVYWEEFQVDPVGLMSRVAQPASKKIDQNKLKPEMDEKGNLTTAGFACSQCGQPLFVYKLEQVSEKGKAYTNYVGRCNVAEHEKLILLAQLKPEKDSDEAVTYSLGKFGQRALDFYSIHVTKESTHPVKPLAQIAGNRYASYPVGKALSDACMGTIASFLSKYQDIIIEHQKVVKGNQKRLESLRELAGKENLEYPSVTLPPQPHTKEGVDAYNEVIARVRMWVNLNLWQKLKLSRDDAKPLLRLKGFPSFPLVERQANEVDWWDMVCNVKKLINEKKEDGKVFWQNLAGYKRQEALRPYLSSEEDRKKGKKFARYQLGDLLLHLEKKHGEDWGKVYDEAWERIDKKVEGLSKHIKLEEERRSEDAQSKAALTDWLRAKASFVIEGLKEADKDEFCRCELKLQKWYGDLRGKPFAIEAENSILDISGFSKQYNCAFIWQKDGVKKLNLYLIINYFKGGKLRFKKIKPEAFEANRFYTVINKKSGEIVPMEVNFNFDDPNLIILPLAFGKRQGREFIWNDLLSLETGSLKLANGRVIEKTLYNRRTRQDEPALFVALTFERREVLDSSNIKPMNLIGVDRGENIPAVIALTDPEGCPLSRFKDSLGNPTHILRIGESYKEKQRTIQAKKEVEQRRAGGYSRKYASKAKNLADDMVRNTARDLLYYAVTQDAMLIFENLSRGFGRQGKRTFMAERQYTRMEDWLTAKLAYEGLPSKTYLSKTLAQYTSKTCSNCGFTITSADYDRVLEKLKKTATGWMTTINGKELKVEGQITYYNRYKRQNVVKDLSVELDRLSEESVNNDISSWTKGRSGEALSLLKKRFSHRPVQEKFVCLNCGFETHADEQAALNIARSWLFLRSQEYKKYQTNKTTGNTDKRAFVETWQSFYRKKLKEVWKPAV

SEQ ID NO: 38450 - protein, 978 aa, synthetic construct
  REGION 1..978: note = engineered CasX variant
QEIKRINKIRRRLVKDSNTKKAGKTGPMKTLLVRVMTPDLRERLENLRKKPENIPQPISNTSRANLNKLLTDYTEMKKAILHVYWEEFQVDPVGLMSRVAQPASKKIDQNKLKPEMDEKGNLTTAGFACSQCGQPLFVYKLEQVSEKGKAYTNYVGRCNVAEHEKLILLAQLKPEKDSDEAVTYSLGKFGQRALDFYSIHVTKESTHPVKPLAQIAGNRYASHPVGKALSDACMGTIASFLSKYQDIIIEHQKVVKGNQKRLESLRELAGKENLEYPSVTLPPQPHTKEGVDAYNEVIARVRMWVNLNLWQKLKLSRDDAKPLLRLKGFPSFPLVERQANEVDWWDMVCNVKKLINEKKEDGKVFWQNLAGYKRQEALRPYLSSEEDRKKGKKFARYQLGDLLLHLEKKHGEDWGKVYDEAWERIDKKVEGLSKHIKLEEERRSEDAQSKAALTDWLRAKASFVIEGLKEADKDEFCRCELKLQKWYGDLRGKPFAIEAENSILDISGFSKQYNCAFIWQKDGVKKLNLYLIINYFKGGKLRFKKIKPEAFEANRFYTVINKKSGEIVPMEVNFNFDDPNLIILPLAFGKRQGREFIWNDLLSLETGSLKLANGRVIEKTLYNRRTRQDEPALFVALTFERREVLDSSNIKPMNLIGVDRGENIPAVIALTDPEGCPLSRFKDSLGNPTHILRIGESYKEKQRTIQAKKEVEQRRAGGYSRKYASKAKNLADDMVRNTARDLLYYAVTQDAMLIFENLSRGFGRQGKRTFMAERQYTRMEDWLTAKLAYEGLPSKTYLSKTLAQYTSKTCSNCGFTITSADYDRVLEKLKKTATGWMTTINGKELKVEGQITYYNRYKRQNVVKDLSVELDRLSEESVNNDISSWTKGRSGEALSLLKKRFSHRPVQEKFVCLNCGFETHADEQAALNIARSWLFLRSQEYKKYQTNKTTGNTDKRAFVETWQSFYRKKLKEVWKPAV

SEQ ID NO: 38451 - protein, 978 aa, synthetic construct
  REGION 1..978: note = engineered CasX variant
QEIKRINKIRRRLVKDSNTKKAGKTGPMKTLLVRVMTPDLRERLENLRKKPENIPQPISNTSRANLNKLLTDYTEMKKAILHVYWEEFQVDPVGLMSRVAQPASKKIDQNKLKPEMDEKGNLTTAGFACSQCGQPLFVYKLEQVSEKGKAYTNYVGRCNVAEHEKLILLAQLKPEKDSDEAVTYSLGKFGQRALDFYSIHVTKESTHPVKPLAQIAGNRYASSPVGKALSDACMGTIASFLSKYQDIIIEHQKVVKGNQKRLESLRELAGKENLEYPSVTLPPQPHTKEGVDAYNEVIARVRMWVNLNLWQKLKLSRDDAKPLLRLKGFPSFPLVERQANEVDWWDMVCNVKKLINEKKEDGKVFWQNLAGYKRQEALRPYLSSEEDRKKGKKFARYQLGDLLLHLEKKHGEDWGKVYDEAWERIDKKVEGLSKHIKLEEERRSEDAQSKAALTDWLRAKASFVIEGLKEADKDEFCRCELKLQKWYGDLRGKPFAIEAENSILDISGFSKQYNCAFIWQKDGVKKLNLYLIINYFKGGKLRFKKIKPEAFEANRFYTVINKKSGEIVPMEVNFNFDDPNLIILPLAFGKRQGREFIWNDLLSLETGSLKLANGRVIEKTLYNRRTRQDEPALFVALTFERREVLDSSNIKPMNLIGVDRGENIPAVIALTDPEGCPLSRFKDSLGNPTHILRIGESYKEKQRTIQAKKEVEQRRAGGYSRKYASKAKNLADDMVRNTARDLLYYAVTQDAMLIFENLSRGFGRQGKRTFMAERQYTRMEDWLTAKLAYEGLPSKTYLSKTLAQYTSKTCSNCGFTITSADYDRVLEKLKKTATGWMTTINGKELKVEGQITYYNRYKRQNVVKDLSVELDRLSEESVNNDISSWTKGRSGEALSLLKKRFSHRPVQEKFVCLNCGFETHADEQAALNIARSWLFLRSQEYKKYQTNKTTGNTDKRAFVETWQSFYRKKLKEVWKPAV

SEQ ID NO: 38452 - protein, 978 aa, synthetic construct
  REGION 1..978: note = engineered CasX variant
QEIKRINKIRRRLVKDSNTKKAGKTGPMKTLLVRVMTPDLRERLENLRKKPENIPQPISNTSRANLNKLLTDYTEMKKAILHVYWEEFQVDPVGLMSRVAQPASKKIDQNKLKPEMDEKGNLTTAGFACSQCGQPLFVYKLEQVSEKGKAYTNYVGRCNVAEHEKLILLAQLKPEKDSDEAVTYSLGKFGQRALDFYSIHVTKESTHPVKPLAQIAGNRYASTPVGKALSDACMGTIASFLSKYQDIIIEHQKVVKGNQKRLESLRELAGKENLEYPSVTLPPQPHTKEGVDAYNEVIARVRMWVNLNLWQKLKLSRDDAKPLLRLKGFPSFPLVERQANEVDWWDMVCNVKKLINEKKEDGKVFWQNLAGYKRQEALRPYLSSEEDRKKGKKFARYQLGDLLLHLEKKHGEDWGKVYDEAWERIDKKVEGLSKHIKLEEERRSEDAQSKAALTDWLRAKASFVIEGLKEADKDEFCRCELKLQKWYGDLRGKPFAIEAENSILDISGFSKQYNCAFIWQKDGVKKLNLYLIINYFKGGKLRFKKIKPEAFEANRFYTVINKKSGEIVPMEVNFNFDDPNLIILPLAFGKRQGREFIWNDLLSLETGSLKLANGRVIEKTLYNRRTRQDEPALFVALTFERREVLDSSNIKPMNLIGVDRGENIPAVIALTDPEGCPLSRFKDSLGNPTHILRIGESYKEKQRTIQAKKEVEQRRAGGYSRKYASKAKNLADDMVRNTARDLLYYAVTQDAMLIFENLSRGFGRQGKRTFMAERQYTRMEDWLTAKLAYEGLPSKTYLSKTLAQYTSKTCSNCGFTITSADYDRVLEKLKKTATGWMTTINGKELKVEGQITYYNRYKRQNVVKDLSVELDRLSEESVNNDISSWTKGRSGEALSLLKKRFSHRPVQEKFVCLNCGFETHADEQAALNIARSWLFLRSQEYKKYQTNKTTGNTDKRAFVETWQSFYRKKLKEVWKPAV

SEQ ID NO: 38453 - protein, 978 aa, synthetic construct
  REGION 1..978: note = engineered CasX variant
QEIKRINKIRRRLVKDSNTKKAGKTGPMKTLLVRVMTPDLRERLENLRKKPENIPQPISNTSRANLNKLLTDYTEMKKAILHVYWEEFQVDPVGLMSRVAQPASKKIDQNKLKPEMDEKGNLTTAGFACSQCGQPLFVYKLEQVSEKGKAYTNYVGRCNVAEHEKLILLAQLKPEKDSDEAVTYSLGKFGQRALDFYSIHVTKESTHPVKPLAQIAGNRYASAPVGKALSDACMGTIASFLSKYQDIIIEHQKVVKGNQKRLESLRELAGKENLEYPSVTLPPQPHTKEGVDAYNEVIARVRMWVNLNLWQKLKLSRDDAKPLLRLKGFPSFPLVERQANEVDWWDMVCNVKKLINEKKEDGKVFWQNLAGYKRQEALRPYLSSEEDRKKGKKFARYQLGDLLLHLEKKHGEDWGKVYDEAWERIDKKVEGLSKHIKLEEERRSEDAQSKAALTDWLRAKASFVIEGLKEADKDEFCRCELKLQKWYGDLRGKPFAIEAENSILDISGFSKQYNCAFIWQKDGVKKLNLYLIINYFKGGKLRFKKIKPEAFEANRFYTVINKKSGEIVPMEVNFNFDDPNLIILPLAFGKRQGREFIWNDLLSLETGSLKLANGRVIEKTLYNRRTRQDEPALFVALTFERREVLDSSNIKPMNLIGVDRGENIPAVIALTDPEGCPLSRFKDSLGNPTHILRIGESYKEKQRTIQAKKEVEQRRAGGYSRKYASKAKNLADDMVRNTARDLLYYAVTQDAMLIFENLSRGFGRQGKRTFMAERQYTRMEDWLTAKLAYEGLPSKTYLSKTLAQYTSKTCSNCGFTITSADYDRVLEKLKKTATGWMTTINGKELKVEGQITYYNRYKRQNVVKDLSVELDRLSEESVNNDISSWTKGRSGEALSLLKKRFSHRPVQEKFVCLNCGFETHADEQAALNIARSWLFLRSQEYKKYQTNKTTGNTDKRAFVETWQSFYRKKLKEVWKPAV

SEQ ID NO: 38454 - protein, 978 aa, synthetic construct
  REGION 1..978: note = engineered CasX variant
QEIKRINKIRRRLVKDSNTKKAGKTGPMKTLLVRVMTPDLRERLENLRKKPENIPQPISNTSRANLNKLLTDYTEMKKAILHVYWEEFQVDPVGLMSRVAQPASKKIDQNKLKPEMDEKGNLTTAGFACSQCGQPLFVYKLEQVSEKGKAYTNYVGRCNVAEHEKLILLAQLKPEKDSDEAVTYSLGKFGQRALDFYSIHVTKESTHPVKPLAQIAGNRYASVPVGKALSDACMGTIASFLSKYQDIIIEHQKVVKGNQKRLESLRELAGKENLEYPSVTLPPQPHTKEGVDAYNEVIARVRMWVNLNLWQKLKLSRDDAKPLLRLKGFPSFPLVERQANEVDWWDMVCNVKKLINEKKEDGKVFWQNLAGYKRQEALRPYLSSEEDRKKGKKFARYQLGDLLLHLEKKHGEDWGKVYDEAWERIDKKVEGLSKHIKLEEERRSEDAQSKAALTDWLRAKASFVIEGLKEADKDEFCRCELKLQKWYGDLRGKPFAIEAENSILDISGFSKQYNCAFIWQKDGVKKLNLYLIINYFKGGKLRFKKIKPEAFEANRFYTVINKKSGEIVPMEVNFNFDDPNLIILPLAFGKRQGREFIWNDLLSLETGSLKLANGRVIEKTLYNRRTRQDEPALFVALTFERREVLDSSNIKPMNLIGVDRGENIPAVIALTDPEGCPLSRFKDSLGNPTHILRIGESYKEKQRTIQAKKEVEQRRAGGYSRKYASKAKNLADDMVRNTARDLLYYAVTQDAMLIFENLSRGFGRQGKRTFMAERQYTRMEDWLTAKLAYEGLPSKTYLSKTLAQYTSKTCSNCGFTITSADYDRVLEKLKKTATGWMTTINGKELKVEGQITYYNRYKRQNVVKDLSVELDRLSEESVNNDISSWTKGRSGEALSLLKKRFSHRPVQEKFVCLNCGFETHADEQAALNIARSWLFLRSQEYKKYQTNKTTGNTDKRAFVETWQSFYRKKLKEVWKPAV

SEQ ID NO: 38455 - protein, 978 aa, synthetic construct
  REGION 1..978: note = engineered CasX variant
QEIKRINKIRRRLVKDSNTKKAGKTGPMKTLLVRVMTPDLRERLENLRKKPENIPQPISNTSRANLNKLLTDYTEMKKAILHVYWEEFQVDPVGLMSRVAQPASKKIDQNKLKPEMDEKGNLTTAGFACSQCGQPLFVYKLEQVSEKGKAYTNYVGRCNVAEHEKLIKLAQLKPEKDSDEAVTYSLGKFGQRALDFYSIHVTKESTHPVKPLAQIAGNRYASGPVGKALSDACMGTIASFLSKYQDIIIEHQKVVKGNQKRLESLRELAGKENLEYPSVTLPPQPHTKEGVDAYNEVIARVRMWVNLNLWQKLKLSRDDAKPLLRLKGFPSFPLVERQANEVDWWDMVCNVKKLINEKKEDGKVFWQNLAGYKRQEALRPYLSSEEDRKKGKKFARYQLGDLLLHLEKKHGEDWGKVYDEAWERIDKKVEGLSKHIKLEEERRSEDAQSKAALTDWLRAKASFVIEGLKEADKDEFCRCELKLQKWYGDLRGKPFAIEAENSILDISGFSKQYNCAFIWQKDGVKKLNLYLIINYFKGGKLRFKKIKPEAFEANRFYTVINKKSGEIVPMEVNFNFDDPNLIILPLAFGKRQGREFIWNDLLSLETGSLKLANGRVIEKTLYNRRTRQDEPALFVALTFERREVLDSSNIKPMNLIGVDRGENIPAVIALTDPEGCPLSRFKDSLGNPTHILRIGESYKEKQRTIQAKKEVEQRRAGGYSRKYASKAKNLADDMVRNTARDLLYYAVTQDAMLIFENLSRGFGRQGKRTFMAERQYTRMEDWLTAKLAYEGLPSKTYLSKTLAQYTSKTCSNCGFTITSADYDRVLEKLKKTATGWMTTINGKELKVEGQITYYNRYKRQNVVKDLSVELDRLSEESVNNDISSWTKGRSGEALSLLKKRFSHRPVQEKFVCLNCGFETHADEQAALNIARSWLFLRSQEYKKYQTNKTTGNTDKRAFVETWQSFYRKKLKEVWKPAV

SEQ ID NO: 38456 - protein, 977 aa, synthetic construct
  REGION 1..977: note = engineered CasX variant
QEIKRINKIRRRLVKDSNTKKAGKTGPMKTLLVRVMTPDLRERLENLRKKPENIPQPISNTSRANLNKLLTDYTEMKKAILHVYWEEFQVDPVGLMSRVAQPASKKIDQNKLKPEMDEKGNLTTAGFACSQCGQPLFVYKLEQVSEKGKAYTNYVGRCNVAEHEKLILLAQLKPEKDSDEAVTYSLGKFGQRALDFYSIHVTKESTHPVKPLAQIAGNRYASPVGKALSDACMGTIASFLSKYQDIIIEHQKVVKGNQKRLESLRELAGKENLEYPSVTLPPQPHTKEGVDAYNEVIARVRMWVNLNLWQKLKLSRDDAKPLLRLKGFPSFPLVERQANEVDWWDMVCNVKKLINEKKEDGKVFWQNLAGYKRQEALRPYLSSEEDRKKGKKFARYQLGDLLLHLEKKHGEDWGKVYDEAWERIDKKVEGLSKHIKLEEERRSEDAQSKAALTDWLRAKASFVIEGLKEADKDEFCRCELKLQKWYGDLRGKPFAIEAENSILDISGFSKQYNCAFIWQKDGVKKLNLYLIINYFKGGKLRFKKIKPEAFEANRFYTVINKKSGEIVPMEVNFNFDDPNLIILPLAFGKRQGREFIWNDLLSLETGSLKLANGRVIEKTLYNRRTRQDEPALFVALTFERREVLDSSNIKPMNLIGVDRGENIPAVIALTDPEGCPLSRFKDSLGNPTHILRIGESYKEKQRTIQAKKEVEQRRAGGYSRKYASKAKNLADDMVRNTARDLLYYAVTQDAMLIFENLSRGFGRQGKRTFMAERQYTRMEDWLTAKLAYEGLPSKTYLSKTLAQYTSKTCSNCGFTITSADYDRVLEKLKKTATGWMTTINGKELKVEGQITYYNRYKRQNVVKDLSVELDRLSEESVNNDISSWTKGRSGEALSLLKKRFSHRPVQEKFVCLNCGFETHADEQAALNIARSWLFLRSQEYKKYQTNKTTGNTDKRAFVETWQSFYRKKLKEVWKPAV

SEQ ID NO: 38457 - protein, 978 aa, synthetic construct
  REGION 1..978: note = engineered CasX variant
QEIKRINKIRRRLVKDSNTKKAGKTGPMKTLLVRVMTPDLRERLENLRKKPENIPQPISNTSRANLNKLLTDYTEMKKAILHVYWEEFQVDPVGLMSRVAQPASKKIDQNKLKPEMDEKGNLTTAGFACSQCGQPLFVYKLEQVSEKGKAYTNYFGRCNVAEHEKLILLAQLKPEKDSDEAVTYSLGKFGQRALDFYSIHVTKESTHPVKPLAQIAGNRYASYPVGKALSDACMGTIASFLSKYQDIIIEHQKVVKGNQKRLESLRELAGKENLEYPSVTLPPQPHTKEGVDAYNEVIARVRMWVNLNLWQKLKLSRDDAKPLLRLKGFPSFPLVERQANEVDWWDMVCNVKKLINEKKEDGKVFWQNLAGYKRQEALRPYLSSEEDRKKGKKFARYQLGDLLLHLEKKHGEDWGKVYDEAWERIDKKVEGLSKHIKLEEERRSEDAQSKAALTDWLRAKASFVIEGLKEADKDEFCRCELKLQKWYGDLRGKPFAIEAENSILDISGFSKQYNCAFIWQKDGVKKLNLYLIINYFKGGKLRFKKIKPEAFEANRFYTVINKKSGEIVPMEVNFNFDDPNLIILPLAFGKRQGREFIWNDLLSLETGSLKLANGRVIEKTLYNRRTRQDEPALFVALTFERREVLDSSNIKPMNLIGVDRGENIPAVIALTDPEGCPLSRFKDSLGNPTHILRIGESYKEKQRTIQAKKEVEQRRAGGYSRKYASKAKNLADDMVRNTARDLLYYAVTQDAMLIFENLSRGFGRQGKRTFMAERQYTRMEDWLTAKLAYEGLASKTYLSKTLAQYTSKTCSNCGFTITSADYDRVLEKLKKTATGWMTTINGKELKVEGQITYYNRYKRQNVVKDLSVELDRLSEESVNNDISSWTKGRSGEALSLLKKRFSHRPVQEKFVCLNCGFETHADEQAALNIARSWLFLRSQEYKKYQTNKTTGNTDKRAFVETWQSFYRKKLKEVWKPAV

SEQ ID NO: 38458 - protein, 978 aa, synthetic construct
  REGION 1..978: note = engineered CasX variant
QEIKRINKIRRRLVKDSNTKKAGKTGPMKTLLVRVMTPDLRERLENLRKKPENIPQPISNTSRANLNKLLTDYTEMKKAILHVYWEEFQVDPVGLMSRVAQPASKKIDQNKLKPEMDEKGNLTTAGFACSQCGQPLFVYKLEQVSEKGKAYTNYFGRCNVAEHEKLILLAQLKPEKDSDEAVTYSLGKFGQRALDFYSIHVTKESTHPVKPLAQIAGNRYASHPVGKALSDACMGTIASFLSKYQDIIIEHQKVVKGNQKRLESLRELAGKENLEYPSVTLPPQPHTKEGVDAYNEVIARVRMWVNLNLWQKLKLSRDDAKPLLRLKGFPSFPLVERQANEVDWWDMVCNVKKLINEKKEDGKVFWQNLAGYKRQEALRPYLSSEEDRKKGKKFARYQLGDLLLHLEKKHGEDWGKVYDEAWERIDKKVEGLSKHIKLEEERRSEDAQSKAALTDWLRAKASFVIEGLKEADKDEFCRCELKLQKWYGDLRGKPFAIEAENSILDISGFSKQYNCAFIWQKDGVKKLNLYLIINYFKGGKLRFKKIKPEAFEANRFYTVINKKSGEIVPMEVNFNFDDPNLIILPLAFGKRQGREFIWNDLLSLETGSLKLANGRVIEKTLYNRRTRQDEPALFVALTFERREVLDSSNIKPMNLIGVDRGENIPAVIALTDPEGCPLSRFKDSLGNPTHILRIGESYKEKQRTIQAKKEVEQRRAGGYSRKYASKAKNLADDMVRNTARDLLYYAVTQDAMLIFENLSRGFGRQGKRTFMAERQYTRMEDWLTAKLAYEGLASKTYLSKTLAQYTSKTCSNCGFTITSADYDRVLEKLKKTATGWMTTINGKELKVEGQITYYNRYKRQNVVKDLSVELDRLSEESVNNDISSWTKGRSGEALSLLKKRFSHRPVQEKFVCLNCGFETHADEQAALNIARSWLFLRSQEYKKYQTNKTTGNTDKRAFVETWQSFYRKKLKEVWKPAV

SEQ ID NO: 38459 - protein, 978 aa, synthetic construct
  REGION 1..978: note = engineered CasX variant
QEIKRINKIRRRLVKDSNTKKAGKTGPMKTLLVRVMTPDLRERLENLRKKPENIPQPISNTSRANLNKLLTDYTEMKKAILHVYWEEFQVDPVGLMSRVAQPASKKIDQNKLKPEMDEKGNLTTAGFACSQCGQPLFVYKLEQVSEKGKAYTNYFGRCNVAEHEKLILLAQLKPEKDSDEAVTYSLGKFGQRALDFYSIHVTKESTHPVKPLAQIAGNRYASSPVGKALSDACMGTIASFLSKYQDIIIEHQKVVKGNQKRLESLRELAGKENLEYPSVTLPPQPHTKEGVDAYNEVIARVRMWVNLNLWQKLKLSRDDAKPLLRLKGFPSFPLVERQANEVDWWDMVCNVKKLINEKKEDGKVFWQNLAGYKRQEALRPYLSSEEDRKKGKKFARYQLGDLLLHLEKKHGEDWGKVYDEAWERIDKKVEGLSKHIKLEEERRSEDAQSKAALTDWLRAKASFVIEGLKEADKDEFCRCELKLQKWYGDLRGKPFAIEAENSILDISGFSKQYNCAFIWQKDGVKKLNLYLIINYFKGGKLRFKKIKPEAFEANRFYTVINKKSGEIVPMEVNFNFDDPNLIILPLAFGKRQGREFIWNDLLSLETGSLKLANGRVIEKTLYNRRTRQDEPALFVALTFERREVLDSSNIKPMNLIGVDRGENIPAVIALTDPEGCPLSRFKDSLGNPTHILRIGESYKEKQRTIQAKKEVEQRRAGGYSRKYASKAKNLADDMVRNTARDLLYYAVTQDAMLIFENLSRGFGRQGKRTFMAERQYTRMEDWLTAKLAYEGLASKTYLSKTLAQYTSKTCSNCGFTITSADYDRVLEKLKKTATGWMTTINGKELKVEGQITYYNRYKRQNVVKDLSVELDRLSEESVNNDISSWTKGRSGEALSLLKKRFSHRPVQEKFVCLNCGFETHADEQAALNIARSWLFLRSQEYKKYQTNKTTGNTDKRAFVETWQSFYRKKLKEVWKPAV

SEQ ID NO: 38460 - protein, 978 aa, synthetic construct
  REGION 1..978: note = engineered CasX variant
QEIKRINKIRRRLVKDSNTKKAGKTGPMKTLLVRVMTPDLRERLENLRKKPENIPQPISNTSRANLNKLLTDYTEMKKAILHVYWEEFQVDPVGLMSRVAQPASKKIDQNKLKPEMDEKGNLTTAGFACSQCGQPLFVYKLEQVSEKGKAYTNYFGRCNVAEHEKLILLAQLKPEKDSDEAVTYSLGKFGQRALDFYSIHVTKESTHPVKPLAQIAGNRYASTPVGKALSDACMGTIASFLSKYQDIIIEHQKVVKGNQKRLESLRELAGKENLEYPSVTLPPQPHTKEGVDAYNEVIARVRMWVNLNLWQKLKLSRDDAKPLLRLKGFPSFPLVERQANEVDWWDMVCNVKKLINEKKEDGKVFWQNLAGYKRQEALRPYLSSEEDRKKGKKFARYQLGDLLLHLEKKHGEDWGKVYDEAWERIDKKVEGLSKHIKLEEERRSEDAQSKAALTDWLRAKASFVIEGLKEADKDEFCRCELKLQKWYGDLRGKPFAIEAENSILDISGFSKQYNCAFIWQKDGVKKLNLYLIINYFKGGKLRFKKIKPEAFEANRFYTVINKKSGEIVPMEVNFNFDDPNLIILPLAFGKRQGREFIWNDLLSLETGSLKLANGRVIEKTLYNRRTRQDEPALFVALTFERREVLDSSNIKPMNLIGVDRGENIPAVIALTDPEGCPLSRFKDSLGNPTHILRIGESYKEKQRTIQAKKEVEQRRAGGYSRKYASKAKNLADDMVRNTARDLLYYAVTQDAMLIFENLSRGFGRQGKRTFMAERQYTRMEDWLTAKLAYEGLASKTYLSKTLAQYTSKTCSNCGFTITSADYDRVLEKLKKTATGWMTTINGKELKVEGQITYYNRYKRQNVVKDLSVELDRLSEESVNNDISSWTKGRSGEALSLLKKRFSHRPVQEKFVCLNCGFETHADEQAALNIARSWLFLRSQEYKKYQTNKTTGNTDKRAFVETWQSFYRKKLKEVWKPAV

SEQ ID NO: 38461 - protein, 978 aa, synthetic construct
  REGION 1..978: note = engineered CasX variant
QEIKRINKIRRRLVKDSNTKKAGKTGPMKTLLVRVMTPDLRERLENLRKKPENIPQPISNTSRANLNKLLTDYTEMKKAILHVYWEEFQVDPVGLMSRVAQPASKKIDQNKLKPEMDEKGNLTTAGFACSQCGQPLFVYKLEQVSEKGKAYTNYFGRCNVAEHEKLILLAQLKPEKDSDEAVTYSLGKFGQRALDFYSIHVTKESTHPVKPLAQIAGNRYASAPVGKALSDACMGTIASFLSKYQDIIIEHQKVVKGNQKRLESLRELAGKENLEYPSVTLPPQPHTKEGVDAYNEVIARVRMWVNLNLWQKLKLSRDDAKPLLRLKGFPSFPLVERQANEVDWWDMVCNVKKLINEKKEDGKVFWQNLAGYKRQEALRPYLSSEEDRKKGKKFARYQLGDLLLHLEKKHGEDWGKVYDEAWERIDKKVEGLSKHIKLEEERRSEDAQSKAALTDWLRAKASFVIEGLKEADKDEFCRCELKLQKWYGDLRGKPFAIEAENSILDISGFSKQYNCAFIWQKDGVKKLNLYLIINYFKGGKLRFKKIKPEAFEANRFYTVINKKSGEIVPMEVNFNFDDPNLIILPLAFGKRQGREFIWNDLLSLETGSLKLANGRVIEKTLYNRRTRQDEPALFVALTFERREVLDSSNIKPMNLIGVDRGENIPAVIALTDPEGCPLSRFKDSLGNPTHILRIGESYKEKQRTIQAKKEVEQRRAGGYSRKYASKAKNLADDMVRNTARDLLYYAVTQDAMLIFENLSRGFGRQGKRTFMAERQYTRMEDWLTAKLAYEGLASKTYLSKTLAQYTSKTCSNCGFTITSADYDRVLEKLKKTATGWMTTINGKELKVEGQITYYNRYKRQNVVKDLSVELDRLSEESVNNDISSWTKGRSGEALSLLKKRFSHRPVQEKFVCLNCGFETHADEQAALNIARSWLFLRSQEYKKYQTNKTTGNTDKRAFVETWQSFYRKKLKEVWKPAV

SEQ ID NO: 38462 - protein, 978 aa, synthetic construct
  REGION 1..978: note = engineered CasX variant
QEIKRINKIRRRLVKDSNTKKAGKTGPMKTLLVRVMTPDLRERLENLRKKPENIPQPISNTSRANLNKLLTDYTEMKKAILHVYWEEFQVDPVGLMSRVAQPASKKIDQNKLKPEMDEKGNLTTAGFACSQCGQPLFVYKLEQVSEKGKAYTNYFGRCNVAEHEKLILLAQLKPEKDSDEAVTYSLGKFGQRALDFYSIHVTKESTHPVKPLAQIAGNRYASVPVGKALSDACMGTIASFLSKYQDIIIEHQKVVKGNQKRLESLRELAGKENLEYPSVTLPPQPHTKEGVDAYNEVIARVRMWVNLNLWQKLKLSRDDAKPLLRLKGFPSFPLVERQANEVDWWDMVCNVKKLINEKKEDGKVFWQNLAGYKRQEALRPYLSSEEDRKKGKKFARYQLGDLLLHLEKKHGEDWGKVYDEAWERIDKKVEGLSKHIKLEEERRSEDAQSKAALTDWLRAKASFVIEGLKEADKDEFCRCELKLQKWYGDLRGKPFAIEAENSILDISGFSKQYNCAFIWQKDGVKKLNLYLIINYFKGGKLRFKKIKPEAFEANRFYTVINKKSGEIVPMEVNFNFDDPNLIILPLAFGKRQGREFIWNDLLSLETGSLKLANGRVIEKTLYNRRTRQDEPALFVALTFERREVLDSSNIKPMNLIGVDRGENIPAVIALTDPEGCPLSRFKDSLGNPTHILRIGESYKEKQRTIQAKKEVEQRRAGGYSRKYASKAKNLADDMVRNTARDLLYYAVTQDAMLIFENLSRGFGRQGKRTFMAERQYTRMEDWLTAKLAYEGLASKTYLSKTLAQYTSKTCSNCGFTITSADYDRVLEKLKKTATGWMTTINGKELKVEGQITYYNRYKRQNVVKDLSVELDRLSEESVNNDISSWTKGRSGEALSLLKKRFSHRPVQEKFVCLNCGFETHADEQAALNIARSWLFLRSQEYKKYQTNKTTGNTDKRAFVETWQSFYRKKLKEVWKPAV

SEQ ID NO: 38463 - protein, 978 aa, synthetic construct
  REGION 1..978: note = engineered CasX variant
QEIKRINKIRRRLVKDSNTKKAGKTGPMKTLLVRVMTPDLRERLENLRKKPENIPQPISNTSRANLNKLLTDYTEMKKAILHVYWEEFQVDPVGLMSRVAQPASKKIDQNKLKPEMDEKGNLTTAGFACSQCGQPLFVYKLEQVSEKGKAYTNYFGRCNVAEHEKLIKLAQLKPEKDSDEAVTYSLGKFGQRALDFYSIHVTKESTHPVKPLAQIAGNRYASGPVGKALSDACMGTIASFLSKYQDIIIEHQKVVKGNQKRLESLRELAGKENLEYPSVTLPPQPHTKEGVDAYNEVIARVRMWVNLNLWQKLKLSRDDAKPLLRLKGFPSFPLVERQANEVDWWDMVCNVKKLINEKKEDGKVFWQNLAGYKRQEALRPYLSSEEDRKKGKKFARYQLGDLLLHLEKKHGEDWGKVYDEAWERIDKKVEGLSKHIKLEEERRSEDAQSKAALTDWLRAKASFVIEGLKEADKDEFCRCELKLQKWYGDLRGKPFAIEAENSILDISGFSKQYNCAFIWQKDGVKKLNLYLIINYFKGGKLRFKKIKPEAFEANRFYTVINKKSGEIVPMEVNFNFDDPNLIILPLAFGKRQGREFIWNDLLSLETGSLKLANGRVIEKTLYNRRTRQDEPALFVALTFERREVLDSSNIKPMNLIGVDRGENIPAVIALTDPEGCPLSRFKDSLGNPTHILRIGESYKEKQRTIQAKKEVEQRRAGGYSRKYASKAKNLADDMVRNTARDLLYYAVTQDAMLIFENLSRGFGRQGKRTFMAERQYTRMEDWLTAKLAYEGLASKTYLSKTLAQYTSKTCSNCGFTITSADYDRVLEKLKKTATGWMTTINGKELKVEGQITYYNRYKRQNVVKDLSVELDRLSEESVNNDISSWTKGRSGEALSLLKKRFSHRPVQEKFVCLNCGFETHADEQAALNIARSWLFLRSQEYKKYQTNKTTGNTDKRAFVETWQSFYRKKLKEVWKPAV

SEQ ID NO: 38464 - protein, 977 aa, synthetic construct
  REGION 1..977: note = engineered CasX variant
QEIKRINKIRRRLVKDSNTKKAGKTGPMKTLLVRVMTPDLRERLENLRKKPENIPQPISNTSRANLNKLLTDYTEMKKAILHVYWEEFQVDPVGLMSRVAQPASKKIDQNKLKPEMDEKGNLTTAGFACSQCGQPLFVYKLEQVSEKGKAYTNYFGRCNVAEHEKLILLAQLKPEKDSDEAVTYSLGKFGQRALDFYSIHVTKESTHPVKPLAQIAGNRYASPVGKALSDACMGTIASFLSKYQDIIIEHQKVVKGNQKRLESLRELAGKENLEYPSVTLPPQPHTKEGVDAYNEVIARVRMWVNLNLWQKLKLSRDDAKPLLRLKGFPSFPLVERQANEVDWWDMVCNVKKLINEKKEDGKVFWQNLAGYKRQEALRPYLSSEEDRKKGKKFARYQLGDLLLHLEKKHGEDWGKVYDEAWERIDKKVEGLSKHIKLEEERRSEDAQSKAALTDWLRAKASFVIEGLKEADKDEFCRCELKLQKWYGDLRGKPFAIEAENSILDISGFSKQYNCAFIWQKDGVKKLNLYLIINYFKGGKLRFKKIKPEAFEANRFYTVINKKSGEIVPMEVNFNFDDPNLIILPLAFGKRQGREFIWNDLLSLETGSLKLANGRVIEKTLYNRRTRQDEPALFVALTFERREVLDSSNIKPMNLIGVDRGENIPAVIALTDPEGCPLSRFKDSLGNPTHILRIGESYKEKQRTIQAKKEVEQRRAGGYSRKYASKAKNLADDMVRNTARDLLYYAVTQDAMLIFENLSRGFGRQGKRTFMAERQYTRMEDWLTAKLAYEGLASKTYLSKTLAQYTSKTCSNCGFTITSADYDRVLEKLKKTATGWMTTINGKELKVEGQITYYNRYKRQNVVKDLSVELDRLSEESVNNDISSWTKGRSGEALSLLKKRFSHRPVQEKFVCLNCGFETHADEQAALNIARSWLFLRSQEYKKYQTNKTTGNTDKRAFVETWQSFYRKKLKEVWKPAV

SEQ ID NO: 38465 - protein, 978 aa, synthetic construct
  REGION 1..978: note = engineered CasX variant
QEIKRINKIRRRLVKDSNTKKAGKTGPMKTLLVRVMTPDLRERLENLRKKPENIPQPISNTSRANLNKLLTDYTEMKKAILHVYWEEFQVDPVGLMSRVAQPASKKIDQNKLKPEMDEKGNLTTAGFACSQCGQPLFVYKLEQVSEKGKAYTNYFGRCNVAEHEKLILLAQLKPEKDSDEAVTYSLGKFGQRALDFYSIHVTKESTHPVKPLAQIAGNRYASYPVGKALSDACMGTIASFLSKYQDIIIEHQKVVKGNQKRLESLRELAGKENLEYPSVTLPPQPHTKEGVDAYNEVIARVRMWVNLNLWQKLKLSRDDAKPLLRLKGFPSFPLVERQANEVDWWDMVCNVKKLINEKKEDGKVFWQNLAGYKRQEALRPYLSSEEDRKKGKKFARYQLGDLLLHLEKKHGEDWGKVYDEAWERIDKKVEGLSKHIKLEEERRSEDAQSKAALTDWLRAKASFVIEGLKEADKDEFCRCELKLQKWYGDLRGKPFAIEAENSILDISGFSKQYNCAFIWQKDGVKKLNLYLIINYFKGGKLRFKKIKPEAFEANRFYTVINKKSGEIVPMEVNFNFDDPNLIILPLAFGKRQGREFIWNDLLSLETGSLKLANGRVIEKTLYNRRTRQDEPALFVALTFERREVLDSSNIKPMNLIGVDRGENIPAVIALTDPEGCPLSRFKDSLGNPTHILRIGESYKEKQRTIQAKKEVEQRRAGGYSRKYASKAKNLADDMVRNTARDLLYYAVTQDAMLIFENLSRGFGRQGKRTFMAERQYTRMEDWLTAKLAYEGLPSKVYLSKTLAQYTSKTCSNCGFTITSADYDRVLEKLKKTATGWMTTINGKELKVEGQITYYNRYKRQNVVKDLSVELDRLSEESVNNDISSWTKGRSGEALSLLKKRFSHRPVQEKFVCLNCGFETHADEQAALNIARSWLFLRSQEYKKYQTNKTTGNTDKRAFVETWQSFYRKKLKEVWKPAV

SEQ ID NO: 38466 - protein, 978 aa, synthetic construct
  REGION 1..978: note = engineered CasX variant
QEIKRINKIRRRLVKDSNTKKAGKTGPMKTLLVRVMTPDLRERLENLRKKPENIPQPISNTSRANLNKLLTDYTEMKKAILHVYWEEFQVDPVGLMSRVAQPASKKIDQNKLKPEMDEKGNLTTAGFACSQCGQPLFVYKLEQVSEKGKAYTNYFGRCNVAEHEKLILLAQLKPEKDSDEAVTYSLGKFGQRALDFYSIHVTKESTHPVKPLAQIAGNRYASHPVGKALSDACMGTIASFLSKYQDIIIEHQKVVKGNQKRLESLRELAGKENLEYPSVTLPPQPHTKEGVDAYNEVIARVRMWVNLNLWQKLKLSRDDAKPLLRLKGFPSFPLVERQANEVDWWDMVCNVKKLINEKKEDGKVFWQNLAGYKRQEALRPYLSSEEDRKKGKKFARYQLGDLLLHLEKKHGEDWGKVYDEAWERIDKKVEGLSKHIKLEEERRSEDAQSKAALTDWLRAKASFVIEGLKEADKDEFCRCELKLQKWYGDLRGKPFAIEAENSILDISGFSKQYNCAFIWQKDGVKKLNLYLIINYFKGGKLRFKKIKPEAFEANRFYTVINKKSGEIVPMEVNFNFDDPNLIILPLAFGKRQGREFIWNDLLSLETGSLKLANGRVIEKTLYNRRTRQDEPALFVALTFERREVLDSSNIKPMNLIGVDRGENIPAVIALTDPEGCPLSRFKDSLGNPTHILRIGESYKEKQRTIQAKKEVEQRRAGGYSRKYASKAKNLADDMVRNTARDLLYYAVTQDAMLIFENLSRGFGRQGKRTFMAERQYTRMEDWLTAKLAYEGLPSKVYLSKTLAQYTSKTCSNCGFTITSADYDRVLEKLKKTATGWMTTINGKELKVEGQITYYNRYKRQNVVKDLSVELDRLSEESVNNDISSWTKGRSGEALSLLKKRFSHRPVQEKFVCLNCGFETHADEQAALNIARSWLFLRSQEYKKYQTNKTTGNTDKRAFVETWQSFYRKKLKEVWKPAV

SEQ ID NO: 38467 - protein, 978 aa, synthetic construct
  REGION 1..978: note = engineered CasX variant
QEIKRINKIRRRLVKDSNTKKAGKTGPMKTLLVRVMTPDLRERLENLRKKPENIPQPISNTSRANLNKLLTDYTEMKKAILHVYWEEFQVDPVGLMSRVAQPASKKIDQNKLKPEMDEKGNLTTAGFACSQCGQPLFVYKLEQVSEKGKAYTNYFGRCNVAEHEKLILLAQLKPEKDSDEAVTYSLGKFGQRALDFYSIHVTKESTHPVKPLAQIAGNRYASSPVGKALSDACMGTIASFLSKYQDIIIEHQKVVKGNQKRLESLRELAGKENLEYPSVTLPPQPHTKEGVDAYNEVIARVRMWVNLNLWQKLKLSRDDAKPLLRLKGFPSFPLVERQANEVDWWDMVCNVKKLINEKKEDGKVFWQNLAGYKRQEALRPYLSSEEDRKKGKKFARYQLGDLLLHLEKKHGEDWGKVYDEAWERIDKKVEGLSKHIKLEEERRSEDAQSKAALTDWLRAKASFVIEGLKEADKDEFCRCELKLQKWYGDLRGKPFAIEAENSILDISGFSKQYNCAFIWQKDGVKKLNLYLIINYFKGGKLRFKKIKPEAFEANRFYTVINKKSGEIVPMEVNFNFDDPNLIILPLAFGKRQGREFIWNDLLSLETGSLKLANGRVIEKTLYNRRTRQDEPALFVALTFERREVLDSSNIKPMNLIGVDRGENIPAVIALTDPEGCPLSRFKDSLGNPTHILRIGESYKEKQRTIQAKKEVEQRRAGGYSRKYASKAKNLADDMVRNTARDLLYYAVTQDAMLIFENLSRGFGRQGKRTFMAERQYTRMEDWLTAKLAYEGLPSKVYLSKTLAQYTSKTCSNCGFTITSADYDRVLEKLKKTATGWMTTINGKELKVEGQITYYNRYKRQNVVKDLSVELDRLSEESVNNDISSWTKGRSGEALSLLKKRFSHRPVQEKFVCLNCGFETHADEQAALNIARSWLFLRSQEYKKYQTNKTTGNTDKRAFVETWQSFYRKKLKEVWKPAV

SEQ ID NO: 38468 - protein, 978 aa, synthetic construct
  REGION 1..978: note = engineered CasX variant
QEIKRINKIRRRLVKDSNTKKAGKTGPMKTLLVRVMTPDLRERLENLRKKPENIPQPISNTSRANLNKLLTDYTEMKKAILHVYWEEFQVDPVGLMSRVAQPASKKIDQNKLKPEMDEKGNLTTAGFACSQCGQPLFVYKLEQVSEKGKAYTNYFGRCNVAEHEKLILLAQLKPEKDSDEAVTYSLGKFGQRALDFYSIHVTKESTHPVKPLAQIAGNRYASTPVGKALSDACMGTIASFLSKYQDIIIEHQKVVKGNQKRLESLRELAGKENLEYPSVTLPPQPHTKEGVDAYNEVIARVRMWVNLNLWQKLKLSRDDAKPLLRLKGFPSFPLVERQANEVDWWDMVCNVKKLINEKKEDGKVFWQNLAGYKRQEALRPYLSSEEDRKKGKKFARYQLGDLLLHLEKKHGEDWGKVYDEAWERIDKKVEGLSKHIKLEEERRSEDAQSKAALTDWLRAKASFVIEGLKEADKDEFCRCELKLQKWYGDLRGKPFAIEAENSILDISGFSKQYNCAFIWQKDGVKKLNLYLIINYFKGGKLRFKKIKPEAFEANRFYTVINKKSGEIVPMEVNFNFDDPNLIILPLAFGKRQGREFIWNDLLSLETGSLKLANGRVIEKTLYNRRTRQDEPALFVALTFERREVLDSSNIKPMNLIGVDRGENIPAVIALTDPEGCPLSRFKDSLGNPTHILRIGESYKEKQRTIQAKKEVEQRRAGGYSRKYASKAKNLADDMVRNTARDLLYYAVTQDAMLIFENLSRGFGRQGKRTFMAERQYTRMEDWLTAKLAYEGLPSKVYLSKTLAQYTSKTCSNCGFTITSADYDRVLEKLKKTATGWMTTINGKELKVEGQITYYNRYKRQNVVKDLSVELDRLSEESVNNDISSWTKGRSGEALSLLKKRFSHRPVQEKFVCLNCGFETHADEQAALNIARSWLFLRSQEYKKYQTNKTTGNTDKRAFVETWQSFYRKKLKEVWKPAV

SEQ ID NO: 38469 - protein, 978 aa, synthetic construct
  REGION 1..978: note = engineered CasX variant
QEIKRINKIRRRLVKDSNTKKAGKTGPMKTLLVRVMTPDLRERLENLRKKPENIPQPISNTSRANLNKLLTDYTEMKKAILHVYWEEFQVDPVGLMSRVAQPASKKIDQNKLKPEMDEKGNLTTAGFACSQCGQPLFVYKLEQVSEKGKAYTNYFGRCNVAEHEKLILLAQLKPEKDSDEAVTYSLGKFGQRALDFYSIHVTKESTHPVKPLAQIAGNRYASAPVGKALSDACMGTIASFLSKYQDIIIEHQKVVKGNQKRLESLRELAGKENLEYPSVTLPPQPHTKEGVDAYNEVIARVRMWVNLNLWQKLKLSRDDAKPLLRLKGFPSFPLVERQANEVDWWDMVCNVKKLINEKKEDGKVFWQNLAGYKRQEALRPYLSSEEDRKKGKKFARYQLGDLLLHLEKKHGEDWGKVYDEAWERIDKKVEGLSKHIKLEEERRSEDAQSKAALTDWLRAKASFVIEGLKEADKDEFCRCELKLQKWYGDLRGKPFAIEAENSILDISGFSKQYNCAFIWQKDGVKKLNLYLIINYFKGGKLRFKKIKPEAFEANRFYTVINKKSGEIVPMEVNFNFDDPNLIILPLAFGKRQGREFIWNDLLSLETGSLKLANGRVIEKTLYNRRTRQDEPALFVALTFERREVLDSSNIKPMNLIGVDRGENIPAVIALTDPEGCPLSRFKDSLGNPTHILRIGESYKEKQRTIQAKKEVEQRRAGGYSRKYASKAKNLADDMVRNTARDLLYYAVTQDAMLIFENLSRGFGRQGKRTFMAERQYTRMEDWLTAKLAYEGLPSKVYLSKTLAQYTSKTCSNCGFTITSADYDRVLEKLKKTATGWMTTINGKELKVEGQITYYNRYKRQNVVKDLSVELDRLSEESVNNDISSWTKGRSGEALSLLKKRFSHRPVQEKFVCLNCGFETHADEQAALNIARSWLFLRSQEYKKYQTNKTTGNTDKRAFVETWQSFYRKKLKEVWKPAV

SEQ ID NO: 38470 - protein, 978 aa, synthetic construct
  REGION 1..978: note = engineered CasX variant
QEIKRINKIRRRLVKDSNTKKAGKTGPMKTLLVRVMTPDLRERLENLRKKPENIPQPISNTSRANLNKLLTDYTEMKKAILHVYWEEFQVDPVGLMSRVAQPASKKIDQNKLKPEMDEKGNLTTAGFACSQCGQPLFVYKLEQVSEKGKAYTNYFGRCNVAEHEKLILLAQLKPEKDSDEAVTYSLGKFGQRALDFYSIHVTKESTHPVKPLAQIAGNRYASVPVGKALSDACMGTIASFLSKYQDIIIEHQKVVKGNQKRLESLRELAGKENLEYPSVTLPPQPHTKEGVDAYNEVIARVRMWVNLNLWQKLKLSRDDAKPLLRLKGFPSFPLVERQANEVDWWDMVCNVKKLINEKKEDGKVFWQNLAGYKRQEALRPYLSSEEDRKKGKKFARYQLGDLLLHLEKKHGEDWGKVYDEAWERIDKKVEGLSKHIKLEEERRSEDAQSKAALTDWLRAKASFVIEGLKEADKDEFCRCELKLQKWYGDLRGKPFAIEAENSILDISGFSKQYNCAFIWQKDGVKKLNLYLIINYFKGGKLRFKKIKPEAFEANRFYTVINKKSGEIVPMEVNFNFDDPNLIILPLAFGKRQGREFIWNDLLSLETGSLKLANGRVIEKTLYNRRTRQDEPALFVALTFERREVLDSSNIKPMNLIGVDRGENIPAVIALTDPEGCPLSRFKDSLGNPTHILRIGESYKEKQRTIQAKKEVEQRRAGGYSRKYASKAKNLADDMVRNTARDLLYYAVTQDAMLIFENLSRGFGRQGKRTFMAERQYTRMEDWLTAKLAYEGLPSKVYLSKTLAQYTSKTCSNCGFTITSADYDRVLEKLKKTATGWMTTINGKELKVEGQITYYNRYKRQNVVKDLSVELDRLSEESVNNDISSWTKGRSGEALSLLKKRFSHRPVQEKFVCLNCGFETHADEQAALNIARSWLFLRSQEYKKYQTNKTTGNTDKRAFVETWQSFYRKKLKEVWKPAV

SEQ ID NO: 38471 - protein, 978 aa, synthetic construct
  REGION 1..978: note = engineered CasX variant
QEIKRINKIRRRLVKDSNTKKAGKTGPMKTLLVRVMTPDLRERLENLRKKPENIPQPISNTSRANLNKLLTDYTEMKKAILHVYWEEFQVDPVGLMSRVAQPASKKIDQNKLKPEMDEKGNLTTAGFACSQCGQPLFVYKLEQVSEKGKAYTNYFGRCNVAEHEKLIKLAQLKPEKDSDEAVTYSLGKFGQRALDFYSIHVTKESTHPVKPLAQIAGNRYASGPVGKALSDACMGTIASFLSKYQDIIIEHQKVVKGNQKRLESLRELAGKENLEYPSVTLPPQPHTKEGVDAYNEVIARVRMWVNLNLWQKLKLSRDDAKPLLRLKGFPSFPLVERQANEVDWWDMVCNVKKLINEKKEDGKVFWQNLAGYKRQEALRPYLSSEEDRKKGKKFARYQLGDLLLHLEKKHGEDWGKVYDEAWERIDKKVEGLSKHIKLEEERRSEDAQSKAALTDWLRAKASFVIEGLKEADKDEFCRCELKLQKWYGDLRGKPFAIEAENSILDISGFSKQYNCAFIWQKDGVKKLNLYLIINYFKGGKLRFKKIKPEAFEANRFYTVINKKSGEIVPMEVNFNFDDPNLIILPLAFGKRQGREFIWNDLLSLETGSLKLANGRVIEKTLYNRRTRQDEPALFVALTFERREVLDSSNIKPMNLIGVDRGENIPAVIALTDPEGCPLSRFKDSLGNPTHILRIGESYKEKQRTIQAKKEVEQRRAGGYSRKYASKAKNLADDMVRNTARDLLYYAVTQDAMLIFENLSRGFGRQGKRTFMAERQYTRMEDWLTAKLAYEGLPSKVYLSKTLAQYTSKTCSNCGFTITSADYDRVLEKLKKTATGWMTTINGKELKVEGQITYYNRYKRQNVVKDLSVELDRLSEESVNNDISSWTKGRSGEALSLLKKRFSHRPVQEKFVCLNCGFETHADEQAALNIARSWLFLRSQEYKKYQTNKTTGNTDKRAFVETWQSFYRKKLKEVWKPAV

SEQ ID NO: 38472 - protein, 977 aa, synthetic construct
  REGION 1..977: note = engineered CasX variant
QEIKRINKIRRRLVKDSNTKKAGKTGPMKTLLVRVMTPDLRERLENLRKKPENIPQPISNTSRANLNKLLTDYTEMKKAILHVYWEEFQVDPVGLMSRVAQPASKKIDQNKLKPEMDEKGNLTTAGFACSQCGQPLFVYKLEQVSEKGKAYTNYFGRCNVAEHEKLILLAQLKPEKDSDEAVTYSLGKFGQRALDFYSIHVTKESTHPVKPLAQIAGNRYASPVGKALSDACMGTIASFLSKYQDIIIEHQKVVKGNQKRLESLRELAGKENLEYPSVTLPPQPHTKEGVDAYNEVIARVRMWVNLNLWQKLKLSRDDAKPLLRLKGFPSFPLVERQANEVDWWDMVCNVKKLINEKKEDGKVFWQNLAGYKRQEALRPYLSSEEDRKKGKKFARYQLGDLLLHLEKKHGEDWGKVYDEAWERIDKKVEGLSKHIKLEEERRSEDAQSKAALTDWLRAKASFVIEGLKEADKDEFCRCELKLQKWYGDLRGKPFAIEAENSILDISGFSKQYNCAFIWQKDGVKKLNLYLIINYFKGGKLRFKKIKPEAFEANRFYTVINKKSGEIVPMEVNFNFDDPNLIILPLAFGKRQGREFIWNDLLSLETGSLKLANGRVIEKTLYNRRTRQDEPALFVALTFERREVLDSSNIKPMNLIGVDRGENIPAVIALTDPEGCPLSRFKDSLGNPTHILRIGESYKEKQRTIQAKKEVEQRRAGGYSRKYASKAKNLADDMVRNTARDLLYYAVTQDAMLIFENLSRGFGRQGKRTFMAERQYTRMEDWLTAKLAYEGLPSKVYLSKTLAQYTSKTCSNCGFTITSADYDRVLEKLKKTATGWMTTINGKELKVEGQITYYNRYKRQNVVKDLSVELDRLSEESVNNDISSWTKGRSGEALSLLKKRFSHRPVQEKFVCLNCGFETHADEQAALNIARSWLFLRSQEYKKYQTNKTTGNTDKRAFVETWQSFYRKKLKEVWKPAV

SEQ ID NO: 38473 - protein, 979 aa, synthetic construct
  REGION 1..979: note = engineered CasX variant
QEIKRINKIRRRLVKDSNTKKAGKTGPMKTLLVRVMTPDLRERLENLRKKPENIPQPISNTSRANLNKLLTDYTEMKKAILHVYWEEFQVDPVGLMSRVAQPASKKIDQNKLKPEMDEKGNLTTAGFACSQCGQPLFVYKLEQVSEKGKAYTNYFGRCNVAEHEKLILLAQLKPEKDSDEAVTYSLGKFGQRALDFYSIHVTKESTHPVKPLAQIAGNRYASYPVGKALSDACMGTIASFLSKYQDIIIEHQKVVKGNQKRLESLRELAGKENLEYPSVTLPPQPHTKEGVDAYNEVIARVRMWVNLNLWQKLKLSRDDAKPLLRLKGFPSFPLVERQANEVDWWDMVCNVKKLINEKKEDGKVFWQNLAGYKRQEALRPYLSSEEDRKKGKKFARYQLGDLLLHLEKKHGEDWGKVYDEAWERIDKKVEGLSKHIKLEEERRSEDAQSKAALTDWLRAKASFVIEGLKEADKDEFCRCELKLQKWYGDLRGKPFAIEAENSILDISGFSKQYNCAFIWQKDGVKKLNLYLIINYFKGGKLRFKKIKPEAFEANRFYTVINKKSGEIVPMEVNFNFDDPNLIILPLAFGKRQGREFIWNDLLSLETGSLKLANGRVIEKTLYNRRTRQDEPALFVALTFERREVLDSSNIKPMNLIGVDRGENIPAVIALTDPEGCPLSRFKDSLGNPTHILRIGESYKEKQRTIQAKKEVEQRRAGGYSRKYASKAKNLADDMVRNTARDLLYYAVTQDAMLIFENLSRGFGRQGKRTFMAERQYTRMEDWLTAKLAYEGPLPSKTYLSKTLAQYTSKTCSNCGFTITSADYDRVLEKLKKTATGWMTTINGKELKVEGQITYYNRYKRQNVVKDLSVELDRLSEESVNNDISSWTKGRSGEALSLLKKRFSHRPVQEKFVCLNCGFETHADEQAALNIARSWLFLRSQEYKKYQTNKTTGNTDKRAFVETWQSFYRKKLKEVWKPAV

SEQ ID NO: 38474 - protein, 979 aa, synthetic construct
  REGION 1..979: note = engineered CasX variant
QEIKRINKIRRRLVKDSNTKKAGKTGPMKTLLVRVMTPDLRERLENLRKKPENIPQPISNTSRANLNKLLTDYTEMKKAILHVYWEEFQVDPVGLMSRVAQPASKKIDQNKLKPEMDEKGNLTTAGFACSQCGQPLFVYKLEQVSEKGKAYTNYFGRCNVAEHEKLILLAQLKPEKDSDEAVTYSLGKFGQRALDFYSIHVTKESTHPVKPLAQIAGNRYASHPVGKALSDACMGTIASFLSKYQDIIIEHQKVVKGNQKRLESLRELAGKENLEYPSVTLPPQPHTKEGVDAYNEVIARVRMWVNLNLWQKLKLSRDDAKPLLRLKGFPSFPLVERQANEVDWWDMVCNVKKLINEKKEDGKVFWQNLAGYKRQEALRPYLSSEEDRKKGKKFARYQLGDLLLHLEKKHGEDWGKVYDEAWERIDKKVEGLSKHIKLEEERRSEDAQSKAALTDWLRAKASFVIEGLKEADKDEFCRCELKLQKWYGDLRGKPFAIEAENSILDISGFSKQYNCAFIWQKDGVKKLNLYLIINYFKGGKLRFKKIKPEAFEANRFYTVINKKSGEIVPMEVNFNFDDPNLIILPLAFGKRQGREFIWNDLLSLETGSLKLANGRVIEKTLYNRRTRQDEPALFVALTFERREVLDSSNIKPMNLIGVDRGENIPAVIALTDPEGCPLSRFKDSLGNPTHILRIGESYKEKQRTIQAKKEVEQRRAGGYSRKYASKAKNLADDMVRNTARDLLYYAVTQDAMLIFENLSRGFGRQGKRTFMAERQYTRMEDWLTAKLAYEGPLPSKTYLSKTLAQYTSKTCSNCGFTITSADYDRVLEKLKKTATGWMTTINGKELKVEGQITYYNRYKRQNVVKDLSVELDRLSEESVNNDISSWTKGRSGEALSLLKKRFSHRPVQEKFVCLNCGFETHADEQAALNIARSWLFLRSQEYKKYQTNKTTGNTDKRAFVETWQSFYRKKLKEVWKPAV

SEQ ID NO: 38475 - protein, 979 aa, synthetic construct
  REGION 1..979: note = engineered CasX variant
QEIKRINKIRRRLVKDSNTKKAGKTGPMKTLLVRVMTPDLRERLENLRKKPENIPQPISNTSRANLNKLLTDYTEMKKAILHVYWEEFQVDPVGLMSRVAQPASKKIDQNKLKPEMDEKGNLTTAGFACSQCGQPLFVYKLEQVSEKGKAYTNYFGRCNVAEHEKLILLAQLKPEKDSDEAVTYSLGKFGQRALDFYSIHVTKESTHPVKPLAQIAGNRYASSPVGKALSDACMGTIASFLSKYQDIIIEHQKVVKGNQKRLESLRELAGKENLEYPSVTLPPQPHTKEGVDAYNEVIARVRMWVNLNLWQKLKLSRDDAKPLLRLKGFPSFPLVERQANEVDWWDMVCNVKKLINEKKEDGKVFWQNLAGYKRQEALRPYLSSEEDRKKGKKFARYQLGDLLLHLEKKHGEDWGKVYDEAWERIDKKVEGLSKHIKLEEERRSEDAQSKAALTDWLRAKASFVIEGLKEADKDEFCRCELKLQKWYGDLRGKPFAIEAENSILDISGFSKQYNCAFIWQKDGVKKLNLYLIINYFKGGKLRFKKIKPEAFEANRFYTVINKKSGEIVPMEVNFNFDDPNLIILPLAFGKRQGREFIWNDLLSLETGSLKLANGRVIEKTLYNRRTRQDEPALFVALTFERREVLDSSNIKPMNLIGVDRGENIPAVIALTDPEGCPLSRFKDSLGNPTHILRIGESYKEKQRTIQAKKEVEQRRAGGYSRKYASKAKNLADDMVRNTARDLLYYAVTQDAMLIFENLSRGFGRQGKRTFMAERQYTRMEDWLTAKLAYEGPLPSKTYLSKTLAQYTSKTCSNCGFTITSADYDRVLEKLKKTATGWMTTINGKELKVEGQITYYNRYKRQNVVKDLSVELDRLSEESVNNDISSWTKGRSGEALSLLKKRFSHRPVQEKFVCLNCGFETHADEQAALNIARSWLFLRSQEYKKYQTNKTTGNTDKRAFVETWQSFYRKKLKEVWKPAV

SEQ ID NO: 38476 - protein, 979 aa, synthetic construct
  REGION 1..979: note = engineered CasX variant
QEIKRINKIRRRLVKDSNTKKAGKTGPMKTLLVRVMTPDLRERLENLRKKPENIPQPISNTSRANLNKLLTDYTEMKKAILHVYWEEFQVDPVGLMSRVAQPASKKIDQNKLKPEMDEKGNLTTAGFACSQCGQPLFVYKLEQVSEKGKAYTNYFGRCNVAEHEKLILLAQLKPEKDSDEAVTYSLGKFGQRALDFYSIHVTKESTHPVKPLAQIAGNRYASTPVGKALSDACMGTIASFLSKYQDIIIEHQKVVKGNQKRLESLRELAGKENLEYPSVTLPPQPHTKEGVDAYNEVIARVRMWVNLNLWQKLKLSRDDAKPLLRLKGFPSFPLVERQANEVDWWDMVCNVKKLINEKKEDGKVFWQNLAGYKRQEALRPYLSSEEDRKKGKKFARYQLGDLLLHLEKKHGEDWGKVYDEAWERIDKKVEGLSKHIKLEEERRSEDAQSKAALTDWLRAKASFVIEGLKEADKDEFCRCELKLQKWYGDLRGKPFAIEAENSILDISGFSKQYNCAFIWQKDGVKKLNLYLIINYFKGGKLRFKKIKPEAFEANRFYTVINKKSGEIVPMEVNFNFDDPNLIILPLAFGKRQGREFIWNDLLSLETGSLKLANGRVIEKTLYNRRTRQDEPALFVALTFERREVLDSSNIKPMNLIGVDRGENIPAVIALTDPEGCPLSRFKDSLGNPTHILRIGESYKEKQRTIQAKKEVEQRRAGGYSRKYASKAKNLADDMVRNTARDLLYYAVTQDAMLIFENLSRGFGRQGKRTFMAERQYTRMEDWLTAKLAYEGPLPSKTYLSKTLAQYTSKTCSNCGFTITSADYDRVLEKLKKTATGWMTTINGKELKVEGQITYYNRYKRQNVVKDLSVELDRLSEESVNNDISSWTKGRSGEALSLLKKRFSHRPVQEKFVCLNCGFETHADEQAALNIARSWLFLRSQEYKKYQTNKTTGNTDKRAFVETWQSFYRKKLKEVWKPAV

SEQ ID NO: 38477 - protein, 979 aa, synthetic construct
  REGION 1..979: note = engineered CasX variant
QEIKRINKIRRRLVKDSNTKKAGKTGPMKTLLVRVMTPDLRERLENLRKKPENIPQPISNTSRANLNKLLTDYTEMKKAILHVYWEEFQVDPVGLMSRVAQPASKKIDQNKLKPEMDEKGNLTTAGFACSQCGQPLFVYKLEQVSEKGKAYTNYFGRCNVAEHEKLILLAQLKPEKDSDEAVTYSLGKFGQRALDFYSIHVTKESTHPVKPLAQIAGNRYASAPVGKALSDACMGTIASFLSKYQDIIIEHQKVVKGNQKRLESLRELAGKENLEYPSVTLPPQPHTKEGVDAYNEVIARVRMWVNLNLWQKLKLSRDDAKPLLRLKGFPSFPLVERQANEVDWWDMVCNVKKLINEKKEDGKVFWQNLAGYKRQEALRPYLSSEEDRKKGKKFARYQLGDLLLHLEKKHGEDWGKVYDEAWERIDKKVEGLSKHIKLEEERRSEDAQSKAALTDWLRAKASFVIEGLKEADKDEFCRCELKLQKWYGDLRGKPFAIEAENSILDISGFSKQYNCAFIWQKDGVKKLNLYLIINYFKGGKLRFKKIKPEAFEANRFYTVINKKSGEIVPMEVNFNFDDPNLIILPLAFGKRQGREFIWNDLLSLETGSLKLANGRVIEKTLYNRRTRQDEPALFVALTFERREVLDSSNIKPMNLIGVDRGENIPAVIALTDPEGCPLSRFKDSLGNPTHILRIGESYKEKQRTIQAKKEVEQRRAGGYSRKYASKAKNLADDMVRNTARDLLYYAVTQDAMLIFENLSRGFGRQGKRTFMAERQYTRMEDWLTAKLAYEGPLPSKTYLSKTLAQYTSKTCSNCGFTITSADYDRVLEKLKKTATGWMTTINGKELKVEGQITYYNRYKRQNVVKDLSVELDRLSEESVNNDISSWTKGRSGEALSLLKKRFSHRPVQEKFVCLNCGFETHADEQAALNIARSWLFLRSQEYKKYQTNKTTGNTDKRAFVETWQSFYRKKLKEVWKPAV

SEQ ID NO: 38478 - protein, 979 aa, synthetic construct
  REGION 1..979: note = engineered CasX variant
QEIKRINKIRRRLVKDSNTKKAGKTGPMKTLLVRVMTPDLRERLENLRKKPENIPQPISNTSRANLNKLLTDYTEMKKAILHVYWEEFQVDPVGLMSRVAQPASKKIDQNKLKPEMDEKGNLTTAGFACSQCGQPLFVYKLEQVSEKGKAYTNYFGRCNVAEHEKLILLAQLKPEKDSDEAVTYSLGKFGQRALDFYSIHVTKESTHPVKPLAQIAGNRYASVPVGKALSDACMGTIASFLSKYQDIIIEHQKVVKGNQKRLESLRELAGKENLEYPSVTLPPQPHTKEGVDAYNEVIARVRMWVNLNLWQKLKLSRDDAKPLLRLKGFPSFPLVERQANEVDWWDMVCNVKKLINEKKEDGKVFWQNLAGYKRQEALRPYLSSEEDRKKGKKFARYQLGDLLLHLEKKHGEDWGKVYDEAWERIDKKVEGLSKHIKLEEERRSEDAQSKAALTDWLRAKASFVIEGLKEADKDEFCRCELKLQKWYGDLRGKPFAIEAENSILDISGFSKQYNCAFIWQKDGVKKLNLYLIINYFKGGKLRFKKIKPEAFEANRFYTVINKKSGEIVPMEVNFNFDDPNLIILPLAFGKRQGREFIWNDLLSLETGSLKLANGRVIEKTLYNRRTRQDEPALFVALTFERREVLDSSNIKPMNLIGVDRGENIPAVIALTDPEGCPLSRFKDSLGNPTHILRIGESYKEKQRTIQAKKEVEQRRAGGYSRKYASKAKNLADDMVRNTARDLLYYAVTQDAMLIFENLSRGFGRQGKRTFMAERQYTRMEDWLTAKLAYEGPLPSKTYLSKTLAQYTSKTCSNCGFTITSADYDRVLEKLKKTATGWMTTINGKELKVEGQITYYNRYKRQNVVKDLSVELDRLSEESVNNDISSWTKGRSGEALSLLKKRFSHRPVQEKFVCLNCGFETHADEQAALNIARSWLFLRSQEYKKYQTNKTTGNTDKRAFVETWQSFYRKKLKEVWKPAV

SEQ ID NO: 38479 - protein, 979 aa, synthetic construct
  REGION 1..979: note = engineered CasX variant
QEIKRINKIRRRLVKDSNTKKAGKTGPMKTLLVRVMTPDLRERLENLRKKPENIPQPISNTSRANLNKLLTDYTEMKKAILHVYWEEFQVDPVGLMSRVAQPASKKIDQNKLKPEMDEKGNLTTAGFACSQCGQPLFVYKLEQVSEKGKAYTNYFGRCNVAEHEKLIKLAQLKPEKDSDEAVTYSLGKFGQRALDFYSIHVTKESTHPVKPLAQIAGNRYASGPVGKALSDACMGTIASFLSKYQDIIIEHQKVVKGNQKRLESLRELAGKENLEYPSVTLPPQPHTKEGVDAYNEVIARVRMWVNLNLWQKLKLSRDDAKPLLRLKGFPSFPLVERQANEVDWWDMVCNVKKLINEKKEDGKVFWQNLAGYKRQEALRPYLSSEEDRKKGKKFARYQLGDLLLHLEKKHGEDWGKVYDEAWERIDKKVEGLSKHIKLEEERRSEDAQSKAALTDWLRAKASFVIEGLKEADKDEFCRCELKLQKWYGDLRGKPFAIEAENSILDISGFSKQYNCAFIWQKDGVKKLNLYLIINYFKGGKLRFKKIKPEAFEANRFYTVINKKSGEIVPMEVNFNFDDPNLIILPLAFGKRQGREFIWNDLLSLETGSLKLANGRVIEKTLYNRRTRQDEPALFVALTFERREVLDSSNIKPMNLIGVDRGENIPAVIALTDPEGCPLSRFKDSLGNPTHILRIGESYKEKQRTIQAKKEVEQRRAGGYSRKYASKAKNLADDMVRNTARDLLYYAVTQDAMLIFENLSRGFGRQGKRTFMAERQYTRMEDWLTAKLAYEGPLPSKTYLSKTLAQYTSKTCSNCGFTITSADYDRVLEKLKKTATGWMTTINGKELKVEGQITYYNRYKRQNVVKDLSVELDRLSEESVNNDISSWTKGRSGEALSLLKKRFSHRPVQEKFVCLNCGFETHADEQAALNIARSWLFLRSQEYKKYQTNKTTGNTDKRAFVETWQSFYRKKLKEVWKPAV

SEQ ID NO: 38480 - protein, 978 aa, synthetic construct
  REGION 1..978: note = engineered CasX variant
QEIKRINKIRRRLVKDSNTKKAGKTGPMKTLLVRVMTPDLRERLENLRKKPENIPQPISNTSRANLNKLLTDYTEMKKAILHVYWEEFQVDPVGLMSRVAQPASKKIDQNKLKPEMDEKGNLTTAGFACSQCGQPLFVYKLEQVSEKGKAYTNYFGRCNVAEHEKLILLAQLKPEKDSDEAVTYSLGKFGQRALDFYSIHVTKESTHPVKPLAQIAGNRYASPVGKALSDACMGTIASFLSKYQDIIIEHQKVVKGNQKRLESLRELAGKENLEYPSVTLPPQPHTKEGVDAYNEVIARVRMWVNLNLWQKLKLSRDDAKPLLRLKGFPSFPLVERQANEVDWWDMVCNVKKLINEKKEDGKVFWQNLAGYKRQEALRPYLSSEEDRKKGKKFARYQLGDLLLHLEKKHGEDWGKVYDEAWERIDKKVEGLSKHIKLEEERRSEDAQSKAALTDWLRAKASFVIEGLKEADKDEFCRCELKLQKWYGDLRGKPFAIEAENSILDISGFSKQYNCAFIWQKDGVKKLNLYLIINYFKGGKLRFKKIKPEAFEANRFYTVINKKSGEIVPMEVNFNFDDPNLIILPLAFGKRQGREFIWNDLLSLETGSLKLANGRVIEKTLYNRRTRQDEPALFVALTFERREVLDSSNIKPMNLIGVDRGENIPAVIALTDPEGCPLSRFKDSLGNPTHILRIGESYKEKQRTIQAKKEVEQRRAGGYSRKYASKAKNLADDMVRNTARDLLYYAVTQDAMLIFENLSRGFGRQGKRTFMAERQYTRMEDWLTAKLAYEGPLPSKTYLSKTLAQYTSKTCSNCGFTITSADYDRVLEKLKKTATGWMTTINGKELKVEGQITYYNRYKRQNVVKDLSVELDRLSEESVNNDISSWTKGRSGEALSLLKKRFSHRPVQEKFVCLNCGFETHADEQAALNIARSWLFLRSQEYKKYQTNKTTGNTDKRAFVETWQSFYRKKLKEVWKPAV

SEQ ID NO: 38481 - protein, 979 aa, synthetic construct
  REGION 1..979: note = engineered CasX variant
QEIKRINKIRRRLVKDSNTKKAGKTGPMKTLLVRVMTPDLRERLENLRKKPENIPQPISNTSRANLNKLLTDYTEMKKAILHVYWEEFQVDPVGLMSRVAQPASKKIDQNKLKPEMDEKGNLTTAGFACSQCGQPLFVYKLEQVSEKGKAYTNYFGRCNVAEHEKLILLAQLKPEKDSDEAVTYSLGKFGQRALDFYSIHVTKESTHPVKPLAQIAGNRYASYPVGKALSDACMGTIASFLSKYQDIIIEHQKVVKGNQKRLESLRELAGKENLEYPSVTLPPQPHTKEGVDAYNEVIARVRMWVNLNLWQKLKLSRDDAKPLLRLKGFPSFPLVERQANEVDWWDMVCNVKKLINEKKEDGKVFWQNLAGYKRQEALRPYLSSEEDVRKKGKKFARYQLGDLLLHLEKKHGEDWGKVYDEAWERIDKKVEGLSKHIKLEEERRSEDAQSKAALTDWLRAKASFVIEGLKEADKDEFCRCELKLQKWYGDLRGKPFAIEAENSILDISGFSKQYNCAFIWQKDGVKKLNLYLIINYFKGGKLRFKKIKPEAFEANRFYTVINKKSGEIVPMEVNFNFDDPNLIILPLAFGKRQGREFIWNDLLSLETGSLKLANGRVIEKTLYNRRTRQDEPALFVALTFERREVLDSSNIKPMNLIGVDRGENIPAVIALTDPEGCPLSRFKDSLGNPTHILRIGESYKEKQRTIQAKKEVEQRRAGGYSRKYASKAKNLADDMVRNTARDLLYYAVTQDAMLIFENLSRGFGRQGKRTFMAERQYTRMEDWLTAKLAYEGLPSKTYLSKTLAQYTSKTCSNCGFTITSADYDRVLEKLKKTATGWMTTINGKELKVEGQITYYNRYKRQNVVKDLSVELDRLSEESVNNDISSWTKGRSGEALSLLKKRFSHRPVQEKFVCLNCGFETHADEQAALNIARSWLFLRSQEYKKYQTNKTTGNTDKRAFVETWQSFYRKKLKEVWKPAV

SEQ ID NO: 38482 - protein, 979 aa, synthetic construct
  REGION 1..979: note = engineered CasX variant
QEIKRINKIRRRLVKDSNTKKAGKTGPMKTLLVRVMTPDLRERLENLRKKPENIPQPISNTSRANLNKLLTDYTEMKKAILHVYWEEFQVDPVGLMSRVAQPASKKIDQNKLKPEMDEKGNLTTAGFACSQCGQPLFVYKLEQVSEKGKAYTNYFGRCNVAEHEKLILLAQLKPEKDSDEAVTYSLGKFGQRALDFYSIHVTKESTHPVKPLAQIAGNRYASHPVGKALSDACMGTIASFLSKYQDIIIEHQKVVKGNQKRLESLRELAGKENLEYPSVTLPPQPHTKEGVDAYNEVIARVRMWVNLNLWQKLKLSRDDAKPLLRLKGFPSFPLVERQANEVDWWDMVCNVKKLINEKKEDGKVFWQNLAGYKRQEALRPYLSSEEDVRKKGKKFARYQLGDLLLHLEKKHGEDWGKVYDEAWERIDKKVEGLSKHIKLEEERRSEDAQSKAALTDWLRAKASFVIEGLKEADKDEFCRCELKLQKWYGDLRGKPFAIEAENSILDISGFSKQYNCAFIWQKDGVKKLNLYLIINYFKGGKLRFKKIKPEAFEANRFYTVINKKSGEIVPMEVNFNFDDPNLIILPLAFGKRQGREFIWNDLLSLETGSLKLANGRVIEKTLYNRRTRQDEPALFVALTFERREVLDSSNIKPMNLIGVDRGENIPAVIALTDPEGCPLSRFKDSLGNPTHILRIGESYKEKQRTIQAKKEVEQRRAGGYSRKYASKAKNLADDMVRNTARDLLYYAVTQDAMLIFENLSRGFGRQGKRTFMAERQYTRMEDWLTAKLAYEGLPSKTYLSKTLAQYTSKTCSNCGFTITSADYDRVLEKLKKTATGWMTTINGKELKVEGQITYYNRYKRQNVVKDLSVELDRLSEESVNNDISSWTKGRSGEALSLLKKRFSHRPVQEKFVCLNCGFETHADEQAALNIARSWLFLRSQEYKKYQTNKTTGNTDKRAFVETWQSFYRKKLKEVWKPAV

SEQ ID NO: 38483 - protein, 979 aa, synthetic construct
  REGION 1..979: note = engineered CasX variant
QEIKRINKIRRRLVKDSNTKKAGKTGPMKTLLVRVMTPDLRERLENLRKKPENIPQPISNTSRANLNKLLTDYTEMKKAILHVYWEEFQVDPVGLMSRVAQPASKKIDQNKLKPEMDEKGNLTTAGFACSQCGQPLFVYKLEQVSEKGKAYTNYFGRCNVAEHEKLILLAQLKPEKDSDEAVTYSLGKFGQRALDFYSIHVTKESTHPVKPLAQIAGNRYASSPVGKALSDACMGTIASFLSKYQDIIIEHQKVVKGNQKRLESLRELAGKENLEYPSVTLPPQPHTKEGVDAYNEVIARVRMWVNLNLWQKLKLSRDDAKPLLRLKGFPSFPLVERQANEVDWWDMVCNVKKLINEKKEDGKVFWQNLAGYKRQEALRPYLSSEEDVRKKGKKFARYQLGDLLLHLEKKHGEDWGKVYDEAWERIDKKVEGLSKHIKLEEERRSEDAQSKAALTDWLRAKASFVIEGLKEADKDEFCRCELKLQKWYGDLRGKPFAIEAENSILDISGFSKQYNCAFIWQKDGVKKLNLYLIINYFKGGKLRFKKIKPEAFEANRFYTVINKKSGEIVPMEVNFNFDDPNLIILPLAFGKRQGREFIWNDLLSLETGSLKLANGRVIEKTLYNRRTRQDEPALFVALTFERREVLDSSNIKPMNLIGVDRGENIPAVIALTDPEGCPLSRFKDSLGNPTHILRIGESYKEKQRTIQAKKEVEQRRAGGYSRKYASKAKNLADDMVRNTARDLLYYAVTQDAMLIFENLSRGFGRQGKRTFMAERQYTRMEDWLTAKLAYEGLPSKTYLSKTLAQYTSKTCSNCGFTITSADYDRVLEKLKKTATGWMTTINGKELKVEGQITYYNRYKRQNVVKDLSVELDRLSEESVNNDISSWTKGRSGEALSLLKKRFSHRPVQEKFVCLNCGFETHADEQAALNIARSWLFLRSQEYKKYQTNKTTGNTDKRAFVETWQSFYRKKLKEVWKPAV

SEQ ID NO: 38484 - protein, 979 aa, synthetic construct
  REGION 1..979: note = engineered CasX variant
QEIKRINKIRRRLVKDSNTKKAGKTGPMKTLLVRVMTPDLRERLENLRKKPENIPQPISNTSRANLNKLLTDYTEMKKAILHVYWEEFQVDPVGLMSRVAQPASKKIDQNKLKPEMDEKGNLTTAGFACSQCGQPLFVYKLEQVSEKGKAYTNYFGRCNVAEHEKLILLAQLKPEKDSDEAVTYSLGKFGQRALDFYSIHVTKESTHPVKPLAQIAGNRYASTPVGKALSDACMGTIASFLSKYQDIIIEHQKVVKGNQKRLESLRELAGKENLEYPSVTLPPQPHTKEGVDAYNEVIARVRMWVNLNLWQKLKLSRDDAKPLLRLKGFPSFPLVERQANEVDWWDMVCNVKKLINEKKEDGKVFWQNLAGYKRQEALRPYLSSEEDVRKKGKKFARYQLGDLLLHLEKKHGEDWGKVYDEAWERIDKKVEGLSKHIKLEEERRSEDAQSKAALTDWLRAKASFVIEGLKEADKDEFCRCELKLQKWYGDLRGKPFAIEAENSILDISGFSKQYNCAFIWQKDGVKKLNLYLIINYFKGGKLRFKKIKPEAFEANRFYTVINKKSGEIVPMEVNFNFDDPNLIILPLAFGKRQGREFIWNDLLSLETGSLKLANGRVIEKTLYNRRTRQDEPALFVALTFERREVLDSSNIKPMNLIGVDRGENIPAVIALTDPEGCPLSRFKDSLGNPTHILRIGESYKEKQRTIQAKKEVEQRRAGGYSRKYASKAKNLADDMVRNTARDLLYYAVTQDAMLIFENLSRGFGRQGKRTFMAERQYTRMEDWLTAKLAYEGLPSKTYLSKTLAQYTSKTCSNCGFTITSADYDRVLEKLKKTATGWMTTINGKELKVEGQITYYNRYKRQNVVKDLSVELDRLSEESVNNDISSWTKGRSGEALSLLKKRFSHRPVQEKFVCLNCGFETHADEQAALNIARSWLFLRSQEYKKYQTNKTTGNTDKRAFVETWQSFYRKKLKEVWKPAV

SEQ ID NO: 38485 - protein, 979 aa, synthetic construct
  REGION 1..979: note = engineered CasX variant
QEIKRINKIRRRLVKDSNTKKAGKTGPMKTLLVRVMTPDLRERLENLRKKPENIPQPISNTSRANLNKLLTDYTEMKKAILHVYWEEFQVDPVGLMSRVAQPASKKIDQNKLKPEMDEKGNLTTAGFACSQCGQPLFVYKLEQVSEKGKAYTNYFGRCNVAEHEKLILLAQLKPEKDSDEAVTYSLGKFGQRALDFYSIHVTKESTHPVKPLAQIAGNRYASAPVGKALSDACMGTIASFLSKYQDIIIEHQKVVKGNQKRLESLRELAGKENLEYPSVTLPPQPHTKEGVDAYNEVIARVRMWVNLNLWQKLKLSRDDAKPLLRLKGFPSFPLVERQANEVDWWDMVCNVKKLINEKKEDGKVFWQNLAGYKRQEALRPYLSSEEDVRKKGKKFARYQLGDLLLHLEKKHGEDWGKVYDEAWERIDKKVEGLSKHIKLEEERRSEDAQSKAALTDWLRAKASFVIEGLKEADKDEFCRCELKLQKWYGDLRGKPFAIEAENSILDISGFSKQYNCAFIWQKDGVKKLNLYLIINYFKGGKLRFKKIKPEAFEANRFYTVINKKSGEIVPMEVNFNFDDPNLIILPLAFGKRQGREFIWNDLLSLETGSLKLANGRVIEKTLYNRRTRQDEPALFVALTFERREVLDSSNIKPMNLIGVDRGENIPAVIALTDPEGCPLSRFKDSLGNPTHILRIGESYKEKQRTIQAKKEVEQRRAGGYSRKYASKAKNLADDMVRNTARDLLYYAVTQDAMLIFENLSRGFGRQGKRTFMAERQYTRMEDWLTAKLAYEGLPSKTYLSKTLAQYTSKTCSNCGFTITSADYDRVLEKLKKTATGWMTTINGKELKVEGQITYYNRYKRQNVVKDLSVELDRLSEESVNNDISSWTKGRSGEALSLLKKRFSHRPVQEKFVCLNCGFETHADEQAALNIARSWLFLRSQEYKKYQTNKTTGNTDKRAFVETWQSFYRKKLKEVWKPAV

SEQ ID NO: 38486 - protein, 979 aa, synthetic construct
  REGION 1..979: note = engineered CasX variant
QEIKRINKIRRRLVKDSNTKKAGKTGPMKTLLVRVMTPDLRERLENLRKKPENIPQPISNTSRANLNKLLTDYTEMKKAILHVYWEEFQVDPVGLMSRVAQPASKKIDQNKLKPEMDEKGNLTTAGFACSQCGQPLFVYKLEQVSEKGKAYTNYFGRCNVAEHEKLILLAQLKPEKDSDEAVTYSLGKFGQRALDFYSIHVTKESTHPVKPLAQIAGNRYASVPVGKALSDACMGTIASFLSKYQDIIIEHQKVVKGNQKRLESLRELAGKENLEYPSVTLPPQPHTKEGVDAYNEVIARVRMWVNLNLWQKLKLSRDDAKPLLRLKGFPSFPLVERQANEVDWWDMVCNVKKLINEKKEDGKVFWQNLAGYKRQEALRPYLSSEEDVRKKGKKFARYQLGDLLLHLEKKHGEDWGKVYDEAWERIDKKVEGLSKHIKLEEERRSEDAQSKAALTDWLRAKASFVIEGLKEADKDEFCRCELKLQKWYGDLRGKPFAIEAENSILDISGFSKQYNCAFIWQKDGVKKLNLYLIINYFKGGKLRFKKIKPEAFEANRFYTVINKKSGEIVPMEVNFNFDDPNLIILPLAFGKRQGREFIWNDLLSLETGSLKLANGRVIEKTLYNRRTRQDEPALFVALTFERREVLDSSNIKPMNLIGVDRGENIPAVIALTDPEGCPLSRFKDSLGNPTHILRIGESYKEKQRTIQAKKEVEQRRAGGYSRKYASKAKNLADDMVRNTARDLLYYAVTQDAMLIFENLSRGFGRQGKRTFMAERQYTRMEDWLTAKLAYEGLPSKTYLSKTLAQYTSKTCSNCGFTITSADYDRVLEKLKKTATGWMTTINGKELKVEGQITYYNRYKRQNVVKDLSVELDRLSEESVNNDISSWTKGRSGEALSLLKKRFSHRPVQEKFVCLNCGFETHADEQAALNIARSWLFLRSQEYKKYQTNKTTGNTDKRAFVETWQSFYRKKLKEVWKPAV

SEQ ID NO: 38487 - protein, 979 aa, synthetic construct
  REGION 1..979: note = engineered CasX variant
QEIKRINKIRRRLVKDSNTKKAGKTGPMKTLLVRVMTPDLRERLENLRKKPENIPQPISNTSRANLNKLLTDYTEMKKAILHVYWEEFQVDPVGLMSRVAQPASKKIDQNKLKPEMDEKGNLTTAGFACSQCGQPLFVYKLEQVSEKGKAYTNYFGRCNVAEHEKLIKLAQLKPEKDSDEAVTYSLGKFGQRALDFYSIHVTKESTHPVKPLAQIAGNRYASGPVGKALSDACMGTIASFLSKYQDIIIEHQKVVKGNQKRLESLRELAGKENLEYPSVTLPPQPHTKEGVDAYNEVIARVRMWVNLNLWQKLKLSRDDAKPLLRLKGFPSFPLVERQANEVDWWDMVCNVKKLINEKKEDGKVFWQNLAGYKRQEALRPYLSSEEDVRKKGKKFARYQLGDLLLHLEKKHGEDWGKVYDEAWERIDKKVEGLSKHIKLEEERRSEDAQSKAALTDWLRAKASFVIEGLKEADKDEFCRCELKLQKWYGDLRGKPFAIEAENSILDISGFSKQYNCAFIWQKDGVKKLNLYLIINYFKGGKLRFKKIKPEAFEANRFYTVINKKSGEIVPMEVNFNFDDPNLIILPLAFGKRQGREFIWNDLLSLETGSLKLANGRVIEKTLYNRRTRQDEPALFVALTFERREVLDSSNIKPMNLIGVDRGENIPAVIALTDPEGCPLSRFKDSLGNPTHILRIGESYKEKQRTIQAKKEVEQRRAGGYSRKYASKAKNLADDMVRNTARDLLYYAVTQDAMLIFENLSRGFGRQGKRTFMAERQYTRMEDWLTAKLAYEGLPSKTYLSKTLAQYTSKTCSNCGFTITSADYDRVLEKLKKTATGWMTTINGKELKVEGQITYYNRYKRQNVVKDLSVELDRLSEESVNNDISSWTKGRSGEALSLLKKRFSHRPVQEKFVCLNCGFETHADEQAALNIARSWLFLRSQEYKKYQTNKTTGNTDKRAFVETWQSFYRKKLKEVWKPAV

SEQ ID NO: 38488 - protein, 978 aa, synthetic construct
  REGION 1..978: note = engineered CasX variant
QEIKRINKIRRRLVKDSNTKKAGKTGPMKTLLVRVMTPDLRERLENLRKKPENIPQPISNTSRANLNKLLTDYTEMKKAILHVYWEEFQVDPVGLMSRVAQPASKKIDQNKLKPEMDEKGNLTTAGFACSQCGQPLFVYKLEQVSEKGKAYTNYFGRCNVAEHEKLILLAQLKPEKDSDEAVTYSLGKFGQRALDFYSIHVTKESTHPVKPLAQIAGNRYASPVGKALSDACMGTIASFLSKYQDIIIEHQKVVKGNQKRLESLRELAGKENLEYPSVTLPPQPHTKEGVDAYNEVIARVRMWVNLNLWQKLKLSRDDAKPLLRLKGFPSFPLVERQANEVDWWDMVCNVKKLINEKKEDGKVFWQNLAGYKRQEALRPYLSSEEDVRKKGKKFARYQLGDLLLHLEKKHGEDWGKVYDEAWERIDKKVEGLSKHIKLEEERRSEDAQSKAALTDWLRAKASFVIEGLKEADKDEFCRCELKLQKWYGDLRGKPFAIEAENSILDISGFSKQYNCAFIWQKDGVKKLNLYLIINYFKGGKLRFKKIKPEAFEANRFYTVINKKSGEIVPMEVNFNFDDPNLIILPLAFGKRQGREFIWNDLLSLETGSLKLANGRVIEKTLYNRRTRQDEPALFVALTFERREVLDSSNIKPMNLIGVDRGENIPAVIALTDPEGCPLSRFKDSLGNPTHILRIGESYKEKQRTIQAKKEVEQRRAGGYSRKYASKAKNLADDMVRNTARDLLYYAVTQDAMLIFENLSRGFGRQGKRTFMAERQYTRMEDWLTAKLAYEGLPSKTYLSKTLAQYTSKTCSNCGFTITSADYDRVLEKLKKTATGWMTTINGKELKVEGQITYYNRYKRQNVVKDLSVELDRLSEESVNNDISSWTKGRSGEALSLLKKRFSHRPVQEKFVCLNCGFETHADEQAALNIARSWLFLRSQEYKKYQTNKTTGNTDKRAFVETWQSFYRKKLKEVWKPAV

SEQ ID NO: 38489 - protein, 978 aa, synthetic construct
  REGION 1..978: note = engineered CasX variant
QEIKRINKIRRRLVKDSNTKKAGKTGPMKTLLVRVMTPDLRERLENLRKKPENIPQPISNTSRANLNKLLTDYTEMKKAILHVYWEEFQVDPVGLMSRVAQPASKKIDQNKLKPEMDEKGNLTTAGFACSQCGQPLFVYKLEQVSEKGKAYTNYFGRCNVAEHEKLILLAQLKPEKDSDEAVTYSLGKFGQRALDFYSIHVTKESTHPVKPLAQIAGNRYASYPVGKALSDACMGTIASFLSKYQDIIIEHQKVVKGNQKRLESLRELAGKENLEYPSVTLPPQPHTKEGVDAYNEVIARVRMWVNLNLWQKLKLSRDDAKPLLRLKGFPSFPLVERQANEVDWWDMVCNVKKLINEKKEDGKVFWQNLAGYKRQEALRPYLSSEEDRKKGKKFARYQLGDLLLHLEKKHGEDWGKVYDEAWERIDKKVEGLSKHIKLEEERRSEDAQSKAALTDWLRAKASFVIEGLKEADKDEFCRCELKLQKWYGDLRGKPFAIEAENSILDISGFSKQYNCAFIWQKDGVKKLNLYLIINYFKGGKLRFKKIKPEAFEANRFYTVINKKSGEIVPMEVNFNFDDPNLIILPLAFGKRQGREFIWNDLLSLETGSLKLANGRVIEKTLYNRRTRQDEPALFVALTFERREVLDSSNIKPMNLIGVDRGENIPAVIALTDPEGCPLSRFKDSLGNPTHILRIGESYKEKQRTIQAKKEVEQRRAGGYSRKYASKAKNLADDMVRNTARDLLYYAVTQDAMLIFENLSRGFGRQGKRTFMAERQYTRMEDWLTAKLAYEGLPSKTYLSKTLAQYTSKTCSNCGFTITSADYDRMLEKLKKTATGWMTTINGKELKVEGQITYYNRYKRQNVVKDLSVELDRLSEESVNNDISSWTKGRSGEALSLLKKRFSHRPVQEKFVCLNCGFETHADEQAALNIARSWLFLRSQEYKKYQTNKTTGNTDKRAFVETWQSFYRKKLKEVWKPAV

SEQ ID NO: 38490 - protein, 978 aa, synthetic construct
  REGION 1..978: note = engineered CasX variant
QEIKRINKIRRRLVKDSNTKKAGKTGPMKTLLVRVMTPDLRERLENLRKKPENIPQPISNTSRANLNKLLTDYTEMKKAILHVYWEEFQVDPVGLMSRVAQPASKKIDQNKLKPEMDEKGNLTTAGFACSQCGQPLFVYKLEQVSEKGKAYTNYFGRCNVAEHEKLILLAQLKPEKDSDEAVTYSLGKFGQRALDFYSIHVTKESTHPVKPLAQIAGNRYASHPVGKALSDACMGTIASFLSKYQDIIIEHQKVVKGNQKRLESLRELAGKENLEYPSVTLPPQPHTKEGVDAYNEVIARVRMWVNLNLWQKLKLSRDDAKPLLRLKGFPSFPLVERQANEVDWWDMVCNVKKLINEKKEDGKVFWQNLAGYKRQEALRPYLSSEEDRKKGKKFARYQLGDLLLHLEKKHGEDWGKVYDEAWERIDKKVEGLSKHIKLEEERRSEDAQSKAALTDWLRAKASFVIEGLKEADKDEFCRCELKLQKWYGDLRGKPFAIEAENSILDISGFSKQYNCAFIWQKDGVKKLNLYLIINYFKGGKLRFKKIKPEAFEANRFYTVINKKSGEIVPMEVNFNFDDPNLIILPLAFGKRQGREFIWNDLLSLETGSLKLANGRVIEKTLYNRRTRQDEPALFVALTFERREVLDSSNIKPMNLIGVDRGENIPAVIALTDPEGCPLSRFKDSLGNPTHILRIGESYKEKQRTIQAKKEVEQRRAGGYSRKYASKAKNLADDMVRNTARDLLYYAVTQDAMLIFENLSRGFGRQGKRTFMAERQYTRMEDWLTAKLAYEGLPSKTYLSKTLAQYTSKTCSNCGFTITSADYDRMLEKLKKTATGWMTTINGKELKVEGQITYYNRYKRQNVVKDLSVELDRLSEESVNNDISSWTKGRSGEALSLLKKRFSHRPVQEKFVCLNCGFETHADEQAALNIARSWLFLRSQEYKKYQTNKTTGNTDKRAFVETWQSFYRKKLKEVWKPAV

SEQ ID NO: 38491 - protein, 978 aa, synthetic construct
  REGION 1..978: note = engineered CasX variant
QEIKRINKIRRRLVKDSNTKKAGKTGPMKTLLVRVMTPDLRERLENLRKKPENIPQPISNTSRANLNKLLTDYTEMKKAILHVYWEEFQVDPVGLMSRVAQPASKKIDQNKLKPEMDEKGNLTTAGFACSQCGQPLFVYKLEQVSEKGKAYTNYFGRCNVAEHEKLILLAQLKPEKDSDEAVTYSLGKFGQRALDFYSIHVTKESTHPVKPLAQIAGNRYASSPVGKALSDACMGTIASFLSKYQDIIIEHQKVVKGNQKRLESLRELAGKENLEYPSVTLPPQPHTKEGVDAYNEVIARVRMWVNLNLWQKLKLSRDDAKPLLRLKGFPSFPLVERQANEVDWWDMVCNVKKLINEKKEDGKVFWQNLAGYKRQEALRPYLSSEEDRKKGKKFARYQLGDLLLHLEKKHGEDWGKVYDEAWERIDKKVEGLSKHIKLEEERRSEDAQSKAALTDWLRAKASFVIEGLKEADKDEFCRCELKLQKWYGDLRGKPFAIEAENSILDISGFSKQYNCAFIWQKDGVKKLNLYLIINYFKGGKLRFKKIKPEAFEANRFYTVINKKSGEIVPMEVNFNFDDPNLIILPLAFGKRQGREFIWNDLLSLETGSLKLANGRVIEKTLYNRRTRQDEPALFVALTFERREVLDSSNIKPMNLIGVDRGENIPAVIALTDPEGCPLSRFKDSLGNPTHILRIGESYKEKQRTIQAKKEVEQRRAGGYSRKYASKAKNLADDMVRNTARDLLYYAVTQDAMLIFENLSRGFGRQGKRTFMAERQYTRMEDWLTAKLAYEGLPSKTYLSKTLAQYTSKTCSNCGFTITSADYDRMLEKLKKTATGWMTTINGKELKVEGQITYYNRYKRQNVVKDLSVELDRLSEESVNNDISSWTKGRSGEALSLLKKRFSHRPVQEKFVCLNCGFETHADEQAALNIARSWLFLRSQEYKKYQTNKTTGNTDKRAFVETWQSFYRKKLKEVWKPAV

SEQ ID NO: 38492 - protein, 978 aa, synthetic construct
  REGION 1..978: note = engineered CasX variant
QEIKRINKIRRRLVKDSNTKKAGKTGPMKTLLVRVMTPDLRERLENLRKKPENIPQPISNTSRANLNKLLTDYTEMKKAILHVYWEEFQVDPVGLMSRVAQPASKKIDQNKLKPEMDEKGNLTTAGFACSQCGQPLFVYKLEQVSEKGKAYTNYFGRCNVAEHEKLILLAQLKPEKDSDEAVTYSLGKFGQRALDFYSIHVTKESTHPVKPLAQIAGNRYASTPVGKALSDACMGTIASFLSKYQDIIIEHQKVVKGNQKRLESLRELAGKENLEYPSVTLPPQPHTKEGVDAYNEVIARVRMWVNLNLWQKLKLSRDDAKPLLRLKGFPSFPLVERQANEVDWWDMVCNVKKLINEKKEDGKVFWQNLAGYKRQEALRPYLSSEEDRKKGKKFARYQLGDLLLHLEKKHGEDWGKVYDEAWERIDKKVEGLSKHIKLEEERRSEDAQSKAALTDWLRAKASFVIEGLKEADKDEFCRCELKLQKWYGDLRGKPFAIEAENSILDISGFSKQYNCAFIWQKDGVKKLNLYLIINYFKGGKLRFKKIKPEAFEANRFYTVINKKSGEIVPMEVNFNFDDPNLIILPLAFGKRQGREFIWNDLLSLETGSLKLANGRVIEKTLYNRRTRQDEPALFVALTFERREVLDSSNIKPMNLIGVDRGENIPAVIALTDPEGCPLSRFKDSLGNPTHILRIGESYKEKQRTIQAKKEVEQRRAGGYSRKYASKAKNLADDMVRNTARDLLYYAVTQDAMLIFENLSRGFGRQGKRTFMAERQYTRMEDWLTAKLAYEGLPSKTYLSKTLAQYTSKTCSNCGFTITSADYDRMLEKLKKTATGWMTTINGKELKVEGQITYYNRYKRQNVVKDLSVELDRLSEESVNNDISSWTKGRSGEALSLLKKRFSHRPVQEKFVCLNCGFETHADEQAALNIARSWLFLRSQEYKKYQTNKTTGNTDKRAFVETWQSFYRKKLKEVWKPAV

SEQ ID NO: 38493 - protein, 978 aa, synthetic construct
  REGION 1..978: note = engineered CasX variant
QEIKRINKIRRRLVKDSNTKKAGKTGPMKTLLVRVMTPDLRERLENLRKKPENIPQPISNTSRANLNKLLTDYTEMKKAILHVYWEEFQVDPVGLMSRVAQPASKKIDQNKLKPEMDEKGNLTTAGFACSQCGQPLFVYKLEQVSEKGKAYTNYFGRCNVAEHEKLILLAQLKPEKDSDEAVTYSLGKFGQRALDFYSIHVTKESTHPVKPLAQIAGNRYASAPVGKALSDACMGTIASFLSKYQDIIIEHQKVVKGNQKRLESLRELAGKENLEYPSVTLPPQPHTKEGVDAYNEVIARVRMWVNLNLWQKLKLSRDDAKPLLRLKGFPSFPLVERQANEVDWWDMVCNVKKLINEKKEDGKVFWQNLAGYKRQEALRPYLSSEEDRKKGKKFARYQLGDLLLHLEKKHGEDWGKVYDEAWERIDKKVEGLSKHIKLEEERRSEDAQSKAALTDWLRAKASFVIEGLKEADKDEFCRCELKLQKWYGDLRGKPFAIEAENSILDISGFSKQYNCAFIWQKDGVKKLNLYLIINYFKGGKLRFKKIKPEAFEANRFYTVINKKSGEIVPMEVNFNFDDPNLIILPLAFGKRQGREFIWNDLLSLETGSLKLANGRVIEKTLYNRRTRQDEPALFVALTFERREVLDSSNIKPMNLIGVDRGENIPAVIALTDPEGCPLSRFKDSLGNPTHILRIGESYKEKQRTIQAKKEVEQRRAGGYSRKYASKAKNLADDMVRNTARDLLYYAVTQDAMLIFENLSRGFGRQGKRTFMAERQYTRMEDWLTAKLAYEGLPSKTYLSKTLAQYTSKTCSNCGFTITSADYDRMLEKLKKTATGWMTTINGKELKVEGQITYYNRYKRQNVVKDLSVELDRLSEESVNNDISSWTKGRSGEALSLLKKRFSHRPVQEKFVCLNCGFETHADEQAALNIARSWLFLRSQEYKKYQTNKTTGNTDKRAFVETWQSFYRKKLKEVWKPAV

SEQ ID NO: 38494 - protein, 978 aa, synthetic construct
  REGION 1..978: note = engineered CasX variant
QEIKRINKIRRRLVKDSNTKKAGKTGPMKTLLVRVMTPDLRERLENLRKKPENIPQPISNTSRANLNKLLTDYTEMKKAILHVYWEEFQVDPVGLMSRVAQPASKKIDQNKLKPEMDEKGNLTTAGFACSQCGQPLFVYKLEQVSEKGKAYTNYFGRCNVAEHEKLILLAQLKPEKDSDEAVTYSLGKFGQRALDFYSIHVTKESTHPVKPLAQIAGNRYASVPVGKALSDACMGTIASFLSKYQDIIIEHQKVVKGNQKRLESLRELAGKENLEYPSVTLPPQPHTKEGVDAYNEVIARVRMWVNLNLWQKLKLSRDDAKPLLRLKGFPSFPLVERQANEVDWWDMVCNVKKLINEKKEDGKVFWQNLAGYKRQEALRPYLSSEEDRKKGKKFARYQLGDLLLHLEKKHGEDWGKVYDEAWERIDKKVEGLSKHIKLEEERRSEDAQSKAALTDWLRAKASFVIEGLKEADKDEFCRCELKLQKWYGDLRGKPFAIEAENSILDISGFSKQYNCAFIWQKDGVKKLNLYLIINYFKGGKLRFKKIKPEAFEANRFYTVINKKSGEIVPMEVNFNFDDPNLIILPLAFGKRQGREFIWNDLLSLETGSLKLANGRVIEKTLYNRRTRQDEPALFVALTFERREVLDSSNIKPMNLIGVDRGENIPAVIALTDPEGCPLSRFKDSLGNPTHILRIGESYKEKQRTIQAKKEVEQRRAGGYSRKYASKAKNLADDMVRNTARDLLYYAVTQDAMLIFENLSRGFGRQGKRTFMAERQYTRMEDWLTAKLAYEGLPSKTYLSKTLAQYTSKTCSNCGFTITSADYDRMLEKLKKTATGWMTTINGKELKVEGQITYYNRYKRQNVVKDLSVELDRLSEESVNNDISSWTKGRSGEALSLLKKRFSHRPVQEKFVCLNCGFETHADEQAALNIARSWLFLRSQEYKKYQTNKTTGNTDKRAFVETWQSFYRKKLKEVWKPAV

SEQ ID NO: 38495 - protein, 978 aa, synthetic construct
  REGION 1..978: note = engineered CasX variant
QEIKRINKIRRRLVKDSNTKKAGKTGPMKTLLVRVMTPDLRERLENLRKKPENIPQPISNTSRANLNKLLTDYTEMKKAILHVYWEEFQVDPVGLMSRVAQPASKKIDQNKLKPEMDEKGNLTTAGFACSQCGQPLFVYKLEQVSEKGKAYTNYFGRCNVAEHEKLIKLAQLKPEKDSDEAVTYSLGKFGQRALDFYSIHVTKESTHPVKPLAQIAGNRYASGPVGKALSDACMGTIASFLSKYQDIIIEHQKVVKGNQKRLESLRELAGKENLEYPSVTLPPQPHTKEGVDAYNEVIARVRMWVNLNLWQKLKLSRDDAKPLLRLKGFPSFPLVERQANEVDWWDMVCNVKKLINEKKEDGKVFWQNLAGYKRQEALRPYLSSEEDRKKGKKFARYQLGDLLLHLEKKHGEDWGKVYDEAWERIDKKVEGLSKHIKLEEERRSEDAQSKAALTDWLRAKASFVIEGLKEADKDEFCRCELKLQKWYGDLRGKPFAIEAENSILDISGFSKQYNCAFIWQKDGVKKLNLYLIINYFKGGKLRFKKIKPEAFEANRFYTVINKKSGEIVPMEVNFNFDDPNLIILPLAFGKRQGREFIWNDLLSLETGSLKLANGRVIEKTLYNRRTRQDEPALFVALTFERREVLDSSNIKPMNLIGVDRGENIPAVIALTDPEGCPLSRFKDSLGNPTHILRIGESYKEKQRTIQAKKEVEQRRAGGYSRKYASKAKNLADDMVRNTARDLLYYAVTQDAMLIFENLSRGFGRQGKRTFMAERQYTRMEDWLTAKLAYEGLPSKTYLSKTLAQYTSKTCSNCGFTITSADYDRMLEKLKKTATGWMTTINGKELKVEGQITYYNRYKRQNVVKDLSVELDRLSEESVNNDISSWTKGRSGEALSLLKKRFSHRPVQEKFVCLNCGFETHADEQAALNIARSWLFLRSQEYKKYQTNKTTGNTDKRAFVETWQSFYRKKLKEVWKPAV

SEQ ID NO: 38496 - protein, 977 aa, synthetic construct
  REGION 1..977: note = engineered CasX variant
QEIKRINKIRRRLVKDSNTKKAGKTGPMKTLLVRVMTPDLRERLENLRKKPENIPQPISNTSRANLNKLLTDYTEMKKAILHVYWEEFQVDPVGLMSRVAQPASKKIDQNKLKPEMDEKGNLTTAGFACSQCGQPLFVYKLEQVSEKGKAYTNYFGRCNVAEHEKLILLAQLKPEKDSDEAVTYSLGKFGQRALDFYSIHVTKESTHPVKPLAQIAGNRYASPVGKALSDACMGTIASFLSKYQDIIIEHQKVVKGNQKRLESLRELAGKENLEYPSVTLPPQPHTKEGVDAYNEVIARVRMWVNLNLWQKLKLSRDDAKPLLRLKGFPSFPLVERQANEVDWWDMVCNVKKLINEKKEDGKVFWQNLAGYKRQEALRPYLSSEEDRKKGKKFARYQLGDLLLHLEKKHGEDWGKVYDEAWERIDKKVEGLSKHIKLEEERRSEDAQSKAALTDWLRAKASFVIEGLKEADKDEFCRCELKLQKWYGDLRGKPFAIEAENSILDISGFSKQYNCAFIWQKDGVKKLNLYLIINYFKGGKLRFKKIKPEAFEANRFYTVINKKSGEIVPMEVNFNFDDPNLIILPLAFGKRQGREFIWNDLLSLETGSLKLANGRVIEKTLYNRRTRQDEPALFVALTFERREVLDSSNIKPMNLIGVDRGENIPAVIALTDPEGCPLSRFKDSLGNPTHILRIGESYKEKQRTIQAKKEVEQRRAGGYSRKYASKAKNLADDMVRNTARDLLYYAVTQDAMLIFENLSRGFGRQGKRTFMAERQYTRMEDWLTAKLAYEGLPSKTYLSKTLAQYTSKTCSNCGFTITSADYDRMLEKLKKTATGWMTTINGKELKVEGQITYYNRYKRQNVVKDLSVELDRLSEESVNNDISSWTKGRSGEALSLLKKRFSHRPVQEKFVCLNCGFETHADEQAALNIARSWLFLRSQEYKKYQTNKTTGNTDKRAFVETWQSFYRKKLKEVWKPAV

SEQ ID NO: 38497 - protein, 978 aa, synthetic construct
  REGION 1..978: note = engineered CasX variant
QEIKRINKIRRRLVKDSNTKKAGKTGPMKTLLVRVMTPDLRERLENLRKKPENIPQPISNTSRANLNKLLTDYTEMKKAILHVYWEEFQVDPVGLMSRVAQPASKKIDQNKLKPEMDEKGNLTTAGFACSQCGQPLFVYKLEQVSEKGKAYTNYFGRCNVAEHEKLILLAQLKPEKDSDEAVTYSLGKFGQRALDFYSIHVTKESTHPVKPLAQIAGNRYASYPVGKALSDACMGTIASFLSKYQDIIIEHQKVVKGNQKRLESLRELAGKENLEYPSVTLPPQPHTKEGVDAYNEVIARVRMWVNLNLWQKLKLSRDDAKPLLRLKGFPSFPLVERQANEVDWWDMVCNVKKLINEKKEDGKVFWQNLAGYKRQEALRPYLSSEEDRKKGKKFARYQLGDLLLHLEKKHGEDWGKVYDEAWERIDKKVEGLSKHIKLEEERRSEDAQSKAALTDWLRAKASFVIEGLKEADKDEFCRCELKLQKWYGDLRGKPFAIEAENSILDISGFSKQYNCAFIWQKDGVKKLNLYLIINYFKGGKLRFKKIKPEAFEANRFYTVINKKSGEIVPMEVNFNFDDPNLIILPLAFGKRQGREFIWNDLLSLETGSLKLANGRVIEKTLYNRRTRQDEPALFVALTFERREVLDSSNIKPMNLIGVDRGENIPAVIALTDPEGCPLSRFKDSLGNPTHILRIGESYKEKQRTIQAKKEVEQRRAGGYSRKYASKAKNLADDMVRNTARDLLYYAVTQDAMLIFENLSRGFGRQGKRTFMAERQYTRMEDWLTAKLAYEGLPSKTYLSKTLAQYTSKTCSNCGFTITSADYDRVLEKLKKTATGWMTTINGKELKVEGQITYYNRYKRQNVVKDLSVELDRLSEESVNNDISSWTKGRQGEALSLLKKRFSHRPVQEKFVCLNCGFETHADEQAALNIARSWLFLRSQEYKKYQTNKTTGNTDKRAFVETWQSFYRKKLKEVWKPAV

SEQ ID NO: 38498 - protein, 978 aa, synthetic construct
  REGION 1..978: note = engineered CasX variant
QEIKRINKIRRRLVKDSNTKKAGKTGPMKTLLVRVMTPDLRERLENLRKKPENIPQPISNTSRANLNKLLTDYTEMKKAILHVYWEEFQVDPVGLMSRVAQPASKKIDQNKLKPEMDEKGNLTTAGFACSQCGQPLFVYKLEQVSEKGKAYTNYFGRCNVAEHEKLILLAQLKPEKDSDEAVTYSLGKFGQRALDFYSIHVTKESTHPVKPLAQIAGNRYASHPVGKALSDACMGTIASFLSKYQDIIIEHQKVVKGNQKRLESLRELAGKENLEYPSVTLPPQPHTKEGVDAYNEVIARVRMWVNLNLWQKLKLSRDDAKPLLRLKGFPSFPLVERQANEVDWWDMVCNVKKLINEKKEDGKVFWQNLAGYKRQEALRPYLSSEEDRKKGKKFARYQLGDLLLHLEKKHGEDWGKVYDEAWERIDKKVEGLSKHIKLEEERRSEDAQSKAALTDWLRAKASFVIEGLKEADKDEFCRCELKLQKWYGDLRGKPFAIEAENSILDISGFSKQYNCAFIWQKDGVKKLNLYLIINYFKGGKLRFKKIKPEAFEANRFYTVINKKSGEIVPMEVNFNFDDPNLIILPLAFGKRQGREFIWNDLLSLETGSLKLANGRVIEKTLYNRRTRQDEPALFVALTFERREVLDSSNIKPMNLIGVDRGENIPAVIALTDPEGCPLSRFKDSLGNPTHILRIGESYKEKQRTIQAKKEVEQRRAGGYSRKYASKAKNLADDMVRNTARDLLYYAVTQDAMLIFENLSRGFGRQGKRTFMAERQYTRMEDWLTAKLAYEGLPSKTYLSKTLAQYTSKTCSNCGFTITSADYDRVLEKLKKTATGWMTTINGKELKVEGQITYYNRYKRQNVVKDLSVELDRLSEESVNNDISSWTKGRQGEALSLLKKRFSHRPVQEKFVCLNCGFETHADEQAALNIARSWLFLRSQEYKKYQTNKTTGNTDKRAFVETWQSFYRKKLKEVWKPAV

SEQ ID NO: 38499 - protein, 978 aa, synthetic construct
  REGION 1..978: note = engineered CasX variant
QEIKRINKIRRRLVKDSNTKKAGKTGPMKTLLVRVMTPDLRERLENLRKKPENIPQPISNTSRANLNKLLTDYTEMKKAILHVYWEEFQVDPVGLMSRVAQPASKKIDQNKLKPEMDEKGNLTTAGFACSQCGQPLFVYKLEQVSEKGKAYTNYFGRCNVAEHEKLILLAQLKPEKDSDEAVTYSLGKFGQRALDFYSIHVTKESTHPVKPLAQIAGNRYASSPVGKALSDACMGTIASFLSKYQDIIIEHQKVVKGNQKRLESLRELAGKENLEYPSVTLPPQPHTKEGVDAYNEVIARVRMWVNLNLWQKLKLSRDDAKPLLRLKGFPSFPLVERQANEVDWWDMVCNVKKLINEKKEDGKVFWQNLAGYKRQEALRPYLSSEEDRKKGKKFARYQLGDLLLHLEKKHGEDWGKVYDEAWERIDKKVEGLSKHIKLEEERRSEDAQSKAALTDWLRAKASFVIEGLKEADKDEFCRCELKLQKWYGDLRGKPFAIEAENSILDISGFSKQYNCAFIWQKDGVKKLNLYLIINYFKGGKLRFKKIKPEAFEANRFYTVINKKSGEIVPMEVNFNFDDPNLIILPLAFGKRQGREFIWNDLLSLETGSLKLANGRVIEKTLYNRRTRQDEPALFVALTFERREVLDSSNIKPMNLIGVDRGENIPAVIALTDPEGCPLSRFKDSLGNPTHILRIGESYKEKQRTIQAKKEVEQRRAGGYSRKYASKAKNLADDMVRNTARDLLYYAVTQDAMLIFENLSRGFGRQGKRTFMAERQYTRMEDWLTAKLAYEGLPSKTYLSKTLAQYTSKTCSNCGFTITSADYDRVLEKLKKTATGWMTTINGKELKVEGQITYYNRYKRQNVVKDLSVELDRLSEESVNNDISSWTKGRQGEALSLLKKRFSHRPVQEKFVCLNCGFETHADEQAALNIARSWLFLRSQEYKKYQTNKTTGNTDKRAFVETWQSFYRKKLKEVWKPAV

SEQ ID NO: 38500 - protein, 978 aa, synthetic construct
  REGION 1..978: note = engineered CasX variant
QEIKRINKIRRRLVKDSNTKKAGKTGPMKTLLVRVMTPDLRERLENLRKKPENIPQPISNTSRANLNKLLTDYTEMKKAILHVYWEEFQVDPVGLMSRVAQPASKKIDQNKLKPEMDEKGNLTTAGFACSQCGQPLFVYKLEQVSEKGKAYTNYFGRCNVAEHEKLILLAQLKPEKDSDEAVTYSLGKFGQRALDFYSIHVTKESTHPVKPLAQIAGNRYASTPVGKALSDACMGTIASFLSKYQDIIIEHQKVVKGNQKRLESLRELAGKENLEYPSVTLPPQPHTKEGVDAYNEVIARVRMWVNLNLWQKLKLSRDDAKPLLRLKGFPSFPLVERQANEVDWWDMVCNVKKLINEKKEDGKVFWQNLAGYKRQEALRPYLSSEEDRKKGKKFARYQLGDLLLHLEKKHGEDWGKVYDEAWERIDKKVEGLSKHIKLEEERRSEDAQSKAALTDWLRAKASFVIEGLKEADKDEFCRCELKLQKWYGDLRGKPFAIEAENSILDISGFSKQYNCAFIWQKDGVKKLNLYLIINYFKGGKLRFKKIKPEAFEANRFYTVINKKSGEIVPMEVNFNFDDPNLIILPLAFGKRQGREFIWNDLLSLETGSLKLANGRVIEKTLYNRRTRQDEPALFVALTFERREVLDSSNIKPMNLIGVDRGENIPAVIALTDPEGCPLSRFKDSLGNPTHILRIGESYKEKQRTIQAKKEVEQRRAGGYSRKYASKAKNLADDMVRNTARDLLYYAVTQDAMLIFENLSRGFGRQGKRTFMAERQYTRMEDWLTAKLAYEGLPSKTYLSKTLAQYTSKTCSNCGFTITSADYDRVLEKLKKTATGWMTTINGKELKVEGQITYYNRYKRQNVVKDLSVELDRLSEESVNNDISSWTKGRQGEALSLLKKRFSHRPVQEKFVCLNCGFETHADEQAALNIARSWLFLRSQEYKKYQTNKTTGNTDKRAFVETWQSFYRKKLKEVWKPAV

SEQ ID NO: 38501 - protein, 978 aa, synthetic construct
  REGION 1..978: note = engineered CasX variant
QEIKRINKIRRRLVKDSNTKKAGKTGPMKTLLVRVMTPDLRERLENLRKKPENIPQPISNTSRANLNKLLTDYTEMKKAILHVYWEEFQVDPVGLMSRVAQPASKKIDQNKLKPEMDEKGNLTTAGFACSQCGQPLFVYKLEQVSEKGKAYTNYFGRCNVAEHEKLILLAQLKPEKDSDEAVTYSLGKFGQRALDFYSIHVTKESTHPVKPLAQIAGNRYASAPVGKALSDACMGTIASFLSKYQDIIIEHQKVVKGNQKRLESLRELAGKENLEYPSVTLPPQPHTKEGVDAYNEVIARVRMWVNLNLWQKLKLSRDDAKPLLRLKGFPSFPLVERQANEVDWWDMVCNVKKLINEKKEDGKVFWQNLAGYKRQEALRPYLSSEEDRKKGKKFARYQLGDLLLHLEKKHGEDWGKVYDEAWERIDKKVEGLSKHIKLEEERRSEDAQSKAALTDWLRAKASFVIEGLKEADKDEFCRCELKLQKWYGDLRGKPFAIEAENSILDISGFSKQYNCAFIWQKDGVKKLNLYLIINYFKGGKLRFKKIKPEAFEANRFYTVINKKSGEIVPMEVNFNFDDPNLIILPLAFGKRQGREFIWNDLLSLETGSLKLANGRVIEKTLYNRRTRQDEPALFVALTFERREVLDSSNIKPMNLIGVDRGENIPAVIALTDPEGCPLSRFKDSLGNPTHILRIGESYKEKQRTIQAKKEVEQRRAGGYSRKYASKAKNLADDMVRNTARDLLYYAVTQDAMLIFENLSRGFGRQGKRTFMAERQYTRMEDWLTAKLAYEGLPSKTYLSKTLAQYTSKTCSNCGFTITSADYDRVLEKLKKTATGWMTTINGKELKVEGQITYYNRYKRQNVVKDLSVELDRLSEESVNNDISSWTKGRQGEALSLLKKRFSHRPVQEKFVCLNCGFETHADEQAALNIARSWLFLRSQEYKKYQTNKTTGNTDKRAFVETWQSFYRKKLKEVWKPAV

SEQ ID NO: 38502 - protein, 978 aa, synthetic construct
  REGION 1..978: note = engineered CasX variant
QEIKRINKIRRRLVKDSNTKKAGKTGPMKTLLVRVMTPDLRERLENLRKKPENIPQPISNTSRANLNKLLTDYTEMKKAILHVYWEEFQVDPVGLMSRVAQPASKKIDQNKLKPEMDEKGNLTTAGFACSQCGQPLFVYKLEQVSEKGKAYTNYFGRCNVAEHEKLILLAQLKPEKDSDEAVTYSLGKFGQRALDFYSIHVTKESTHPVKPLAQIAGNRYASVPVGKALSDACMGTIASFLSKYQDIIIEHQKVVKGNQKRLESLRELAGKENLEYPSVTLPPQPHTKEGVDAYNEVIARVRMWVNLNLWQKLKLSRDDAKPLLRLKGFPSFPLVERQANEVDWWDMVCNVKKLINEKKEDGKVFWQNLAGYKRQEALRPYLSSEEDRKKGKKFARYQLGDLLLHLEKKHGEDWGKVYDEAWERIDKKVEGLSKHIKLEEERRSEDAQSKAALTDWLRAKASFVIEGLKEADKDEFCRCELKLQKWYGDLRGKPFAIEAENSILDISGFSKQYNCAFIWQKDGVKKLNLYLIINYFKGGKLRFKKIKPEAFEANRFYTVINKKSGEIVPMEVNFNFDDPNLIILPLAFGKRQGREFIWNDLLSLETGSLKLANGRVIEKTLYNRRTRQDEPALFVALTFERREVLDSSNIKPMNLIGVDRGENIPAVIALTDPEGCPLSRFKDSLGNPTHILRIGESYKEKQRTIQAKKEVEQRRAGGYSRKYASKAKNLADDMVRNTARDLLYYAVTQDAMLIFENLSRGFGRQGKRTFMAERQYTRMEDWLTAKLAYEGLPSKTYLSKTLAQYTSKTCSNCGFTITSADYDRVLEKLKKTATGWMTTINGKELKVEGQITYYNRYKRQNVVKDLSVELDRLSEESVNNDISSWTKGRQGEALSLLKKRFSHRPVQEKFVCLNCGFETHADEQAALNIARSWLFLRSQEYKKYQTNKTTGNTDKRAFVETWQSFYRKKLKEVWKPAV

SEQ ID NO: 38503 - protein, 978 aa, synthetic construct
  REGION 1..978: note = engineered CasX variant
QEIKRINKIRRRLVKDSNTKKAGKTGPMKTLLVRVMTPDLRERLENLRKKPENIPQPISNTSRANLNKLLTDYTEMKKAILHVYWEEFQVDPVGLMSRVAQPASKKIDQNKLKPEMDEKGNLTTAGFACSQCGQPLFVYKLEQVSEKGKAYTNYFGRCNVAEHEKLIKLAQLKPEKDSDEAVTYSLGKFGQRALDFYSIHVTKESTHPVKPLAQIAGNRYASGPVGKALSDACMGTIASFLSKYQDIIIEHQKVVKGNQKRLESLRELAGKENLEYPSVTLPPQPHTKEGVDAYNEVIARVRMWVNLNLWQKLKLSRDDAKPLLRLKGFPSFPLVERQANEVDWWDMVCNVKKLINEKKEDGKVFWQNLAGYKRQEALRPYLSSEEDRKKGKKFARYQLGDLLLHLEKKHGEDWGKVYDEAWERIDKKVEGLSKHIKLEEERRSEDAQSKAALTDWLRAKASFVIEGLKEADKDEFCRCELKLQKWYGDLRGKPFAIEAENSILDISGFSKQYNCAFIWQKDGVKKLNLYLIINYFKGGKLRFKKIKPEAFEANRFYTVINKKSGEIVPMEVNFNFDDPNLIILPLAFGKRQGREFIWNDLLSLETGSLKLANGRVIEKTLYNRRTRQDEPALFVALTFERREVLDSSNIKPMNLIGVDRGENIPAVIALTDPEGCPLSRFKDSLGNPTHILRIGESYKEKQRTIQAKKEVEQRRAGGYSRKYASKAKNLADDMVRNTARDLLYYAVTQDAMLIFENLSRGFGRQGKRTFMAERQYTRMEDWLTAKLAYEGLPSKTYLSKTLAQYTSKTCSNCGFTITSADYDRVLEKLKKTATGWMTTINGKELKVEGQITYYNRYKRQNVVKDLSVELDRLSEESVNNDISSWTKGRQGEALSLLKKRFSHRPVQEKFVCLNCGFETHADEQAALNIARSWLFLRSQEYKKYQTNKTTGNTDKRAFVETWQSFYRKKLKEVWKPAV

SEQ ID NO: 38504 - protein, 977 aa, synthetic construct
  REGION 1..977: note = engineered CasX variant
QEIKRINKIRRRLVKDSNTKKAGKTGPMKTLLVRVMTPDLRERLENLRKKPENIPQPISNTSRANLNKLLTDYTEMKKAILHVYWEEFQVDPVGLMSRVAQPASKKIDQNKLKPEMDEKGNLTTAGFACSQCGQPLFVYKLEQVSEKGKAYTNYFGRCNVAEHEKLILLAQLKPEKDSDEAVTYSLGKFGQRALDFYSIHVTKESTHPVKPLAQIAGNRYASPVGKALSDACMGTIASFLSKYQDIIIEHQKVVKGNQKRLESLRELAGKENLEYPSVTLPPQPHTKEGVDAYNEVIARVRMWVNLNLWQKLKLSRDDAKPLLRLKGFPSFPLVERQANEVDWWDMVCNVKKLINEKKEDGKVFWQNLAGYKRQEALRPYLSSEEDRKKGKKFARYQLGDLLLHLEKKHGEDWGKVYDEAWERIDKKVEGLSKHIKLEEERRSEDAQSKAALTDWLRAKASFVIEGLKEADKDEFCRCELKLQKWYGDLRGKPFAIEAENSILDISGFSKQYNCAFIWQKDGVKKLNLYLIINYFKGGKLRFKKIKPEAFEANRFYTVINKKSGEIVPMEVNFNFDDPNLIILPLAFGKRQGREFIWNDLLSLETGSLKLANGRVIEKTLYNRRTRQDEPALFVALTFERREVLDSSNIKPMNLIGVDRGENIPAVIALTDPEGCPLSRFKDSLGNPTHILRIGESYKEKQRTIQAKKEVEQRRAGGYSRKYASKAKNLADDMVRNTARDLLYYAVTQDAMLIFENLSRGFGRQGKRTFMAERQYTRMEDWLTAKLAYEGLPSKTYLSKTLAQYTSKTCSNCGFTITSADYDRVLEKLKKTATGWMTTINGKELKVEGQITYYNRYKRQNVVKDLSVELDRLSEESVNNDISSWTKGRQGEALSLLKKRFSHRPVQEKFVCLNCGFETHADEQAALNIARSWLFLRSQEYKKYQTNKTTGNTDKRAFVETWQSFYRKKLKEVWKPAV

SEQ ID NO: 38505 - protein, 978 aa, synthetic construct
  REGION 1..978: note = engineered CasX variant
QEIKRINKIRRRLVKDSNTKKAGKTGPMKTLLVRVMTPDLRERLENLRKKPENIPQPISNTSRANLNKLLTDYTEMKKAILHVYWEEFQVDPVGLMSRVAQPASKKIDQNKLKPEMDEKGNLTTAGFACSQCGQPLFVYKLEQVSEKGKAYTNYFGRCNVAEHEKLILLAQLKPEKDSDEAVTYSLGKFGQRALDFYSIHVTKESTHPVKPLAQIAGNRYASYPVGKALSDACMGTIASFLSKYQDIIIEHQKVVKGNQKRLESLRELAGKENLEYPSVTLPPQPHTKEGVDAYNEVIARVRMWVNLNLWQKLKLSRDDAKPLLRLKGFPSFPLVERQANEVDWWDMVCNVKKLINEKKEDGKVFWQNLAGYKRQEALRPYLSSEEDRKKGKKFARYQLGDLLLHLEKKHGEDWGKVYDEAWERIDKKVEGLSKHIKLEEERRSEDAQSKAALTDWLRAKASFVIEGLKEADKDEFCRCELKLQKWYGDLRGKPFAIEAENSILDISGFSKQYNCAFIWQKDGVKKLNLYLIINYFKGGKLRFKKIKPEAFEANRFYTVINKKSGEIVPMEVNFNFDDPNLIILPLAFGKRQGREFIWNDLLSLETGSLKLANGRVIEKTLYNRRTRQDEPALFVALTFERREVLDSSNIKPMNLIGVDRGENIPAVIALTDPEGCPLSRFKDSLGNPTHILRIGESYKEKQRTIQAKKEVEQRRAGGYSRKYASKAKNLADDMVRNTARDLLYYAVTQDAMLIFENLSRGFGRQGKRTFMAERQYTRMEDWLTAKLAYEGLPSKTYLSKTLAQYTSKTCSNCGFTITSADYDRVLEKLKKTATGWMTTINGKELKVEGQITYYNRYKRQNVVKDLSVELDRLSEESVNNDISSWTKGRSGEALSLLKKRFSHRPVQEKFVCLNCEFETHADEQAALNIARSWLFLRSQEYKKYQTNKTTGNTDKRAFVETWQSFYRKKLKEVWKPAV

SEQ ID NO: 38506 - protein, 978 aa, synthetic construct
  REGION 1..978: note = engineered CasX variant
QEIKRINKIRRRLVKDSNTKKAGKTGPMKTLLVRVMTPDLRERLENLRKKPENIPQPISNTSRANLNKLLTDYTEMKKAILHVYWEEFQVDPVGLMSRVAQPASKKIDQNKLKPEMDEKGNLTTAGFACSQCGQPLFVYKLEQVSEKGKAYTNYFGRCNVAEHEKLILLAQLKPEKDSDEAVTYSLGKFGQRALDFYSIHVTKESTHPVKPLAQIAGNRYASHPVGKALSDACMGTIASFLSKYQDIIIEHQKVVKGNQKRLESLRELAGKENLEYPSVTLPPQPHTKEGVDAYNEVIARVRMWVNLNLWQKLKLSRDDAKPLLRLKGFPSFPLVERQANEVDWWDMVCNVKKLINEKKEDGKVFWQNLAGYKRQEALRPYLSSEEDRKKGKKFARYQLGDLLLHLEKKHGEDWGKVYDEAWERIDKKVEGLSKHIKLEEERRSEDAQSKAALTDWLRAKASFVIEGLKEADKDEFCRCELKLQKWYGDLRGKPFAIEAENSILDISGFSKQYNCAFIWQKDGVKKLNLYLIINYFKGGKLRFKKIKPEAFEANRFYTVINKKSGEIVPMEVNFNFDDPNLIILPLAFGKRQGREFIWNDLLSLETGSLKLANGRVIEKTLYNRRTRQDEPALFVALTFERREVLDSSNIKPMNLIGVDRGENIPAVIALTDPEGCPLSRFKDSLGNPTHILRIGESYKEKQRTIQAKKEVEQRRAGGYSRKYASKAKNLADDMVRNTARDLLYYAVTQDAMLIFENLSRGFGRQGKRTFMAERQYTRMEDWLTAKLAYEGLPSKTYLSKTLAQYTSKTCSNCGFTITSADYDRVLEKLKKTATGWMTTINGKELKVEGQITYYNRYKRQNVVKDLSVELDRLSEESVNNDISSWTKGRSGEALSLLKKRFSHRPVQEKFVCLNCEFETHADEQAALNIARSWLFLRSQEYKKYQTNKTTGNTDKRAFVETWQSFYRKKLKEVWKPAV

SEQ ID NO: 38507 - protein, 978 aa, synthetic construct
  REGION 1..978: note = engineered CasX variant
QEIKRINKIRRRLVKDSNTKKAGKTGPMKTLLVRVMTPDLRERLENLRKKPENIPQPISNTSRANLNKLLTDYTEMKKAILHVYWEEFQVDPVGLMSRVAQPASKKIDQNKLKPEMDEKGNLTTAGFACSQCGQPLFVYKLEQVSEKGKAYTNYFGRCNVAEHEKLILLAQLKPEKDSDEAVTYSLGKFGQRALDFYSIHVTKESTHPVKPLAQIAGNRYASSPVGKALSDACMGTIASFLSKYQDIIIEHQKVVKGNQKRLESLRELAGKENLEYPSVTLPPQPHTKEGVDAYNEVIARVRMWVNLNLWQKLKLSRDDAKPLLRLKGFPSFPLVERQANEVDWWDMVCNVKKLINEKKEDGKVFWQNLAGYKRQEALRPYLSSEEDRKKGKKFARYQLGDLLLHLEKKHGEDWGKVYDEAWERIDKKVEGLSKHIKLEEERRSEDAQSKAALTDWLRAKASFVIEGLKEADKDEFCRCELKLQKWYGDLRGKPFAIEAENSILDISGFSKQYNCAFIWQKDGVKKLNLYLIINYFKGGKLRFKKIKPEAFEANRFYTVINKKSGEIVPMEVNFNFDDPNLIILPLAFGKRQGREFIWNDLLSLETGSLKLANGRVIEKTLYNRRTRQDEPALFVALTFERREVLDSSNIKPMNLIGVDRGENIPAVIALTDPEGCPLSRFKDSLGNPTHILRIGESYKEKQRTIQAKKEVEQRRAGGYSRKYASKAKNLADDMVRNTARDLLYYAVTQDAMLIFENLSRGFGRQGKRTFMAERQYTRMEDWLTAKLAYEGLPSKTYLSKTLAQYTSKTCSNCGFTITSADYDRVLEKLKKTATGWMTTINGKELKVEGQITYYNRYKRQNVVKDLSVELDRLSEESVNNDISSWTKGRSGEALSLLKKRFSHRPVQEKFVCLNCEFETHADEQAALNIARSWLFLRSQEYKKYQTNKTTGNTDKRAFVETWQSFYRKKLKEVWKPAV

SEQ ID NO: 38508 - protein, 978 aa, synthetic construct
  REGION 1..978: note = engineered CasX variant
QEIKRINKIRRRLVKDSNTKKAGKTGPMKTLLVRVMTPDLRERLENLRKKPENIPQPISNTSRANLNKLLTDYTEMKKAILHVYWEEFQVDPVGLMSRVAQPASKKIDQNKLKPEMDEKGNLTTAGFACSQCGQPLFVYKLEQVSEKGKAYTNYFGRCNVAEHEKLILLAQLKPEKDSDEAVTYSLGKFGQRALDFYSIHVTKESTHPVKPLAQIAGNRYASTPVGKALSDACMGTIASFLSKYQDIIIEHQKVVKGNQKRLESLRELAGKENLEYPSVTLPPQPHTKEGVDAYNEVIARVRMWVNLNLWQKLKLSRDDAKPLLRLKGFPSFPLVERQANEVDWWDMVCNVKKLINEKKEDGKVFWQNLAGYKRQEALRPYLSSEEDRKKGKKFARYQLGDLLLHLEKKHGEDWGKVYDEAWERIDKKVEGLSKHIKLEEERRSEDAQSKAALTDWLRAKASFVIEGLKEADKDEFCRCELKLQKWYGDLRGKPFAIEAENSILDISGFSKQYNCAFIWQKDGVKKLNLYLIINYFKGGKLRFKKIKPEAFEANRFYTVINKKSGEIVPMEVNFNFDDPNLIILPLAFGKRQGREFIWNDLLSLETGSLKLANGRVIEKTLYNRRTRQDEPALFVALTFERREVLDSSNIKPMNLIGVDRGENIPAVIALTDPEGCPLSRFKDSLGNPTHILRIGESYKEKQRTIQAKKEVEQRRAGGYSRKYASKAKNLADDMVRNTARDLLYYAVTQDAMLIFENLSRGFGRQGKRTFMAERQYTRMEDWLTAKLAYEGLPSKTYLSKTLAQYTSKTCSNCGFTITSADYDRVLEKLKKTATGWMTTINGKELKVEGQITYYNRYKRQNVVKDLSVELDRLSEESVNNDISSWTKGRSGEALSLLKKRFSHRPVQEKFVCLNCEFETHADEQAALNIARSWLFLRSQEYKKYQTNKTTGNTDKRAFVETWQSFYRKKLKEVWKPAV

SEQ ID NO: 38509 - protein, 978 aa, synthetic construct
  REGION 1..978: note = engineered CasX variant
QEIKRINKIRRRLVKDSNTKKAGKTGPMKTLLVRVMTPDLRERLENLRKKPENIPQPISNTSRANLNKLLTDYTEMKKAILHVYWEEFQVDPVGLMSRVAQPASKKIDQNKLKPEMDEKGNLTTAGFACSQCGQPLFVYKLEQVSEKGKAYTNYFGRCNVAEHEKLILLAQLKPEKDSDEAVTYSLGKFGQRALDFYSIHVTKESTHPVKPLAQIAGNRYASAPVGKALSDACMGTIASFLSKYQDIIIEHQKVVKGNQKRLESLRELAGKENLEYPSVTLPPQPHTKEGVDAYNEVIARVRMWVNLNLWQKLKLSRDDAKPLLRLKGFPSFPLVERQANEVDWWDMVCNVKKLINEKKEDGKVFWQNLAGYKRQEALRPYLSSEEDRKKGKKFARYQLGDLLLHLEKKHGEDWGKVYDEAWERIDKKVEGLSKHIKLEEERRSEDAQSKAALTDWLRAKASFVIEGLKEADKDEFCRCELKLQKWYGDLRGKPFAIEAENSILDISGFSKQYNCAFIWQKDGVKKLNLYLIINYFKGGKLRFKKIKPEAFEANRFYTVINKKSGEIVPMEVNFNFDDPNLIILPLAFGKRQGREFIWNDLLSLETGSLKLANGRVIEKTLYNRRTRQDEPALFVALTFERREVLDSSNIKPMNLIGVDRGENIPAVIALTDPEGCPLSRFKDSLGNPTHILRIGESYKEKQRTIQAKKEVEQRRAGGYSRKYASKAKNLADDMVRNTARDLLYYAVTQDAMLIFENLSRGFGRQGKRTFMAERQYTRMEDWLTAKLAYEGLPSKTYLSKTLAQYTSKTCSNCGFTITSADYDRVLEKLKKTATGWMTTINGKELKVEGQITYYNRYKRQNVVKDLSVELDRLSEESVNNDISSWTKGRSGEALSLLKKRFSHRPVQEKFVCLNCEFETHADEQAALNIARSWLFLRSQEYKKYQTNKTTGNTDKRAFVETWQSFYRKKLKEVWKPAV

SEQ ID NO: 38510 - protein, 978 aa, synthetic construct
  REGION 1..978: note = engineered CasX variant
QEIKRINKIRRRLVKDSNTKKAGKTGPMKTLLVRVMTPDLRERLENLRKKPENIPQPISNTSRANLNKLLTDYTEMKKAILHVYWEEFQVDPVGLMSRVAQPASKKIDQNKLKPEMDEKGNLTTAGFACSQCGQPLFVYKLEQVSEKGKAYTNYFGRCNVAEHEKLILLAQLKPEKDSDEAVTYSLGKFGQRALDFYSIHVTKESTHPVKPLAQIAGNRYASVPVGKALSDACMGTIASFLSKYQDIIIEHQKVVKGNQKRLESLRELAGKENLEYPSVTLPPQPHTKEGVDAYNEVIARVRMWVNLNLWQKLKLSRDDAKPLLRLKGFPSFPLVERQANEVDWWDMVCNVKKLINEKKEDGKVFWQNLAGYKRQEALRPYLSSEEDRKKGKKFARYQLGDLLLHLEKKHGEDWGKVYDEAWERIDKKVEGLSKHIKLEEERRSEDAQSKAALTDWLRAKASFVIEGLKEADKDEFCRCELKLQKWYGDLRGKPFAIEAENSILDISGFSKQYNCAFIWQKDGVKKLNLYLIINYFKGGKLRFKKIKPEAFEANRFYTVINKKSGEIVPMEVNFNFDDPNLIILPLAFGKRQGREFIWNDLLSLETGSLKLANGRVIEKTLYNRRTRQDEPALFVALTFERREVLDSSNIKPMNLIGVDRGENIPAVIALTDPEGCPLSRFKDSLGNPTHILRIGESYKEKQRTIQAKKEVEQRRAGGYSRKYASKAKNLADDMVRNTARDLLYYAVTQDAMLIFENLSRGFGRQGKRTFMAERQYTRMEDWLTAKLAYEGLPSKTYLSKTLAQYTSKTCSNCGFTITSADYDRVLEKLKKTATGWMTTINGKELKVEGQITYYNRYKRQNVVKDLSVELDRLSEESVNNDISSWTKGRSGEALSLLKKRFSHRPVQEKFVCLNCEFETHADEQAALNIARSWLFLRSQEYKKYQTNKTTGNTDKRAFVETWQSFYRKKLKEVWKPAV

SEQ ID NO: 38511 - protein, 978 aa, synthetic construct
  REGION 1..978: note = engineered CasX variant
QEIKRINKIRRRLVKDSNTKKAGKTGPMKTLLVRVMTPDLRERLENLRKKPENIPQPISNTSRANLNKLLTDYTEMKKAILHVYWEEFQVDPVGLMSRVAQPASKKIDQNKLKPEMDEKGNLTTAGFACSQCGQPLFVYKLEQVSEKGKAYTNYFGRCNVAEHEKLIKLAQLKPEKDSDEAVTYSLGKFGQRALDFYSIHVTKESTHPVKPLAQIAGNRYASGPVGKALSDACMGTIASFLSKYQDIIIEHQKVVKGNQKRLESLRELAGKENLEYPSVTLPPQPHTKEGVDAYNEVIARVRMWVNLNLWQKLKLSRDDAKPLLRLKGFPSFPLVERQANEVDWWDMVCNVKKLINEKKEDGKVFWQNLAGYKRQEALRPYLSSEEDRKKGKKFARYQLGDLLLHLEKKHGEDWGKVYDEAWERIDKKVEGLSKHIKLEEERRSEDAQSKAALTDWLRAKASFVIEGLKEADKDEFCRCELKLQKWYGDLRGKPFAIEAENSILDISGFSKQYNCAFIWQKDGVKKLNLYLIINYFKGGKLRFKKIKPEAFEANRFYTVINKKSGEIVPMEVNFNFDDPNLIILPLAFGKRQGREFIWNDLLSLETGSLKLANGRVIEKTLYNRRTRQDEPALFVALTFERREVLDSSNIKPMNLIGVDRGENIPAVIALTDPEGCPLSRFKDSLGNPTHILRIGESYKEKQRTIQAKKEVEQRRAGGYSRKYASKAKNLADDMVRNTARDLLYYAVTQDAMLIFENLSRGFGRQGKRTFMAERQYTRMEDWLTAKLAYEGLPSKTYLSKTLAQYTSKTCSNCGFTITSADYDRVLEKLKKTATGWMTTINGKELKVEGQITYYNRYKRQNVVKDLSVELDRLSEESVNNDISSWTKGRSGEALSLLKKRFSHRPVQEKFVCLNCEFETHADEQAALNIARSWLFLRSQEYKKYQTNKTTGNTDKRAFVETWQSFYRKKLKEVWKPAV

SEQ ID NO: 38512 - protein, 977 aa, synthetic construct
  REGION 1..977: note = engineered CasX variant
QEIKRINKIRRRLVKDSNTKKAGKTGPMKTLLVRVMTPDLRERLENLRKKPENIPQPISNTSRANLNKLLTDYTEMKKAILHVYWEEFQVDPVGLMSRVAQPASKKIDQNKLKPEMDEKGNLTTAGFACSQCGQPLFVYKLEQVSEKGKAYTNYFGRCNVAEHEKLILLAQLKPEKDSDEAVTYSLGKFGQRALDFYSIHVTKESTHPVKPLAQIAGNRYASPVGKALSDACMGTIASFLSKYQDIIIEHQKVVKGNQKRLESLRELAGKENLEYPSVTLPPQPHTKEGVDAYNEVIARVRMWVNLNLWQKLKLSRDDAKPLLRLKGFPSFPLVERQANEVDWWDMVCNVKKLINEKKEDGKVFWQNLAGYKRQEALRPYLSSEEDRKKGKKFARYQLGDLLLHLEKKHGEDWGKVYDEAWERIDKKVEGLSKHIKLEEERRSEDAQSKAALTDWLRAKASFVIEGLKEADKDEFCRCELKLQKWYGDLRGKPFAIEAENSILDISGFSKQYNCAFIWQKDGVKKLNLYLIINYFKGGKLRFKKIKPEAFEANRFYTVINKKSGEIVPMEVNFNFDDPNLIILPLAFGKRQGREFIWNDLLSLETGSLKLANGRVIEKTLYNRRTRQDEPALFVALTFERREVLDSSNIKPMNLIGVDRGENIPAVIALTDPEGCPLSRFKDSLGNPTHILRIGESYKEKQRTIQAKKEVEQRRAGGYSRKYASKAKNLADDMVRNTARDLLYYAVTQDAMLIFENLSRGFGRQGKRTFMAERQYTRMEDWLTAKLAYEGLPSKTYLSKTLAQYTSKTCSNCGFTITSADYDRVLEKLKKTATGWMTTINGKELKVEGQITYYNRYKRQNVVKDLSVELDRLSEESVNNDISSWTKGRSGEALSLLKKRFSHRPVQEKFVCLNCEFETHADEQAALNIARSWLFLRSQEYKKYQTNKTTGNTDKRAFVETWQSFYRKKLKEVWKPAV

SEQ ID NO: 38513 - protein, 979 aa, synthetic construct
  REGION 1..979: note = engineered CasX variant
QEIKRINKIRRRLVKDSNTKKAGKTGPMKTLLVRVMTPDLRERLENLRKKPENIPQPISNTSRANLNKLLTDYTEMKKAILHVYWEEFQVDPVGLMSRVAQPASKKIDQNKLKPEMDEKGNLTTAGFACSQCGQPLFVYKLEQVSEKGKAYTNYFGRCNVAEHEKLILLAQLKPEKDSDEAVTYSLGKFGQRALDFYSIHVTKESTHPVKPLAQIAGNRYASYPVGKALSDACMGTIASFLSKYQDIIIEHQKVVKGNQKRLESLRELAGKENLEYPSVTLPPQPHTKEGVDAYNEVIARVRMWVNLNLWQKLKLSRDDAKPLLRLKGFPSFPLVERQANEVDWWDMVCNVKKLINEKKEDGKVFWQNLAGYKRQEALRPYLSSEEDRKKGKKFARYQLGDLLLHLEKKHGEDWGKVYDEAWERIDKKVEGLSKHIKLEEERRSEDAQSKAALTDWLRAKASFVIEGLKEADKDEFCRCELKLQKWYGDLRGKPFAIEAENSILDISGFSKQYNCAFIWQKDGVKKLNLYLIINYFKGGKLRFKKIKPEAFEANRFYTVINKKSGEIVPMEVNFNFDDPNLIILPLAFGKRQGREFIWNDLLSLETGSLKLANGRVIEKTLYNRRTRQDEPALFVALTFERREVLDSSNIKPMNLIGVDRGENIPAVIALTDPEGCPLSRFKDSLGNPTHILRIGESYKEKQRTIQAKKEVEQRRAGGYSRKYASKAKNLADDMVRNTARDLLYYAVTQDAMLIFENLSRGFGRQGKRTFMAERQYTRMEDWLTAKLAYEGLPSKTYLSKTLAQYTSKTCSNCGFTITSADYDRVLEKLKKTATGWMTTINGKELKVEGQITYYNRYKRQNVVKDLSVELDRLSEESVNNDISSWTKGRSGEALSLLKKRFSHRPVQEKFVCLNCGFETHADEQAALNIARSWLFLRSQEYKKYQTNKTSTGNTDKRAFVETWQSFYRKKLKEVWKPAV

SEQ ID NO: 38514 - protein, 979 aa, synthetic construct
  REGION 1..979: note = engineered CasX variant
QEIKRINKIRRRLVKDSNTKKAGKTGPMKTLLVRVMTPDLRERLENLRKKPENIPQPISNTSRANLNKLLTDYTEMKKAILHVYWEEFQVDPVGLMSRVAQPASKKIDQNKLKPEMDEKGNLTTAGFACSQCGQPLFVYKLEQVSEKGKAYTNYFGRCNVAEHEKLILLAQLKPEKDSDEAVTYSLGKFGQRALDFYSIHVTKESTHPVKPLAQIAGNRYASHPVGKALSDACMGTIASFLSKYQDIIIEHQKVVKGNQKRLESLRELAGKENLEYPSVTLPPQPHTKEGVDAYNEVIARVRMWVNLNLWQKLKLSRDDAKPLLRLKGFPSFPLVERQANEVDWWDMVCNVKKLINEKKEDGKVFWQNLAGYKRQEALRPYLSSEEDRKKGKKFARYQLGDLLLHLEKKHGEDWGKVYDEAWERIDKKVEGLSKHIKLEEERRSEDAQSKAALTDWLRAKASFVIEGLKEADKDEFCRCELKLQKWYGDLRGKPFAIEAENSILDISGFSKQYNCAFIWQKDGVKKLNLYLIINYFKGGKLRFKKIKPEAFEANRFYTVINKKSGEIVPMEVNFNFDDPNLIILPLAFGKRQGREFIWNDLLSLETGSLKLANGRVIEKTLYNRRTRQDEPALFVALTFERREVLDSSNIKPMNLIGVDRGENIPAVIALTDPEGCPLSRFKDSLGNPTHILRIGESYKEKQRTIQAKKEVEQRRAGGYSRKYASKAKNLADDMVRNTARDLLYYAVTQDAMLIFENLSRGFGRQGKRTFMAERQYTRMEDWLTAKLAYEGLPSKTYLSKTLAQYTSKTCSNCGFTITSADYDRVLEKLKKTATGWMTTINGKELKVEGQITYYNRYKRQNVVKDLSVELDRLSEESVNNDISSWTKGRSGEALSLLKKRFSHRPVQEKFVCLNCGFETHADEQAALNIARSWLFLRSQEYKKYQTNKTSTGNTDKRAFVETWQSFYRKKLKEVWKPAV

SEQ ID NO: 38515 - protein, 979 aa, synthetic construct
  REGION 1..979: note = engineered CasX variant
QEIKRINKIRRRLVKDSNTKKAGKTGPMKTLLVRVMTPDLRERLENLRKKPENIPQPISNTSRANLNKLLTDYTEMKKAILHVYWEEFQVDPVGLMSRVAQPASKKIDQNKLKPEMDEKGNLTTAGFACSQCGQPLFVYKLEQVSEKGKAYTNYFGRCNVAEHEKLILLAQLKPEKDSDEAVTYSLGKFGQRALDFYSIHVTKESTHPVKPLAQIAGNRYASSPVGKALSDACMGTIASFLSKYQDIIIEHQKVVKGNQKRLESLRELAGKENLEYPSVTLPPQPHTKEGVDAYNEVIARVRMWVNLNLWQKLKLSRDDAKPLLRLKGFPSFPLVERQANEVDWWDMVCNVKKLINEKKEDGKVFWQNLAGYKRQEALRPYLSSEEDRKKGKKFARYQLGDLLLHLEKKHGEDWGKVYDEAWERIDKKVEGLSKHIKLEEERRSEDAQSKAALTDWLRAKASFVIEGLKEADKDEFCRCELKLQKWYGDLRGKPFAIEAENSILDISGFSKQYNCAFIWQKDGVKKLNLYLIINYFKGGKLRFKKIKPEAFEANRFYTVINKKSGEIVPMEVNFNFDDPNLIILPLAFGKRQGREFIWNDLLSLETGSLKLANGRVIEKTLYNRRTRQDEPALFVALTFERREVLDSSNIKPMNLIGVDRGENIPAVIALTDPEGCPLSRFKDSLGNPTHILRIGESYKEKQRTIQAKKEVEQRRAGGYSRKYASKAKNLADDMVRNTARDLLYYAVTQDAMLIFENLSRGFGRQGKRTFMAERQYTRMEDWLTAKLAYEGLPSKTYLSKTLAQYTSKTCSNCGFTITSADYDRVLEKLKKTATGWMTTINGKELKVEGQITYYNRYKRQNVVKDLSVELDRLSEESVNNDISSWTKGRSGEALSLLKKRFSHRPVQEKFVCLNCGFETHADEQAALNIARSWLFLRSQEYKKYQTNKTSTGNTDKRAFVETWQSFYRKKLKEVWKPAV

SEQ ID NO: 38516 - protein, 979 aa, synthetic construct
  REGION 1..979: note = engineered CasX variant
QEIKRINKIRRRLVKDSNTKKAGKTGPMKTLLVRVMTPDLRERLENLRKKPENIPQPISNTSRANLNKLLTDYTEMKKAILHVYWEEFQVDPVGLMSRVAQPASKKIDQNKLKPEMDEKGNLTTAGFACSQCGQPLFVYKLEQVSEKGKAYTNYFGRCNVAEHEKLILLAQLKPEKDSDEAVTYSLGKFGQRALDFYSIHVTKESTHPVKPLAQIAGNRYASTPVGKALSDACMGTIASFLSKYQDIIIEHQKVVKGNQKRLESLRELAGKENLEYPSVTLPPQPHTKEGVDAYNEVIARVRMWVNLNLWQKLKLSRDDAKPLLRLKGFPSFPLVERQANEVDWWDMVCNVKKLINEKKEDGKVFWQNLAGYKRQEALRPYLSSEEDRKKGKKFARYQLGDLLLHLEKKHGEDWGKVYDEAWERIDKKVEGLSKHIKLEEERRSEDAQSKAALTDWLRAKASFVIEGLKEADKDEFCRCELKLQKWYGDLRGKPFAIEAENSILDISGFSKQYNCAFIWQKDGVKKLNLYLIINYFKGGKLRFKKIKPEAFEANRFYTVINKKSGEIVPMEVNFNFDDPNLIILPLAFGKRQGREFIWNDLLSLETGSLKLANGRVIEKTLYNRRTRQDEPALFVALTFERREVLDSSNIKPMNLIGVDRGENIPAVIALTDPEGCPLSRFKDSLGNPTHILRIGESYKEKQRTIQAKKEVEQRRAGGYSRKYASKAKNLADDMVRNTARDLLYYAVTQDAMLIFENLSRGFGRQGKRTFMAERQYTRMEDWLTAKLAYEGLPSKTYLSKTLAQYTSKTCSNCGFTITSADYDRVLEKLKKTATGWMTTINGKELKVEGQITYYNRYKRQNVVKDLSVELDRLSEESVNNDISSWTKGRSGEALSLLKKRFSHRPVQEKFVCLNCGFETHADEQAALNIARSWLFLRSQEYKKYQTNKTSTGNTDKRAFVETWQSFYRKKLKEVWKPAV

SEQ ID NO: 38517 - protein, 979 aa, synthetic construct
  REGION 1..979: note = engineered CasX variant
QEIKRINKIRRRLVKDSNTKKAGKTGPMKTLLVRVMTPDLRERLENLRKKPENIPQPISNTSRANLNKLLTDYTEMKKAILHVYWEEFQVDPVGLMSRVAQPASKKIDQNKLKPEMDEKGNLTTAGFACSQCGQPLFVYKLEQVSEKGKAYTNYFGRCNVAEHEKLILLAQLKPEKDSDEAVTYSLGKFGQRALDFYSIHVTKESTHPVKPLAQIAGNRYASAPVGKALSDACMGTIASFLSKYQDIIIEHQKVVKGNQKRLESLRELAGKENLEYPSVTLPPQPHTKEGVDAYNEVIARVRMWVNLNLWQKLKLSRDDAKPLLRLKGFPSFPLVERQANEVDWWDMVCNVKKLINEKKEDGKVFWQNLAGYKRQEALRPYLSSEEDRKKGKKFARYQLGDLLLHLEKKHGEDWGKVYDEAWERIDKKVEGLSKHIKLEEERRSEDAQSKAALTDWLRAKASFVIEGLKEADKDEFCRCELKLQKWYGDLRGKPFAIEAENSILDISGFSKQYNCAFIWQKDGVKKLNLYLIINYFKGGKLRFKKIKPEAFEANRFYTVINKKSGEIVPMEVNFNFDDPNLIILPLAFGKRQGREFIWNDLLSLETGSLKLANGRVIEKTLYNRRTRQDEPALFVALTFERREVLDSSNIKPMNLIGVDRGENIPAVIALTDPEGCPLSRFKDSLGNPTHILRIGESYKEKQRTIQAKKEVEQRRAGGYSRKYASKAKNLADDMVRNTARDLLYYAVTQDAMLIFENLSRGFGRQGKRTFMAERQYTRMEDWLTAKLAYEGLPSKTYLSKTLAQYTSKTCSNCGFTITSADYDRVLEKLKKTATGWMTTINGKELKVEGQITYYNRYKRQNVVKDLSVELDRLSEESVNNDISSWTKGRSGEALSLLKKRFSHRPVQEKFVCLNCGFETHADEQAALNIARSWLFLRSQEYKKYQTNKTSTGNTDKRAFVETWQSFYRKKLKEVWKPAV

SEQ ID NO: 38518 - protein, 979 aa, synthetic construct
  REGION 1..979: note = engineered CasX variant
QEIKRINKIRRRLVKDSNTKKAGKTGPMKTLLVRVMTPDLRERLENLRKKPENIPQPISNTSRANLNKLLTDYTEMKKAILHVYWEEFQVDPVGLMSRVAQPASKKIDQNKLKPEMDEKGNLTTAGFACSQCGQPLFVYKLEQVSEKGKAYTNYFGRCNVAEHEKLILLAQLKPEKDSDEAVTYSLGKFGQRALDFYSIHVTKESTHPVKPLAQIAGNRYASVPVGKALSDACMGTIASFLSKYQDIIIEHQKVVKGNQKRLESLRELAGKENLEYPSVTLPPQPHTKEGVDAYNEVIARVRMWVNLNLWQKLKLSRDDAKPLLRLKGFPSFPLVERQANEVDWWDMVCNVKKLINEKKEDGKVFWQNLAGYKRQEALRPYLSSEEDRKKGKKFARYQLGDLLLHLEKKHGEDWGKVYDEAWERIDKKVEGLSKHIKLEEERRSEDAQSKAALTDWLRAKASFVIEGLKEADKDEFCRCELKLQKWYGDLRGKPFAIEAENSILDISGFSKQYNCAFIWQKDGVKKLNLYLIINYFKGGKLRFKKIKPEAFEANRFYTVINKKSGEIVPMEVNFNFDDPNLIILPLAFGKRQGREFIWNDLLSLETGSLKLANGRVIEKTLYNRRTRQDEPALFVALTFERREVLDSSNIKPMNLIGVDRGENIPAVIALTDPEGCPLSRFKDSLGNPTHILRIGESYKEKQRTIQAKKEVEQRRAGGYSRKYASKAKNLADDMVRNTARDLLYYAVTQDAMLIFENLSRGFGRQGKRTFMAERQYTRMEDWLTAKLAYEGLPSKTYLSKTLAQYTSKTCSNCGFTITSADYDRVLEKLKKTATGWMTTINGKELKVEGQITYYNRYKRQNVVKDLSVELDRLSEESVNNDISSWTKGRSGEALSLLKKRFSHRPVQEKFVCLNCGFETHADEQAALNIARSWLFLRSQEYKKYQTNKTSTGNTDKRAFVETWQSFYRKKLKEVWKPAV

SEQ ID NO: 38519 - protein, 979 aa, synthetic construct
  REGION 1..979: note = engineered CasX variant
QEIKRINKIRRRLVKDSNTKKAGKTGPMKTLLVRVMTPDLRERLENLRKKPENIPQPISNTSRANLNKLLTDYTEMKKAILHVYWEEFQVDPVGLMSRVAQPASKKIDQNKLKPEMDEKGNLTTAGFACSQCGQPLFVYKLEQVSEKGKAYTNYFGRCNVAEHEKLIKLAQLKPEKDSDEAVTYSLGKFGQRALDFYSIHVTKESTHPVKPLAQIAGNRYASGPVGKALSDACMGTIASFLSKYQDIIIEHQKVVKGNQKRLESLRELAGKENLEYPSVTLPPQPHTKEGVDAYNEVIARVRMWVNLNLWQKLKLSRDDAKPLLRLKGFPSFPLVERQANEVDWWDMVCNVKKLINEKKEDGKVFWQNLAGYKRQEALRPYLSSEEDRKKGKKFARYQLGDLLLHLEKKHGEDWGKVYDEAWERIDKKVEGLSKHIKLEEERRSEDAQSKAALTDWLRAKASFVIEGLKEADKDEFCRCELKLQKWYGDLRGKPFAIEAENSILDISGFSKQYNCAFIWQKDGVKKLNLYLIINYFKGGKLRFKKIKPEAFEANRFYTVINKKSGEIVPMEVNFNFDDPNLIILPLAFGKRQGREFIWNDLLSLETGSLKLANGRVIEKTLYNRRTRQDEPALFVALTFERREVLDSSNIKPMNLIGVDRGENIPAVIALTDPEGCPLSRFKDSLGNPTHILRIGESYKEKQRTIQAKKEVEQRRAGGYSRKYASKAKNLADDMVRNTARDLLYYAVTQDAMLIFENLSRGFGRQGKRTFMAERQYTRMEDWLTAKLAYEGLPSKTYLSKTLAQYTSKTCSNCGFTITSADYDRVLEKLKKTATGWMTTINGKELKVEGQITYYNRYKRQNVVKDLSVELDRLSEESVNNDISSWTKGRSGEALSLLKKRFSHRPVQEKFVCLNCGFETHADEQAALNIARSWLFLRSQEYKKYQTNKTSTGNTDKRAFVETWQSFYRKKLKEVWKPAV

SEQ ID NO: 38520 - protein, 978 aa, synthetic construct
  REGION 1..978: note = engineered CasX variant
QEIKRINKIRRRLVKDSNTKKAGKTGPMKTLLVRVMTPDLRERLENLRKKPENIPQPISNTSRANLNKLLTDYTEMKKAILHVYWEEFQVDPVGLMSRVAQPASKKIDQNKLKPEMDEKGNLTTAGFACSQCGQPLFVYKLEQVSEKGKAYTNYFGRCNVAEHEKLILLAQLKPEKDSDEAVTYSLGKFGQRALDFYSIHVTKESTHPVKPLAQIAGNRYASPVGKALSDACMGTIASFLSKYQDIIIEHQKVVKGNQKRLESLRELAGKENLEYPSVTLPPQPHTKEGVDAYNEVIARVRMWVNLNLWQKLKLSRDDAKPLLRLKGFPSFPLVERQANEVDWWDMVCNVKKLINEKKEDGKVFWQNLAGYKRQEALRPYLSSEEDRKKGKKFARYQLGDLLLHLEKKHGEDWGKVYDEAWERIDKKVEGLSKHIKLEEERRSEDAQSKAALTDWLRAKASFVIEGLKEADKDEFCRCELKLQKWYGDLRGKPFAIEAENSILDISGFSKQYNCAFIWQKDGVKKLNLYLIINYFKGGKLRFKKIKPEAFEANRFYTVINKKSGEIVPMEVNFNFDDPNLIILPLAFGKRQGREFIWNDLLSLETGSLKLANGRVIEKTLYNRRTRQDEPALFVALTFERREVLDSSNIKPMNLIGVDRGENIPAVIALTDPEGCPLSRFKDSLGNPTHILRIGESYKEKQRTIQAKKEVEQRRAGGYSRKYASKAKNLADDMVRNTARDLLYYAVTQDAMLIFENLSRGFGRQGKRTFMAERQYTRMEDWLTAKLAYEGLPSKTYLSKTLAQYTSKTCSNCGFTITSADYDRVLEKLKKTATGWMTTINGKELKVEGQITYYNRYKRQNVVKDLSVELDRLSEESVNNDISSWTKGRSGEALSLLKKRFSHRPVQEKFVCLNCGFETHADEQAALNIARSWLFLRSQEYKKYQTNKTSTGNTDKRAFVETWQSFYRKKLKEVWKPAV

SEQ ID NO: 38521 - protein, 979 aa, synthetic construct
  REGION 1..979: note = engineered CasX variant
QEIKRINKIRRRLVKDSNTKKAGKTGPMKTLLVRVMTPDLRERLENLRKKPENIPQPISNTSRANLNKLLTDYTEMKKAILHVYWEEFQVDPVGLMSRVAQPASKKIDQNKLKPEMDEKGNLTTAGFACSQCGQPLFVYKLEQVSEKGKAYTNYFGRCNVAEHEKLILLAQLKPEKDSDEAVTYSLGKFGQRALDFYSIHVTKESTHPVKPLAQIAGNRYASYPVGKALSDACMGTIASFLSKYQDIIIEHQKVVKGNQKRLESLRELAGKENLEYPSVTLPPQPHTKEGVDAYNEVIARVRMWVNLNLWQKLKLSRDDAKPLLRLKGFPSFPLVERQANEVDWWDMVCNVKKLINEKKEDGKVFWQNLAGYKRQEALRPYLSSEEDRKKGKKFARYQLGDLLLHLEKKHGEDWGKVYDEAWERIDKKVEGLSKHIKLEEERRSEDAQSKAALTDWLRAKASFVIEGLKEADKDEFCRCELKLQKWYGDLRGKPFAIEAENSILDISGFSKQYNCAFIWQKDGVKKLNLYLIINYFKGGKLRFKKIKPEAFEANRFYTVINKKSGEIVPMEVNFNFDDPNLIILPLAFGKRQGREFIWNDLLSLETGSLKLANGRVIEKTLYNRRTRQDEPALFVALTFERREVLDSSNIKPMNLIGVDRGENIPAVIALTDPEGCPLSRFKDSLGNPTHILRIGESYKEKQRTIQAKKEVEQRRAGGYSRKYASKAKNLADDMVRNTARDLLYYAVTQDAMLIFENLSRGFGRQGKRTFMAERQYTRMEDWLTAKLAYEGLPSKTYLSKTLAQYTSKTCSNCGFTITSADYDRVLEKLKKTATGWMTTINGKELKVEGQITYYNRYKRQNVVKDLSVELDRLSEESVNNDISSWTKGRSGEALSLLKKRFSHRPVQEKFVCLNCGFETHADEQAALNIARSWLFLRSQEYKKYQTNKTTGKNTDKRAFVETWQSFYRKKLKEVWKPAV

SEQ ID NO: 38522 - protein, 979 aa, synthetic construct
  REGION 1..979: note = engineered CasX variant
QEIKRINKIRRRLVKDSNTKKAGKTGPMKTLLVRVMTPDLRERLENLRKKPENIPQPISNTSRANLNKLLTDYTEMKKAILHVYWEEFQVDPVGLMSRVAQPASKKIDQNKLKPEMDEKGNLTTAGFACSQCGQPLFVYKLEQVSEKGKAYTNYFGRCNVAEHEKLILLAQLKPEKDSDEAVTYSLGKFGQRALDFYSIHVTKESTHPVKPLAQIAGNRYASHPVGKALSDACMGTIASFLSKYQDIIIEHQKVVKGNQKRLESLRELAGKENLEYPSVTLPPQPHTKEGVDAYNEVIARVRMWVNLNLWQKLKLSRDDAKPLLRLKGFPSFPLVERQANEVDWWDMVCNVKKLINEKKEDGKVFWQNLAGYKRQEALRPYLSSEEDRKKGKKFARYQLGDLLLHLEKKHGEDWGKVYDEAWERIDKKVEGLSKHIKLEEERRSEDAQSKAALTDWLRAKASFVIEGLKEADKDEFCRCELKLQKWYGDLRGKPFAIEAENSILDISGFSKQYNCAFIWQKDGVKKLNLYLIINYFKGGKLRFKKIKPEAFEANRFYTVINKKSGEIVPMEVNFNFDDPNLIILPLAFGKRQGREFIWNDLLSLETGSLKLANGRVIEKTLYNRRTRQDEPALFVALTFERREVLDSSNIKPMNLIGVDRGENIPAVIALTDPEGCPLSRFKDSLGNPTHILRIGESYKEKQRTIQAKKEVEQRRAGGYSRKYASKAKNLADDMVRNTARDLLYYAVTQDAMLIFENLSRGFGRQGKRTFMAERQYTRMEDWLTAKLAYEGLPSKTYLSKTLAQYTSKTCSNCGFTITSADYDRVLEKLKKTATGWMTTINGKELKVEGQITYYNRYKRQNVVKDLSVELDRLSEESVNNDISSWTKGRSGEALSLLKKRFSHRPVQEKFVCLNCGFETHADEQAALNIARSWLFLRSQEYKKYQTNKTTGKNTDKRAFVETWQSFYRKKLKEVWKPAV

SEQ ID NO: 38523 - protein, 979 aa, synthetic construct
  REGION 1..979: note = engineered CasX variant
QEIKRINKIRRRLVKDSNTKKAGKTGPMKTLLVRVMTPDLRERLENLRKKPENIPQPISNTSRANLNKLLTDYTEMKKAILHVYWEEFQVDPVGLMSRVAQPASKKIDQNKLKPEMDEKGNLTTAGFACSQCGQPLFVYKLEQVSEKGKAYTNYFGRCNVAEHEKLILLAQLKPEKDSDEAVTYSLGKFGQRALDFYSIHVTKESTHPVKPLAQIAGNRYASSPVGKALSDACMGTIASFLSKYQDIIIEHQKVVKGNQKRLESLRELAGKENLEYPSVTLPPQPHTKEGVDAYNEVIARVRMWVNLNLWQKLKLSRDDAKPLLRLKGFPSFPLVERQANEVDWWDMVCNVKKLINEKKEDGKVFWQNLAGYKRQEALRPYLSSEEDRKKGKKFARYQLGDLLLHLEKKHGEDWGKVYDEAWERIDKKVEGLSKHIKLEEERRSEDAQSKAALTDWLRAKASFVIEGLKEADKDEFCRCELKLQKWYGDLRGKPFAIEAENSILDISGFSKQYNCAFIWQKDGVKKLNLYLIINYFKGGKLRFKKIKPEAFEANRFYTVINKKSGEIVPMEVNFNFDDPNLIILPLAFGKRQGREFIWNDLLSLETGSLKLANGRVIEKTLYNRRTRQDEPALFVALTFERREVLDSSNIKPMNLIGVDRGENIPAVIALTDPEGCPLSRFKDSLGNPTHILRIGESYKEKQRTIQAKKEVEQRRAGGYSRKYASKAKNLADDMVRNTARDLLYYAVTQDAMLIFENLSRGFGRQGKRTFMAERQYTRMEDWLTAKLAYEGLPSKTYLSKTLAQYTSKTCSNCGFTITSADYDRVLEKLKKTATGWMTTINGKELKVEGQITYYNRYKRQNVVKDLSVELDRLSEESVNNDISSWTKGRSGEALSLLKKRFSHRPVQEKFVCLNCGFETHADEQAALNIARSWLFLRSQEYKKYQTNKTTGKNTDKRAFVETWQSFYRKKLKEVWKPAV

SEQ ID NO: 38524 - protein, 979 aa, synthetic construct
  REGION 1..979: note = engineered CasX variant
QEIKRINKIRRRLVKDSNTKKAGKTGPMKTLLVRVMTPDLRERLENLRKKPENIPQPISNTSRANLNKLLTDYTEMKKAILHVYWEEFQVDPVGLMSRVAQPASKKIDQNKLKPEMDEKGNLTTAGFACSQCGQPLFVYKLEQVSEKGKAYTNYFGRCNVAEHEKLILLAQLKPEKDSDEAVTYSLGKFGQRALDFYSIHVTKESTHPVKPLAQIAGNRYASTPVGKALSDACMGTIASFLSKYQDIIIEHQKVVKGNQKRLESLRELAGKENLEYPSVTLPPQPHTKEGVDAYNEVIARVRMWVNLNLWQKLKLSRDDAKPLLRLKGFPSFPLVERQANEVDWWDMVCNVKKLINEKKEDGKVFWQNLAGYKRQEALRPYLSSEEDRKKGKKFARYQLGDLLLHLEKKHGEDWGKVYDEAWERIDKKVEGLSKHIKLEEERRSEDAQSKAALTDWLRAKASFVIEGLKEADKDEFCRCELKLQKWYGDLRGKPFAIEAENSILDISGFSKQYNCAFIWQKDGVKKLNLYLIINYFKGGKLRFKKIKPEAFEANRFYTVINKKSGEIVPMEVNFNFDDPNLIILPLAFGKRQGREFIWNDLLSLETGSLKLANGRVIEKTLYNRRTRQDEPALFVALTFERREVLDSSNIKPMNLIGVDRGENIPAVIALTDPEGCPLSRFKDSLGNPTHILRIGESYKEKQRTIQAKKEVEQRRAGGYSRKYASKAKNLADDMVRNTARDLLYYAVTQDAMLIFENLSRGFGRQGKRTFMAERQYTRMEDWLTAKLAYEGLPSKTYLSKTLAQYTSKTCSNCGFTITSADYDRVLEKLKKTATGWMTTINGKELKVEGQITYYNRYKRQNVVKDLSVELDRLSEESVNNDISSWTKGRSGEALSLLKKRFSHRPVQEKFVCLNCGFETHADEQAALNIARSWLFLRSQEYKKYQTNKTTGKNTDKRAFVETWQSFYRKKLKEVWKPAV

SEQ ID NO: 38525 - protein, 979 aa, synthetic construct
  REGION 1..979: note = engineered CasX variant
QEIKRINKIRRRLVKDSNTKKAGKTGPMKTLLVRVMTPDLRERLENLRKKPENIPQPISNTSRANLNKLLTDYTEMKKAILHVYWEEFQVDPVGLMSRVAQPASKKIDQNKLKPEMDEKGNLTTAGFACSQCGQPLFVYKLEQVSEKGKAYTNYFGRCNVAEHEKLILLAQLKPEKDSDEAVTYSLGKFGQRALDFYSIHVTKESTHPVKPLAQIAGNRYASAPVGKALSDACMGTIASFLSKYQDIIIEHQKVVKGNQKRLESLRELAGKENLEYPSVTLPPQPHTKEGVDAYNEVIARVRMWVNLNLWQKLKLSRDDAKPLLRLKGFPSFPLVERQANEVDWWDMVCNVKKLINEKKEDGKVFWQNLAGYKRQEALRPYLSSEEDRKKGKKFARYQLGDLLLHLEKKHGEDWGKVYDEAWERIDKKVEGLSKHIKLEEERRSEDAQSKAALTDWLRAKASFVIEGLKEADKDEFCRCELKLQKWYGDLRGKPFAIEAENSILDISGFSKQYNCAFIWQKDGVKKLNLYLIINYFKGGKLRFKKIKPEAFEANRFYTVINKKSGEIVPMEVNFNFDDPNLIILPLAFGKRQGREFIWNDLLSLETGSLKLANGRVIEKTLYNRRTRQDEPALFVALTFERREVLDSSNIKPMNLIGVDRGENIPAVIALTDPEGCPLSRFKDSLGNPTHILRIGESYKEKQRTIQAKKEVEQRRAGGYSRKYASKAKNLADDMVRNTARDLLYYAVTQDAMLIFENLSRGFGRQGKRTFMAERQYTRMEDWLTAKLAYEGLPSKTYLSKTLAQYTSKTCSNCGFTITSADYDRVLEKLKKTATGWMTTINGKELKVEGQITYYNRYKRQNVVKDLSVELDRLSEESVNNDISSWTKGRSGEALSLLKKRFSHRPVQEKFVCLNCGFETHADEQAALNIARSWLFLRSQEYKKYQTNKTTGKNTDKRAFVETWQSFYRKKLKEVWKPAV

SEQ ID NO: 38526 - protein, 979 aa, synthetic construct
  REGION 1..979: note = engineered CasX variant
QEIKRINKIRRRLVKDSNTKKAGKTGPMKTLLVRVMTPDLRERLENLRKKPENIPQPISNTSRANLNKLLTDYTEMKKAILHVYWEEFQVDPVGLMSRVAQPASKKIDQNKLKPEMDEKGNLTTAGFACSQCGQPLFVYKLEQVSEKGKAYTNYFGRCNVAEHEKLILLAQLKPEKDSDEAVTYSLGKFGQRALDFYSIHVTKESTHPVKPLAQIAGNRYASVPVGKALSDACMGTIASFLSKYQDIIIEHQKVVKGNQKRLESLRELAGKENLEYPSVTLPPQPHTKEGVDAYNEVIARVRMWVNLNLWQKLKLSRDDAKPLLRLKGFPSFPLVERQANEVDWWDMVCNVKKLINEKKEDGKVFWQNLAGYKRQEALRPYLSSEEDRKKGKKFARYQLGDLLLHLEKKHGEDWGKVYDEAWERIDKKVEGLSKHIKLEEERRSEDAQSKAALTDWLRAKASFVIEGLKEADKDEFCRCELKLQKWYGDLRGKPFAIEAENSILDISGFSKQYNCAFIWQKDGVKKLNLYLIINYFKGGKLRFKKIKPEAFEANRFYTVINKKSGEIVPMEVNFNFDDPNLIILPLAFGKRQGREFIWNDLLSLETGSLKLANGRVIEKTLYNRRTRQDEPALFVALTFERREVLDSSNIKPMNLIGVDRGENIPAVIALTDPEGCPLSRFKDSLGNPTHILRIGESYKEKQRTIQAKKEVEQRRAGGYSRKYASKAKNLADDMVRNTARDLLYYAVTQDAMLIFENLSRGFGRQGKRTFMAERQYTRMEDWLTAKLAYEGLPSKTYLSKTLAQYTSKTCSNCGFTITSADYDRVLEKLKKTATGWMTTINGKELKVEGQITYYNRYKRQNVVKDLSVELDRLSEESVNNDISSWTKGRSGEALSLLKKRFSHRPVQEKFVCLNCGFETHADEQAALNIARSWLFLRSQEYKKYQTNKTTGKNTDKRAFVETWQSFYRKKLKEVWKPAV

SEQ ID NO: 38527 - protein, 979 aa, synthetic construct
  REGION 1..979: note = engineered CasX variant
QEIKRINKIRRRLVKDSNTKKAGKTGPMKTLLVRVMTPDLRERLENLRKKPENIPQPISNTSRANLNKLLTDYTEMKKAILHVYWEEFQVDPVGLMSRVAQPASKKIDQNKLKPEMDEKGNLTTAGFACSQCGQPLFVYKLEQVSEKGKAYTNYFGRCNVAEHEKLIKLAQLKPEKDSDEAVTYSLGKFGQRALDFYSIHVTKESTHPVKPLAQIAGNRYASGPVGKALSDACMGTIASFLSKYQDIIIEHQKVVKGNQKRLESLRELAGKENLEYPSVTLPPQPHTKEGVDAYNEVIARVRMWVNLNLWQKLKLSRDDAKPLLRLKGFPSFPLVERQANEVDWWDMVCNVKKLINEKKEDGKVFWQNLAGYKRQEALRPYLSSEEDRKKGKKFARYQLGDLLLHLEKKHGEDWGKVYDEAWERIDKKVEGLSKHIKLEEERRSEDAQSKAALTDWLRAKASFVIEGLKEADKDEFCRCELKLQKWYGDLRGKPFAIEAENSILDISGFSKQYNCAFIWQKDGVKKLNLYLIINYFKGGKLRFKKIKPEAFEANRFYTVINKKSGEIVPMEVNFNFDDPNLIILPLAFGKRQGREFIWNDLLSLETGSLKLANGRVIEKTLYNRRTRQDEPALFVALTFERREVLDSSNIKPMNLIGVDRGENIPAVIALTDPEGCPLSRFKDSLGNPTHILRIGESYKEKQRTIQAKKEVEQRRAGGYSRKYASKAKNLADDMVRNTARDLLYYAVTQDAMLIFENLSRGFGRQGKRTFMAERQYTRMEDWLTAKLAYEGLPSKTYLSKTLAQYTSKTCSNCGFTITSADYDRVLEKLKKTATGWMTTINGKELKVEGQITYYNRYKRQNVVKDLSVELDRLSEESVNNDISSWTKGRSGEALSLLKKRFSHRPVQEKFVCLNCGFETHADEQAALNIARSWLFLRSQEYKKYQTNKTTGKNTDKRAFVETWQSFYRKKLKEVWKPAV

SEQ ID NO: 38528 - protein, 978 aa, synthetic construct
  REGION 1..978: note = engineered CasX variant
QEIKRINKIRRRLVKDSNTKKAGKTGPMKTLLVRVMTPDLRERLENLRKKPENIPQPISNTSRANLNKLLTDYTEMKKAILHVYWEEFQVDPVGLMSRVAQPASKKIDQNKLKPEMDEKGNLTTAGFACSQCGQPLFVYKLEQVSEKGKAYTNYFGRCNVAEHEKLILLAQLKPEKDSDEAVTYSLGKFGQRALDFYSIHVTKESTHPVKPLAQIAGNRYASPVGKALSDACMGTIASFLSKYQDIIIEHQKVVKGNQKRLESLRELAGKENLEYPSVTLPPQPHTKEGVDAYNEVIARVRMWVNLNLWQKLKLSRDDAKPLLRLKGFPSFPLVERQANEVDWWDMVCNVKKLINEKKEDGKVFWQNLAGYKRQEALRPYLSSEEDRKKGKKFARYQLGDLLLHLEKKHGEDWGKVYDEAWERIDKKVEGLSKHIKLEEERRSEDAQSKAALTDWLRAKASFVIEGLKEADKDEFCRCELKLQKWYGDLRGKPFAIEAENSILDISGFSKQYNCAFIWQKDGVKKLNLYLIINYFKGGKLRFKKIKPEAFEANRFYTVINKKSGEIVPMEVNFNFDDPNLIILPLAFGKRQGREFIWNDLLSLETGSLKLANGRVIEKTLYNRRTRQDEPALFVALTFERREVLDSSNIKPMNLIGVDRGENIPAVIALTDPEGCPLSRFKDSLGNPTHILRIGESYKEKQRTIQAKKEVEQRRAGGYSRKYASKAKNLADDMVRNTARDLLYYAVTQDAMLIFENLSRGFGRQGKRTFMAERQYTRMEDWLTAKLAYEGLPSKTYLSKTLAQYTSKTCSNCGFTITSADYDRVLEKLKKTATGWMTTINGKELKVEGQITYYNRYKRQNVVKDLSVELDRLSEESVNNDISSWTKGRSGEALSLLKKRFSHRPVQEKFVCLNCGFETHADEQAALNIARSWLFLRSQEYKKYQTNKTTGKNTDKRAFVETWQSFYRKKLKEVWKPAV

SEQ ID NO: 38529 - protein, 978 aa, synthetic construct
  REGION 1..978: note = engineered CasX variant
QEIKRINKIRRRLVKDSNTKKAGKTGPMKTLLVRVMTPDLRERLENLRKKPENIPQPISNTSRANLNKLLTDYTEMKKAILHVYWEEFQVDPVGLMSRVAQPASKKIDQNKLKPEMDEKGNLTTAGFACSQCGQPLFVYKLEQVSEKGKAYTNYFGRCNVAEHEKLILLAQLKPEKDSDEAVTYSLGKFGQRALDFYSIHVTKESTHPVKPLAQIAGNRYASYPVGKALSDACMGTIASFLSKYQDIIIEHQKVVKGNQKRLESLRELAGKENLEYPSVTLPPQPHTKEGVDAYNEVIARVRMWVNLNLWQKLKLSRDDAKPLLRLKKFPSFPLVERQANEVDWWDMVCNVKKLINEKKEDGKVFWQNLAGYKRQEALRPYLSSEEDRKKGKKFARYQLGDLLLHLEKKHGEDWGKVYDEAWERIDKKVEGLSKHIKLEEERRSEDAQSKAALTDWLRAKASFVIEGLKEADKDEFCRCELKLQKWYGDLRGKPFAIEAENSILDISGFSKQYNCAFIWQKDGVKKLNLYLIINYFKGGKLRFKKIKPEAFEANRFYTVINKKSGEIVPMEVNFNFDDPNLIILPLAFGKRQGREFIWNDLLSLETGSLKLANGRVIEKTLYNRRTRQDEPALFVALTFERREVLDSSNIKPMNLIGVDRGENIPAVIALTDPEGCPLSRFKDSLGNPTHILRIGESYKEKQRTIQAKKEVEQRRAGGYSRKYASKAKNLADDMVRNTARDLLYYAVTQDAMLIFENLSRGFGRQGKRTFMAERQYTRMEDWLTAKLAYEGLPSKTYLSKTLAQYTSKTCSNCGFTITSADYDRVLEKLKKTATGWMTTINGKELKVEGQITYYNRYKRQNVVKDLSVELDRLSEESVNNDISSWTKGRSGEALSLLKKRFSHRPVQEKFVCLNCGFETHADEQAALNIARSWLFLRSQEYKKYQTNKTTGNTDKRAFVETWQSFYRKKLKEVWKPAV

SEQ ID NO: 38530 - protein, 978 aa, synthetic construct
  REGION 1..978: note = engineered CasX variant
QEIKRINKIRRRLVKDSNTKKAGKTGPMKTLLVRVMTPDLRERLENLRKKPENIPQPISNTSRANLNKLLTDYTEMKKAILHVYWEEFQVDPVGLMSRVAQPASKKIDQNKLKPEMDEKGNLTTAGFACSQCGQPLFVYKLEQVSEKGKAYTNYFGRCNVAEHEKLILLAQLKPEKDSDEAVTYSLGKFGQRALDFYSIHVTKESTHPVKPLAQIAGNRYASHPVGKALSDACMGTIASFLSKYQDIIIEHQKVVKGNQKRLESLRELAGKENLEYPSVTLPPQPHTKEGVDAYNEVIARVRMWVNLNLWQKLKLSRDDAKPLLRLKKFPSFPLVERQANEVDWWDMVCNVKKLINEKKEDGKVFWQNLAGYKRQEALRPYLSSEEDRKKGKKFARYQLGDLLLHLEKKHGEDWGKVYDEAWERIDKKVEGLSKHIKLEEERRSEDAQSKAALTDWLRAKASFVIEGLKEADKDEFCRCELKLQKWYGDLRGKPFAIEAENSILDISGFSKQYNCAFIWQKDGVKKLNLYLIINYFKGGKLRFKKIKPEAFEANRFYTVINKKSGEIVPMEVNFNFDDPNLIILPLAFGKRQGREFIWNDLLSLETGSLKLANGRVIEKTLYNRRTRQDEPALFVALTFERREVLDSSNIKPMNLIGVDRGENIPAVIALTDPEGCPLSRFKDSLGNPTHILRIGESYKEKQRTIQAKKEVEQRRAGGYSRKYASKAKNLADDMVRNTARDLLYYAVTQDAMLIFENLSRGFGRQGKRTFMAERQYTRMEDWLTAKLAYEGLPSKTYLSKTLAQYTSKTCSNCGFTITSADYDRVLEKLKKTATGWMTTINGKELKVEGQITYYNRYKRQNVVKDLSVELDRLSEESVNNDISSWTKGRSGEALSLLKKRFSHRPVQEKFVCLNCGFETHADEQAALNIARSWLFLRSQEYKKYQTNKTTGNTDKRAFVETWQSFYRKKLKEVWKPAV

SEQ ID NO: 38531 - protein, 978 aa, synthetic construct
  REGION 1..978: note = engineered CasX variant
QEIKRINKIRRRLVKDSNTKKAGKTGPMKTLLVRVMTPDLRERLENLRKKPENIPQPISNTSRANLNKLLTDYTEMKKAILHVYWEEFQVDPVGLMSRVAQPASKKIDQNKLKPEMDEKGNLTTAGFACSQCGQPLFVYKLEQVSEKGKAYTNYFGRCNVAEHEKLILLAQLKPEKDSDEAVTYSLGKFGQRALDFYSIHVTKESTHPVKPLAQIAGNRYASSPVGKALSDACMGTIASFLSKYQDIIIEHQKVVKGNQKRLESLRELAGKENLEYPSVTLPPQPHTKEGVDAYNEVIARVRMWVNLNLWQKLKLSRDDAKPLLRLKKFPSFPLVERQANEVDWWDMVCNVKKLINEKKEDGKVFWQNLAGYKRQEALRPYLSSEEDRKKGKKFARYQLGDLLLHLEKKHGEDWGKVYDEAWERIDKKVEGLSKHIKLEEERRSEDAQSKAALTDWLRAKASFVIEGLKEADKDEFCRCELKLQKWYGDLRGKPFAIEAENSILDISGFSKQYNCAFIWQKDGVKKLNLYLIINYFKGGKLRFKKIKPEAFEANRFYTVINKKSGEIVPMEVNFNFDDPNLIILPLAFGKRQGREFIWNDLLSLETGSLKLANGRVIEKTLYNRRTRQDEPALFVALTFERREVLDSSNIKPMNLIGVDRGENIPAVIALTDPEGCPLSRFKDSLGNPTHILRIGESYKEKQRTIQAKKEVEQRRAGGYSRKYASKAKNLADDMVRNTARDLLYYAVTQDAMLIFENLSRGFGRQGKRTFMAERQYTRMEDWLTAKLAYEGLPSKTYLSKTLAQYTSKTCSNCGFTITSADYDRVLEKLKKTATGWMTTINGKELKVEGQITYYNRYKRQNVVKDLSVELDRLSEESVNNDISSWTKGRSGEALSLLKKRFSHRPVQEKFVCLNCGFETHADEQAALNIARSWLFLRSQEYKKYQTNKTTGNTDKRAFVETWQSFYRKKLKEVWKPAV

SEQ ID NO: 38532 - protein, 978 aa, synthetic construct
  REGION 1..978: note = engineered CasX variant
QEIKRINKIRRRLVKDSNTKKAGKTGPMKTLLVRVMTPDLRERLENLRKKPENIPQPISNTSRANLNKLLTDYTEMKKAILHVYWEEFQVDPVGLMSRVAQPASKKIDQNKLKPEMDEKGNLTTAGFACSQCGQPLFVYKLEQVSEKGKAYTNYFGRCNVAEHEKLILLAQLKPEKDSDEAVTYSLGKFGQRALDFYSIHVTKESTHPVKPLAQIAGNRYASTPVGKALSDACMGTIASFLSKYQDIIIEHQKVVKGNQKRLESLRELAGKENLEYPSVTLPPQPHTKEGVDAYNEVIARVRMWVNLNLWQKLKLSRDDAKPLLRLKKFPSFPLVERQANEVDWWDMVCNVKKLINEKKEDGKVFWQNLAGYKRQEALRPYLSSEEDRKKGKKFARYQLGDLLLHLEKKHGEDWGKVYDEAWERIDKKVEGLSKHIKLEEERRSEDAQSKAALTDWLRAKASFVIEGLKEADKDEFCRCELKLQKWYGDLRGKPFAIEAENSILDISGFSKQYNCAFIWQKDGVKKLNLYLIINYFKGGKLRFKKIKPEAFEANRFYTVINKKSGEIVPMEVNFNFDDPNLIILPLAFGKRQGREFIWNDLLSLETGSLKLANGRVIEKTLYNRRTRQDEPALFVALTFERREVLDSSNIKPMNLIGVDRGENIPAVIALTDPEGCPLSRFKDSLGNPTHILRIGESYKEKQRTIQAKKEVEQRRAGGYSRKYASKAKNLADDMVRNTARDLLYYAVTQDAMLIFENLSRGFGRQGKRTFMAERQYTRMEDWLTAKLAYEGLPSKTYLSKTLAQYTSKTCSNCGFTITSADYDRVLEKLKKTATGWMTTINGKELKVEGQITYYNRYKRQNVVKDLSVELDRLSEESVNNDISSWTKGRSGEALSLLKKRFSHRPVQEKFVCLNCGFETHADEQAALNIARSWLFLRSQEYKKYQTNKTTGNTDKRAFVETWQSFYRKKLKEVWKPAV

SEQ ID NO: 38533 - protein, 978 aa, synthetic construct
  REGION 1..978: note = engineered CasX variant
QEIKRINKIRRRLVKDSNTKKAGKTGPMKTLLVRVMTPDLRERLENLRKKPENIPQPISNTSRANLNKLLTDYTEMKKAILHVYWEEFQVDPVGLMSRVAQPASKKIDQNKLKPEMDEKGNLTTAGFACSQCGQPLFVYKLEQVSEKGKAYTNYFGRCNVAEHEKLILLAQLKPEKDSDEAVTYSLGKFGQRALDFYSIHVTKESTHPVKPLAQIAGNRYASAPVGKALSDACMGTIASFLSKYQDIIIEHQKVVKGNQKRLESLRELAGKENLEYPSVTLPPQPHTKEGVDAYNEVIARVRMWVNLNLWQKLKLSRDDAKPLLRLKKFPSFPLVERQANEVDWWDMVCNVKKLINEKKEDGKVFWQNLAGYKRQEALRPYLSSEEDRKKGKKFARYQLGDLLLHLEKKHGEDWGKVYDEAWERIDKKVEGLSKHIKLEEERRSEDAQSKAALTDWLRAKASFVIEGLKEADKDEFCRCELKLQKWYGDLRGKPFAIEAENSILDISGFSKQYNCAFIWQKDGVKKLNLYLIINYFKGGKLRFKKIKPEAFEANRFYTVINKKSGEIVPMEVNFNFDDPNLIILPLAFGKRQGREFIWNDLLSLETGSLKLANGRVIEKTLYNRRTRQDEPALFVALTFERREVLDSSNIKPMNLIGVDRGENIPAVIALTDPEGCPLSRFKDSLGNPTHILRIGESYKEKQRTIQAKKEVEQRRAGGYSRKYASKAKNLADDMVRNTARDLLYYAVTQDAMLIFENLSRGFGRQGKRTFMAERQYTRMEDWLTAKLAYEGLPSKTYLSKTLAQYTSKTCSNCGFTITSADYDRVLEKLKKTATGWMTTINGKELKVEGQITYYNRYKRQNVVKDLSVELDRLSEESVNNDISSWTKGRSGEALSLLKKRFSHRPVQEKFVCLNCGFETHADEQAALNIARSWLFLRSQEYKKYQTNKTTGNTDKRAFVETWQSFYRKKLKEVWKPAV

SEQ ID NO: 38534 - protein, 978 aa, synthetic construct
  REGION 1..978: note = engineered CasX variant
QEIKRINKIRRRLVKDSNTKKAGKTGPMKTLLVRVMTPDLRERLENLRKKPENIPQPISNTSRANLNKLLTDYTEMKKAILHVYWEEFQVDPVGLMSRVAQPASKKIDQNKLKPEMDEKGNLTTAGFACSQCGQPLFVYKLEQVSEKGKAYTNYFGRCNVAEHEKLILLAQLKPEKDSDEAVTYSLGKFGQRALDFYSIHVTKESTHPVKPLAQIAGNRYASVPVGKALSDACMGTIASFLSKYQDIIIEHQKVVKGNQKRLESLRELAGKENLEYPSVTLPPQPHTKEGVDAYNEVIARVRMWVNLNLWQKLKLSRDDAKPLLRLKKFPSFPLVERQANEVDWWDMVCNVKKLINEKKEDGKVFWQNLAGYKRQEALRPYLSSEEDRKKGKKFARYQLGDLLLHLEKKHGEDWGKVYDEAWERIDKKVEGLSKHIKLEEERRSEDAQSKAALTDWLRAKASFVIEGLKEADKDEFCRCELKLQKWYGDLRGKPFAIEAENSILDISGFSKQYNCAFIWQKDGVKKLNLYLIINYFKGGKLRFKKIKPEAFEANRFYTVINKKSGEIVPMEVNFNFDDPNLIILPLAFGKRQGREFIWNDLLSLETGSLKLANGRVIEKTLYNRRTRQDEPALFVALTFERREVLDSSNIKPMNLIGVDRGENIPAVIALTDPEGCPLSRFKDSLGNPTHILRIGESYKEKQRTIQAKKEVEQRRAGGYSRKYASKAKNLADDMVRNTARDLLYYAVTQDAMLIFENLSRGFGRQGKRTFMAERQYTRMEDWLTAKLAYEGLPSKTYLSKTLAQYTSKTCSNCGFTITSADYDRVLEKLKKTATGWMTTINGKELKVEGQITYYNRYKRQNVVKDLSVELDRLSEESVNNDISSWTKGRSGEALSLLKKRFSHRPVQEKFVCLNCGFETHADEQAALNIARSWLFLRSQEYKKYQTNKTTGNTDKRAFVETWQSFYRKKLKEVWKPAV

SEQ ID NO: 38535 - protein, 978 aa, synthetic construct
  REGION 1..978: note = engineered CasX variant
QEIKRINKIRRRLVKDSNTKKAGKTGPMKTLLVRVMTPDLRERLENLRKKPENIPQPISNTSRANLNKLLTDYTEMKKAILHVYWEEFQVDPVGLMSRVAQPASKKIDQNKLKPEMDEKGNLTTAGFACSQCGQPLFVYKLEQVSEKGKAYTNYFGRCNVAEHEKLIKLAQLKPEKDSDEAVTYSLGKFGQRALDFYSIHVTKESTHPVKPLAQIAGNRYASGPVGKALSDACMGTIASFLSKYQDIIIEHQKVVKGNQKRLESLRELAGKENLEYPSVTLPPQPHTKEGVDAYNEVIARVRMWVNLNLWQKLKLSRDDAKPLLRLKKFPSFPLVERQANEVDWWDMVCNVKKLINEKKEDGKVFWQNLAGYKRQEALRPYLSSEEDRKKGKKFARYQLGDLLLHLEKKHGEDWGKVYDEAWERIDKKVEGLSKHIKLEEERRSEDAQSKAALTDWLRAKASFVIEGLKEADKDEFCRCELKLQKWYGDLRGKPFAIEAENSILDISGFSKQYNCAFIWQKDGVKKLNLYLIINYFKGGKLRFKKIKPEAFEANRFYTVINKKSGEIVPMEVNFNFDDPNLIILPLAFGKRQGREFIWNDLLSLETGSLKLANGRVIEKTLYNRRTRQDEPALFVALTFERREVLDSSNIKPMNLIGVDRGENIPAVIALTDPEGCPLSRFKDSLGNPTHILRIGESYKEKQRTIQAKKEVEQRRAGGYSRKYASKAKNLADDMVRNTARDLLYYAVTQDAMLIFENLSRGFGRQGKRTFMAERQYTRMEDWLTAKLAYEGLPSKTYLSKTLAQYTSKTCSNCGFTITSADYDRVLEKLKKTATGWMTTINGKELKVEGQITYYNRYKRQNVVKDLSVELDRLSEESVNNDISSWTKGRSGEALSLLKKRFSHRPVQEKFVCLNCGFETHADEQAALNIARSWLFLRSQEYKKYQTNKTTGNTDKRAFVETWQSFYRKKLKEVWKPAV

SEQ ID NO: 38536 - protein, 977 aa, synthetic construct
  REGION 1..977: note = engineered CasX variant
QEIKRINKIRRRLVKDSNTKKAGKTGPMKTLLVRVMTPDLRERLENLRKKPENIPQPISNTSRANLNKLLTDYTEMKKAILHVYWEEFQVDPVGLMSRVAQPASKKIDQNKLKPEMDEKGNLTTAGFACSQCGQPLFVYKLEQVSEKGKAYTNYFGRCNVAEHEKLILLAQLKPEKDSDEAVTYSLGKFGQRALDFYSIHVTKESTHPVKPLAQIAGNRYASPVGKALSDACMGTIASFLSKYQDIIIEHQKVVKGNQKRLESLRELAGKENLEYPSVTLPPQPHTKEGVDAYNEVIARVRMWVNLNLWQKLKLSRDDAKPLLRLKKFPSFPLVERQANEVDWWDMVCNVKKLINEKKEDGKVFWQNLAGYKRQEALRPYLSSEEDRKKGKKFARYQLGDLLLHLEKKHGEDWGKVYDEAWERIDKKVEGLSKHIKLEEERRSEDAQSKAALTDWLRAKASFVIEGLKEADKDEFCRCELKLQKWYGDLRGKPFAIEAENSILDISGFSKQYNCAFIWQKDGVKKLNLYLIINYFKGGKLRFKKIKPEAFEANRFYTVINKKSGEIVPMEVNFNFDDPNLIILPLAFGKRQGREFIWNDLLSLETGSLKLANGRVIEKTLYNRRTRQDEPALFVALTFERREVLDSSNIKPMNLIGVDRGENIPAVIALTDPEGCPLSRFKDSLGNPTHILRIGESYKEKQRTIQAKKEVEQRRAGGYSRKYASKAKNLADDMVRNTARDLLYYAVTQDAMLIFENLSRGFGRQGKRTFMAERQYTRMEDWLTAKLAYEGLPSKTYLSKTLAQYTSKTCSNCGFTITSADYDRVLEKLKKTATGWMTTINGKELKVEGQITYYNRYKRQNVVKDLSVELDRLSEESVNNDISSWTKGRSGEALSLLKKRFSHRPVQEKFVCLNCGFETHADEQAALNIARSWLFLRSQEYKKYQTNKTTGNTDKRAFVETWQSFYRKKLKEVWKPAV

SEQ ID NO: 38537 - protein, 978 aa, synthetic construct
  REGION 1..978: note = engineered CasX variant
QEIKRINKIRRRLVKDSNTKKAGKTGPMKTLLVRVMTPDLRERLENLRKKPENIPQPISNTSRANLNKLLTDYTEMKKAILHVYWEEFQVDPVGLMSRVAQPASKKIDQNKLKPEMDEKGNLTTAGFACSQCGQPLFVYKLEQVSEKGKAYTNYFGRCNVAEHEKLILLAQLKPEKDSDEAVTYSLGKFGQRALDFYSIHVTKESTHPVKPLAQIAGNRYASYPVGKALSDACMGTIASFLSKYQDIIIEHQKVVKGNQKRLESLRELAGKENLEYPSVTLPPQPHTKEGVDAYNEVIARVRMWVNLNLWQKLKLSRDDAKPLLRLKGFPSFPLVERQANEVDWWDMVCNVKKLINEKKEDGKVFWQNLAGYKRQEALRPYLSSEEDRKKGKKFARYQLGDLLLHLEKKHGEDWGKVYDEAWERIDKKVEGLSKHIKLEEERRSEDAQSKAALTDWLRAKASFVIEGLKEADKDEFCRCELKLQKWYGDLRGKPFAIEAENSILDISGFSKQYNCAFIWQKDGVKKLNLYLIINYFKGGKLRFKKIKPEAFEANRFYTVINKKSGEIVPMEVNFNFDDPNLIILPLAFGKRQGREFIWNDLLSLETGSLKLANGRVIEKTLYNRRTRQDEPALFVALTFERREVLDSSNIKPMNLIGVDRGENIPAVIALTDPEGCPLSRFKDSLGNPTHILRIGERYKEKQRTIQAKKEVEQRRAGGYSRKYASKAKNLADDMVRNTARDLLYYAVTQDAMLIFENLSRGFGRQGKRTFMAERQYTRMEDWLTAKLAYEGLPSKTYLSKTLAQYTSKTCSNCGFTITSADYDRVLEKLKKTATGWMTTINGKELKVEGQITYYNRYKRQNVVKDLSVELDRLSEESVNNDISSWTKGRSGEALSLLKKRFSHRPVQEKFVCLNCGFETHADEQAALNIARSWLFLRSQEYKKYQTNKTTGNTDKRAFVETWQSFYRKKLKEVWKPAV

SEQ ID NO: 38538 - protein, 978 aa, synthetic construct
  REGION 1..978: note = engineered CasX variant
QEIKRINKIRRRLVKDSNTKKAGKTGPMKTLLVRVMTPDLRERLENLRKKPENIPQPISNTSRANLNKLLTDYTEMKKAILHVYWEEFQVDPVGLMSRVAQPASKKIDQNKLKPEMDEKGNLTTAGFACSQCGQPLFVYKLEQVSEKGKAYTNYFGRCNVAEHEKLILLAQLKPEKDSDEAVTYSLGKFGQRALDFYSIHVTKESTHPVKPLAQIAGNRYASHPVGKALSDACMGTIASFLSKYQDIIIEHQKVVKGNQKRLESLRELAGKENLEYPSVTLPPQPHTKEGVDAYNEVIARVRMWVNLNLWQKLKLSRDDAKPLLRLKGFPSFPLVERQANEVDWWDMVCNVKKLINEKKEDGKVFWQNLAGYKRQEALRPYLSSEEDRKKGKKFARYQLGDLLLHLEKKHGEDWGKVYDEAWERIDKKVEGLSKHIKLEEERRSEDAQSKAALTDWLRAKASFVIEGLKEADKDEFCRCELKLQKWYGDLRGKPFAIEAENSILDISGFSKQYNCAFIWQKDGVKKLNLYLIINYFKGGKLRFKKIKPEAFEANRFYTVINKKSGEIVPMEVNFNFDDPNLIILPLAFGKRQGREFIWNDLLSLETGSLKLANGRVIEKTLYNRRTRQDEPALFVALTFERREVLDSSNIKPMNLIGVDRGENIPAVIALTDPEGCPLSRFKDSLGNPTHILRIGERYKEKQRTIQAKKEVEQRRAGGYSRKYASKAKNLADDMVRNTARDLLYYAVTQDAMLIFENLSRGFGRQGKRTFMAERQYTRMEDWLTAKLAYEGLPSKTYLSKTLAQYTSKTCSNCGFTITSADYDRVLEKLKKTATGWMTTINGKELKVEGQITYYNRYKRQNVVKDLSVELDRLSEESVNNDISSWTKGRSGEALSLLKKRFSHRPVQEKFVCLNCGFETHADEQAALNIARSWLFLRSQEYKKYQTNKTTGNTDKRAFVETWQSFYRKKLKEVWKPAV

SEQ ID NO: 38539 - protein, 978 aa, synthetic construct
  REGION 1..978: note = engineered CasX variant
QEIKRINKIRRRLVKDSNTKKAGKTGPMKTLLVRVMTPDLRERLENLRKKPENIPQPISNTSRANLNKLLTDYTEMKKAILHVYWEEFQVDPVGLMSRVAQPASKKIDQNKLKPEMDEKGNLTTAGFACSQCGQPLFVYKLEQVSEKGKAYTNYFGRCNVAEHEKLILLAQLKPEKDSDEAVTYSLGKFGQRALDFYSIHVTKESTHPVKPLAQIAGNRYASSPVGKALSDACMGTIASFLSKYQDIIIEHQKVVKGNQKRLESLRELAGKENLEYPSVTLPPQPHTKEGVDAYNEVIARVRMWVNLNLWQKLKLSRDDAKPLLRLKGFPSFPLVERQANEVDWWDMVCNVKKLINEKKEDGKVFWQNLAGYKRQEALRPYLSSEEDRKKGKKFARYQLGDLLLHLEKKHGEDWGKVYDEAWERIDKKVEGLSKHIKLEEERRSEDAQSKAALTDWLRAKASFVIEGLKEADKDEFCRCELKLQKWYGDLRGKPFAIEAENSILDISGFSKQYNCAFIWQKDGVKKLNLYLIINYFKGGKLRFKKIKPEAFEANRFYTVINKKSGEIVPMEVNFNFDDPNLIILPLAFGKRQGREFIWNDLLSLETGSLKLANGRVIEKTLYNRRTRQDEPALFVALTFERREVLDSSNIKPMNLIGVDRGENIPAVIALTDPEGCPLSRFKDSLGNPTHILRIGERYKEKQRTIQAKKEVEQRRAGGYSRKYASKAKNLADDMVRNTARDLLYYAVTQDAMLIFENLSRGFGRQGKRTFMAERQYTRMEDWLTAKLAYEGLPSKTYLSKTLAQYTSKTCSNCGFTITSADYDRVLEKLKKTATGWMTTINGKELKVEGQITYYNRYKRQNVVKDLSVELDRLSEESVNNDISSWTKGRSGEALSLLKKRFSHRPVQEKFVCLNCGFETHADEQAALNIARSWLFLRSQEYKKYQTNKTTGNTDKRAFVETWQSFYRKKLKEVWKPAV

SEQ ID NO: 38540 - protein, 978 aa, synthetic construct
  REGION 1..978: note = engineered CasX variant
QEIKRINKIRRRLVKDSNTKKAGKTGPMKTLLVRVMTPDLRERLENLRKKPENIPQPISNTSRANLNKLLTDYTEMKKAILHVYWEEFQVDPVGLMSRVAQPASKKIDQNKLKPEMDEKGNLTTAGFACSQCGQPLFVYKLEQVSEKGKAYTNYFGRCNVAEHEKLILLAQLKPEKDSDEAVTYSLGKFGQRALDFYSIHVTKESTHPVKPLAQIAGNRYASTPVGKALSDACMGTIASFLSKYQDIIIEHQKVVKGNQKRLESLRELAGKENLEYPSVTLPPQPHTKEGVDAYNEVIARVRMWVNLNLWQKLKLSRDDAKPLLRLKGFPSFPLVERQANEVDWWDMVCNVKKLINEKKEDGKVFWQNLAGYKRQEALRPYLSSEEDRKKGKKFARYQLGDLLLHLEKKHGEDWGKVYDEAWERIDKKVEGLSKHIKLEEERRSEDAQSKAALTDWLRAKASFVIEGLKEADKDEFCRCELKLQKWYGDLRGKPFAIEAENSILDISGFSKQYNCAFIWQKDGVKKLNLYLIINYFKGGKLRFKKIKPEAFEANRFYTVINKKSGEIVPMEVNFNFDDPNLIILPLAFGKRQGREFIWNDLLSLETGSLKLANGRVIEKTLYNRRTRQDEPALFVALTFERREVLDSSNIKPMNLIGVDRGENIPAVIALTDPEGCPLSRFKDSLGNPTHILRIGERYKEKQRTIQAKKEVEQRRAGGYSRKYASKAKNLADDMVRNTARDLLYYAVTQDAMLIFENLSRGFGRQGKRTFMAERQYTRMEDWLTAKLAYEGLPSKTYLSKTLAQYTSKTCSNCGFTITSADYDRVLEKLKKTATGWMTTINGKELKVEGQITYYNRYKRQNVVKDLSVELDRLSEESVNNDISSWTKGRSGEALSLLKKRFSHRPVQEKFVCLNCGFETHADEQAALNIARSWLFLRSQEYKKYQTNKTTGNTDKRAFVETWQSFYRKKLKEVWKPAV

SEQ ID NO: 38541 - protein, 978 aa, synthetic construct
  REGION 1..978: note = engineered CasX variant
QEIKRINKIRRRLVKDSNTKKAGKTGPMKTLLVRVMTPDLRERLENLRKKPENIPQPISNTSRANLNKLLTDYTEMKKAILHVYWEEFQVDPVGLMSRVAQPASKKIDQNKLKPEMDEKGNLTTAGFACSQCGQPLFVYKLEQVSEKGKAYTNYFGRCNVAEHEKLILLAQLKPEKDSDEAVTYSLGKFGQRALDFYSIHVTKESTHPVKPLAQIAGNRYASAPVGKALSDACMGTIASFLSKYQDIIIEHQKVVKGNQKRLESLRELAGKENLEYPSVTLPPQPHTKEGVDAYNEVIARVRMWVNLNLWQKLKLSRDDAKPLLRLKGFPSFPLVERQANEVDWWDMVCNVKKLINEKKEDGKVFWQNLAGYKRQEALRPYLSSEEDRKKGKKFARYQLGDLLLHLEKKHGEDWGKVYDEAWERIDKKVEGLSKHIKLEEERRSEDAQSKAALTDWLRAKASFVIEGLKEADKDEFCRCELKLQKWYGDLRGKPFAIEAENSILDISGFSKQYNCAFIWQKDGVKKLNLYLIINYFKGGKLRFKKIKPEAFEANRFYTVINKKSGEIVPMEVNFNFDDPNLIILPLAFGKRQGREFIWNDLLSLETGSLKLANGRVIEKTLYNRRTRQDEPALFVALTFERREVLDSSNIKPMNLIGVDRGENIPAVIALTDPEGCPLSRFKDSLGNPTHILRIGERYKEKQRTIQAKKEVEQRRAGGYSRKYASKAKNLADDMVRNTARDLLYYAVTQDAMLIFENLSRGFGRQGKRTFMAERQYTRMEDWLTAKLAYEGLPSKTYLSKTLAQYTSKTCSNCGFTITSADYDRVLEKLKKTATGWMTTINGKELKVEGQITYYNRYKRQNVVKDLSVELDRLSEESVNNDISSWTKGRSGEALSLLKKRFSHRPVQEKFVCLNCGFETHADEQAALNIARSWLFLRSQEYKKYQTNKTTGNTDKRAFVETWQSFYRKKLKEVWKPAV

SEQ ID NO: 38542 - protein, 978 aa, synthetic construct
  REGION 1..978: note = engineered CasX variant
QEIKRINKIRRRLVKDSNTKKAGKTGPMKTLLVRVMTPDLRERLENLRKKPENIPQPISNTSRANLNKLLTDYTEMKKAILHVYWEEFQVDPVGLMSRVAQPASKKIDQNKLKPEMDEKGNLTTAGFACSQCGQPLFVYKLEQVSEKGKAYTNYFGRCNVAEHEKLILLAQLKPEKDSDEAVTYSLGKFGQRALDFYSIHVTKESTHPVKPLAQIAGNRYASVPVGKALSDACMGTIASFLSKYQDIIIEHQKVVKGNQKRLESLRELAGKENLEYPSVTLPPQPHTKEGVDAYNEVIARVRMWVNLNLWQKLKLSRDDAKPLLRLKGFPSFPLVERQANEVDWWDMVCNVKKLINEKKEDGKVFWQNLAGYKRQEALRPYLSSEEDRKKGKKFARYQLGDLLLHLEKKHGEDWGKVYDEAWERIDKKVEGLSKHIKLEEERRSEDAQSKAALTDWLRAKASFVIEGLKEADKDEFCRCELKLQKWYGDLRGKPFAIEAENSILDISGFSKQYNCAFIWQKDGVKKLNLYLIINYFKGGKLRFKKIKPEAFEANRFYTVINKKSGEIVPMEVNFNFDDPNLIILPLAFGKRQGREFIWNDLLSLETGSLKLANGRVIEKTLYNRRTRQDEPALFVALTFERREVLDSSNIKPMNLIGVDRGENIPAVIALTDPEGCPLSRFKDSLGNPTHILRIGERYKEKQRTIQAKKEVEQRRAGGYSRKYASKAKNLADDMVRNTARDLLYYAVTQDAMLIFENLSRGFGRQGKRTFMAERQYTRMEDWLTAKLAYEGLPSKTYLSKTLAQYTSKTCSNCGFTITSADYDRVLEKLKKTATGWMTTINGKELKVEGQITYYNRYKRQNVVKDLSVELDRLSEESVNNDISSWTKGRSGEALSLLKKRFSHRPVQEKFVCLNCGFETHADEQAALNIARSWLFLRSQEYKKYQTNKTTGNTDKRAFVETWQSFYRKKLKEVWKPAV

SEQ ID NO: 38543 - protein, 978 aa, synthetic construct
  REGION 1..978: note = engineered CasX variant
QEIKRINKIRRRLVKDSNTKKAGKTGPMKTLLVRVMTPDLRERLENLRKKPENIPQPISNTSRANLNKLLTDYTEMKKAILHVYWEEFQVDPVGLMSRVAQPASKKIDQNKLKPEMDEKGNLTTAGFACSQCGQPLFVYKLEQVSEKGKAYTNYFGRCNVAEHEKLIKLAQLKPEKDSDEAVTYSLGKFGQRALDFYSIHVTKESTHPVKPLAQIAGNRYASGPVGKALSDACMGTIASFLSKYQDIIIEHQKVVKGNQKRLESLRELAGKENLEYPSVTLPPQPHTKEGVDAYNEVIARVRMWVNLNLWQKLKLSRDDAKPLLRLKGFPSFPLVERQANEVDWWDMVCNVKKLINEKKEDGKVFWQNLAGYKRQEALRPYLSSEEDRKKGKKFARYQLGDLLLHLEKKHGEDWGKVYDEAWERIDKKVEGLSKHIKLEEERRSEDAQSKAALTDWLRAKASFVIEGLKEADKDEFCRCELKLQKWYGDLRGKPFAIEAENSILDISGFSKQYNCAFIWQKDGVKKLNLYLIINYFKGGKLRFKKIKPEAFEANRFYTVINKKSGEIVPMEVNFNFDDPNLIILPLAFGKRQGREFIWNDLLSLETGSLKLANGRVIEKTLYNRRTRQDEPALFVALTFERREVLDSSNIKPMNLIGVDRGENIPAVIALTDPEGCPLSRFKDSLGNPTHILRIGERYKEKQRTIQAKKEVEQRRAGGYSRKYASKAKNLADDMVRNTARDLLYYAVTQDAMLIFENLSRGFGRQGKRTFMAERQYTRMEDWLTAKLAYEGLPSKTYLSKTLAQYTSKTCSNCGFTITSADYDRVLEKLKKTATGWMTTINGKELKVEGQITYYNRYKRQNVVKDLSVELDRLSEESVNNDISSWTKGRSGEALSLLKKRFSHRPVQEKFVCLNCGFETHADEQAALNIARSWLFLRSQEYKKYQTNKTTGNTDKRAFVETWQSFYRKKLKEVWKPAV

SEQ ID NO: 38544 - protein, 977 aa, synthetic construct
  REGION 1..977: note = engineered CasX variant
QEIKRINKIRRRLVKDSNTKKAGKTGPMKTLLVRVMTPDLRERLENLRKKPENIPQPISNTSRANLNKLLTDYTEMKKAILHVYWEEFQVDPVGLMSRVAQPASKKIDQNKLKPEMDEKGNLTTAGFACSQCGQPLFVYKLEQVSEKGKAYTNYFGRCNVAEHEKLILLAQLKPEKDSDEAVTYSLGKFGQRALDFYSIHVTKESTHPVKPLAQIAGNRYASPVGKALSDACMGTIASFLSKYQDIIIEHQKVVKGNQKRLESLRELAGKENLEYPSVTLPPQPHTKEGVDAYNEVIARVRMWVNLNLWQKLKLSRDDAKPLLRLKGFPSFPLVERQANEVDWWDMVCNVKKLINEKKEDGKVFWQNLAGYKRQEALRPYLSSEEDRKKGKKFARYQLGDLLLHLEKKHGEDWGKVYDEAWERIDKKVEGLSKHIKLEEERRSEDAQSKAALTDWLRAKASFVIEGLKEADKDEFCRCELKLQKWYGDLRGKPFAIEAENSILDISGFSKQYNCAFIWQKDGVKKLNLYLIINYFKGGKLRFKKIKPEAFEANRFYTVINKKSGEIVPMEVNFNFDDPNLIILPLAFGKRQGREFIWNDLLSLETGSLKLANGRVIEKTLYNRRTRQDEPALFVALTFERREVLDSSNIKPMNLIGVDRGENIPAVIALTDPEGCPLSRFKDSLGNPTHILRIGERYKEKQRTIQAKKEVEQRRAGGYSRKYASKAKNLADDMVRNTARDLLYYAVTQDAMLIFENLSRGFGRQGKRTFMAERQYTRMEDWLTAKLAYEGLPSKTYLSKTLAQYTSKTCSNCGFTITSADYDRVLEKLKKTATGWMTTINGKELKVEGQITYYNRYKRQNVVKDLSVELDRLSEESVNNDISSWTKGRSGEALSLLKKRFSHRPVQEKFVCLNCGFETHADEQAALNIARSWLFLRSQEYKKYQTNKTTGNTDKRAFVETWQSFYRKKLKEVWKPAV

SEQ ID NO: 38545 - protein, 978 aa, synthetic construct
  REGION 1..978: note = engineered CasX variant
QEIKRINKIRRRLVKDSNTKKAGKTGPMKTLLVRVMTPDLRERLENLRKKPENIPQPISNTSRANLNKLLTDYTEMKKAILHVYWEEFQVDPVGLMSRVAQPASKKIDQNKLKPEMDEKGNLTTAGFACSQCGQPLFVYKLEQVSEKGKAYTNYFGRCNVAEHEKLILLAQLKPEKDSDEAVTYSLGKFGQRALDFYSIHVTKESTHPVKPLAQIAGNRYASYPVGKALSDACMGTIASFLSKYQDIIIEHQKVVKGNQKRLESLRELAGKENLEYPSVTLPPQPHTKEGVDAYNEVIARVRMWVNLNLWQKLKLSRDDAKPLLRLKGFPSFPLVERQANEVDWWDMVCNVKKLINEKKEDGKVFWQNLAGYKRQEALRPYLSSEEDRKKGKKFARYQLGDLLLHLEKKHGEDWGKVYDEAWERIDKKVEGLSKHIKLEEERRSEDAQSKAALTDWLRAKASFVIEGLKEADKDEFCRCELKLQKWYGDLRGKPFAIEAENSILDISGFSKQYNCAFIWQKDGVKKLNLYLIINYFKGGKLRFKKIKPEAFEANRFYTVINKKSGEIVPMEVNFNFDDPNLIILPLAFGKRQGREFIWNDLLSLETGSLQLANGRVIEKTLYNRRTRQDEPALFVALTFERREVLDSSNIKPMNLIGVDRGENIPAVIALTDPEGCPLSRFKDSLGNPTHILRIGESYKEKQRTIQAKKEVEQRRAGGYSRKYASKAKNLADDMVRNTARDLLYYAVTQDAMLIFENLSRGFGRQGKRTFMAERQYTRMEDWLTAKLAYEGLPSKTYLSKTLAQYTSKTCSNCGFTITSADYDRVLEKLKKTATGWMTTINGKELKVEGQITYYNRYKRQNVVKDLSVELDRLSEESVNNDISSWTKGRSGEALSLLKKRFSHRPVQEKFVCLNCGFETHADEQAALNIARSWLFLRSQEYKKYQTNKTTGNTDKRAFVETWQSFYRKKLKEVWKPAV

SEQ ID NO: 38546 - protein, 978 aa, synthetic construct
  REGION 1..978: note = engineered CasX variant
QEIKRINKIRRRLVKDSNTKKAGKTGPMKTLLVRVMTPDLRERLENLRKKPENIPQPISNTSRANLNKLLTDYTEMKKAILHVYWEEFQVDPVGLMSRVAQPASKKIDQNKLKPEMDEKGNLTTAGFACSQCGQPLFVYKLEQVSEKGKAYTNYFGRCNVAEHEKLILLAQLKPEKDSDEAVTYSLGKFGQRALDFYSIHVTKESTHPVKPLAQIAGNRYASHPVGKALSDACMGTIASFLSKYQDIIIEHQKVVKGNQKRLESLRELAGKENLEYPSVTLPPQPHTKEGVDAYNEVIARVRMWVNLNLWQKLKLSRDDAKPLLRLKGFPSFPLVERQANEVDWWDMVCNVKKLINEKKEDGKVFWQNLAGYKRQEALRPYLSSEEDRKKGKKFARYQLGDLLLHLEKKHGEDWGKVYDEAWERIDKKVEGLSKHIKLEEERRSEDAQSKAALTDWLRAKASFVIEGLKEADKDEFCRCELKLQKWYGDLRGKPFAIEAENSILDISGFSKQYNCAFIWQKDGVKKLNLYLIINYFKGGKLRFKKIKPEAFEANRFYTVINKKSGEIVPMEVNFNFDDPNLIILPLAFGKRQGREFIWNDLLSLETGSLQLANGRVIEKTLYNRRTRQDEPALFVALTFERREVLDSSNIKPMNLIGVDRGENIPAVIALTDPEGCPLSRFKDSLGNPTHILRIGESYKEKQRTIQAKKEVEQRRAGGYSRKYASKAKNLADDMVRNTARDLLYYAVTQDAMLIFENLSRGFGRQGKRTFMAERQYTRMEDWLTAKLAYEGLPSKTYLSKTLAQYTSKTCSNCGFTITSADYDRVLEKLKKTATGWMTTINGKELKVEGQITYYNRYKRQNVVKDLSVELDRLSEESVNNDISSWTKGRSGEALSLLKKRFSHRPVQEKFVCLNCGFETHADEQAALNIARSWLFLRSQEYKKYQTNKTTGNTDKRAFVETWQSFYRKKLKEVWKPAV

SEQ ID NO: 38547 - protein, 978 aa, synthetic construct
  REGION 1..978: note = engineered CasX variant
QEIKRINKIRRRLVKDSNTKKAGKTGPMKTLLVRVMTPDLRERLENLRKKPENIPQPISNTSRANLNKLLTDYTEMKKAILHVYWEEFQVDPVGLMSRVAQPASKKIDQNKLKPEMDEKGNLTTAGFACSQCGQPLFVYKLEQVSEKGKAYTNYFGRCNVAEHEKLILLAQLKPEKDSDEAVTYSLGKFGQRALDFYSIHVTKESTHPVKPLAQIAGNRYASSPVGKALSDACMGTIASFLSKYQDIIIEHQKVVKGNQKRLESLRELAGKENLEYPSVTLPPQPHTKEGVDAYNEVIARVRMWVNLNLWQKLKLSRDDAKPLLRLKGFPSFPLVERQANEVDWWDMVCNVKKLINEKKEDGKVFWQNLAGYKRQEALRPYLSSEEDRKKGKKFARYQLGDLLLHLEKKHGEDWGKVYDEAWERIDKKVEGLSKHIKLEEERRSEDAQSKAALTDWLRAKASFVIEGLKEADKDEFCRCELKLQKWYGDLRGKPFAIEAENSILDISGFSKQYNCAFIWQKDGVKKLNLYLIINYFKGGKLRFKKIKPEAFEANRFYTVINKKSGEIVPMEVNFNFDDPNLIILPLAFGKRQGREFIWNDLLSLETGSLQLANGRVIEKTLYNRRTRQDEPALFVALTFERREVLDSSNIKPMNLIGVDRGENIPAVIALTDPEGCPLSRFKDSLGNPTHILRIGESYKEKQRTIQAKKEVEQRRAGGYSRKYASKAKNLADDMVRNTARDLLYYAVTQDAMLIFENLSRGFGRQGKRTFMAERQYTRMEDWLTAKLAYEGLPSKTYLSKTLAQYTSKTCSNCGFTITSADYDRVLEKLKKTATGWMTTINGKELKVEGQITYYNRYKRQNVVKDLSVELDRLSEESVNNDISSWTKGRSGEALSLLKKRFSHRPVQEKFVCLNCGFETHADEQAALNIARSWLFLRSQEYKKYQTNKTTGNTDKRAFVETWQSFYRKKLKEVWKPAV

SEQ ID NO: 38548 - protein, 978 aa, synthetic construct
  REGION 1..978: note = engineered CasX variant
QEIKRINKIRRRLVKDSNTKKAGKTGPMKTLLVRVMTPDLRERLENLRKKPENIPQPISNTSRANLNKLLTDYTEMKKAILHVYWEEFQVDPVGLMSRVAQPASKKIDQNKLKPEMDEKGNLTTAGFACSQCGQPLFVYKLEQVSEKGKAYTNYFGRCNVAEHEKLILLAQLKPEKDSDEAVTYSLGKFGQRALDFYSIHVTKESTHPVKPLAQIAGNRYASTPVGKALSDACMGTIASFLSKYQDIIIEHQKVVKGNQKRLESLRELAGKENLEYPSVTLPPQPHTKEGVDAYNEVIARVRMWVNLNLWQKLKLSRDDAKPLLRLKGFPSFPLVERQANEVDWWDMVCNVKKLINEKKEDGKVFWQNLAGYKRQEALRPYLSSEEDRKKGKKFARYQLGDLLLHLEKKHGEDWGKVYDEAWERIDKKVEGLSKHIKLEEERRSEDAQSKAALTDWLRAKASFVIEGLKEADKDEFCRCELKLQKWYGDLRGKPFAIEAENSILDISGFSKQYNCAFIWQKDGVKKLNLYLIINYFKGGKLRFKKIKPEAFEANRFYTVINKKSGEIVPMEVNFNFDDPNLIILPLAFGKRQGREFIWNDLLSLETGSLQLANGRVIEKTLYNRRTRQDEPALFVALTFERREVLDSSNIKPMNLIGVDRGENIPAVIALTDPEGCPLSRFKDSLGNPTHILRIGESYKEKQRTIQAKKEVEQRRAGGYSRKYASKAKNLADDMVRNTARDLLYYAVTQDAMLIFENLSRGFGRQGKRTFMAERQYTRMEDWLTAKLAYEGLPSKTYLSKTLAQYTSKTCSNCGFTITSADYDRVLEKLKKTATGWMTTINGKELKVEGQITYYNRYKRQNVVKDLSVELDRLSEESVNNDISSWTKGRSGEALSLLKKRFSHRPVQEKFVCLNCGFETHADEQAALNIARSWLFLRSQEYKKYQTNKTTGNTDKRAFVETWQSFYRKKLKEVWKPAV

SEQ ID NO: 38549 - protein, 978 aa, synthetic construct
  REGION 1..978: note = engineered CasX variant
QEIKRINKIRRRLVKDSNTKKAGKTGPMKTLLVRVMTPDLRERLENLRKKPENIPQPISNTSRANLNKLLTDYTEMKKAILHVYWEEFQVDPVGLMSRVAQPASKKIDQNKLKPEMDEKGNLTTAGFACSQCGQPLFVYKLEQVSEKGKAYTNYFGRCNVAEHEKLILLAQLKPEKDSDEAVTYSLGKFGQRALDFYSIHVTKESTHPVKPLAQIAGNRYASAPVGKALSDACMGTIASFLSKYQDIIIEHQKVVKGNQKRLESLRELAGKENLEYPSVTLPPQPHTKEGVDAYNEVIARVRMWVNLNLWQKLKLSRDDAKPLLRLKGFPSFPLVERQANEVDWWDMVCNVKKLINEKKEDGKVFWQNLAGYKRQEALRPYLSSEEDRKKGKKFARYQLGDLLLHLEKKHGEDWGKVYDEAWERIDKKVEGLSKHIKLEEERRSEDAQSKAALTDWLRAKASFVIEGLKEADKDEFCRCELKLQKWYGDLRGKPFAIEAENSILDISGFSKQYNCAFIWQKDGVKKLNLYLIINYFKGGKLRFKKIKPEAFEANRFYTVINKKSGEIVPMEVNFNFDDPNLIILPLAFGKRQGREFIWNDLLSLETGSLQLANGRVIEKTLYNRRTRQDEPALFVALTFERREVLDSSNIKPMNLIGVDRGENIPAVIALTDPEGCPLSRFKDSLGNPTHILRIGESYKEKQRTIQAKKEVEQRRAGGYSRKYASKAKNLADDMVRNTARDLLYYAVTQDAMLIFENLSRGFGRQGKRTFMAERQYTRMEDWLTAKLAYEGLPSKTYLSKTLAQYTSKTCSNCGFTITSADYDRVLEKLKKTATGWMTTINGKELKVEGQITYYNRYKRQNVVKDLSVELDRLSEESVNNDISSWTKGRSGEALSLLKKRFSHRPVQEKFVCLNCGFETHADEQAALNIARSWLFLRSQEYKKYQTNKTTGNTDKRAFVETWQSFYRKKLKEVWKPAV

SEQ ID NO: 38550 - protein, 978 aa, synthetic construct
  REGION 1..978: note = engineered CasX variant
QEIKRINKIRRRLVKDSNTKKAGKTGPMKTLLVRVMTPDLRERLENLRKKPENIPQPISNTSRANLNKLLTDYTEMKKAILHVYWEEFQVDPVGLMSRVAQPASKKIDQNKLKPEMDEKGNLTTAGFACSQCGQPLFVYKLEQVSEKGKAYTNYFGRCNVAEHEKLILLAQLKPEKDSDEAVTYSLGKFGQRALDFYSIHVTKESTHPVKPLAQIAGNRYASVPVGKALSDACMGTIASFLSKYQDIIIEHQKVVKGNQKRLESLRELAGKENLEYPSVTLPPQPHTKEGVDAYNEVIARVRMWVNLNLWQKLKLSRDDAKPLLRLKGFPSFPLVERQANEVDWWDMVCNVKKLINEKKEDGKVFWQNLAGYKRQEALRPYLSSEEDRKKGKKFARYQLGDLLLHLEKKHGEDWGKVYDEAWERIDKKVEGLSKHIKLEEERRSEDAQSKAALTDWLRAKASFVIEGLKEADKDEFCRCELKLQKWYGDLRGKPFAIEAENSILDISGFSKQYNCAFIWQKDGVKKLNLYLIINYFKGGKLRFKKIKPEAFEANRFYTVINKKSGEIVPMEVNFNFDDPNLIILPLAFGKRQGREFIWNDLLSLETGSLQLANGRVIEKTLYNRRTRQDEPALFVALTFERREVLDSSNIKPMNLIGVDRGENIPAVIALTDPEGCPLSRFKDSLGNPTHILRIGESYKEKQRTIQAKKEVEQRRAGGYSRKYASKAKNLADDMVRNTARDLLYYAVTQDAMLIFENLSRGFGRQGKRTFMAERQYTRMEDWLTAKLAYEGLPSKTYLSKTLAQYTSKTCSNCGFTITSADYDRVLEKLKKTATGWMTTINGKELKVEGQITYYNRYKRQNVVKDLSVELDRLSEESVNNDISSWTKGRSGEALSLLKKRFSHRPVQEKFVCLNCGFETHADEQAALNIARSWLFLRSQEYKKYQTNKTTGNTDKRAFVETWQSFYRKKLKEVWKPAV

SEQ ID NO: 38551 - protein, 978 aa, synthetic construct
  REGION 1..978: note = engineered CasX variant
QEIKRINKIRRRLVKDSNTKKAGKTGPMKTLLVRVMTPDLRERLENLRKKPENIPQPISNTSRANLNKLLTDYTEMKKAILHVYWEEFQVDPVGLMSRVAQPASKKIDQNKLKPEMDEKGNLTTAGFACSQCGQPLFVYKLEQVSEKGKAYTNYFGRCNVAEHEKLIKLAQLKPEKDSDEAVTYSLGKFGQRALDFYSIHVTKESTHPVKPLAQIAGNRYASGPVGKALSDACMGTIASFLSKYQDIIIEHQKVVKGNQKRLESLRELAGKENLEYPSVTLPPQPHTKEGVDAYNEVIARVRMWVNLNLWQKLKLSRDDAKPLLRLKGFPSFPLVERQANEVDWWDMVCNVKKLINEKKEDGKVFWQNLAGYKRQEALRPYLSSEEDRKKGKKFARYQLGDLLLHLEKKHGEDWGKVYDEAWERIDKKVEGLSKHIKLEEERRSEDAQSKAALTDWLRAKASFVIEGLKEADKDEFCRCELKLQKWYGDLRGKPFAIEAENSILDISGFSKQYNCAFIWQKDGVKKLNLYLIINYFKGGKLRFKKIKPEAFEANRFYTVINKKSGEIVPMEVNFNFDDPNLIILPLAFGKRQGREFIWNDLLSLETGSLQLANGRVIEKTLYNRRTRQDEPALFVALTFERREVLDSSNIKPMNLIGVDRGENIPAVIALTDPEGCPLSRFKDSLGNPTHILRIGESYKEKQRTIQAKKEVEQRRAGGYSRKYASKAKNLADDMVRNTARDLLYYAVTQDAMLIFENLSRGFGRQGKRTFMAERQYTRMEDWLTAKLAYEGLPSKTYLSKTLAQYTSKTCSNCGFTITSADYDRVLEKLKKTATGWMTTINGKELKVEGQITYYNRYKRQNVVKDLSVELDRLSEESVNNDISSWTKGRSGEALSLLKKRFSHRPVQEKFVCLNCGFETHADEQAALNIARSWLFLRSQEYKKYQTNKTTGNTDKRAFVETWQSFYRKKLKEVWKPAV

SEQ ID NO: 38552 - protein, 977 aa, synthetic construct
  REGION 1..977: note = engineered CasX variant
QEIKRINKIRRRLVKDSNTKKAGKTGPMKTLLVRVMTPDLRERLENLRKKPENIPQPISNTSRANLNKLLTDYTEMKKAILHVYWEEFQVDPVGLMSRVAQPASKKIDQNKLKPEMDEKGNLTTAGFACSQCGQPLFVYKLEQVSEKGKAYTNYFGRCNVAEHEKLILLAQLKPEKDSDEAVTYSLGKFGQRALDFYSIHVTKESTHPVKPLAQIAGNRYASPVGKALSDACMGTIASFLSKYQDIIIEHQKVVKGNQKRLESLRELAGKENLEYPSVTLPPQPHTKEGVDAYNEVIARVRMWVNLNLWQKLKLSRDDAKPLLRLKGFPSFPLVERQANEVDWWDMVCNVKKLINEKKEDGKVFWQNLAGYKRQEALRPYLSSEEDRKKGKKFARYQLGDLLLHLEKKHGEDWGKVYDEAWERIDKKVEGLSKHIKLEEERRSEDAQSKAALTDWLRAKASFVIEGLKEADKDEFCRCELKLQKWYGDLRGKPFAIEAENSILDISGFSKQYNCAFIWQKDGVKKLNLYLIINYFKGGKLRFKKIKPEAFEANRFYTVINKKSGEIVPMEVNFNFDDPNLIILPLAFGKRQGREFIWNDLLSLETGSLQLANGRVIEKTLYNRRTRQDEPALFVALTFERREVLDSSNIKPMNLIGVDRGENIPAVIALTDPEGCPLSRFKDSLGNPTHILRIGESYKEKQRTIQAKKEVEQRRAGGYSRKYASKAKNLADDMVRNTARDLLYYAVTQDAMLIFENLSRGFGRQGKRTFMAERQYTRMEDWLTAKLAYEGLPSKTYLSKTLAQYTSKTCSNCGFTITSADYDRVLEKLKKTATGWMTTINGKELKVEGQITYYNRYKRQNVVKDLSVELDRLSEESVNNDISSWTKGRSGEALSLLKKRFSHRPVQEKFVCLNCGFETHADEQAALNIARSWLFLRSQEYKKYQTNKTTGNTDKRAFVETWQSFYRKKLKEVWKPAV

SEQ ID NO: 38553 - protein, 979 aa, synthetic construct
  REGION 1..979: note = engineered CasX variant
QEIKRLANKIRRRLVKDSNTKKAGKTGPMKTLLVRVMTPDLRERLENLRKKPENIPQPISNTSRANLNKLLTDYTEMKKAILHVYWEEFQKDPVGLMSRVAQPASKKIDQNKLKPEMDEKGNLTTAGFACSQCGQPLFVYKLEQVSEKGKAYTNYFGRCNVAEHEKLILLAQLKPEKDSDEAVTYSLGKFGQRALDFYSIHVTKESTHPVKPLAQIAGNRYASYPVGKALSDACMGTIASFLSKYQDIIIEHQKVVKGNQKRLESLRELAGKENLEYPSVTLPPQPHTKEGVDAYNEVIARVRMWVNLNLWQKLKLSRDDAKPLLRLKGFPSFPLVERQANEVDWWDMVCNVKKLINEKKEDGKVFWQNLAGYKRQEALRPYLSSEEDRKKGKKFARYQLGDLLLHLEKKHGEDWGKVYDEAWERIDKKVEGLSKHIKLEEERRSEDAQSKAALTDWLRAKASFVIEGLKEADKDEFCRCELKLQKWYGDLRGKPFAIEAENSILDISGFSKQYNCAFIWQKDGVKKLNLYLIINYFKGGKLRFKKIKPEAFEANRFYTVINKKSGEIVPMEVNFNFDDPNLIILPLAFGKRQGREFIWNDLLSLETGSLKLANGRVIEKTLYNRRTRQDEPALFVALTFERREVLDSSNIKPMNLIGVDRGENIPAVIALTDPEGCPLSRFKDSLGNPTHILRIGESYKEKQRTIQAKKEVEQRRAGGYSRKYASKAKNLADDMVRNTARDLLYYAVTQDAMLIFENLSRGFGRQGKRTFMAERQYTRMEDWLTAKLAYEGLPSKTYLSKTLAQYTSKTCSNCGFTITSADYDRVLEKLKKTATGWMTTINGKELKVEGQITYYNRYKRQNVVKDLSVELDRLSEESVNNDISSWTKGRSGEALSLLKKRFSHRPVQEKFVCLNCGFETHADEQAALNIARSWLFLRSQEYKKYQTNKTTGNTDKRAFVETWQSFYRKKLKEVWKPAV

SEQ ID NO: 38554 - protein, 979 aa, synthetic construct
  REGION 1..979: note = engineered CasX variant
QEIKRLANKIRRRLVKDSNTKKAGKTGPMKTLLVRVMTPDLRERLENLRKKPENIPQPISNTSRANLNKLLTDYTEMKKAILHVYWEEFQKDPVGLMSRVAQPASKKIDQNKLKPEMDEKGNLTTAGFACSQCGQPLFVYKLEQVSEKGKAYTNYFGRCNVAEHEKLILLAQLKPEKDSDEAVTYSLGKFGQRALDFYSIHVTKESTHPVKPLAQIAGNRYASHPVGKALSDACMGTIASFLSKYQDIIIEHQKVVKGNQKRLESLRELAGKENLEYPSVTLPPQPHTKEGVDAYNEVIARVRMWVNLNLWQKLKLSRDDAKPLLRLKGFPSFPLVERQANEVDWWDMVCNVKKLINEKKEDGKVFWQNLAGYKRQEALRPYLSSEEDRKKGKKFARYQLGDLLLHLEKKHGEDWGKVYDEAWERIDKKVEGLSKHIKLEEERRSEDAQSKAALTDWLRAKASFVIEGLKEADKDEFCRCELKLQKWYGDLRGKPFAIEAENSILDISGFSKQYNCAFIWQKDGVKKLNLYLIINYFKGGKLRFKKIKPEAFEANRFYTVINKKSGEIVPMEVNFNFDDPNLIILPLAFGKRQGREFIWNDLLSLETGSLKLANGRVIEKTLYNRRTRQDEPALFVALTFERREVLDSSNIKPMNLIGVDRGENIPAVIALTDPEGCPLSRFKDSLGNPTHILRIGESYKEKQRTIQAKKEVEQRRAGGYSRKYASKAKNLADDMVRNTARDLLYYAVTQDAMLIFENLSRGFGRQGKRTFMAERQYTRMEDWLTAKLAYEGLPSKTYLSKTLAQYTSKTCSNCGFTITSADYDRVLEKLKKTATGWMTTINGKELKVEGQITYYNRYKRQNVVKDLSVELDRLSEESVNNDISSWTKGRSGEALSLLKKRFSHRPVQEKFVCLNCGFETHADEQAALNIARSWLFLRSQEYKKYQTNKTTGNTDKRAFVETWQSFYRKKLKEVWKPAV

SEQ ID NO: 38555 - protein, 979 aa, synthetic construct
  REGION 1..979: note = engineered CasX variant
QEIKRLANKIRRRLVKDSNTKKAGKTGPMKTLLVRVMTPDLRERLENLRKKPENIPQPISNTSRANLNKLLTDYTEMKKAILHVYWEEFQKDPVGLMSRVAQPASKKIDQNKLKPEMDEKGNLTTAGFACSQCGQPLFVYKLEQVSEKGKAYTNYFGRCNVAEHEKLILLAQLKPEKDSDEAVTYSLGKFGQRALDFYSIHVTKESTHPVKPLAQIAGNRYASSPVGKALSDACMGTIASFLSKYQDIIIEHQKVVKGNQKRLESLRELAGKENLEYPSVTLPPQPHTKEGVDAYNEVIARVRMWVNLNLWQKLKLSRDDAKPLLRLKGFPSFPLVERQANEVDWWDMVCNVKKLINEKKEDGKVFWQNLAGYKRQEALRPYLSSEEDRKKGKKFARYQLGDLLLHLEKKHGEDWGKVYDEAWERIDKKVEGLSKHIKLEEERRSEDAQSKAALTDWLRAKASFVIEGLKEADKDEFCRCELKLQKWYGDLRGKPFAIEAENSILDISGFSKQYNCAFIWQKDGVKKLNLYLIINYFKGGKLRFKKIKPEAFEANRFYTVINKKSGEIVPMEVNFNFDDPNLIILPLAFGKRQGREFIWNDLLSLETGSLKLANGRVIEKTLYNRRTRQDEPALFVALTFERREVLDSSNIKPMNLIGVDRGENIPAVIALTDPEGCPLSRFKDSLGNPTHILRIGESYKEKQRTIQAKKEVEQRRAGGYSRKYASKAKNLADDMVRNTARDLLYYAVTQDAMLIFENLSRGFGRQGKRTFMAERQYTRMEDWLTAKLAYEGLPSKTYLSKTLAQYTSKTCSNCGFTITSADYDRVLEKLKKTATGWMTTINGKELKVEGQITYYNRYKRQNVVKDLSVELDRLSEESVNNDISSWTKGRSGEALSLLKKRFSHRPVQEKFVCLNCGFETHADEQAALNIARSWLFLRSQEYKKYQTNKTTGNTDKRAFVETWQSFYRKKLKEVWKPAV

SEQ ID NO: 38556 - protein, 979 aa, synthetic construct
  REGION 1..979: note = engineered CasX variant
QEIKRLANKIRRRLVKDSNTKKAGKTGPMKTLLVRVMTPDLRERLENLRKKPENIPQPISNTSRANLNKLLTDYTEMKKAILHVYWEEFQKDPVGLMSRVAQPASKKIDQNKLKPEMDEKGNLTTAGFACSQCGQPLFVYKLEQVSEKGKAYTNYFGRCNVAEHEKLILLAQLKPEKDSDEAVTYSLGKFGQRALDFYSIHVTKESTHPVKPLAQIAGNRYASTPVGKALSDACMGTIASFLSKYQDIIIEHQKVVKGNQKRLESLRELAGKENLEYPSVTLPPQPHTKEGVDAYNEVIARVRMWVNLNLWQKLKLSRDDAKPLLRLKGFPSFPLVERQANEVDWWDMVCNVKKLINEKKEDGKVFWQNLAGYKRQEALRPYLSSEEDRKKGKKFARYQLGDLLLHLEKKHGEDWGKVYDEAWERIDKKVEGLSKHIKLEEERRSEDAQSKAALTDWLRAKASFVIEGLKEADKDEFCRCELKLQKWYGDLRGKPFAIEAENSILDISGFSKQYNCAFIWQKDGVKKLNLYLIINYFKGGKLRFKKIKPEAFEANRFYTVINKKSGEIVPMEVNFNFDDPNLIILPLAFGKRQGREFIWNDLLSLETGSLKLANGRVIEKTLYNRRTRQDEPALFVALTFERREVLDSSNIKPMNLIGVDRGENIPAVIALTDPEGCPLSRFKDSLGNPTHILRIGESYKEKQRTIQAKKEVEQRRAGGYSRKYASKAKNLADDMVRNTARDLLYYAVTQDAMLIFENLSRGFGRQGKRTFMAERQYTRMEDWLTAKLAYEGLPSKTYLSKTLAQYTSKTCSNCGFTITSADYDRVLEKLKKTATGWMTTINGKELKVEGQITYYNRYKRQNVVKDLSVELDRLSEESVNNDISSWTKGRSGEALSLLKKRFSHRPVQEKFVCLNCGFETHADEQAALNIARSWLFLRSQEYKKYQTNKTTGNTDKRAFVETWQSFYRKKLKEVWKPAV

SEQ ID NO: 38557 - protein, 979 aa, synthetic construct
  REGION 1..979: note = engineered CasX variant
QEIKRLANKIRRRLVKDSNTKKAGKTGPMKTLLVRVMTPDLRERLENLRKKPENIPQPISNTSRANLNKLLTDYTEMKKAILHVYWEEFQKDPVGLMSRVAQPASKKIDQNKLKPEMDEKGNLTTAGFACSQCGQPLFVYKLEQVSEKGKAYTNYFGRCNVAEHEKLILLAQLKPEKDSDEAVTYSLGKFGQRALDFYSIHVTKESTHPVKPLAQIAGNRYASAPVGKALSDACMGTIASFLSKYQDIIIEHQKVVKGNQKRLESLRELAGKENLEYPSVTLPPQPHTKEGVDAYNEVIARVRMWVNLNLWQKLKLSRDDAKPLLRLKGFPSFPLVERQANEVDWWDMVCNVKKLINEKKEDGKVFWQNLAGYKRQEALRPYLSSEEDRKKGKKFARYQLGDLLLHLEKKHGEDWGKVYDEAWERIDKKVEGLSKHIKLEEERRSEDAQSKAALTDWLRAKASFVIEGLKEADKDEFCRCELKLQKWYGDLRGKPFAIEAENSILDISGFSKQYNCAFIWQKDGVKKLNLYLIINYFKGGKLRFKKIKPEAFEANRFYTVINKKSGEIVPMEVNFNFDDPNLIILPLAFGKRQGREFIWNDLLSLETGSLKLANGRVIEKTLYNRRTRQDEPALFVALTFERREVLDSSNIKPMNLIGVDRGENIPAVIALTDPEGCPLSRFKDSLGNPTHILRIGESYKEKQRTIQAKKEVEQRRAGGYSRKYASKAKNLADDMVRNTARDLLYYAVTQDAMLIFENLSRGFGRQGKRTFMAERQYTRMEDWLTAKLAYEGLPSKTYLSKTLAQYTSKTCSNCGFTITSADYDRVLEKLKKTATGWMTTINGKELKVEGQITYYNRYKRQNVVKDLSVELDRLSEESVNNDISSWTKGRSGEALSLLKKRFSHRPVQEKFVCLNCGFETHADEQAALNIARSWLFLRSQEYKKYQTNKTTGNTDKRAFVETWQSFYRKKLKEVWKPAV

SEQ ID NO: 38558 - protein, 979 aa, synthetic construct
  REGION 1..979: note = engineered CasX variant
QEIKRLANKIRRRLVKDSNTKKAGKTGPMKTLLVRVMTPDLRERLENLRKKPENIPQPISNTSRANLNKLLTDYTEMKKAILHVYWEEFQKDPVGLMSRVAQPASKKIDQNKLKPEMDEKGNLTTAGFACSQCGQPLFVYKLEQVSEKGKAYTNYFGRCNVAEHEKLILLAQLKPEKDSDEAVTYSLGKFGQRALDFYSIHVTKESTHPVKPLAQIAGNRYASVPVGKALSDACMGTIASFLSKYQDIIIEHQKVVKGNQKRLESLRELAGKENLEYPSVTLPPQPHTKEGVDAYNEVIARVRMWVNLNLWQKLKLSRDDAKPLLRLKGFPSFPLVERQANEVDWWDMVCNVKKLINEKKEDGKVFWQNLAGYKRQEALRPYLSSEEDRKKGKKFARYQLGDLLLHLEKKHGEDWGKVYDEAWERIDKKVEGLSKHIKLEEERRSEDAQSKAALTDWLRAKASFVIEGLKEADKDEFCRCELKLQKWYGDLRGKPFAIEAENSILDISGFSKQYNCAFIWQKDGVKKLNLYLIINYFKGGKLRFKKIKPEAFEANRFYTVINKKSGEIVPMEVNFNFDDPNLIILPLAFGKRQGREFIWNDLLSLETGSLKLANGRVIEKTLYNRRTRQDEPALFVALTFERREVLDSSNIKPMNLIGVDRGENIPAVIALTDPEGCPLSRFKDSLGNPTHILRIGESYKEKQRTIQAKKEVEQRRAGGYSRKYASKAKNLADDMVRNTARDLLYYAVTQDAMLIFENLSRGFGRQGKRTFMAERQYTRMEDWLTAKLAYEGLPSKTYLSKTLAQYTSKTCSNCGFTITSADYDRVLEKLKKTATGWMTTINGKELKVEGQITYYNRYKRQNVVKDLSVELDRLSEESVNNDISSWTKGRSGEALSLLKKRFSHRPVQEKFVCLNCGFETHADEQAALNIARSWLFLRSQEYKKYQTNKTTGNTDKRAFVETWQSFYRKKLKEVWKPAV

SEQ ID NO: 38559 - protein, 979 aa, synthetic construct
  REGION 1..979: note = engineered CasX variant
QEIKRLANKIRRRLVKDSNTKKAGKTGPMKTLLVRVMTPDLRERLENLRKKPENIPQPISNTSRANLNKLLTDYTEMKKAILHVYWEEFQKDPVGLMSRVAQPASKKIDQNKLKPEMDEKGNLTTAGFACSQCGQPLFVYKLEQVSEKGKAYTNYFGRCNVAEHEKLIKLAQLKPEKDSDEAVTYSLGKFGQRALDFYSIHVTKESTHPVKPLAQIAGNRYASGPVGKALSDACMGTIASFLSKYQDIIIEHQKVVKGNQKRLESLRELAGKENLEYPSVTLPPQPHTKEGVDAYNEVIARVRMWVNLNLWQKLKLSRDDAKPLLRLKGFPSFPLVERQANEVDWWDMVCNVKKLINEKKEDGKVFWQNLAGYKRQEALRPYLSSEEDRKKGKKFARYQLGDLLLHLEKKHGEDWGKVYDEAWERIDKKVEGLSKHIKLEEERRSEDAQSKAALTDWLRAKASFVIEGLKEADKDEFCRCELKLQKWYGDLRGKPFAIEAENSILDISGFSKQYNCAFIWQKDGVKKLNLYLIINYFKGGKLRFKKIKPEAFEANRFYTVINKKSGEIVPMEVNFNFDDPNLIILPLAFGKRQGREFIWNDLLSLETGSLKLANGRVIEKTLYNRRTRQDEPALFVALTFERREVLDSSNIKPMNLIGVDRGENIPAVIALTDPEGCPLSRFKDSLGNPTHILRIGESYKEKQRTIQAKKEVEQRRAGGYSRKYASKAKNLADDMVRNTARDLLYYAVTQDAMLIFENLSRGFGRQGKRTFMAERQYTRMEDWLTAKLAYEGLPSKTYLSKTLAQYTSKTCSNCGFTITSADYDRVLEKLKKTATGWMTTINGKELKVEGQITYYNRYKRQNVVKDLSVELDRLSEESVNNDISSWTKGRSGEALSLLKKRFSHRPVQEKFVCLNCGFETHADEQAALNIARSWLFLRSQEYKKYQTNKTTGNTDKRAFVETWQSFYRKKLKEVWKPAV

SEQ ID NO: 38560 - protein, 978 aa, synthetic construct
  REGION 1..978: note = engineered CasX variant
QEIKRLANKIRRRLVKDSNTKKAGKTGPMKTLLVRVMTPDLRERLENLRKKPENIPQPISNTSRANLNKLLTDYTEMKKAILHVYWEEFQKDPVGLMSRVAQPASKKIDQNKLKPEMDEKGNLTTAGFACSQCGQPLFVYKLEQVSEKGKAYTNYFGRCNVAEHEKLILLAQLKPEKDSDEAVTYSLGKFGQRALDFYSIHVTKESTHPVKPLAQIAGNRYASPVGKALSDACMGTIASFLSKYQDIIIEHQKVVKGNQKRLESLRELAGKENLEYPSVTLPPQPHTKEGVDAYNEVIARVRMWVNLNLWQKLKLSRDDAKPLLRLKGFPSFPLVERQANEVDWWDMVCNVKKLINEKKEDGKVFWQNLAGYKRQEALRPYLSSEEDRKKGKKFARYQLGDLLLHLEKKHGEDWGKVYDEAWERIDKKVEGLSKHIKLEEERRSEDAQSKAALTDWLRAKASFVIEGLKEADKDEFCRCELKLQKWYGDLRGKPFAIEAENSILDISGFSKQYNCAFIWQKDGVKKLNLYLIINYFKGGKLRFKKIKPEAFEANRFYTVINKKSGEIVPMEVNFNFDDPNLIILPLAFGKRQGREFIWNDLLSLETGSLKLANGRVIEKTLYNRRTRQDEPALFVALTFERREVLDSSNIKPMNLIGVDRGENIPAVIALTDPEGCPLSRFKDSLGNPTHILRIGESYKEKQRTIQAKKEVEQRRAGGYSRKYASKAKNLADDMVRNTARDLLYYAVTQDAMLIFENLSRGFGRQGKRTFMAERQYTRMEDWLTAKLAYEGLPSKTYLSKTLAQYTSKTCSNCGFTITSADYDRVLEKLKKTATGWMTTINGKELKVEGQITYYNRYKRQNVVKDLSVELDRLSEESVNNDISSWTKGRSGEALSLLKKRFSHRPVQEKFVCLNCGFETHADEQAALNIARSWLFLRSQEYKKYQTNKTTGNTDKRAFVETWQSFYRKKLKEVWKPAV

SEQ ID NO: 38561 - protein, 978 aa, synthetic construct
  REGION 1..978: note = engineered CasX variant
QEIKRLNKIRRRLVKDSNTKKAGKTGPMKTLLVRVMTPDLRERLENLRKKPENIPQPISNTSRANLNKLLTDYTEMKKAILHVYWEEFQKDPVGLMSRVAQPASKKIDQNKLKPEMDEKGNLTTAGFACSQCGQPLFVYKLEQVSEKGKAYTNYVGRCNVAEHEKLILLAQLKPEKDSDEAVTYSLGKFGQRALDFYSIHVTKESTHPVKPLAQIAGNRYASYPVGKALSDACMGTIASFLSKYQDIIIEHQKVVKGNQKRLESLRELAGKENLEYPSVTLPPQPHTKEGVDAYNEVIARVRMWVNLNLWQKLKLSRDDAKPLLRLKGFPSFPLVERQANEVDWWDMVCNVKKLINEKKEDGKVFWQNLAGYKRQEALRPYLSSEEDRKKGKKFARYQLGDLLLHLEKKHGEDWGKVYDEAWERIDKKVEGLSKHIKLEEERRSEDAQSKAALTDWLRAKASFVIEGLKEADKDEFCRCELKLQKWYGDLRGKPFAIEAENSILDISGFSKQYNCAFIWQKDGVKKLNLYLIINYFKGGKLRFKKIKPEAFEANRFYTVINKKSGEIVPMEVNFNFDDPNLIILPLAFGKRQGREFIWNDLLSLETGSLKLANGRVIEKTLYNRRTRQDEPALFVALTFERREVLDSSNIKPMNLIGVDRGENIPAVIALTDPEGCPLSRFKDSLGNPTHILRIGESYKEKQRTIQAKKEVEQRRAGGYSRKYASKAKNLADDMVRNTARDLLYYAVTQDAMLIFENLSRGFGRQGKRTFMAERQYTRMEDWLTAKLAYEGLPSKTYLSKTLAQYTSKTCSNCGFTITSADYDRVLEKLKKTATGWMTTINGKELKVEGQITYYNRYKRQNVVKDLSVELDRLSEESVNNDISSWTKGRSGEALSLLKKRFSHRPVQEKFVCLNCGFETHADEQAALNIARSWLFLRSQEYKKYQTNKTTGNTDKRAFVETWQSFYRKKLKEVWKPAV

SEQ ID NO: 38562 - protein, 978 aa, synthetic construct
  REGION 1..978: note = engineered CasX variant
QEIKRLNKIRRRLVKDSNTKKAGKTGPMKTLLVRVMTPDLRERLENLRKKPENIPQPISNTSRANLNKLLTDYTEMKKAILHVYWEEFQKDPVGLMSRVAQPASKKIDQNKLKPEMDEKGNLTTAGFACSQCGQPLFVYKLEQVSEKGKAYTNYVGRCNVAEHEKLILLAQLKPEKDSDEAVTYSLGKFGQRALDFYSIHVTKESTHPVKPLAQIAGNRYASHPVGKALSDACMGTIASFLSKYQDIIIEHQKVVKGNQKRLESLRELAGKENLEYPSVTLPPQPHTKEGVDAYNEVIARVRMWVNLNLWQKLKLSRDDAKPLLRLKGFPSFPLVERQANEVDWWDMVCNVKKLINEKKEDGKVFWQNLAGYKRQEALRPYLSSEEDRKKGKKFARYQLGDLLLHLEKKHGEDWGKVYDEAWERIDKKVEGLSKHIKLEEERRSEDAQSKAALTDWLRAKASFVIEGLKEADKDEFCRCELKLQKWYGDLRGKPFAIEAENSILDISGFSKQYNCAFIWQKDGVKKLNLYLIINYFKGGKLRFKKIKPEAFEANRFYTVINKKSGEIVPMEVNFNFDDPNLIILPLAFGKRQGREFIWNDLLSLETGSLKLANGRVIEKTLYNRRTRQDEPALFVALTFERREVLDSSNIKPMNLIGVDRGENIPAVIALTDPEGCPLSRFKDSLGNPTHILRIGESYKEKQRTIQAKKEVEQRRAGGYSRKYASKAKNLADDMVRNTARDLLYYAVTQDAMLIFENLSRGFGRQGKRTFMAERQYTRMEDWLTAKLAYEGLPSKTYLSKTLAQYTSKTCSNCGFTITSADYDRVLEKLKKTATGWMTTINGKELKVEGQITYYNRYKRQNVVKDLSVELDRLSEESVNNDISSWTKGRSGEALSLLKKRFSHRPVQEKFVCLNCGFETHADEQAALNIARSWLFLRSQEYKKYQTNKTTGNTDKRAFVETWQSFYRKKLKEVWKPAV

SEQ ID NO: 38563 - protein, 978 aa, synthetic construct
  REGION 1..978: note = engineered CasX variant
QEIKRLNKIRRRLVKDSNTKKAGKTGPMKTLLVRVMTPDLRERLENLRKKPENIPQPISNTSRANLNKLLTDYTEMKKAILHVYWEEFQKDPVGLMSRVAQPASKKIDQNKLKPEMDEKGNLTTAGFACSQCGQPLFVYKLEQVSEKGKAYTNYVGRCNVAEHEKLILLAQLKPEKDSDEAVTYSLGKFGQRALDFYSIHVTKESTHPVKPLAQIAGNRYASSPVGKALSDACMGTIASFLSKYQDIIIEHQKVVKGNQKRLESLRELAGKENLEYPSVTLPPQPHTKEGVDAYNEVIARVRMWVNLNLWQKLKLSRDDAKPLLRLKGFPSFPLVERQANEVDWWDMVCNVKKLINEKKEDGKVFWQNLAGYKRQEALRPYLSSEEDRKKGKKFARYQLGDLLLHLEKKHGEDWGKVYDEAWERIDKKVEGLSKHIKLEEERRSEDAQSKAALTDWLRAKASFVIEGLKEADKDEFCRCELKLQKWYGDLRGKPFAIEAENSILDISGFSKQYNCAFIWQKDGVKKLNLYLIINYFKGGKLRFKKIKPEAFEANRFYTVINKKSGEIVPMEVNFNFDDPNLIILPLAFGKRQGREFIWNDLLSLETGSLKLANGRVIEKTLYNRRTRQDEPALFVALTFERREVLDSSNIKPMNLIGVDRGENIPAVIALTDPEGCPLSRFKDSLGNPTHILRIGESYKEKQRTIQAKKEVEQRRAGGYSRKYASKAKNLADDMVRNTARDLLYYAVTQDAMLIFENLSRGFGRQGKRTFMAERQYTRMEDWLTAKLAYEGLPSKTYLSKTLAQYTSKTCSNCGFTITSADYDRVLEKLKKTATGWMTTINGKELKVEGQITYYNRYKRQNVVKDLSVELDRLSEESVNNDISSWTKGRSGEALSLLKKRFSHRPVQEKFVCLNCGFETHADEQAALNIARSWLFLRSQEYKKYQTNKTTGNTDKRAFVETWQSFYRKKLKEVWKPAV

SEQ ID NO: 38564 - protein, 978 aa, synthetic construct
  REGION 1..978: note = engineered CasX variant
QEIKRLNKIRRRLVKDSNTKKAGKTGPMKTLLVRVMTPDLRERLENLRKKPENIPQPISNTSRANLNKLLTDYTEMKKAILHVYWEEFQKDPVGLMSRVAQPASKKIDQNKLKPEMDEKGNLTTAGFACSQCGQPLFVYKLEQVSEKGKAYTNYVGRCNVAEHEKLILLAQLKPEKDSDEAVTYSLGKFGQRALDFYSIHVTKESTHPVKPLAQIAGNRYASTPVGKALSDACMGTIASFLSKYQDIIIEHQKVVKGNQKRLESLRELAGKENLEYPSVTLPPQPHTKEGVDAYNEVIARVRMWVNLNLWQKLKLSRDDAKPLLRLKGFPSFPLVERQANEVDWWDMVCNVKKLINEKKEDGKVFWQNLAGYKRQEALRPYLSSEEDRKKGKKFARYQLGDLLLHLEKKHGEDWGKVYDEAWERIDKKVEGLSKHIKLEEERRSEDAQSKAALTDWLRAKASFVIEGLKEADKDEFCRCELKLQKWYGDLRGKPFAIEAENSILDISGFSKQYNCAFIWQKDGVKKLNLYLIINYFKGGKLRFKKIKPEAFEANRFYTVINKKSGEIVPMEVNFNFDDPNLIILPLAFGKRQGREFIWNDLLSLETGSLKLANGRVIEKTLYNRRTRQDEPALFVALTFERREVLDSSNIKPMNLIGVDRGENIPAVIALTDPEGCPLSRFKDSLGNPTHILRIGESYKEKQRTIQAKKEVEQRRAGGYSRKYASKAKNLADDMVRNTARDLLYYAVTQDAMLIFENLSRGFGRQGKRTFMAERQYTRMEDWLTAKLAYEGLPSKTYLSKTLAQYTSKTCSNCGFTITSADYDRVLEKLKKTATGWMTTINGKELKVEGQITYYNRYKRQNVVKDLSVELDRLSEESVNNDISSWTKGRSGEALSLLKKRFSHRPVQEKFVCLNCGFETHADEQAALNIARSWLFLRSQEYKKYQTNKTTGNTDKRAFVETWQSFYRKKLKEVWKPAV

SEQ ID NO: 38565 - protein, 978 aa, synthetic construct
  REGION 1..978: note = engineered CasX variant
QEIKRLNKIRRRLVKDSNTKKAGKTGPMKTLLVRVMTPDLRERLENLRKKPENIPQPISNTSRANLNKLLTDYTEMKKAILHVYWEEFQKDPVGLMSRVAQPASKKIDQNKLKPEMDEKGNLTTAGFACSQCGQPLFVYKLEQVSEKGKAYTNYVGRCNVAEHEKLILLAQLKPEKDSDEAVTYSLGKFGQRALDFYSIHVTKESTHPVKPLAQIAGNRYASAPVGKALSDACMGTIASFLSKYQDIIIEHQKVVKGNQKRLESLRELAGKENLEYPSVTLPPQPHTKEGVDAYNEVIARVRMWVNLNLWQKLKLSRDDAKPLLRLKGFPSFPLVERQANEVDWWDMVCNVKKLINEKKEDGKVFWQNLAGYKRQEALRPYLSSEEDRKKGKKFARYQLGDLLLHLEKKHGEDWGKVYDEAWERIDKKVEGLSKHIKLEEERRSEDAQSKAALTDWLRAKASFVIEGLKEADKDEFCRCELKLQKWYGDLRGKPFAIEAENSILDISGFSKQYNCAFIWQKDGVKKLNLYLIINYFKGGKLRFKKIKPEAFEANRFYTVINKKSGEIVPMEVNFNFDDPNLIILPLAFGKRQGREFIWNDLLSLETGSLKLANGRVIEKTLYNRRTRQDEPALFVALTFERREVLDSSNIKPMNLIGVDRGENIPAVIALTDPEGCPLSRFKDSLGNPTHILRIGESYKEKQRTIQAKKEVEQRRAGGYSRKYASKAKNLADDMVRNTARDLLYYAVTQDAMLIFENLSRGFGRQGKRTFMAERQYTRMEDWLTAKLAYEGLPSKTYLSKTLAQYTSKTCSNCGFTITSADYDRVLEKLKKTATGWMTTINGKELKVEGQITYYNRYKRQNVVKDLSVELDRLSEESVNNDISSWTKGRSGEALSLLKKRFSHRPVQEKFVCLNCGFETHADEQAALNIARSWLFLRSQEYKKYQTNKTTGNTDKRAFVETWQSFYRKKLKEVWKPAV

SEQ ID NO: 38566 - protein, 978 aa, synthetic construct
  REGION 1..978: note = engineered CasX variant
QEIKRLNKIRRRLVKDSNTKKAGKTGPMKTLLVRVMTPDLRERLENLRKKPENIPQPISNTSRANLNKLLTDYTEMKKAILHVYWEEFQKDPVGLMSRVAQPASKKIDQNKLKPEMDEKGNLTTAGFACSQCGQPLFVYKLEQVSEKGKAYTNYVGRCNVAEHEKLILLAQLKPEKDSDEAVTYSLGKFGQRALDFYSIHVTKESTHPVKPLAQIAGNRYASVPVGKALSDACMGTIASFLSKYQDIIIEHQKVVKGNQKRLESLRELAGKENLEYPSVTLPPQPHTKEGVDAYNEVIARVRMWVNLNLWQKLKLSRDDAKPLLRLKGFPSFPLVERQANEVDWWDMVCNVKKLINEKKEDGKVFWQNLAGYKRQEALRPYLSSEEDRKKGKKFARYQLGDLLLHLEKKHGEDWGKVYDEAWERIDKKVEGLSKHIKLEEERRSEDAQSKAALTDWLRAKASFVIEGLKEADKDEFCRCELKLQKWYGDLRGKPFAIEAENSILDISGFSKQYNCAFIWQKDGVKKLNLYLIINYFKGGKLRFKKIKPEAFEANRFYTVINKKSGEIVPMEVNFNFDDPNLIILPLAFGKRQGREFIWNDLLSLETGSLKLANGRVIEKTLYNRRTRQDEPALFVALTFERREVLDSSNIKPMNLIGVDRGENIPAVIALTDPEGCPLSRFKDSLGNPTHILRIGESYKEKQRTIQAKKEVEQRRAGGYSRKYASKAKNLADDMVRNTARDLLYYAVTQDAMLIFENLSRGFGRQGKRTFMAERQYTRMEDWLTAKLAYEGLPSKTYLSKTLAQYTSKTCSNCGFTITSADYDRVLEKLKKTATGWMTTINGKELKVEGQITYYNRYKRQNVVKDLSVELDRLSEESVNNDISSWTKGRSGEALSLLKKRFSHRPVQEKFVCLNCGFETHADEQAALNIARSWLFLRSQEYKKYQTNKTTGNTDKRAFVETWQSFYRKKLKEVWKPAV

SEQ ID NO: 38567 - protein, 978 aa, synthetic construct
  REGION 1..978: note = engineered CasX variant
QEIKRLNKIRRRLVKDSNTKKAGKTGPMKTLLVRVMTPDLRERLENLRKKPENIPQPISNTSRANLNKLLTDYTEMKKAILHVYWEEFQKDPVGLMSRVAQPASKKIDQNKLKPEMDEKGNLTTAGFACSQCGQPLFVYKLEQVSEKGKAYTNYVGRCNVAEHEKLIKLAQLKPEKDSDEAVTYSLGKFGQRALDFYSIHVTKESTHPVKPLAQIAGNRYASGPVGKALSDACMGTIASFLSKYQDIIIEHQKVVKGNQKRLESLRELAGKENLEYPSVTLPPQPHTKEGVDAYNEVIARVRMWVNLNLWQKLKLSRDDAKPLLRLKGFPSFPLVERQANEVDWWDMVCNVKKLINEKKEDGKVFWQNLAGYKRQEALRPYLSSEEDRKKGKKFARYQLGDLLLHLEKKHGEDWGKVYDEAWERIDKKVEGLSKHIKLEEERRSEDAQSKAALTDWLRAKASFVIEGLKEADKDEFCRCELKLQKWYGDLRGKPFAIEAENSILDISGFSKQYNCAFIWQKDGVKKLNLYLIINYFKGGKLRFKKIKPEAFEANRFYTVINKKSGEIVPMEVNFNFDDPNLIILPLAFGKRQGREFIWNDLLSLETGSLKLANGRVIEKTLYNRRTRQDEPALFVALTFERREVLDSSNIKPMNLIGVDRGENIPAVIALTDPEGCPLSRFKDSLGNPTHILRIGESYKEKQRTIQAKKEVEQRRAGGYSRKYASKAKNLADDMVRNTARDLLYYAVTQDAMLIFENLSRGFGRQGKRTFMAERQYTRMEDWLTAKLAYEGLPSKTYLSKTLAQYTSKTCSNCGFTITSADYDRVLEKLKKTATGWMTTINGKELKVEGQITYYNRYKRQNVVKDLSVELDRLSEESVNNDISSWTKGRSGEALSLLKKRFSHRPVQEKFVCLNCGFETHADEQAALNIARSWLFLRSQEYKKYQTNKTTGNTDKRAFVETWQSFYRKKLKEVWKPAV

SEQ ID NO: 38568 - protein, 977 aa, synthetic construct
  REGION 1..977: note = engineered CasX variant
QEIKRLNKIRRRLVKDSNTKKAGKTGPMKTLLVRVMTPDLRERLENLRKKPENIPQPISNTSRANLNKLLTDYTEMKKAILHVYWEEFQKDPVGLMSRVAQPASKKIDQNKLKPEMDEKGNLTTAGFACSQCGQPLFVYKLEQVSEKGKAYTNYVGRCNVAEHEKLILLAQLKPEKDSDEAVTYSLGKFGQRALDFYSIHVTKESTHPVKPLAQIAGNRYASPVGKALSDACMGTIASFLSKYQDIIIEHQKVVKGNQKRLESLRELAGKENLEYPSVTLPPQPHTKEGVDAYNEVIARVRMWVNLNLWQKLKLSRDDAKPLLRLKGFPSFPLVERQANEVDWWDMVCNVKKLINEKKEDGKVFWQNLAGYKRQEALRPYLSSEEDRKKGKKFARYQLGDLLLHLEKKHGEDWGKVYDEAWERIDKKVEGLSKHIKLEEERRSEDAQSKAALTDWLRAKASFVIEGLKEADKDEFCRCELKLQKWYGDLRGKPFAIEAENSILDISGFSKQYNCAFIWQKDGVKKLNLYLIINYFKGGKLRFKKIKPEAFEANRFYTVINKKSGEIVPMEVNFNFDDPNLIILPLAFGKRQGREFIWNDLLSLETGSLKLANGRVIEKTLYNRRTRQDEPALFVALTFERREVLDSSNIKPMNLIGVDRGENIPAVIALTDPEGCPLSRFKDSLGNPTHILRIGESYKEKQRTIQAKKEVEQRRAGGYSRKYASKAKNLADDMVRNTARDLLYYAVTQDAMLIFENLSRGFGRQGKRTFMAERQYTRMEDWLTAKLAYEGLPSKTYLSKTLAQYTSKTCSNCGFTITSADYDRVLEKLKKTATGWMTTINGKELKVEGQITYYNRYKRQNVVKDLSVELDRLSEESVNNDISSWTKGRSGEALSLLKKRFSHRPVQEKFVCLNCGFETHADEQAALNIARSWLFLRSQEYKKYQTNKTTGNTDKRAFVETWQSFYRKKLKEVWKPAV

SEQ ID NO: 38569 - protein, 978 aa, synthetic construct
  REGION 1..978: note = engineered CasX variant
QEIKRLNKIRRRLVKDSNTKKAGKTGPMKTLLVRVMTPDLRERLENLRKKPENIPQPISNTSRANLNKLLTDYTEMKKAILHVYWEEFQKDPVGLMSRVAQPASKKIDQNKLKPEMDEKGNLTTAGFACSQCGQPLFVYKLEQVSEKGKAYTNYFGRCNVAEHEKLILLAQLKPEKDSDEAVTYSLGKFGQRALDFYSIHVTKESTHPVKPLAQIAGNRYASYPVGKALSDACMGTIASFLSKYQDIIIEHQKVVKGNQKRLESLRELAGKENLEYPSVTLPPQPHTKEGVDAYNEVIARVRMWVNLNLWQKLKLSRDDAKPLLRLKGFPSFPLVERQANEVDWWDMVCNVKKLINEKKEDGKVFWQNLAGYKRQEALRPYLSSEEDRKKGKKFARYQLGDLLLHLEKKHGEDWGKVYDEAWERIDKKVEGLSKHIKLEEERRSEDAQSKAALTDWLRAKASFVIEGLKEADKDEFCRCELKLQKWYGDLRGKPFAIEAENSILDISGFSKQYNCAFIWQKDGVKKLNLYLIINYFKGGKLRFKKIKPEAFEANRFYTVINKKSGEIVPMEVNFNFDDPNLIILPLAFGKRQGREFIWNDLLSLETGSLKLANGRVIEKTLYNRRTRQDEPALFVALTFERREVLDSSNIKPMNLIGVDRGENIPAVIALTDPEGCPLSRFKDSLGNPTHILRIGESYKEKQRTIQAKKEVEQRRAGGYSRKYASKAKNLADDMVRNTARDLLYYAVTQDAMLIFENLSRGFGRQGKRTFMAERQYTRMEDWLTAKLAYEGLASKTYLSKTLAQYTSKTCSNCGFTITSADYDRVLEKLKKTATGWMTTINGKELKVEGQITYYNRYKRQNVVKDLSVELDRLSEESVNNDISSWTKGRSGEALSLLKKRFSHRPVQEKFVCLNCGFETHADEQAALNIARSWLFLRSQEYKKYQTNKTTGNTDKRAFVETWQSFYRKKLKEVWKPAV

SEQ ID NO: 38570 - protein, 978 aa, synthetic construct
  REGION 1..978: note = engineered CasX variant
QEIKRLNKIRRRLVKDSNTKKAGKTGPMKTLLVRVMTPDLRERLENLRKKPENIPQPISNTSRANLNKLLTDYTEMKKAILHVYWEEFQKDPVGLMSRVAQPASKKIDQNKLKPEMDEKGNLTTAGFACSQCGQPLFVYKLEQVSEKGKAYTNYFGRCNVAEHEKLILLAQLKPEKDSDEAVTYSLGKFGQRALDFYSIHVTKESTHPVKPLAQIAGNRYASHPVGKALSDACMGTIASFLSKYQDIIIEHQKVVKGNQKRLESLRELAGKENLEYPSVTLPPQPHTKEGVDAYNEVIARVRMWVNLNLWQKLKLSRDDAKPLLRLKGFPSFPLVERQANEVDWWDMVCNVKKLINEKKEDGKVFWQNLAGYKRQEALRPYLSSEEDRKKGKKFARYQLGDLLLHLEKKHGEDWGKVYDEAWERIDKKVEGLSKHIKLEEERRSEDAQSKAALTDWLRAKASFVIEGLKEADKDEFCRCELKLQKWYGDLRGKPFAIEAENSILDISGFSKQYNCAFIWQKDGVKKLNLYLIINYFKGGKLRFKKIKPEAFEANRFYTVINKKSGEIVPMEVNFNFDDPNLIILPLAFGKRQGREFIWNDLLSLETGSLKLANGRVIEKTLYNRRTRQDEPALFVALTFERREVLDSSNIKPMNLIGVDRGENIPAVIALTDPEGCPLSRFKDSLGNPTHILRIGESYKEKQRTIQAKKEVEQRRAGGYSRKYASKAKNLADDMVRNTARDLLYYAVTQDAMLIFENLSRGFGRQGKRTFMAERQYTRMEDWLTAKLAYEGLASKTYLSKTLAQYTSKTCSNCGFTITSADYDRVLEKLKKTATGWMTTINGKELKVEGQITYYNRYKRQNVVKDLSVELDRLSEESVNNDISSWTKGRSGEALSLLKKRFSHRPVQEKFVCLNCGFETHADEQAALNIARSWLFLRSQEYKKYQTNKTTGNTDKRAFVETWQSFYRKKLKEVWKPAV

SEQ ID NO: 38571 - protein, 978 aa, synthetic construct
  REGION 1..978: note = engineered CasX variant
QEIKRLNKIRRRLVKDSNTKKAGKTGPMKTLLVRVMTPDLRERLENLRKKPENIPQPISNTSRANLNKLLTDYTEMKKAILHVYWEEFQKDPVGLMSRVAQPASKKIDQNKLKPEMDEKGNLTTAGFACSQCGQPLFVYKLEQVSEKGKAYTNYFGRCNVAEHEKLILLAQLKPEKDSDEAVTYSLGKFGQRALDFYSIHVTKESTHPVKPLAQIAGNRYASSPVGKALSDACMGTIASFLSKYQDIIIEHQKVVKGNQKRLESLRELAGKENLEYPSVTLPPQPHTKEGVDAYNEVIARVRMWVNLNLWQKLKLSRDDAKPLLRLKGFPSFPLVERQANEVDWWDMVCNVKKLINEKKEDGKVFWQNLAGYKRQEALRPYLSSEEDRKKGKKFARYQLGDLLLHLEKKHGEDWGKVYDEAWERIDKKVEGLSKHIKLEEERRSEDAQSKAALTDWLRAKASFVIEGLKEADKDEFCRCELKLQKWYGDLRGKPFAIEAENSILDISGFSKQYNCAFIWQKDGVKKLNLYLIINYFKGGKLRFKKIKPEAFEANRFYTVINKKSGEIVPMEVNFNFDDPNLIILPLAFGKRQGREFIWNDLLSLETGSLKLANGRVIEKTLYNRRTRQDEPALFVALTFERREVLDSSNIKPMNLIGVDRGENIPAVIALTDPEGCPLSRFKDSLGNPTHILRIGESYKEKQRTIQAKKEVEQRRAGGYSRKYASKAKNLADDMVRNTARDLLYYAVTQDAMLIFENLSRGFGRQGKRTFMAERQYTRMEDWLTAKLAYEGLASKTYLSKTLAQYTSKTCSNCGFTITSADYDRVLEKLKKTATGWMTTINGKELKVEGQITYYNRYKRQNVVKDLSVELDRLSEESVNNDISSWTKGRSGEALSLLKKRFSHRPVQEKFVCLNCGFETHADEQAALNIARSWLFLRSQEYKKYQTNKTTGNTDKRAFVETWQSFYRKKLKEVWKPAV

SEQ ID NO: 38572 - protein, 978 aa, synthetic construct
  REGION 1..978: note = engineered CasX variant
QEIKRLNKIRRRLVKDSNTKKAGKTGPMKTLLVRVMTPDLRERLENLRKKPENIPQPISNTSRANLNKLLTDYTEMKKAILHVYWEEFQKDPVGLMSRVAQPASKKIDQNKLKPEMDEKGNLTTAGFACSQCGQPLFVYKLEQVSEKGKAYTNYFGRCNVAEHEKLILLAQLKPEKDSDEAVTYSLGKFGQRALDFYSIHVTKESTHPVKPLAQIAGNRYASTPVGKALSDACMGTIASFLSKYQDIIIEHQKVVKGNQKRLESLRELAGKENLEYPSVTLPPQPHTKEGVDAYNEVIARVRMWVNLNLWQKLKLSRDDAKPLLRLKGFPSFPLVERQANEVDWWDMVCNVKKLINEKKEDGKVFWQNLAGYKRQEALRPYLSSEEDRKKGKKFARYQLGDLLLHLEKKHGEDWGKVYDEAWERIDKKVEGLSKHIKLEEERRSEDAQSKAALTDWLRAKASFVIEGLKEADKDEFCRCELKLQKWYGDLRGKPFAIEAENSILDISGFSKQYNCAFIWQKDGVKKLNLYLIINYFKGGKLRFKKIKPEAFEANRFYTVINKKSGEIVPMEVNFNFDDPNLIILPLAFGKRQGREFIWNDLLSLETGSLKLANGRVIEKTLYNRRTRQDEPALFVALTFERREVLDSSNIKPMNLIGVDRGENIPAVIALTDPEGCPLSRFKDSLGNPTHILRIGESYKEKQRTIQAKKEVEQRRAGGYSRKYASKAKNLADDMVRNTARDLLYYAVTQDAMLIFENLSRGFGRQGKRTFMAERQYTRMEDWLTAKLAYEGLASKTYLSKTLAQYTSKTCSNCGFTITSADYDRVLEKLKKTATGWMTTINGKELKVEGQITYYNRYKRQNVVKDLSVELDRLSEESVNNDISSWTKGRSGEALSLLKKRFSHRPVQEKFVCLNCGFETHADEQAALNIARSWLFLRSQEYKKYQTNKTTGNTDKRAFVETWQSFYRKKLKEVWKPAV

SEQ ID NO: 38573 - protein, 978 aa, synthetic construct
  REGION 1..978: note = engineered CasX variant
QEIKRLNKIRRRLVKDSNTKKAGKTGPMKTLLVRVMTPDLRERLENLRKKPENIPQPISNTSRANLNKLLTDYTEMKKAILHVYWEEFQKDPVGLMSRVAQPASKKIDQNKLKPEMDEKGNLTTAGFACSQCGQPLFVYKLEQVSEKGKAYTNYFGRCNVAEHEKLILLAQLKPEKDSDEAVTYSLGKFGQRALDFYSIHVTKESTHPVKPLAQIAGNRYASAPVGKALSDACMGTIASFLSKYQDIIIEHQKVVKGNQKRLESLRELAGKENLEYPSVTLPPQPHTKEGVDAYNEVIARVRMWVNLNLWQKLKLSRDDAKPLLRLKGFPSFPLVERQANEVDWWDMVCNVKKLINEKKEDGKVFWQNLAGYKRQEALRPYLSSEEDRKKGKKFARYQLGDLLLHLEKKHGEDWGKVYDEAWERIDKKVEGLSKHIKLEEERRSEDAQSKAALTDWLRAKASFVIEGLKEADKDEFCRCELKLQKWYGDLRGKPFAIEAENSILDISGFSKQYNCAFIWQKDGVKKLNLYLIINYFKGGKLRFKKIKPEAFEANRFYTVINKKSGEIVPMEVNFNFDDPNLIILPLAFGKRQGREFIWNDLLSLETGSLKLANGRVIEKTLYNRRTRQDEPALFVALTFERREVLDSSNIKPMNLIGVDRGENIPAVIALTDPEGCPLSRFKDSLGNPTHILRIGESYKEKQRTIQAKKEVEQRRAGGYSRKYASKAKNLADDMVRNTARDLLYYAVTQDAMLIFENLSRGFGRQGKRTFMAERQYTRMEDWLTAKLAYEGLASKTYLSKTLAQYTSKTCSNCGFTITSADYDRVLEKLKKTATGWMTTINGKELKVEGQITYYNRYKRQNVVKDLSVELDRLSEESVNNDISSWTKGRSGEALSLLKKRFSHRPVQEKFVCLNCGFETHADEQAALNIARSWLFLRSQEYKKYQTNKTTGNTDKRAFVETWQSFYRKKLKEVWKPAV

SEQ ID NO: 38574 - protein, 978 aa, synthetic construct
  REGION 1..978: note = engineered CasX variant
QEIKRLNKIRRRLVKDSNTKKAGKTGPMKTLLVRVMTPDLRERLENLRKKPENIPQPISNTSRANLNKLLTDYTEMKKAILHVYWEEFQKDPVGLMSRVAQPASKKIDQNKLKPEMDEKGNLTTAGFACSQCGQPLFVYKLEQVSEKGKAYTNYFGRCNVAEHEKLILLAQLKPEKDSDEAVTYSLGKFGQRALDFYSIHVTKESTHPVKPLAQIAGNRYASVPVGKALSDACMGTIASFLSKYQDIIIEHQKVVKGNQKRLESLRELAGKENLEYPSVTLPPQPHTKEGVDAYNEVIARVRMWVNLNLWQKLKLSRDDAKPLLRLKGFPSFPLVERQANEVDWWDMVCNVKKLINEKKEDGKVFWQNLAGYKRQEALRPYLSSEEDRKKGKKFARYQLGDLLLHLEKKHGEDWGKVYDEAWERIDKKVEGLSKHIKLEEERRSEDAQSKAALTDWLRAKASFVIEGLKEADKDEFCRCELKLQKWYGDLRGKPFAIEAENSILDISGFSKQYNCAFIWQKDGVKKLNLYLIINYFKGGKLRFKKIKPEAFEANRFYTVINKKSGEIVPMEVNFNFDDPNLIILPLAFGKRQGREFIWNDLLSLETGSLKLANGRVIEKTLYNRRTRQDEPALFVALTFERREVLDSSNIKPMNLIGVDRGENIPAVIALTDPEGCPLSRFKDSLGNPTHILRIGESYKEKQRTIQAKKEVEQRRAGGYSRKYASKAKNLADDMVRNTARDLLYYAVTQDAMLIFENLSRGFGRQGKRTFMAERQYTRMEDWLTAKLAYEGLASKTYLSKTLAQYTSKTCSNCGFTITSADYDRVLEKLKKTATGWMTTINGKELKVEGQITYYNRYKRQNVVKDLSVELDRLSEESVNNDISSWTKGRSGEALSLLKKRFSHRPVQEKFVCLNCGFETHADEQAALNIARSWLFLRSQEYKKYQTNKTTGNTDKRAFVETWQSFYRKKLKEVWKPAV

SEQ ID NO: 38575 - protein, 978 aa, synthetic construct
  REGION 1..978: note = engineered CasX variant
QEIKRLNKIRRRLVKDSNTKKAGKTGPMKTLLVRVMTPDLRERLENLRKKPENIPQPISNTSRANLNKLLTDYTEMKKAILHVYWEEFQKDPVGLMSRVAQPASKKIDQNKLKPEMDEKGNLTTAGFACSQCGQPLFVYKLEQVSEKGKAYTNYFGRCNVAEHEKLIKLAQLKPEKDSDEAVTYSLGKFGQRALDFYSIHVTKESTHPVKPLAQIAGNRYASGPVGKALSDACMGTIASFLSKYQDIIIEHQKVVKGNQKRLESLRELAGKENLEYPSVTLPPQPHTKEGVDAYNEVIARVRMWVNLNLWQKLKLSRDDAKPLLRLKGFPSFPLVERQANEVDWWDMVCNVKKLINEKKEDGKVFWQNLAGYKRQEALRPYLSSEEDRKKGKKFARYQLGDLLLHLEKKHGEDWGKVYDEAWERIDKKVEGLSKHIKLEEERRSEDAQSKAALTDWLRAKASFVIEGLKEADKDEFCRCELKLQKWYGDLRGKPFAIEAENSILDISGFSKQYNCAFIWQKDGVKKLNLYLIINYFKGGKLRFKKIKPEAFEANRFYTVINKKSGEIVPMEVNFNFDDPNLIILPLAFGKRQGREFIWNDLLSLETGSLKLANGRVIEKTLYNRRTRQDEPALFVALTFERREVLDSSNIKPMNLIGVDRGENIPAVIALTDPEGCPLSRFKDSLGNPTHILRIGESYKEKQRTIQAKKEVEQRRAGGYSRKYASKAKNLADDMVRNTARDLLYYAVTQDAMLIFENLSRGFGRQGKRTFMAERQYTRMEDWLTAKLAYEGLASKTYLSKTLAQYTSKTCSNCGFTITSADYDRVLEKLKKTATGWMTTINGKELKVEGQITYYNRYKRQNVVKDLSVELDRLSEESVNNDISSWTKGRSGEALSLLKKRFSHRPVQEKFVCLNCGFETHADEQAALNIARSWLFLRSQEYKKYQTNKTTGNTDKRAFVETWQSFYRKKLKEVWKPAV

SEQ ID NO: 38576 - protein, 977 aa, synthetic construct
  REGION 1..977: note = engineered CasX variant
QEIKRLNKIRRRLVKDSNTKKAGKTGPMKTLLVRVMTPDLRERLENLRKKPENIPQPISNTSRANLNKLLTDYTEMKKAILHVYWEEFQKDPVGLMSRVAQPASKKIDQNKLKPEMDEKGNLTTAGFACSQCGQPLFVYKLEQVSEKGKAYTNYFGRCNVAEHEKLILLAQLKPEKDSDEAVTYSLGKFGQRALDFYSIHVTKESTHPVKPLAQIAGNRYASPVGKALSDACMGTIASFLSKYQDIIIEHQKVVKGNQKRLESLRELAGKENLEYPSVTLPPQPHTKEGVDAYNEVIARVRMWVNLNLWQKLKLSRDDAKPLLRLKGFPSFPLVERQANEVDWWDMVCNVKKLINEKKEDGKVFWQNLAGYKRQEALRPYLSSEEDRKKGKKFARYQLGDLLLHLEKKHGEDWGKVYDEAWERIDKKVEGLSKHIKLEEERRSEDAQSKAALTDWLRAKASFVIEGLKEADKDEFCRCELKLQKWYGDLRGKPFAIEAENSILDISGFSKQYNCAFIWQKDGVKKLNLYLIINYFKGGKLRFKKIKPEAFEANRFYTVINKKSGEIVPMEVNFNFDDPNLIILPLAFGKRQGREFIWNDLLSLETGSLKLANGRVIEKTLYNRRTRQDEPALFVALTFERREVLDSSNIKPMNLIGVDRGENIPAVIALTDPEGCPLSRFKDSLGNPTHILRIGESYKEKQRTIQAKKEVEQRRAGGYSRKYASKAKNLADDMVRNTARDLLYYAVTQDAMLIFENLSRGFGRQGKRTFMAERQYTRMEDWLTAKLAYEGLASKTYLSKTLAQYTSKTCSNCGFTITSADYDRVLEKLKKTATGWMTTINGKELKVEGQITYYNRYKRQNVVKDLSVELDRLSEESVNNDISSWTKGRSGEALSLLKKRFSHRPVQEKFVCLNCGFETHADEQAALNIARSWLFLRSQEYKKYQTNKTTGNTDKRAFVETWQSFYRKKLKEVWKPAV

SEQ ID NO: 38577 - protein, 978 aa, synthetic construct
  REGION 1..978: note = engineered CasX variant
QEIKRLNKIRRRLVKDSNTKKAGKTGPMKTLLVRVMTPDLRERLENLRKKPENIPQPISNTSRANLNKLLTDYTEMKKAILHVYWEEFQKDPVGLMSRVAQPASKKIDQNKLKPEMDEKGNLTTAGFACSQCGQPLFVYKLEQVSEKGKAYTNYFGRCNVAEHEKLILLAQLKPEKDSDEAVTYSLGKFGQRALDFYSIHVTKESTHPVKPLAQIAGNRYASYPVGKALSDACMGTIASFLSKYQDIIIEHQKVVKGNQKRLESLRELAGKENLEYPSVTLPPQPHTKEGVDAYNEVIARVRMWVNLNLWQKLKLSRDDAKPLLRLKGFPSFPLVERQANEVDWWDMVCNVKKLINEKKEDGKVFWQNLAGYKRQEALRPYLSSEEDRKKGKKFARYQLGDLLLHLEKKHGEDWGKVYDEAWERIDKKVEGLSKHIKLEEERRSEDAQSKAALTDWLRAKASFVIEGLKEADKDEFCRCELKLQKWYGDLRGKPFAIEAENSILDISGFSKQYNCAFIWQKDGVKKLNLYLIINYFKGGKLRFKKIKPEAFEANRFYTVINKKSGEIVPMEVNFNFDDPNLIILPLAFGKRQGREFIWNDLLSLETGSLKLANGRVIEKTLYNRRTRQDEPALFVALTFERREVLDSSNIKPMNLIGVDRGENIPAVIALTDPEGCPLSRFKDSLGNPTHILRIGESYKEKQRTIQAKKEVEQRRAGGYSRKYASKAKNLADDMVRNTARDLLYYAVTQDAMLIFENLSRGFGRQGKRTFMAERQYTRMEDWLTAKLAYEGLPSKVYLSKTLAQYTSKTCSNCGFTITSADYDRVLEKLKKTATGWMTTINGKELKVEGQITYYNRYKRQNVVKDLSVELDRLSEESVNNDISSWTKGRSGEALSLLKKRFSHRPVQEKFVCLNCGFETHADEQAALNIARSWLFLRSQEYKKYQTNKTTGNTDKRAFVETWQSFYRKKLKEVWKPAV

SEQ ID NO: 38578 - protein, 978 aa, synthetic construct
  REGION 1..978: note = engineered CasX variant
QEIKRLNKIRRRLVKDSNTKKAGKTGPMKTLLVRVMTPDLRERLENLRKKPENIPQPISNTSRANLNKLLTDYTEMKKAILHVYWEEFQKDPVGLMSRVAQPASKKIDQNKLKPEMDEKGNLTTAGFACSQCGQPLFVYKLEQVSEKGKAYTNYFGRCNVAEHEKLILLAQLKPEKDSDEAVTYSLGKFGQRALDFYSIHVTKESTHPVKPLAQIAGNRYASHPVGKALSDACMGTIASFLSKYQDIIIEHQKVVKGNQKRLESLRELAGKENLEYPSVTLPPQPHTKEGVDAYNEVIARVRMWVNLNLWQKLKLSRDDAKPLLRLKGFPSFPLVERQANEVDWWDMVCNVKKLINEKKEDGKVFWQNLAGYKRQEALRPYLSSEEDRKKGKKFARYQLGDLLLHLEKKHGEDWGKVYDEAWERIDKKVEGLSKHIKLEEERRSEDAQSKAALTDWLRAKASFVIEGLKEADKDEFCRCELKLQKWYGDLRGKPFAIEAENSILDISGFSKQYNCAFIWQKDGVKKLNLYLIINYFKGGKLRFKKIKPEAFEANRFYTVINKKSGEIVPMEVNFNFDDPNLIILPLAFGKRQGREFIWNDLLSLETGSLKLANGRVIEKTLYNRRTRQDEPALFVALTFERREVLDSSNIKPMNLIGVDRGENIPAVIALTDPEGCPLSRFKDSLGNPTHILRIGESYKEKQRTIQAKKEVEQRRAGGYSRKYASKAKNLADDMVRNTARDLLYYAVTQDAMLIFENLSRGFGRQGKRTFMAERQYTRMEDWLTAKLAYEGLPSKVYLSKTLAQYTSKTCSNCGFTITSADYDRVLEKLKKTATGWMTTINGKELKVEGQITYYNRYKRQNVVKDLSVELDRLSEESVNNDISSWTKGRSGEALSLLKKRFSHRPVQEKFVCLNCGFETHADEQAALNIARSWLFLRSQEYKKYQTNKTTGNTDKRAFVETWQSFYRKKLKEVWKPAV

SEQ ID NO: 38579 - protein, 978 aa, synthetic construct
  REGION 1..978: note = engineered CasX variant
QEIKRLNKIRRRLVKDSNTKKAGKTGPMKTLLVRVMTPDLRERLENLRKKPENIPQPISNTSRANLNKLLTDYTEMKKAILHVYWEEFQKDPVGLMSRVAQPASKKIDQNKLKPEMDEKGNLTTAGFACSQCGQPLFVYKLEQVSEKGKAYTNYFGRCNVAEHEKLILLAQLKPEKDSDEAVTYSLGKFGQRALDFYSIHVTKESTHPVKPLAQIAGNRYASSPVGKALSDACMGTIASFLSKYQDIIIEHQKVVKGNQKRLESLRELAGKENLEYPSVTLPPQPHTKEGVDAYNEVIARVRMWVNLNLWQKLKLSRDDAKPLLRLKGFPSFPLVERQANEVDWWDMVCNVKKLINEKKEDGKVFWQNLAGYKRQEALRPYLSSEEDRKKGKKFARYQLGDLLLHLEKKHGEDWGKVYDEAWERIDKKVEGLSKHIKLEEERRSEDAQSKAALTDWLRAKASFVIEGLKEADKDEFCRCELKLQKWYGDLRGKPFAIEAENSILDISGFSKQYNCAFIWQKDGVKKLNLYLIINYFKGGKLRFKKIKPEAFEANRFYTVINKKSGEIVPMEVNFNFDDPNLIILPLAFGKRQGREFIWNDLLSLETGSLKLANGRVIEKTLYNRRTRQDEPALFVALTFERREVLDSSNIKPMNLIGVDRGENIPAVIALTDPEGCPLSRFKDSLGNPTHILRIGESYKEKQRTIQAKKEVEQRRAGGYSRKYASKAKNLADDMVRNTARDLLYYAVTQDAMLIFENLSRGFGRQGKRTFMAERQYTRMEDWLTAKLAYEGLPSKVYLSKTLAQYTSKTCSNCGFTITSADYDRVLEKLKKTATGWMTTINGKELKVEGQITYYNRYKRQNVVKDLSVELDRLSEESVNNDISSWTKGRSGEALSLLKKRFSHRPVQEKFVCLNCGFETHADEQAALNIARSWLFLRSQEYKKYQTNKTTGNTDKRAFVETWQSFYRKKLKEVWKPAV

SEQ ID NO: 38580 - protein, 978 aa, synthetic construct
  REGION 1..978: note = engineered CasX variant
QEIKRLNKIRRRLVKDSNTKKAGKTGPMKTLLVRVMTPDLRERLENLRKKPENIPQPISNTSRANLNKLLTDYTEMKKAILHVYWEEFQKDPVGLMSRVAQPASKKIDQNKLKPEMDEKGNLTTAGFACSQCGQPLFVYKLEQVSEKGKAYTNYFGRCNVAEHEKLILLAQLKPEKDSDEAVTYSLGKFGQRALDFYSIHVTKESTHPVKPLAQIAGNRYASTPVGKALSDACMGTIASFLSKYQDIIIEHQKVVKGNQKRLESLRELAGKENLEYPSVTLPPQPHTKEGVDAYNEVIARVRMWVNLNLWQKLKLSRDDAKPLLRLKGFPSFPLVERQANEVDWWDMVCNVKKLINEKKEDGKVFWQNLAGYKRQEALRPYLSSEEDRKKGKKFARYQLGDLLLHLEKKHGEDWGKVYDEAWERIDKKVEGLSKHIKLEEERRSEDAQSKAALTDWLRAKASFVIEGLKEADKDEFCRCELKLQKWYGDLRGKPFAIEAENSILDISGFSKQYNCAFIWQKDGVKKLNLYLIINYFKGGKLRFKKIKPEAFEANRFYTVINKKSGEIVPMEVNFNFDDPNLIILPLAFGKRQGREFIWNDLLSLETGSLKLANGRVIEKTLYNRRTRQDEPALFVALTFERREVLDSSNIKPMNLIGVDRGENIPAVIALTDPEGCPLSRFKDSLGNPTHILRIGESYKEKQRTIQAKKEVEQRRAGGYSRKYASKAKNLADDMVRNTARDLLYYAVTQDAMLIFENLSRGFGRQGKRTFMAERQYTRMEDWLTAKLAYEGLPSKVYLSKTLAQYTSKTCSNCGFTITSADYDRVLEKLKKTATGWMTTINGKELKVEGQITYYNRYKRQNVVKDLSVELDRLSEESVNNDISSWTKGRSGEALSLLKKRFSHRPVQEKFVCLNCGFETHADEQAALNIARSWLFLRSQEYKKYQTNKTTGNTDKRAFVETWQSFYRKKLKEVWKPAV

SEQ ID NO: 38581 - protein, 978 aa, synthetic construct
  REGION 1..978: note = engineered CasX variant
QEIKRLNKIRRRLVKDSNTKKAGKTGPMKTLLVRVMTPDLRERLENLRKKPENIPQPISNTSRANLNKLLTDYTEMKKAILHVYWEEFQKDPVGLMSRVAQPASKKIDQNKLKPEMDEKGNLTTAGFACSQCGQPLFVYKLEQVSEKGKAYTNYFGRCNVAEHEKLILLAQLKPEKDSDEAVTYSLGKFGQRALDFYSIHVTKESTHPVKPLAQIAGNRYASAPVGKALSDACMGTIASFLSKYQDIIIEHQKVVKGNQKRLESLRELAGKENLEYPSVTLPPQPHTKEGVDAYNEVIARVRMWVNLNLWQKLKLSRDDAKPLLRLKGFPSFPLVERQANEVDWWDMVCNVKKLINEKKEDGKVFWQNLAGYKRQEALRPYLSSEEDRKKGKKFARYQLGDLLLHLEKKHGEDWGKVYDEAWERIDKKVEGLSKHIKLEEERRSEDAQSKAALTDWLRAKASFVIEGLKEADKDEFCRCELKLQKWYGDLRGKPFAIEAENSILDISGFSKQYNCAFIWQKDGVKKLNLYLIINYFKGGKLRFKKIKPEAFEANRFYTVINKKSGEIVPMEVNFNFDDPNLIILPLAFGKRQGREFIWNDLLSLETGSLKLANGRVIEKTLYNRRTRQDEPALFVALTFERREVLDSSNIKPMNLIGVDRGENIPAVIALTDPEGCPLSRFKDSLGNPTHILRIGESYKEKQRTIQAKKEVEQRRAGGYSRKYASKAKNLADDMVRNTARDLLYYAVTQDAMLIFENLSRGFGRQGKRTFMAERQYTRMEDWLTAKLAYEGLPSKVYLSKTLAQYTSKTCSNCGFTITSADYDRVLEKLKKTATGWMTTINGKELKVEGQITYYNRYKRQNVVKDLSVELDRLSEESVNNDISSWTKGRSGEALSLLKKRFSHRPVQEKFVCLNCGFETHADEQAALNIARSWLFLRSQEYKKYQTNKTTGNTDKRAFVETWQSFYRKKLKEVWKPAV

SEQ ID NO: 38582 - protein, 978 aa, synthetic construct
  REGION 1..978: note = engineered CasX variant
QEIKRLNKIRRRLVKDSNTKKAGKTGPMKTLLVRVMTPDLRERLENLRKKPENIPQPISNTSRANLNKLLTDYTEMKKAILHVYWEEFQKDPVGLMSRVAQPASKKIDQNKLKPEMDEKGNLTTAGFACSQCGQPLFVYKLEQVSEKGKAYTNYFGRCNVAEHEKLILLAQLKPEKDSDEAVTYSLGKFGQRALDFYSIHVTKESTHPVKPLAQIAGNRYASVPVGKALSDACMGTIASFLSKYQDIIIEHQKVVKGNQKRLESLRELAGKENLEYPSVTLPPQPHTKEGVDAYNEVIARVRMWVNLNLWQKLKLSRDDAKPLLRLKGFPSFPLVERQANEVDWWDMVCNVKKLINEKKEDGKVFWQNLAGYKRQEALRPYLSSEEDRKKGKKFARYQLGDLLLHLEKKHGEDWGKVYDEAWERIDKKVEGLSKHIKLEEERRSEDAQSKAALTDWLRAKASFVIEGLKEADKDEFCRCELKLQKWYGDLRGKPFAIEAENSILDISGFSKQYNCAFIWQKDGVKKLNLYLIINYFKGGKLRFKKIKPEAFEANRFYTVINKKSGEIVPMEVNFNFDDPNLIILPLAFGKRQGREFIWNDLLSLETGSLKLANGRVIEKTLYNRRTRQDEPALFVALTFERREVLDSSNIKPMNLIGVDRGENIPAVIALTDPEGCPLSRFKDSLGNPTHILRIGESYKEKQRTIQAKKEVEQRRAGGYSRKYASKAKNLADDMVRNTARDLLYYAVTQDAMLIFENLSRGFGRQGKRTFMAERQYTRMEDWLTAKLAYEGLPSKVYLSKTLAQYTSKTCSNCGFTITSADYDRVLEKLKKTATGWMTTINGKELKVEGQITYYNRYKRQNVVKDLSVELDRLSEESVNNDISSWTKGRSGEALSLLKKRFSHRPVQEKFVCLNCGFETHADEQAALNIARSWLFLRSQEYKKYQTNKTTGNTDKRAFVETWQSFYRKKLKEVWKPAV

SEQ ID NO: 38583 - protein, 978 aa, synthetic construct
  REGION 1..978: note = engineered CasX variant
QEIKRLNKIRRRLVKDSNTKKAGKTGPMKTLLVRVMTPDLRERLENLRKKPENIPQPISNTSRANLNKLLTDYTEMKKAILHVYWEEFQKDPVGLMSRVAQPASKKIDQNKLKPEMDEKGNLTTAGFACSQCGQPLFVYKLEQVSEKGKAYTNYFGRCNVAEHEKLIKLAQLKPEKDSDEAVTYSLGKFGQRALDFYSIHVTKESTHPVKPLAQIAGNRYASGPVGKALSDACMGTIASFLSKYQDIIIEHQKVVKGNQKRLESLRELAGKENLEYPSVTLPPQPHTKEGVDAYNEVIARVRMWVNLNLWQKLKLSRDDAKPLLRLKGFPSFPLVERQANEVDWWDMVCNVKKLINEKKEDGKVFWQNLAGYKRQEALRPYLSSEEDRKKGKKFARYQLGDLLLHLEKKHGEDWGKVYDEAWERIDKKVEGLSKHIKLEEERRSEDAQSKAALTDWLRAKASFVIEGLKEADKDEFCRCELKLQKWYGDLRGKPFAIEAENSILDISGFSKQYNCAFIWQKDGVKKLNLYLIINYFKGGKLRFKKIKPEAFEANRFYTVINKKSGEIVPMEVNFNFDDPNLIILPLAFGKRQGREFIWNDLLSLETGSLKLANGRVIEKTLYNRRTRQDEPALFVALTFERREVLDSSNIKPMNLIGVDRGENIPAVIALTDPEGCPLSRFKDSLGNPTHILRIGESYKEKQRTIQAKKEVEQRRAGGYSRKYASKAKNLADDMVRNTARDLLYYAVTQDAMLIFENLSRGFGRQGKRTFMAERQYTRMEDWLTAKLAYEGLPSKVYLSKTLAQYTSKTCSNCGFTITSADYDRVLEKLKKTATGWMTTINGKELKVEGQITYYNRYKRQNVVKDLSVELDRLSEESVNNDISSWTKGRSGEALSLLKKRFSHRPVQEKFVCLNCGFETHADEQAALNIARSWLFLRSQEYKKYQTNKTTGNTDKRAFVETWQSFYRKKLKEVWKPAV

SEQ ID NO: 38584 - protein, 977 aa, synthetic construct
  REGION 1..977: note = engineered CasX variant
QEIKRLNKIRRRLVKDSNTKKAGKTGPMKTLLVRVMTPDLRERLENLRKKPENIPQPISNTSRANLNKLLTDYTEMKKAILHVYWEEFQKDPVGLMSRVAQPASKKIDQNKLKPEMDEKGNLTTAGFACSQCGQPLFVYKLEQVSEKGKAYTNYFGRCNVAEHEKLILLAQLKPEKDSDEAVTYSLGKFGQRALDFYSIHVTKESTHPVKPLAQIAGNRYASPVGKALSDACMGTIASFLSKYQDIIIEHQKVVKGNQKRLESLRELAGKENLEYPSVTLPPQPHTKEGVDAYNEVIARVRMWVNLNLWQKLKLSRDDAKPLLRLKGFPSFPLVERQANEVDWWDMVCNVKKLINEKKEDGKVFWQNLAGYKRQEALRPYLSSEEDRKKGKKFARYQLGDLLLHLEKKHGEDWGKVYDEAWERIDKKVEGLSKHIKLEEERRSEDAQSKAALTDWLRAKASFVIEGLKEADKDEFCRCELKLQKWYGDLRGKPFAIEAENSILDISGFSKQYNCAFIWQKDGVKKLNLYLIINYFKGGKLRFKKIKPEAFEANRFYTVINKKSGEIVPMEVNFNFDDPNLIILPLAFGKRQGREFIWNDLLSLETGSLKLANGRVIEKTLYNRRTRQDEPALFVALTFERREVLDSSNIKPMNLIGVDRGENIPAVIALTDPEGCPLSRFKDSLGNPTHILRIGESYKEKQRTIQAKKEVEQRRAGGYSRKYASKAKNLADDMVRNTARDLLYYAVTQDAMLIFENLSRGFGRQGKRTFMAERQYTRMEDWLTAKLAYEGLPSKVYLSKTLAQYTSKTCSNCGFTITSADYDRVLEKLKKTATGWMTTINGKELKVEGQITYYNRYKRQNVVKDLSVELDRLSEESVNNDISSWTKGRSGEALSLLKKRFSHRPVQEKFVCLNCGFETHADEQAALNIARSWLFLRSQEYKKYQTNKTTGNTDKRAFVETWQSFYRKKLKEVWKPAV

SEQ ID NO: 38585 - protein, 979 aa, synthetic construct
  REGION 1..979: note = engineered CasX variant
QEIKRLNKIRRRLVKDSNTKKAGKTGPMKTLLVRVMTPDLRERLENLRKKPENIPQPISNTSRANLNKLLTDYTEMKKAILHVYWEEFQKDPVGLMSRVAQPASKKIDQNKLKPEMDEKGNLTTAGFACSQCGQPLFVYKLEQVSEKGKAYTNYFGRCNVAEHEKLILLAQLKPEKDSDEAVTYSLGKFGQRALDFYSIHVTKESTHPVKPLAQIAGNRYASYPVGKALSDACMGTIASFLSKYQDIIIEHQKVVKGNQKRLESLRELAGKENLEYPSVTLPPQPHTKEGVDAYNEVIARVRMWVNLNLWQKLKLSRDDAKPLLRLKGFPSFPLVERQANEVDWWDMVCNVKKLINEKKEDGKVFWQNLAGYKRQEALRPYLSSEEDRKKGKKFARYQLGDLLLHLEKKHGEDWGKVYDEAWERIDKKVEGLSKHIKLEEERRSEDAQSKAALTDWLRAKASFVIEGLKEADKDEFCRCELKLQKWYGDLRGKPFAIEAENSILDISGFSKQYNCAFIWQKDGVKKLNLYLIINYFKGGKLRFKKIKPEAFEANRFYTVINKKSGEIVPMEVNFNFDDPNLIILPLAFGKRQGREFIWNDLLSLETGSLKLANGRVIEKTLYNRRTRQDEPALFVALTFERREVLDSSNIKPMNLIGVDRGENIPAVIALTDPEGCPLSRFKDSLGNPTHILRIGESYKEKQRTIQAKKEVEQRRAGGYSRKYASKAKNLADDMVRNTARDLLYYAVTQDAMLIFENLSRGFGRQGKRTFMAERQYTRMEDWLTAKLAYEGPLPSKTYLSKTLAQYTSKTCSNCGFTITSADYDRVLEKLKKTATGWMTTINGKELKVEGQITYYNRYKRQNVVKDLSVELDRLSEESVNNDISSWTKGRSGEALSLLKKRFSHRPVQEKFVCLNCGFETHADEQAALNIARSWLFLRSQEYKKYQTNKTTGNTDKRAFVETWQSFYRKKLKEVWKPAV

SEQ ID NO: 38586 - protein, 979 aa, synthetic construct
  REGION 1..979: note = engineered CasX variant
QEIKRLNKIRRRLVKDSNTKKAGKTGPMKTLLVRVMTPDLRERLENLRKKPENIPQPISNTSRANLNKLLTDYTEMKKAILHVYWEEFQKDPVGLMSRVAQPASKKIDQNKLKPEMDEKGNLTTAGFACSQCGQPLFVYKLEQVSEKGKAYTNYFGRCNVAEHEKLILLAQLKPEKDSDEAVTYSLGKFGQRALDFYSIHVTKESTHPVKPLAQIAGNRYASHPVGKALSDACMGTIASFLSKYQDIIIEHQKVVKGNQKRLESLRELAGKENLEYPSVTLPPQPHTKEGVDAYNEVIARVRMWVNLNLWQKLKLSRDDAKPLLRLKGFPSFPLVERQANEVDWWDMVCNVKKLINEKKEDGKVFWQNLAGYKRQEALRPYLSSEEDRKKGKKFARYQLGDLLLHLEKKHGEDWGKVYDEAWERIDKKVEGLSKHIKLEEERRSEDAQSKAALTDWLRAKASFVIEGLKEADKDEFCRCELKLQKWYGDLRGKPFAIEAENSILDISGFSKQYNCAFIWQKDGVKKLNLYLIINYFKGGKLRFKKIKPEAFEANRFYTVINKKSGEIVPMEVNFNFDDPNLIILPLAFGKRQGREFIWNDLLSLETGSLKLANGRVIEKTLYNRRTRQDEPALFVALTFERREVLDSSNIKPMNLIGVDRGENIPAVIALTDPEGCPLSRFKDSLGNPTHILRIGESYKEKQRTIQAKKEVEQRRAGGYSRKYASKAKNLADDMVRNTARDLLYYAVTQDAMLIFENLSRGFGRQGKRTFMAERQYTRMEDWLTAKLAYEGPLPSKTYLSKTLAQYTSKTCSNCGFTITSADYDRVLEKLKKTATGWMTTINGKELKVEGQITYYNRYKRQNVVKDLSVELDRLSEESVNNDISSWTKGRSGEALSLLKKRFSHRPVQEKFVCLNCGFETHADEQAALNIARSWLFLRSQEYKKYQTNKTTGNTDKRAFVETWQSFYRKKLKEVWKPAV

SEQ ID NO: 38587 - protein, 979 aa, synthetic construct
  REGION 1..979: note = engineered CasX variant
QEIKRLNKIRRRLVKDSNTKKAGKTGPMKTLLVRVMTPDLRERLENLRKKPENIPQPISNTSRANLNKLLTDYTEMKKAILHVYWEEFQKDPVGLMSRVAQPASKKIDQNKLKPEMDEKGNLTTAGFACSQCGQPLFVYKLEQVSEKGKAYTNYFGRCNVAEHEKLILLAQLKPEKDSDEAVTYSLGKFGQRALDFYSIHVTKESTHPVKPLAQIAGNRYASSPVGKALSDACMGTIASFLSKYQDIIIEHQKVVKGNQKRLESLRELAGKENLEYPSVTLPPQPHTKEGVDAYNEVIARVRMWVNLNLWQKLKLSRDDAKPLLRLKGFPSFPLVERQANEVDWWDMVCNVKKLINEKKEDGKVFWQNLAGYKRQEALRPYLSSEEDRKKGKKFARYQLGDLLLHLEKKHGEDWGKVYDEAWERIDKKVEGLSKHIKLEEERRSEDAQSKAALTDWLRAKASFVIEGLKEADKDEFCRCELKLQKWYGDLRGKPFAIEAENSILDISGFSKQYNCAFIWQKDGVKKLNLYLIINYFKGGKLRFKKIKPEAFEANRFYTVINKKSGEIVPMEVNFNFDDPNLIILPLAFGKRQGREFIWNDLLSLETGSLKLANGRVIEKTLYNRRTRQDEPALFVALTFERREVLDSSNIKPMNLIGVDRGENIPAVIALTDPEGCPLSRFKDSLGNPTHILRIGESYKEKQRTIQAKKEVEQRRAGGYSRKYASKAKNLADDMVRNTARDLLYYAVTQDAMLIFENLSRGFGRQGKRTFMAERQYTRMEDWLTAKLAYEGPLPSKTYLSKTLAQYTSKTCSNCGFTITSADYDRVLEKLKKTATGWMTTINGKELKVEGQITYYNRYKRQNVVKDLSVELDRLSEESVNNDISSWTKGRSGEALSLLKKRFSHRPVQEKFVCLNCGFETHADEQAALNIARSWLFLRSQEYKKYQTNKTTGNTDKRAFVETWQSFYRKKLKEVWKPAV

SEQ ID NO: 38588 - protein, 979 aa, synthetic construct
  REGION 1..979: note = engineered CasX variant
QEIKRLNKIRRRLVKDSNTKKAGKTGPMKTLLVRVMTPDLRERLENLRKKPENIPQPISNTSRANLNKLLTDYTEMKKAILHVYWEEFQKDPVGLMSRVAQPASKKIDQNKLKPEMDEKGNLTTAGFACSQCGQPLFVYKLEQVSEKGKAYTNYFGRCNVAEHEKLILLAQLKPEKDSDEAVTYSLGKFGQRALDFYSIHVTKESTHPVKPLAQIAGNRYASTPVGKALSDACMGTIASFLSKYQDIIIEHQKVVKGNQKRLESLRELAGKENLEYPSVTLPPQPHTKEGVDAYNEVIARVRMWVNLNLWQKLKLSRDDAKPLLRLKGFPSFPLVERQANEVDWWDMVCNVKKLINEKKEDGKVFWQNLAGYKRQEALRPYLSSEEDRKKGKKFARYQLGDLLLHLEKKHGEDWGKVYDEAWERIDKKVEGLSKHIKLEEERRSEDAQSKAALTDWLRAKASFVIEGLKEADKDEFCRCELKLQKWYGDLRGKPFAIEAENSILDISGFSKQYNCAFIWQKDGVKKLNLYLIINYFKGGKLRFKKIKPEAFEANRFYTVINKKSGEIVPMEVNFNFDDPNLIILPLAFGKRQGREFIWNDLLSLETGSLKLANGRVIEKTLYNRRTRQDEPALFVALTFERREVLDSSNIKPMNLIGVDRGENIPAVIALTDPEGCPLSRFKDSLGNPTHILRIGESYKEKQRTIQAKKEVEQRRAGGYSRKYASKAKNLADDMVRNTARDLLYYAVTQDAMLIFENLSRGFGRQGKRTFMAERQYTRMEDWLTAKLAYEGPLPSKTYLSKTLAQYTSKTCSNCGFTITSADYDRVLEKLKKTATGWMTTINGKELKVEGQITYYNRYKRQNVVKDLSVELDRLSEESVNNDISSWTKGRSGEALSLLKKRFSHRPVQEKFVCLNCGFETHADEQAALNIARSWLFLRSQEYKKYQTNKTTGNTDKRAFVETWQSFYRKKLKEVWKPAV

SEQ ID NO: 38589 - protein, 979 aa, synthetic construct
  REGION 1..979: note = engineered CasX variant
QEIKRLNKIRRRLVKDSNTKKAGKTGPMKTLLVRVMTPDLRERLENLRKKPENIPQPISNTSRANLNKLLTDYTEMKKAILHVYWEEFQKDPVGLMSRVAQPASKKIDQNKLKPEMDEKGNLTTAGFACSQCGQPLFVYKLEQVSEKGKAYTNYFGRCNVAEHEKLILLAQLKPEKDSDEAVTYSLGKFGQRALDFYSIHVTKESTHPVKPLAQIAGNRYASAPVGKALSDACMGTIASFLSKYQDIIIEHQKVVKGNQKRLESLRELAGKENLEYPSVTLPPQPHTKEGVDAYNEVIARVRMWVNLNLWQKLKLSRDDAKPLLRLKGFPSFPLVERQANEVDWWDMVCNVKKLINEKKEDGKVFWQNLAGYKRQEALRPYLSSEEDRKKGKKFARYQLGDLLLHLEKKHGEDWGKVYDEAWERIDKKVEGLSKHIKLEEERRSEDAQSKAALTDWLRAKASFVIEGLKEADKDEFCRCELKLQKWYGDLRGKPFAIEAENSILDISGFSKQYNCAFIWQKDGVKKLNLYLIINYFKGGKLRFKKIKPEAFEANRFYTVINKKSGEIVPMEVNFNFDDPNLIILPLAFGKRQGREFIWNDLLSLETGSLKLANGRVIEKTLYNRRTRQDEPALFVALTFERREVLDSSNIKPMNLIGVDRGENIPAVIALTDPEGCPLSRFKDSLGNPTHILRIGESYKEKQRTIQAKKEVEQRRAGGYSRKYASKAKNLADDMVRNTARDLLYYAVTQDAMLIFENLSRGFGRQGKRTFMAERQYTRMEDWLTAKLAYEGPLPSKTYLSKTLAQYTSKTCSNCGFTITSADYDRVLEKLKKTATGWMTTINGKELKVEGQITYYNRYKRQNVVKDLSVELDRLSEESVNNDISSWTKGRSGEALSLLKKRFSHRPVQEKFVCLNCGFETHADEQAALNIARSWLFLRSQEYKKYQTNKTTGNTDKRAFVETWQSFYRKKLKEVWKPAV

SEQ ID NO: 38590 - protein, 979 aa, synthetic construct
  REGION 1..979: note = engineered CasX variant
QEIKRLNKIRRRLVKDSNTKKAGKTGPMKTLLVRVMTPDLRERLENLRKKPENIPQPISNTSRANLNKLLTDYTEMKKAILHVYWEEFQKDPVGLMSRVAQPASKKIDQNKLKPEMDEKGNLTTAGFACSQCGQPLFVYKLEQVSEKGKAYTNYFGRCNVAEHEKLILLAQLKPEKDSDEAVTYSLGKFGQRALDFYSIHVTKESTHPVKPLAQIAGNRYASVPVGKALSDACMGTIASFLSKYQDIIIEHQKVVKGNQKRLESLRELAGKENLEYPSVTLPPQPHTKEGVDAYNEVIARVRMWVNLNLWQKLKLSRDDAKPLLRLKGFPSFPLVERQANEVDWWDMVCNVKKLINEKKEDGKVFWQNLAGYKRQEALRPYLSSEEDRKKGKKFARYQLGDLLLHLEKKHGEDWGKVYDEAWERIDKKVEGLSKHIKLEEERRSEDAQSKAALTDWLRAKASFVIEGLKEADKDEFCRCELKLQKWYGDLRGKPFAIEAENSILDISGFSKQYNCAFIWQKDGVKKLNLYLIINYFKGGKLRFKKIKPEAFEANRFYTVINKKSGEIVPMEVNFNFDDPNLIILPLAFGKRQGREFIWNDLLSLETGSLKLANGRVIEKTLYNRRTRQDEPALFVALTFERREVLDSSNIKPMNLIGVDRGENIPAVIALTDPEGCPLSRFKDSLGNPTHILRIGESYKEKQRTIQAKKEVEQRRAGGYSRKYASKAKNLADDMVRNTARDLLYYAVTQDAMLIFENLSRGFGRQGKRTFMAERQYTRMEDWLTAKLAYEGPLPSKTYLSKTLAQYTSKTCSNCGFTITSADYDRVLEKLKKTATGWMTTINGKELKVEGQITYYNRYKRQNVVKDLSVELDRLSEESVNNDISSWTKGRSGEALSLLKKRFSHRPVQEKFVCLNCGFETHADEQAALNIARSWLFLRSQEYKKYQTNKTTGNTDKRAFVETWQSFYRKKLKEVWKPAV

SEQ ID NO: 38591 - protein, 979 aa, synthetic construct
  REGION 1..979: note = engineered CasX variant
QEIKRLNKIRRRLVKDSNTKKAGKTGPMKTLLVRVMTPDLRERLENLRKKPENIPQPISNTSRANLNKLLTDYTEMKKAILHVYWEEFQKDPVGLMSRVAQPASKKIDQNKLKPEMDEKGNLTTAGFACSQCGQPLFVYKLEQVSEKGKAYTNYFGRCNVAEHEKLIKLAQLKPEKDSDEAVTYSLGKFGQRALDFYSIHVTKESTHPVKPLAQIAGNRYASGPVGKALSDACMGTIASFLSKYQDIIIEHQKVVKGNQKRLESLRELAGKENLEYPSVTLPPQPHTKEGVDAYNEVIARVRMWVNLNLWQKLKLSRDDAKPLLRLKGFPSFPLVERQANEVDWWDMVCNVKKLINEKKEDGKVFWQNLAGYKRQEALRPYLSSEEDRKKGKKFARYQLGDLLLHLEKKHGEDWGKVYDEAWERIDKKVEGLSKHIKLEEERRSEDAQSKAALTDWLRAKASFVIEGLKEADKDEFCRCELKLQKWYGDLRGKPFAIEAENSILDISGFSKQYNCAFIWQKDGVKKLNLYLIINYFKGGKLRFKKIKPEAFEANRFYTVINKKSGEIVPMEVNFNFDDPNLIILPLAFGKRQGREFIWNDLLSLETGSLKLANGRVIEKTLYNRRTRQDEPALFVALTFERREVLDSSNIKPMNLIGVDRGENIPAVIALTDPEGCPLSRFKDSLGNPTHILRIGESYKEKQRTIQAKKEVEQRRAGGYSRKYASKAKNLADDMVRNTARDLLYYAVTQDAMLIFENLSRGFGRQGKRTFMAERQYTRMEDWLTAKLAYEGPLPSKTYLSKTLAQYTSKTCSNCGFTITSADYDRVLEKLKKTATGWMTTINGKELKVEGQITYYNRYKRQNVVKDLSVELDRLSEESVNNDISSWTKGRSGEALSLLKKRFSHRPVQEKFVCLNCGFETHADEQAALNIARSWLFLRSQEYKKYQTNKTTGNTDKRAFVETWQSFYRKKLKEVWKPAV

SEQ ID NO: 38592 - protein, 978 aa, synthetic construct
  REGION 1..978: note = engineered CasX variant
QEIKRLNKIRRRLVKDSNTKKAGKTGPMKTLLVRVMTPDLRERLENLRKKPENIPQPISNTSRANLNKLLTDYTEMKKAILHVYWEEFQKDPVGLMSRVAQPASKKIDQNKLKPEMDEKGNLTTAGFACSQCGQPLFVYKLEQVSEKGKAYTNYFGRCNVAEHEKLILLAQLKPEKDSDEAVTYSLGKFGQRALDFYSIHVTKESTHPVKPLAQIAGNRYASPVGKALSDACMGTIASFLSKYQDIIIEHQKVVKGNQKRLESLRELAGKENLEYPSVTLPPQPHTKEGVDAYNEVIARVRMWVNLNLWQKLKLSRDDAKPLLRLKGFPSFPLVERQANEVDWWDMVCNVKKLINEKKEDGKVFWQNLAGYKRQEALRPYLSSEEDRKKGKKFARYQLGDLLLHLEKKHGEDWGKVYDEAWERIDKKVEGLSKHIKLEEERRSEDAQSKAALTDWLRAKASFVIEGLKEADKDEFCRCELKLQKWYGDLRGKPFAIEAENSILDISGFSKQYNCAFIWQKDGVKKLNLYLIINYFKGGKLRFKKIKPEAFEANRFYTVINKKSGEIVPMEVNFNFDDPNLIILPLAFGKRQGREFIWNDLLSLETGSLKLANGRVIEKTLYNRRTRQDEPALFVALTFERREVLDSSNIKPMNLIGVDRGENIPAVIALTDPEGCPLSRFKDSLGNPTHILRIGESYKEKQRTIQAKKEVEQRRAGGYSRKYASKAKNLADDMVRNTARDLLYYAVTQDAMLIFENLSRGFGRQGKRTFMAERQYTRMEDWLTAKLAYEGPLPSKTYLSKTLAQYTSKTCSNCGFTITSADYDRVLEKLKKTATGWMTTINGKELKVEGQITYYNRYKRQNVVKDLSVELDRLSEESVNNDISSWTKGRSGEALSLLKKRFSHRPVQEKFVCLNCGFETHADEQAALNIARSWLFLRSQEYKKYQTNKTTGNTDKRAFVETWQSFYRKKLKEVWKPAV

SEQ ID NO: 38593 - protein, 979 aa, synthetic construct
  REGION 1..979: note = engineered CasX variant
QEIKRLNKIRRRLVKDSNTKKAGKTGPMKTLLVRVMTPDLRERLENLRKKPENIPQPISNTSRANLNKLLTDYTEMKKAILHVYWEEFQKDPVGLMSRVAQPASKKIDQNKLKPEMDEKGNLTTAGFACSQCGQPLFVYKLEQVSEKGKAYTNYFGRCNVAEHEKLILLAQLKPEKDSDEAVTYSLGKFGQRALDFYSIHVTKESTHPVKPLAQIAGNRYASYPVGKALSDACMGTIASFLSKYQDIIIEHQKVVKGNQKRLESLRELAGKENLEYPSVTLPPQPHTKEGVDAYNEVIARVRMWVNLNLWQKLKLSRDDAKPLLRLKGFPSFPLVERQANEVDWWDMVCNVKKLINEKKEDGKVFWQNLAGYKRQEALRPYLSSEEDVRKKGKKFARYQLGDLLLHLEKKHGEDWGKVYDEAWERIDKKVEGLSKHIKLEEERRSEDAQSKAALTDWLRAKASFVIEGLKEADKDEFCRCELKLQKWYGDLRGKPFAIEAENSILDISGFSKQYNCAFIWQKDGVKKLNLYLIINYFKGGKLRFKKIKPEAFEANRFYTVINKKSGEIVPMEVNFNFDDPNLIILPLAFGKRQGREFIWNDLLSLETGSLKLANGRVIEKTLYNRRTRQDEPALFVALTFERREVLDSSNIKPMNLIGVDRGENIPAVIALTDPEGCPLSRFKDSLGNPTHILRIGESYKEKQRTIQAKKEVEQRRAGGYSRKYASKAKNLADDMVRNTARDLLYYAVTQDAMLIFENLSRGFGRQGKRTFMAERQYTRMEDWLTAKLAYEGLPSKTYLSKTLAQYTSKTCSNCGFTITSADYDRVLEKLKKTATGWMTTINGKELKVEGQITYYNRYKRQNVVKDLSVELDRLSEESVNNDISSWTKGRSGEALSLLKKRFSHRPVQEKFVCLNCGFETHADEQAALNIARSWLFLRSQEYKKYQTNKTTGNTDKRAFVETWQSFYRKKLKEVWKPAV

SEQ ID NO: 38594 - protein, 979 aa, synthetic construct
  REGION 1..979: note = engineered CasX variant
QEIKRLNKIRRRLVKDSNTKKAGKTGPMKTLLVRVMTPDLRERLENLRKKPENIPQPISNTSRANLNKLLTDYTEMKKAILHVYWEEFQKDPVGLMSRVAQPASKKIDQNKLKPEMDEKGNLTTAGFACSQCGQPLFVYKLEQVSEKGKAYTNYFGRCNVAEHEKLILLAQLKPEKDSDEAVTYSLGKFGQRALDFYSIHVTKESTHPVKPLAQIAGNRYASHPVGKALSDACMGTIASFLSKYQDIIIEHQKVVKGNQKRLESLRELAGKENLEYPSVTLPPQPHTKEGVDAYNEVIARVRMWVNLNLWQKLKLSRDDAKPLLRLKGFPSFPLVERQANEVDWWDMVCNVKKLINEKKEDGKVFWQNLAGYKRQEALRPYLSSEEDVRKKGKKFARYQLGDLLLHLEKKHGEDWGKVYDEAWERIDKKVEGLSKHIKLEEERRSEDAQSKAALTDWLRAKASFVIEGLKEADKDEFCRCELKLQKWYGDLRGKPFAIEAENSILDISGFSKQYNCAFIWQKDGVKKLNLYLIINYFKGGKLRFKKIKPEAFEANRFYTVINKKSGEIVPMEVNFNFDDPNLIILPLAFGKRQGREFIWNDLLSLETGSLKLANGRVIEKTLYNRRTRQDEPALFVALTFERREVLDSSNIKPMNLIGVDRGENIPAVIALTDPEGCPLSRFKDSLGNPTHILRIGESYKEKQRTIQAKKEVEQRRAGGYSRKYASKAKNLADDMVRNTARDLLYYAVTQDAMLIFENLSRGFGRQGKRTFMAERQYTRMEDWLTAKLAYEGLPSKTYLSKTLAQYTSKTCSNCGFTITSADYDRVLEKLKKTATGWMTTINGKELKVEGQITYYNRYKRQNVVKDLSVELDRLSEESVNNDISSWTKGRSGEALSLLKKRFSHRPVQEKFVCLNCGFETHADEQAALNIARSWLFLRSQEYKKYQTNKTTGNTDKRAFVETWQSFYRKKLKEVWKPAV

SEQ ID NO: 38595 - protein, 979 aa, synthetic construct
  REGION 1..979: note = engineered CasX variant
QEIKRLNKIRRRLVKDSNTKKAGKTGPMKTLLVRVMTPDLRERLENLRKKPENIPQPISNTSRANLNKLLTDYTEMKKAILHVYWEEFQKDPVGLMSRVAQPASKKIDQNKLKPEMDEKGNLTTAGFACSQCGQPLFVYKLEQVSEKGKAYTNYFGRCNVAEHEKLILLAQLKPEKDSDEAVTYSLGKFGQRALDFYSIHVTKESTHPVKPLAQIAGNRYASSPVGKALSDACMGTIASFLSKYQDIIIEHQKVVKGNQKRLESLRELAGKENLEYPSVTLPPQPHTKEGVDAYNEVIARVRMWVNLNLWQKLKLSRDDAKPLLRLKGFPSFPLVERQANEVDWWDMVCNVKKLINEKKEDGKVFWQNLAGYKRQEALRPYLSSEEDVRKKGKKFARYQLGDLLLHLEKKHGEDWGKVYDEAWERIDKKVEGLSKHIKLEEERRSEDAQSKAALTDWLRAKASFVIEGLKEADKDEFCRCELKLQKWYGDLRGKPFAIEAENSILDISGFSKQYNCAFIWQKDGVKKLNLYLIINYFKGGKLRFKKIKPEAFEANRFYTVINKKSGEIVPMEVNFNFDDPNLIILPLAFGKRQGREFIWNDLLSLETGSLKLANGRVIEKTLYNRRTRQDEPALFVALTFERREVLDSSNIKPMNLIGVDRGENIPAVIALTDPEGCPLSRFKDSLGNPTHILRIGESYKEKQRTIQAKKEVEQRRAGGYSRKYASKAKNLADDMVRNTARDLLYYAVTQDAMLIFENLSRGFGRQGKRTFMAERQYTRMEDWLTAKLAYEGLPSKTYLSKTLAQYTSKTCSNCGFTITSADYDRVLEKLKKTATGWMTTINGKELKVEGQITYYNRYKRQNVVKDLSVELDRLSEESVNNDISSWTKGRSGEALSLLKKRFSHRPVQEKFVCLNCGFETHADEQAALNIARSWLFLRSQEYKKYQTNKTTGNTDKRAFVETWQSFYRKKLKEVWKPAV

SEQ ID NO: 38596 - protein, 979 aa, synthetic construct
  REGION 1..979: note = engineered CasX variant
QEIKRLNKIRRRLVKDSNTKKAGKTGPMKTLLVRVMTPDLRERLENLRKKPENIPQPISNTSRANLNKLLTDYTEMKKAILHVYWEEFQKDPVGLMSRVAQPASKKIDQNKLKPEMDEKGNLTTAGFACSQCGQPLFVYKLEQVSEKGKAYTNYFGRCNVAEHEKLILLAQLKPEKDSDEAVTYSLGKFGQRALDFYSIHVTKESTHPVKPLAQIAGNRYASTPVGKALSDACMGTIASFLSKYQDIIIEHQKVVKGNQKRLESLRELAGKENLEYPSVTLPPQPHTKEGVDAYNEVIARVRMWVNLNLWQKLKLSRDDAKPLLRLKGFPSFPLVERQANEVDWWDMVCNVKKLINEKKEDGKVFWQNLAGYKRQEALRPYLSSEEDVRKKGKKFARYQLGDLLLHLEKKHGEDWGKVYDEAWERIDKKVEGLSKHIKLEEERRSEDAQSKAALTDWLRAKASFVIEGLKEADKDEFCRCELKLQKWYGDLRGKPFAIEAENSILDISGFSKQYNCAFIWQKDGVKKLNLYLIINYFKGGKLRFKKIKPEAFEANRFYTVINKKSGEIVPMEVNFNFDDPNLIILPLAFGKRQGREFIWNDLLSLETGSLKLANGRVIEKTLYNRRTRQDEPALFVALTFERREVLDSSNIKPMNLIGVDRGENIPAVIALTDPEGCPLSRFKDSLGNPTHILRIGESYKEKQRTIQAKKEVEQRRAGGYSRKYASKAKNLADDMVRNTARDLLYYAVTQDAMLIFENLSRGFGRQGKRTFMAERQYTRMEDWLTAKLAYEGLPSKTYLSKTLAQYTSKTCSNCGFTITSADYDRVLEKLKKTATGWMTTINGKELKVEGQITYYNRYKRQNVVKDLSVELDRLSEESVNNDISSWTKGRSGEALSLLKKRFSHRPVQEKFVCLNCGFETHADEQAALNIARSWLFLRSQEYKKYQTNKTTGNTDKRAFVETWQSFYRKKLKEVWKPAV

SEQ ID NO: 38597 - protein, 979 aa, synthetic construct
  REGION 1..979: note = engineered CasX variant
QEIKRLNKIRRRLVKDSNTKKAGKTGPMKTLLVRVMTPDLRERLENLRKKPENIPQPISNTSRANLNKLLTDYTEMKKAILHVYWEEFQKDPVGLMSRVAQPASKKIDQNKLKPEMDEKGNLTTAGFACSQCGQPLFVYKLEQVSEKGKAYTNYFGRCNVAEHEKLILLAQLKPEKDSDEAVTYSLGKFGQRALDFYSIHVTKESTHPVKPLAQIAGNRYASAPVGKALSDACMGTIASFLSKYQDIIIEHQKVVKGNQKRLESLRELAGKENLEYPSVTLPPQPHTKEGVDAYNEVIARVRMWVNLNLWQKLKLSRDDAKPLLRLKGFPSFPLVERQANEVDWWDMVCNVKKLINEKKEDGKVFWQNLAGYKRQEALRPYLSSEEDVRKKGKKFARYQLGDLLLHLEKKHGEDWGKVYDEAWERIDKKVEGLSKHIKLEEERRSEDAQSKAALTDWLRAKASFVIEGLKEADKDEFCRCELKLQKWYGDLRGKPFAIEAENSILDISGFSKQYNCAFIWQKDGVKKLNLYLIINYFKGGKLRFKKIKPEAFEANRFYTVINKKSGEIVPMEVNFNFDDPNLIILPLAFGKRQGREFIWNDLLSLETGSLKLANGRVIEKTLYNRRTRQDEPALFVALTFERREVLDSSNIKPMNLIGVDRGENIPAVIALTDPEGCPLSRFKDSLGNPTHILRIGESYKEKQRTIQAKKEVEQRRAGGYSRKYASKAKNLADDMVRNTARDLLYYAVTQDAMLIFENLSRGFGRQGKRTFMAERQYTRMEDWLTAKLAYEGLPSKTYLSKTLAQYTSKTCSNCGFTITSADYDRVLEKLKKTATGWMTTINGKELKVEGQITYYNRYKRQNVVKDLSVELDRLSEESVNNDISSWTKGRSGEALSLLKKRFSHRPVQEKFVCLNCGFETHADEQAALNIARSWLFLRSQEYKKYQTNKTTGNTDKRAFVETWQSFYRKKLKEVWKPAV

SEQ ID NO: 38598 - protein, 979 aa, synthetic construct
  REGION 1..979: note = engineered CasX variant
QEIKRLNKIRRRLVKDSNTKKAGKTGPMKTLLVRVMTPDLRERLENLRKKPENIPQPISNTSRANLNKLLTDYTEMKKAILHVYWEEFQKDPVGLMSRVAQPASKKIDQNKLKPEMDEKGNLTTAGFACSQCGQPLFVYKLEQVSEKGKAYTNYFGRCNVAEHEKLILLAQLKPEKDSDEAVTYSLGKFGQRALDFYSIHVTKESTHPVKPLAQIAGNRYASVPVGKALSDACMGTIASFLSKYQDIIIEHQKVVKGNQKRLESLRELAGKENLEYPSVTLPPQPHTKEGVDAYNEVIARVRMWVNLNLWQKLKLSRDDAKPLLRLKGFPSFPLVERQANEVDWWDMVCNVKKLINEKKEDGKVFWQNLAGYKRQEALRPYLSSEEDVRKKGKKFARYQLGDLLLHLEKKHGEDWGKVYDEAWERIDKKVEGLSKHIKLEEERRSEDAQSKAALTDWLRAKASFVIEGLKEADKDEFCRCELKLQKWYGDLRGKPFAIEAENSILDISGFSKQYNCAFIWQKDGVKKLNLYLIINYFKGGKLRFKKIKPEAFEANRFYTVINKKSGEIVPMEVNFNFDDPNLIILPLAFGKRQGREFIWNDLLSLETGSLKLANGRVIEKTLYNRRTRQDEPALFVALTFERREVLDSSNIKPMNLIGVDRGENIPAVIALTDPEGCPLSRFKDSLGNPTHILRIGESYKEKQRTIQAKKEVEQRRAGGYSRKYASKAKNLADDMVRNTARDLLYYAVTQDAMLIFENLSRGFGRQGKRTFMAERQYTRMEDWLTAKLAYEGLPSKTYLSKTLAQYTSKTCSNCGFTITSADYDRVLEKLKKTATGWMTTINGKELKVEGQITYYNRYKRQNVVKDLSVELDRLSEESVNNDISSWTKGRSGEALSLLKKRFSHRPVQEKFVCLNCGFETHADEQAALNIARSWLFLRSQEYKKYQTNKTTGNTDKRAFVETWQSFYRKKLKEVWKPAV

SEQ ID NO: 38599 - protein, 979 aa, synthetic construct
  REGION 1..979: note = engineered CasX variant
QEIKRLNKIRRRLVKDSNTKKAGKTGPMKTLLVRVMTPDLRERLENLRKKPENIPQPISNTSRANLNKLLTDYTEMKKAILHVYWEEFQKDPVGLMSRVAQPASKKIDQNKLKPEMDEKGNLTTAGFACSQCGQPLFVYKLEQVSEKGKAYTNYFGRCNVAEHEKLIKLAQLKPEKDSDEAVTYSLGKFGQRALDFYSIHVTKESTHPVKPLAQIAGNRYASGPVGKALSDACMGTIASFLSKYQDIIIEHQKVVKGNQKRLESLRELAGKENLEYPSVTLPPQPHTKEGVDAYNEVIARVRMWVNLNLWQKLKLSRDDAKPLLRLKGFPSFPLVERQANEVDWWDMVCNVKKLINEKKEDGKVFWQNLAGYKRQEALRPYLSSEEDVRKKGKKFARYQLGDLLLHLEKKHGEDWGKVYDEAWERIDKKVEGLSKHIKLEEERRSEDAQSKAALTDWLRAKASFVIEGLKEADKDEFCRCELKLQKWYGDLRGKPFAIEAENSILDISGFSKQYNCAFIWQKDGVKKLNLYLIINYFKGGKLRFKKIKPEAFEANRFYTVINKKSGEIVPMEVNFNFDDPNLIILPLAFGKRQGREFIWNDLLSLETGSLKLANGRVIEKTLYNRRTRQDEPALFVALTFERREVLDSSNIKPMNLIGVDRGENIPAVIALTDPEGCPLSRFKDSLGNPTHILRIGESYKEKQRTIQAKKEVEQRRAGGYSRKYASKAKNLADDMVRNTARDLLYYAVTQDAMLIFENLSRGFGRQGKRTFMAERQYTRMEDWLTAKLAYEGLPSKTYLSKTLAQYTSKTCSNCGFTITSADYDRVLEKLKKTATGWMTTINGKELKVEGQITYYNRYKRQNVVKDLSVELDRLSEESVNNDISSWTKGRSGEALSLLKKRFSHRPVQEKFVCLNCGFETHADEQAALNIARSWLFLRSQEYKKYQTNKTTGNTDKRAFVETWQSFYRKKLKEVWKPAV

SEQ ID NO: 38600 - protein, 978 aa, synthetic construct
  REGION 1..978: note = engineered CasX variant
QEIKRLNKIRRRLVKDSNTKKAGKTGPMKTLLVRVMTPDLRERLENLRKKPENIPQPISNTSRANLNKLLTDYTEMKKAILHVYWEEFQKDPVGLMSRVAQPASKKIDQNKLKPEMDEKGNLTTAGFACSQCGQPLFVYKLEQVSEKGKAYTNYFGRCNVAEHEKLILLAQLKPEKDSDEAVTYSLGKFGQRALDFYSIHVTKESTHPVKPLAQIAGNRYASPVGKALSDACMGTIASFLSKYQDIIIEHQKVVKGNQKRLESLRELAGKENLEYPSVTLPPQPHTKEGVDAYNEVIARVRMWVNLNLWQKLKLSRDDAKPLLRLKGFPSFPLVERQANEVDWWDMVCNVKKLINEKKEDGKVFWQNLAGYKRQEALRPYLSSEEDVRKKGKKFARYQLGDLLLHLEKKHGEDWGKVYDEAWERIDKKVEGLSKHIKLEEERRSEDAQSKAALTDWLRAKASFVIEGLKEADKDEFCRCELKLQKWYGDLRGKPFAIEAENSILDISGFSKQYNCAFIWQKDGVKKLNLYLIINYFKGGKLRFKKIKPEAFEANRFYTVINKKSGEIVPMEVNFNFDDPNLIILPLAFGKRQGREFIWNDLLSLETGSLKLANGRVIEKTLYNRRTRQDEPALFVALTFERREVLDSSNIKPMNLIGVDRGENIPAVIALTDPEGCPLSRFKDSLGNPTHILRIGESYKEKQRTIQAKKEVEQRRAGGYSRKYASKAKNLADDMVRNTARDLLYYAVTQDAMLIFENLSRGFGRQGKRTFMAERQYTRMEDWLTAKLAYEGLPSKTYLSKTLAQYTSKTCSNCGFTITSADYDRVLEKLKKTATGWMTTINGKELKVEGQITYYNRYKRQNVVKDLSVELDRLSEESVNNDISSWTKGRSGEALSLLKKRFSHRPVQEKFVCLNCGFETHADEQAALNIARSWLFLRSQEYKKYQTNKTTGNTDKRAFVETWQSFYRKKLKEVWKPAV

SEQ ID NO: 38601 - protein, 978 aa, synthetic construct
  REGION 1..978: note = engineered CasX variant
QEIKRLNKIRRRLVKDSNTKKAGKTGPMKTLLVRVMTPDLRERLENLRKKPENIPQPISNTSRANLNKLLTDYTEMKKAILHVYWEEFQKDPVGLMSRVAQPASKKIDQNKLKPEMDEKGNLTTAGFACSQCGQPLFVYKLEQVSEKGKAYTNYFGRCNVAEHEKLILLAQLKPEKDSDEAVTYSLGKFGQRALDFYSIHVTKESTHPVKPLAQIAGNRYASYPVGKALSDACMGTIASFLSKYQDIIIEHQKVVKGNQKRLESLRELAGKENLEYPSVTLPPQPHTKEGVDAYNEVIARVRMWVNLNLWQKLKLSRDDAKPLLRLKGFPSFPLVERQANEVDWWDMVCNVKKLINEKKEDGKVFWQNLAGYKRQEALRPYLSSEEDRKKGKKFARYQLGDLLLHLEKKHGEDWGKVYDEAWERIDKKVEGLSKHIKLEEERRSEDAQSKAALTDWLRAKASFVIEGLKEADKDEFCRCELKLQKWYGDLRGKPFAIEAENSILDISGFSKQYNCAFIWQKDGVKKLNLYLIINYFKGGKLRFKKIKPEAFEANRFYTVINKKSGEIVPMEVNFNFDDPNLIILPLAFGKRQGREFIWNDLLSLETGSLKLANGRVIEKTLYNRRTRQDEPALFVALTFERREVLDSSNIKPMNLIGVDRGENIPAVIALTDPEGCPLSRFKDSLGNPTHILRIGESYKEKQRTIQAKKEVEQRRAGGYSRKYASKAKNLADDMVRNTARDLLYYAVTQDAMLIFENLSRGFGRQGKRTFMAERQYTRMEDWLTAKLAYEGLPSKTYLSKTLAQYTSKTCSNCGFTITSADYDRMLEKLKKTATGWMTTINGKELKVEGQITYYNRYKRQNVVKDLSVELDRLSEESVNNDISSWTKGRSGEALSLLKKRFSHRPVQEKFVCLNCGFETHADEQAALNIARSWLFLRSQEYKKYQTNKTTGNTDKRAFVETWQSFYRKKLKEVWKPAV

SEQ ID NO: 38602 - protein, 978 aa, synthetic construct
  REGION 1..978: note = engineered CasX variant
QEIKRLNKIRRRLVKDSNTKKAGKTGPMKTLLVRVMTPDLRERLENLRKKPENIPQPISNTSRANLNKLLTDYTEMKKAILHVYWEEFQKDPVGLMSRVAQPASKKIDQNKLKPEMDEKGNLTTAGFACSQCGQPLFVYKLEQVSEKGKAYTNYFGRCNVAEHEKLILLAQLKPEKDSDEAVTYSLGKFGQRALDFYSIHVTKESTHPVKPLAQIAGNRYASHPVGKALSDACMGTIASFLSKYQDIIIEHQKVVKGNQKRLESLRELAGKENLEYPSVTLPPQPHTKEGVDAYNEVIARVRMWVNLNLWQKLKLSRDDAKPLLRLKGFPSFPLVERQANEVDWWDMVCNVKKLINEKKEDGKVFWQNLAGYKRQEALRPYLSSEEDRKKGKKFARYQLGDLLLHLEKKHGEDWGKVYDEAWERIDKKVEGLSKHIKLEEERRSEDAQSKAALTDWLRAKASFVIEGLKEADKDEFCRCELKLQKWYGDLRGKPFAIEAENSILDISGFSKQYNCAFIWQKDGVKKLNLYLIINYFKGGKLRFKKIKPEAFEANRFYTVINKKSGEIVPMEVNFNFDDPNLIILPLAFGKRQGREFIWNDLLSLETGSLKLANGRVIEKTLYNRRTRQDEPALFVALTFERREVLDSSNIKPMNLIGVDRGENIPAVIALTDPEGCPLSRFKDSLGNPTHILRIGESYKEKQRTIQAKKEVEQRRAGGYSRKYASKAKNLADDMVRNTARDLLYYAVTQDAMLIFENLSRGFGRQGKRTFMAERQYTRMEDWLTAKLAYEGLPSKTYLSKTLAQYTSKTCSNCGFTITSADYDRMLEKLKKTATGWMTTINGKELKVEGQITYYNRYKRQNVVKDLSVELDRLSEESVNNDISSWTKGRSGEALSLLKKRFSHRPVQEKFVCLNCGFETHADEQAALNIARSWLFLRSQEYKKYQTNKTTGNTDKRAFVETWQSFYRKKLKEVWKPAV

SEQ ID NO: 38603 - protein, 978 aa, synthetic construct
  REGION 1..978: note = engineered CasX variant
QEIKRLNKIRRRLVKDSNTKKAGKTGPMKTLLVRVMTPDLRERLENLRKKPENIPQPISNTSRANLNKLLTDYTEMKKAILHVYWEEFQKDPVGLMSRVAQPASKKIDQNKLKPEMDEKGNLTTAGFACSQCGQPLFVYKLEQVSEKGKAYTNYFGRCNVAEHEKLILLAQLKPEKDSDEAVTYSLGKFGQRALDFYSIHVTKESTHPVKPLAQIAGNRYASSPVGKALSDACMGTIASFLSKYQDIIIEHQKVVKGNQKRLESLRELAGKENLEYPSVTLPPQPHTKEGVDAYNEVIARVRMWVNLNLWQKLKLSRDDAKPLLRLKGFPSFPLVERQANEVDWWDMVCNVKKLINEKKEDGKVFWQNLAGYKRQEALRPYLSSEEDRKKGKKFARYQLGDLLLHLEKKHGEDWGKVYDEAWERIDKKVEGLSKHIKLEEERRSEDAQSKAALTDWLRAKASFVIEGLKEADKDEFCRCELKLQKWYGDLRGKPFAIEAENSILDISGFSKQYNCAFIWQKDGVKKLNLYLIINYFKGGKLRFKKIKPEAFEANRFYTVINKKSGEIVPMEVNFNFDDPNLIILPLAFGKRQGREFIWNDLLSLETGSLKLANGRVIEKTLYNRRTRQDEPALFVALTFERREVLDSSNIKPMNLIGVDRGENIPAVIALTDPEGCPLSRFKDSLGNPTHILRIGESYKEKQRTIQAKKEVEQRRAGGYSRKYASKAKNLADDMVRNTARDLLYYAVTQDAMLIFENLSRGFGRQGKRTFMAERQYTRMEDWLTAKLAYEGLPSKTYLSKTLAQYTSKTCSNCGFTITSADYDRMLEKLKKTATGWMTTINGKELKVEGQITYYNRYKRQNVVKDLSVELDRLSEESVNNDISSWTKGRSGEALSLLKKRFSHRPVQEKFVCLNCGFETHADEQAALNIARSWLFLRSQEYKKYQTNKTTGNTDKRAFVETWQSFYRKKLKEVWKPAV

SEQ ID NO: 38604 - protein, 978 aa, synthetic construct
  REGION 1..978: note = engineered CasX variant
QEIKRLNKIRRRLVKDSNTKKAGKTGPMKTLLVRVMTPDLRERLENLRKKPENIPQPISNTSRANLNKLLTDYTEMKKAILHVYWEEFQKDPVGLMSRVAQPASKKIDQNKLKPEMDEKGNLTTAGFACSQCGQPLFVYKLEQVSEKGKAYTNYFGRCNVAEHEKLILLAQLKPEKDSDEAVTYSLGKFGQRALDFYSIHVTKESTHPVKPLAQIAGNRYASTPVGKALSDACMGTIASFLSKYQDIIIEHQKVVKGNQKRLESLRELAGKENLEYPSVTLPPQPHTKEGVDAYNEVIARVRMWVNLNLWQKLKLSRDDAKPLLRLKGFPSFPLVERQANEVDWWDMVCNVKKLINEKKEDGKVFWQNLAGYKRQEALRPYLSSEEDRKKGKKFARYQLGDLLLHLEKKHGEDWGKVYDEAWERIDKKVEGLSKHIKLEEERRSEDAQSKAALTDWLRAKASFVIEGLKEADKDEFCRCELKLQKWYGDLRGKPFAIEAENSILDISGFSKQYNCAFIWQKDGVKKLNLYLIINYFKGGKLRFKKIKPEAFEANRFYTVINKKSGEIVPMEVNFNFDDPNLIILPLAFGKRQGREFIWNDLLSLETGSLKLANGRVIEKTLYNRRTRQDEPALFVALTFERREVLDSSNIKPMNLIGVDRGENIPAVIALTDPEGCPLSRFKDSLGNPTHILRIGESYKEKQRTIQAKKEVEQRRAGGYSRKYASKAKNLADDMVRNTARDLLYYAVTQDAMLIFENLSRGFGRQGKRTFMAERQYTRMEDWLTAKLAYEGLPSKTYLSKTLAQYTSKTCSNCGFTITSADYDRMLEKLKKTATGWMTTINGKELKVEGQITYYNRYKRQNVVKDLSVELDRLSEESVNNDISSWTKGRSGEALSLLKKRFSHRPVQEKFVCLNCGFETHADEQAALNIARSWLFLRSQEYKKYQTNKTTGNTDKRAFVETWQSFYRKKLKEVWKPAV

SEQ ID NO: 38605 - protein, 978 aa, synthetic construct
  REGION 1..978: note = engineered CasX variant
QEIKRLNKIRRRLVKDSNTKKAGKTGPMKTLLVRVMTPDLRERLENLRKKPENIPQPISNTSRANLNKLLTDYTEMKKAILHVYWEEFQKDPVGLMSRVAQPASKKIDQNKLKPEMDEKGNLTTAGFACSQCGQPLFVYKLEQVSEKGKAYTNYFGRCNVAEHEKLILLAQLKPEKDSDEAVTYSLGKFGQRALDFYSIHVTKESTHPVKPLAQIAGNRYASAPVGKALSDACMGTIASFLSKYQDIIIEHQKVVKGNQKRLESLRELAGKENLEYPSVTLPPQPHTKEGVDAYNEVIARVRMWVNLNLWQKLKLSRDDAKPLLRLKGFPSFPLVERQANEVDWWDMVCNVKKLINEKKEDGKVFWQNLAGYKRQEALRPYLSSEEDRKKGKKFARYQLGDLLLHLEKKHGEDWGKVYDEAWERIDKKVEGLSKHIKLEEERRSEDAQSKAALTDWLRAKASFVIEGLKEADKDEFCRCELKLQKWYGDLRGKPFAIEAENSILDISGFSKQYNCAFIWQKDGVKKLNLYLIINYFKGGKLRFKKIKPEAFEANRFYTVINKKSGEIVPMEVNFNFDDPNLIILPLAFGKRQGREFIWNDLLSLETGSLKLANGRVIEKTLYNRRTRQDEPALFVALTFERREVLDSSNIKPMNLIGVDRGENIPAVIALTDPEGCPLSRFKDSLGNPTHILRIGESYKEKQRTIQAKKEVEQRRAGGYSRKYASKAKNLADDMVRNTARDLLYYAVTQDAMLIFENLSRGFGRQGKRTFMAERQYTRMEDWLTAKLAYEGLPSKTYLSKTLAQYTSKTCSNCGFTITSADYDRMLEKLKKTATGWMTTINGKELKVEGQITYYNRYKRQNVVKDLSVELDRLSEESVNNDISSWTKGRSGEALSLLKKRFSHRPVQEKFVCLNCGFETHADEQAALNIARSWLFLRSQEYKKYQTNKTTGNTDKRAFVETWQSFYRKKLKEVWKPAV

SEQ ID NO: 38606 - protein, 978 aa, synthetic construct
  REGION 1..978: note = engineered CasX variant
QEIKRLNKIRRRLVKDSNTKKAGKTGPMKTLLVRVMTPDLRERLENLRKKPENIPQPISNTSRANLNKLLTDYTEMKKAILHVYWEEFQKDPVGLMSRVAQPASKKIDQNKLKPEMDEKGNLTTAGFACSQCGQPLFVYKLEQVSEKGKAYTNYFGRCNVAEHEKLILLAQLKPEKDSDEAVTYSLGKFGQRALDFYSIHVTKESTHPVKPLAQIAGNRYASVPVGKALSDACMGTIASFLSKYQDIIIEHQKVVKGNQKRLESLRELAGKENLEYPSVTLPPQPHTKEGVDAYNEVIARVRMWVNLNLWQKLKLSRDDAKPLLRLKGFPSFPLVERQANEVDWWDMVCNVKKLINEKKEDGKVFWQNLAGYKRQEALRPYLSSEEDRKKGKKFARYQLGDLLLHLEKKHGEDWGKVYDEAWERIDKKVEGLSKHIKLEEERRSEDAQSKAALTDWLRAKASFVIEGLKEADKDEFCRCELKLQKWYGDLRGKPFAIEAENSILDISGFSKQYNCAFIWQKDGVKKLNLYLIINYFKGGKLRFKKIKPEAFEANRFYTVINKKSGEIVPMEVNFNFDDPNLIILPLAFGKRQGREFIWNDLLSLETGSLKLANGRVIEKTLYNRRTRQDEPALFVALTFERREVLDSSNIKPMNLIGVDRGENIPAVIALTDPEGCPLSRFKDSLGNPTHILRIGESYKEKQRTIQAKKEVEQRRAGGYSRKYASKAKNLADDMVRNTARDLLYYAVTQDAMLIFENLSRGFGRQGKRTFMAERQYTRMEDWLTAKLAYEGLPSKTYLSKTLAQYTSKTCSNCGFTITSADYDRMLEKLKKTATGWMTTINGKELKVEGQITYYNRYKRQNVVKDLSVELDRLSEESVNNDISSWTKGRSGEALSLLKKRFSHRPVQEKFVCLNCGFETHADEQAALNIARSWLFLRSQEYKKYQTNKTTGNTDKRAFVETWQSFYRKKLKEVWKPAV

SEQ ID NO: 38607 - protein, 978 aa, synthetic construct
  REGION 1..978: note = engineered CasX variant
QEIKRLNKIRRRLVKDSNTKKAGKTGPMKTLLVRVMTPDLRERLENLRKKPENIPQPISNTSRANLNKLLTDYTEMKKAILHVYWEEFQKDPVGLMSRVAQPASKKIDQNKLKPEMDEKGNLTTAGFACSQCGQPLFVYKLEQVSEKGKAYTNYFGRCNVAEHEKLIKLAQLKPEKDSDEAVTYSLGKFGQRALDFYSIHVTKESTHPVKPLAQIAGNRYASGPVGKALSDACMGTIASFLSKYQDIIIEHQKVVKGNQKRLESLRELAGKENLEYPSVTLPPQPHTKEGVDAYNEVIARVRMWVNLNLWQKLKLSRDDAKPLLRLKGFPSFPLVERQANEVDWWDMVCNVKKLINEKKEDGKVFWQNLAGYKRQEALRPYLSSEEDRKKGKKFARYQLGDLLLHLEKKHGEDWGKVYDEAWERIDKKVEGLSKHIKLEEERRSEDAQSKAALTDWLRAKASFVIEGLKEADKDEFCRCELKLQKWYGDLRGKPFAIEAENSILDISGFSKQYNCAFIWQKDGVKKLNLYLIINYFKGGKLRFKKIKPEAFEANRFYTVINKKSGEIVPMEVNFNFDDPNLIILPLAFGKRQGREFIWNDLLSLETGSLKLANGRVIEKTLYNRRTRQDEPALFVALTFERREVLDSSNIKPMNLIGVDRGENIPAVIALTDPEGCPLSRFKDSLGNPTHILRIGESYKEKQRTIQAKKEVEQRRAGGYSRKYASKAKNLADDMVRNTARDLLYYAVTQDAMLIFENLSRGFGRQGKRTFMAERQYTRMEDWLTAKLAYEGLPSKTYLSKTLAQYTSKTCSNCGFTITSADYDRMLEKLKKTATGWMTTINGKELKVEGQITYYNRYKRQNVVKDLSVELDRLSEESVNNDISSWTKGRSGEALSLLKKRFSHRPVQEKFVCLNCGFETHADEQAALNIARSWLFLRSQEYKKYQTNKTTGNTDKRAFVETWQSFYRKKLKEVWKPAV

SEQ ID NO: 38608 - protein, 977 aa, synthetic construct
  REGION 1..977: note = engineered CasX variant
QEIKRLNKIRRRLVKDSNTKKAGKTGPMKTLLVRVMTPDLRERLENLRKKPENIPQPISNTSRANLNKLLTDYTEMKKAILHVYWEEFQKDPVGLMSRVAQPASKKIDQNKLKPEMDEKGNLTTAGFACSQCGQPLFVYKLEQVSEKGKAYTNYFGRCNVAEHEKLILLAQLKPEKDSDEAVTYSLGKFGQRALDFYSIHVTKESTHPVKPLAQIAGNRYASPVGKALSDACMGTIASFLSKYQDIIIEHQKVVKGNQKRLESLRELAGKENLEYPSVTLPPQPHTKEGVDAYNEVIARVRMWVNLNLWQKLKLSRDDAKPLLRLKGFPSFPLVERQANEVDWWDMVCNVKKLINEKKEDGKVFWQNLAGYKRQEALRPYLSSEEDRKKGKKFARYQLGDLLLHLEKKHGEDWGKVYDEAWERIDKKVEGLSKHIKLEEERRSEDAQSKAALTDWLRAKASFVIEGLKEADKDEFCRCELKLQKWYGDLRGKPFAIEAENSILDISGFSKQYNCAFIWQKDGVKKLNLYLIINYFKGGKLRFKKIKPEAFEANRFYTVINKKSGEIVPMEVNFNFDDPNLIILPLAFGKRQGREFIWNDLLSLETGSLKLANGRVIEKTLYNRRTRQDEPALFVALTFERREVLDSSNIKPMNLIGVDRGENIPAVIALTDPEGCPLSRFKDSLGNPTHILRIGESYKEKQRTIQAKKEVEQRRAGGYSRKYASKAKNLADDMVRNTARDLLYYAVTQDAMLIFENLSRGFGRQGKRTFMAERQYTRMEDWLTAKLAYEGLPSKTYLSKTLAQYTSKTCSNCGFTITSADYDRMLEKLKKTATGWMTTINGKELKVEGQITYYNRYKRQNVVKDLSVELDRLSEESVNNDISSWTKGRSGEALSLLKKRFSHRPVQEKFVCLNCGFETHADEQAALNIARSWLFLRSQEYKKYQTNKTTGNTDKRAFVETWQSFYRKKLKEVWKPAV

SEQ ID NO: 38609 - protein, 978 aa, synthetic construct
  REGION 1..978: note = engineered CasX variant
QEIKRLNKIRRRLVKDSNTKKAGKTGPMKTLLVRVMTPDLRERLENLRKKPENIPQPISNTSRANLNKLLTDYTEMKKAILHVYWEEFQKDPVGLMSRVAQPASKKIDQNKLKPEMDEKGNLTTAGFACSQCGQPLFVYKLEQVSEKGKAYTNYFGRCNVAEHEKLILLAQLKPEKDSDEAVTYSLGKFGQRALDFYSIHVTKESTHPVKPLAQIAGNRYASYPVGKALSDACMGTIASFLSKYQDIIIEHQKVVKGNQKRLESLRELAGKENLEYPSVTLPPQPHTKEGVDAYNEVIARVRMWVNLNLWQKLKLSRDDAKPLLRLKGFPSFPLVERQANEVDWWDMVCNVKKLINEKKEDGKVFWQNLAGYKRQEALRPYLSSEEDRKKGKKFARYQLGDLLLHLEKKHGEDWGKVYDEAWERIDKKVEGLSKHIKLEEERRSEDAQSKAALTDWLRAKASFVIEGLKEADKDEFCRCELKLQKWYGDLRGKPFAIEAENSILDISGFSKQYNCAFIWQKDGVKKLNLYLIINYFKGGKLRFKKIKPEAFEANRFYTVINKKSGEIVPMEVNFNFDDPNLIILPLAFGKRQGREFIWNDLLSLETGSLKLANGRVIEKTLYNRRTRQDEPALFVALTFERREVLDSSNIKPMNLIGVDRGENIPAVIALTDPEGCPLSRFKDSLGNPTHILRIGESYKEKQRTIQAKKEVEQRRAGGYSRKYASKAKNLADDMVRNTARDLLYYAVTQDAMLIFENLSRGFGRQGKRTFMAERQYTRMEDWLTAKLAYEGLPSKTYLSKTLAQYTSKTCSNCGFTITSADYDRVLEKLKKTATGWMTTINGKELKVEGQITYYNRYKRQNVVKDLSVELDRLSEESVNNDISSWTKGRQGEALSLLKKRFSHRPVQEKFVCLNCGFETHADEQAALNIARSWLFLRSQEYKKYQTNKTTGNTDKRAFVETWQSFYRKKLKEVWKPAV

SEQ ID NO: 38610 - protein, 978 aa, synthetic construct
  REGION 1..978: note = engineered CasX variant
QEIKRLNKIRRRLVKDSNTKKAGKTGPMKTLLVRVMTPDLRERLENLRKKPENIPQPISNTSRANLNKLLTDYTEMKKAILHVYWEEFQKDPVGLMSRVAQPASKKIDQNKLKPEMDEKGNLTTAGFACSQCGQPLFVYKLEQVSEKGKAYTNYFGRCNVAEHEKLILLAQLKPEKDSDEAVTYSLGKFGQRALDFYSIHVTKESTHPVKPLAQIAGNRYASHPVGKALSDACMGTIASFLSKYQDIIIEHQKVVKGNQKRLESLRELAGKENLEYPSVTLPPQPHTKEGVDAYNEVIARVRMWVNLNLWQKLKLSRDDAKPLLRLKGFPSFPLVERQANEVDWWDMVCNVKKLINEKKEDGKVFWQNLAGYKRQEALRPYLSSEEDRKKGKKFARYQLGDLLLHLEKKHGEDWGKVYDEAWERIDKKVEGLSKHIKLEEERRSEDAQSKAALTDWLRAKASFVIEGLKEADKDEFCRCELKLQKWYGDLRGKPFAIEAENSILDISGFSKQYNCAFIWQKDGVKKLNLYLIINYFKGGKLRFKKIKPEAFEANRFYTVINKKSGEIVPMEVNFNFDDPNLIILPLAFGKRQGREFIWNDLLSLETGSLKLANGRVIEKTLYNRRTRQDEPALFVALTFERREVLDSSNIKPMNLIGVDRGENIPAVIALTDPEGCPLSRFKDSLGNPTHILRIGESYKEKQRTIQAKKEVEQRRAGGYSRKYASKAKNLADDMVRNTARDLLYYAVTQDAMLIFENLSRGFGRQGKRTFMAERQYTRMEDWLTAKLAYEGLPSKTYLSKTLAQYTSKTCSNCGFTITSADYDRVLEKLKKTATGWMTTINGKELKVEGQITYYNRYKRQNVVKDLSVELDRLSEESVNNDISSWTKGRQGEALSLLKKRFSHRPVQEKFVCLNCGFETHADEQAALNIARSWLFLRSQEYKKYQTNKTTGNTDKRAFVETWQSFYRKKLKEVWKPAV

SEQ ID NO: 38611 - protein, 978 aa, synthetic construct
  REGION 1..978: note = engineered CasX variant
QEIKRLNKIRRRLVKDSNTKKAGKTGPMKTLLVRVMTPDLRERLENLRKKPENIPQPISNTSRANLNKLLTDYTEMKKAILHVYWEEFQKDPVGLMSRVAQPASKKIDQNKLKPEMDEKGNLTTAGFACSQCGQPLFVYKLEQVSEKGKAYTNYFGRCNVAEHEKLILLAQLKPEKDSDEAVTYSLGKFGQRALDFYSIHVTKESTHPVKPLAQIAGNRYASSPVGKALSDACMGTIASFLSKYQDIIIEHQKVVKGNQKRLESLRELAGKENLEYPSVTLPPQPHTKEGVDAYNEVIARVRMWVNLNLWQKLKLSRDDAKPLLRLKGFPSFPLVERQANEVDWWDMVCNVKKLINEKKEDGKVFWQNLAGYKRQEALRPYLSSEEDRKKGKKFARYQLGDLLLHLEKKHGEDWGKVYDEAWERIDKKVEGLSKHIKLEEERRSEDAQSKAALTDWLRAKASFVIEGLKEADKDEFCRCELKLQKWYGDLRGKPFAIEAENSILDISGFSKQYNCAFIWQKDGVKKLNLYLIINYFKGGKLRFKKIKPEAFEANRFYTVINKKSGEIVPMEVNFNFDDPNLIILPLAFGKRQGREFIWNDLLSLETGSLKLANGRVIEKTLYNRRTRQDEPALFVALTFERREVLDSSNIKPMNLIGVDRGENIPAVIALTDPEGCPLSRFKDSLGNPTHILRIGESYKEKQRTIQAKKEVEQRRAGGYSRKYASKAKNLADDMVRNTARDLLYYAVTQDAMLIFENLSRGFGRQGKRTFMAERQYTRMEDWLTAKLAYEGLPSKTYLSKTLAQYTSKTCSNCGFTITSADYDRVLEKLKKTATGWMTTINGKELKVEGQITYYNRYKRQNVVKDLSVELDRLSEESVNNDISSWTKGRQGEALSLLKKRFSHRPVQEKFVCLNCGFETHADEQAALNIARSWLFLRSQEYKKYQTNKTTGNTDKRAFVETWQSFYRKKLKEVWKPAV

SEQ ID NO: 38612 - protein, 978 aa, synthetic construct
  REGION 1..978: note = engineered CasX variant
QEIKRLNKIRRRLVKDSNTKKAGKTGPMKTLLVRVMTPDLRERLENLRKKPENIPQPISNTSRANLNKLLTDYTEMKKAILHVYWEEFQKDPVGLMSRVAQPASKKIDQNKLKPEMDEKGNLTTAGFACSQCGQPLFVYKLEQVSEKGKAYTNYFGRCNVAEHEKLILLAQLKPEKDSDEAVTYSLGKFGQRALDFYSIHVTKESTHPVKPLAQIAGNRYASTPVGKALSDACMGTIASFLSKYQDIIIEHQKVVKGNQKRLESLRELAGKENLEYPSVTLPPQPHTKEGVDAYNEVIARVRMWVNLNLWQKLKLSRDDAKPLLRLKGFPSFPLVERQANEVDWWDMVCNVKKLINEKKEDGKVFWQNLAGYKRQEALRPYLSSEEDRKKGKKFARYQLGDLLLHLEKKHGEDWGKVYDEAWERIDKKVEGLSKHIKLEEERRSEDAQSKAALTDWLRAKASFVIEGLKEADKDEFCRCELKLQKWYGDLRGKPFAIEAENSILDISGFSKQYNCAFIWQKDGVKKLNLYLIINYFKGGKLRFKKIKPEAFEANRFYTVINKKSGEIVPMEVNFNFDDPNLIILPLAFGKRQGREFIWNDLLSLETGSLKLANGRVIEKTLYNRRTRQDEPALFVALTFERREVLDSSNIKPMNLIGVDRGENIPAVIALTDPEGCPLSRFKDSLGNPTHILRIGESYKEKQRTIQAKKEVEQRRAGGYSRKYASKAKNLADDMVRNTARDLLYYAVTQDAMLIFENLSRGFGRQGKRTFMAERQYTRMEDWLTAKLAYEGLPSKTYLSKTLAQYTSKTCSNCGFTITSADYDRVLEKLKKTATGWMTTINGKELKVEGQITYYNRYKRQNVVKDLSVELDRLSEESVNNDISSWTKGRQGEALSLLKKRFSHRPVQEKFVCLNCGFETHADEQAALNIARSWLFLRSQEYKKYQTNKTTGNTDKRAFVETWQSFYRKKLKEVWKPAV

SEQ ID NO: 38613 - protein, 978 aa, synthetic construct
  REGION 1..978: note = engineered CasX variant
QEIKRLNKIRRRLVKDSNTKKAGKTGPMKTLLVRVMTPDLRERLENLRKKPENIPQPISNTSRANLNKLLTDYTEMKKAILHVYWEEFQKDPVGLMSRVAQPASKKIDQNKLKPEMDEKGNLTTAGFACSQCGQPLFVYKLEQVSEKGKAYTNYFGRCNVAEHEKLILLAQLKPEKDSDEAVTYSLGKFGQRALDFYSIHVTKESTHPVKPLAQIAGNRYASAPVGKALSDACMGTIASFLSKYQDIIIEHQKVVKGNQKRLESLRELAGKENLEYPSVTLPPQPHTKEGVDAYNEVIARVRMWVNLNLWQKLKLSRDDAKPLLRLKGFPSFPLVERQANEVDWWDMVCNVKKLINEKKEDGKVFWQNLAGYKRQEALRPYLSSEEDRKKGKKFARYQLGDLLLHLEKKHGEDWGKVYDEAWERIDKKVEGLSKHIKLEEERRSEDAQSKAALTDWLRAKASFVIEGLKEADKDEFCRCELKLQKWYGDLRGKPFAIEAENSILDISGFSKQYNCAFIWQKDGVKKLNLYLIINYFKGGKLRFKKIKPEAFEANRFYTVINKKSGEIVPMEVNFNFDDPNLIILPLAFGKRQGREFIWNDLLSLETGSLKLANGRVIEKTLYNRRTRQDEPALFVALTFERREVLDSSNIKPMNLIGVDRGENIPAVIALTDPEGCPLSRFKDSLGNPTHILRIGESYKEKQRTIQAKKEVEQRRAGGYSRKYASKAKNLADDMVRNTARDLLYYAVTQDAMLIFENLSRGFGRQGKRTFMAERQYTRMEDWLTAKLAYEGLPSKTYLSKTLAQYTSKTCSNCGFTITSADYDRVLEKLKKTATGWMTTINGKELKVEGQITYYNRYKRQNVVKDLSVELDRLSEESVNNDISSWTKGRQGEALSLLKKRFSHRPVQEKFVCLNCGFETHADEQAALNIARSWLFLRSQEYKKYQTNKTTGNTDKRAFVETWQSFYRKKLKEVWKPAV

SEQ ID NO: 38614 - protein, 978 aa, synthetic construct
  REGION 1..978: note = engineered CasX variant
QEIKRLNKIRRRLVKDSNTKKAGKTGPMKTLLVRVMTPDLRERLENLRKKPENIPQPISNTSRANLNKLLTDYTEMKKAILHVYWEEFQKDPVGLMSRVAQPASKKIDQNKLKPEMDEKGNLTTAGFACSQCGQPLFVYKLEQVSEKGKAYTNYFGRCNVAEHEKLILLAQLKPEKDSDEAVTYSLGKFGQRALDFYSIHVTKESTHPVKPLAQIAGNRYASVPVGKALSDACMGTIASFLSKYQDIIIEHQKVVKGNQKRLESLRELAGKENLEYPSVTLPPQPHTKEGVDAYNEVIARVRMWVNLNLWQKLKLSRDDAKPLLRLKGFPSFPLVERQANEVDWWDMVCNVKKLINEKKEDGKVFWQNLAGYKRQEALRPYLSSEEDRKKGKKFARYQLGDLLLHLEKKHGEDWGKVYDEAWERIDKKVEGLSKHIKLEEERRSEDAQSKAALTDWLRAKASFVIEGLKEADKDEFCRCELKLQKWYGDLRGKPFAIEAENSILDISGFSKQYNCAFIWQKDGVKKLNLYLIINYFKGGKLRFKKIKPEAFEANRFYTVINKKSGEIVPMEVNFNFDDPNLIILPLAFGKRQGREFIWNDLLSLETGSLKLANGRVIEKTLYNRRTRQDEPALFVALTFERREVLDSSNIKPMNLIGVDRGENIPAVIALTDPEGCPLSRFKDSLGNPTHILRIGESYKEKQRTIQAKKEVEQRRAGGYSRKYASKAKNLADDMVRNTARDLLYYAVTQDAMLIFENLSRGFGRQGKRTFMAERQYTRMEDWLTAKLAYEGLPSKTYLSKTLAQYTSKTCSNCGFTITSADYDRVLEKLKKTATGWMTTINGKELKVEGQITYYNRYKRQNVVKDLSVELDRLSEESVNNDISSWTKGRQGEALSLLKKRFSHRPVQEKFVCLNCGFETHADEQAALNIARSWLFLRSQEYKKYQTNKTTGNTDKRAFVETWQSFYRKKLKEVWKPAV

SEQ ID NO: 38615 - protein, 978 aa, synthetic construct
  REGION 1..978: note = engineered CasX variant
QEIKRLNKIRRRLVKDSNTKKAGKTGPMKTLLVRVMTPDLRERLENLRKKPENIPQPISNTSRANLNKLLTDYTEMKKAILHVYWEEFQKDPVGLMSRVAQPASKKIDQNKLKPEMDEKGNLTTAGFACSQCGQPLFVYKLEQVSEKGKAYTNYFGRCNVAEHEKLIKLAQLKPEKDSDEAVTYSLGKFGQRALDFYSIHVTKESTHPVKPLAQIAGNRYASGPVGKALSDACMGTIASFLSKYQDIIIEHQKVVKGNQKRLESLRELAGKENLEYPSVTLPPQPHTKEGVDAYNEVIARVRMWVNLNLWQKLKLSRDDAKPLLRLKGFPSFPLVERQANEVDWWDMVCNVKKLINEKKEDGKVFWQNLAGYKRQEALRPYLSSEEDRKKGKKFARYQLGDLLLHLEKKHGEDWGKVYDEAWERIDKKVEGLSKHIKLEEERRSEDAQSKAALTDWLRAKASFVIEGLKEADKDEFCRCELKLQKWYGDLRGKPFAIEAENSILDISGFSKQYNCAFIWQKDGVKKLNLYLIINYFKGGKLRFKKIKPEAFEANRFYTVINKKSGEIVPMEVNFNFDDPNLIILPLAFGKRQGREFIWNDLLSLETGSLKLANGRVIEKTLYNRRTRQDEPALFVALTFERREVLDSSNIKPMNLIGVDRGENIPAVIALTDPEGCPLSRFKDSLGNPTHILRIGESYKEKQRTIQAKKEVEQRRAGGYSRKYASKAKNLADDMVRNTARDLLYYAVTQDAMLIFENLSRGFGRQGKRTFMAERQYTRMEDWLTAKLAYEGLPSKTYLSKTLAQYTSKTCSNCGFTITSADYDRVLEKLKKTATGWMTTINGKELKVEGQITYYNRYKRQNVVKDLSVELDRLSEESVNNDISSWTKGRQGEALSLLKKRFSHRPVQEKFVCLNCGFETHADEQAALNIARSWLFLRSQEYKKYQTNKTTGNTDKRAFVETWQSFYRKKLKEVWKPAV

SEQ ID NO: 38616 - protein, 977 aa, synthetic construct
  REGION 1..977: note = engineered CasX variant
QEIKRLNKIRRRLVKDSNTKKAGKTGPMKTLLVRVMTPDLRERLENLRKKPENIPQPISNTSRANLNKLLTDYTEMKKAILHVYWEEFQKDPVGLMSRVAQPASKKIDQNKLKPEMDEKGNLTTAGFACSQCGQPLFVYKLEQVSEKGKAYTNYFGRCNVAEHEKLILLAQLKPEKDSDEAVTYSLGKFGQRALDFYSIHVTKESTHPVKPLAQIAGNRYASPVGKALSDACMGTIASFLSKYQDIIIEHQKVVKGNQKRLESLRELAGKENLEYPSVTLPPQPHTKEGVDAYNEVIARVRMWVNLNLWQKLKLSRDDAKPLLRLKGFPSFPLVERQANEVDWWDMVCNVKKLINEKKEDGKVFWQNLAGYKRQEALRPYLSSEEDRKKGKKFARYQLGDLLLHLEKKHGEDWGKVYDEAWERIDKKVEGLSKHIKLEEERRSEDAQSKAALTDWLRAKASFVIEGLKEADKDEFCRCELKLQKWYGDLRGKPFAIEAENSILDISGFSKQYNCAFIWQKDGVKKLNLYLIINYFKGGKLRFKKIKPEAFEANRFYTVINKKSGEIVPMEVNFNFDDPNLIILPLAFGKRQGREFIWNDLLSLETGSLKLANGRVIEKTLYNRRTRQDEPALFVALTFERREVLDSSNIKPMNLIGVDRGENIPAVIALTDPEGCPLSRFKDSLGNPTHILRIGESYKEKQRTIQAKKEVEQRRAGGYSRKYASKAKNLADDMVRNTARDLLYYAVTQDAMLIFENLSRGFGRQGKRTFMAERQYTRMEDWLTAKLAYEGLPSKTYLSKTLAQYTSKTCSNCGFTITSADYDRVLEKLKKTATGWMTTINGKELKVEGQITYYNRYKRQNVVKDLSVELDRLSEESVNNDISSWTKGRQGEALSLLKKRFSHRPVQEKFVCLNCGFETHADEQAALNIARSWLFLRSQEYKKYQTNKTTGNTDKRAFVETWQSFYRKKLKEVWKPAV

SEQ ID NO: 38617 - protein, 978 aa, synthetic construct
  REGION 1..978: note = engineered CasX variant
QEIKRLNKIRRRLVKDSNTKKAGKTGPMKTLLVRVMTPDLRERLENLRKKPENIPQPISNTSRANLNKLLTDYTEMKKAILHVYWEEFQKDPVGLMSRVAQPASKKIDQNKLKPEMDEKGNLTTAGFACSQCGQPLFVYKLEQVSEKGKAYTNYFGRCNVAEHEKLILLAQLKPEKDSDEAVTYSLGKFGQRALDFYSIHVTKESTHPVKPLAQIAGNRYASYPVGKALSDACMGTIASFLSKYQDIIIEHQKVVKGNQKRLESLRELAGKENLEYPSVTLPPQPHTKEGVDAYNEVIARVRMWVNLNLWQKLKLSRDDAKPLLRLKGFPSFPLVERQANEVDWWDMVCNVKKLINEKKEDGKVFWQNLAGYKRQEALRPYLSSEEDRKKGKKFARYQLGDLLLHLEKKHGEDWGKVYDEAWERIDKKVEGLSKHIKLEEERRSEDAQSKAALTDWLRAKASFVIEGLKEADKDEFCRCELKLQKWYGDLRGKPFAIEAENSILDISGFSKQYNCAFIWQKDGVKKLNLYLIINYFKGGKLRFKKIKPEAFEANRFYTVINKKSGEIVPMEVNFNFDDPNLIILPLAFGKRQGREFIWNDLLSLETGSLKLANGRVIEKTLYNRRTRQDEPALFVALTFERREVLDSSNIKPMNLIGVDRGENIPAVIALTDPEGCPLSRFKDSLGNPTHILRIGESYKEKQRTIQAKKEVEQRRAGGYSRKYASKAKNLADDMVRNTARDLLYYAVTQDAMLIFENLSRGFGRQGKRTFMAERQYTRMEDWLTAKLAYEGLPSKTYLSKTLAQYTSKTCSNCGFTITSADYDRVLEKLKKTATGWMTTINGKELKVEGQITYYNRYKRQNVVKDLSVELDRLSEESVNNDISSWTKGRSGEALSLLKKRFSHRPVQEKFVCLNCEFETHADEQAALNIARSWLFLRSQEYKKYQTNKTTGNTDKRAFVETWQSFYRKKLKEVWKPAV

SEQ ID NO: 38618 - protein, 978 aa, synthetic construct
  REGION 1..978: note = engineered CasX variant
QEIKRLNKIRRRLVKDSNTKKAGKTGPMKTLLVRVMTPDLRERLENLRKKPENIPQPISNTSRANLNKLLTDYTEMKKAILHVYWEEFQKDPVGLMSRVAQPASKKIDQNKLKPEMDEKGNLTTAGFACSQCGQPLFVYKLEQVSEKGKAYTNYFGRCNVAEHEKLILLAQLKPEKDSDEAVTYSLGKFGQRALDFYSIHVTKESTHPVKPLAQIAGNRYASHPVGKALSDACMGTIASFLSKYQDIIIEHQKVVKGNQKRLESLRELAGKENLEYPSVTLPPQPHTKEGVDAYNEVIARVRMWVNLNLWQKLKLSRDDAKPLLRLKGFPSFPLVERQANEVDWWDMVCNVKKLINEKKEDGKVFWQNLAGYKRQEALRPYLSSEEDRKKGKKFARYQLGDLLLHLEKKHGEDWGKVYDEAWERIDKKVEGLSKHIKLEEERRSEDAQSKAALTDWLRAKASFVIEGLKEADKDEFCRCELKLQKWYGDLRGKPFAIEAENSILDISGFSKQYNCAFIWQKDGVKKLNLYLIINYFKGGKLRFKKIKPEAFEANRFYTVINKKSGEIVPMEVNFNFDDPNLIILPLAFGKRQGREFIWNDLLSLETGSLKLANGRVIEKTLYNRRTRQDEPALFVALTFERREVLDSSNIKPMNLIGVDRGENIPAVIALTDPEGCPLSRFKDSLGNPTHILRIGESYKEKQRTIQAKKEVEQRRAGGYSRKYASKAKNLADDMVRNTARDLLYYAVTQDAMLIFENLSRGFGRQGKRTFMAERQYTRMEDWLTAKLAYEGLPSKTYLSKTLAQYTSKTCSNCGFTITSADYDRVLEKLKKTATGWMTTINGKELKVEGQITYYNRYKRQNVVKDLSVELDRLSEESVNNDISSWTKGRSGEALSLLKKRFSHRPVQEKFVCLNCEFETHADEQAALNIARSWLFLRSQEYKKYQTNKTTGNTDKRAFVETWQSFYRKKLKEVWKPAV

SEQ ID NO: 38619 - protein, 978 aa, synthetic construct
  REGION 1..978: note = engineered CasX variant
QEIKRLNKIRRRLVKDSNTKKAGKTGPMKTLLVRVMTPDLRERLENLRKKPENIPQPISNTSRANLNKLLTDYTEMKKAILHVYWEEFQKDPVGLMSRVAQPASKKIDQNKLKPEMDEKGNLTTAGFACSQCGQPLFVYKLEQVSEKGKAYTNYFGRCNVAEHEKLILLAQLKPEKDSDEAVTYSLGKFGQRALDFYSIHVTKESTHPVKPLAQIAGNRYASSPVGKALSDACMGTIASFLSKYQDIIIEHQKVVKGNQKRLESLRELAGKENLEYPSVTLPPQPHTKEGVDAYNEVIARVRMWVNLNLWQKLKLSRDDAKPLLRLKGFPSFPLVERQANEVDWWDMVCNVKKLINEKKEDGKVFWQNLAGYKRQEALRPYLSSEEDRKKGKKFARYQLGDLLLHLEKKHGEDWGKVYDEAWERIDKKVEGLSKHIKLEEERRSEDAQSKAALTDWLRAKASFVIEGLKEADKDEFCRCELKLQKWYGDLRGKPFAIEAENSILDISGFSKQYNCAFIWQKDGVKKLNLYLIINYFKGGKLRFKKIKPEAFEANRFYTVINKKSGEIVPMEVNFNFDDPNLIILPLAFGKRQGREFIWNDLLSLETGSLKLANGRVIEKTLYNRRTRQDEPALFVALTFERREVLDSSNIKPMNLIGVDRGENIPAVIALTDPEGCPLSRFKDSLGNPTHILRIGESYKEKQRTIQAKKEVEQRRAGGYSRKYASKAKNLADDMVRNTARDLLYYAVTQDAMLIFENLSRGFGRQGKRTFMAERQYTRMEDWLTAKLAYEGLPSKTYLSKTLAQYTSKTCSNCGFTITSADYDRVLEKLKKTATGWMTTINGKELKVEGQITYYNRYKRQNVVKDLSVELDRLSEESVNNDISSWTKGRSGEALSLLKKRFSHRPVQEKFVCLNCEFETHADEQAALNIARSWLFLRSQEYKKYQTNKTTGNTDKRAFVETWQSFYRKKLKEVWKPAV

SEQ ID NO: 38620 - protein, 978 aa, synthetic construct
  REGION 1..978: note = engineered CasX variant
QEIKRLNKIRRRLVKDSNTKKAGKTGPMKTLLVRVMTPDLRERLENLRKKPENIPQPISNTSRANLNKLLTDYTEMKKAILHVYWEEFQKDPVGLMSRVAQPASKKIDQNKLKPEMDEKGNLTTAGFACSQCGQPLFVYKLEQVSEKGKAYTNYFGRCNVAEHEKLILLAQLKPEKDSDEAVTYSLGKFGQRALDFYSIHVTKESTHPVKPLAQIAGNRYASTPVGKALSDACMGTIASFLSKYQDIIIEHQKVVKGNQKRLESLRELAGKENLEYPSVTLPPQPHTKEGVDAYNEVIARVRMWVNLNLWQKLKLSRDDAKPLLRLKGFPSFPLVERQANEVDWWDMVCNVKKLINEKKEDGKVFWQNLAGYKRQEALRPYLSSEEDRKKGKKFARYQLGDLLLHLEKKHGEDWGKVYDEAWERIDKKVEGLSKHIKLEEERRSEDAQSKAALTDWLRAKASFVIEGLKEADKDEFCRCELKLQKWYGDLRGKPFAIEAENSILDISGFSKQYNCAFIWQKDGVKKLNLYLIINYFKGGKLRFKKIKPEAFEANRFYTVINKKSGEIVPMEVNFNFDDPNLIILPLAFGKRQGREFIWNDLLSLETGSLKLANGRVIEKTLYNRRTRQDEPALFVALTFERREVLDSSNIKPMNLIGVDRGENIPAVIALTDPEGCPLSRFKDSLGNPTHILRIGESYKEKQRTIQAKKEVEQRRAGGYSRKYASKAKNLADDMVRNTARDLLYYAVTQDAMLIFENLSRGFGRQGKRTFMAERQYTRMEDWLTAKLAYEGLPSKTYLSKTLAQYTSKTCSNCGFTITSADYDRVLEKLKKTATGWMTTINGKELKVEGQITYYNRYKRQNVVKDLSVELDRLSEESVNNDISSWTKGRSGEALSLLKKRFSHRPVQEKFVCLNCEFETHADEQAALNIARSWLFLRSQEYKKYQTNKTTGNTDKRAFVETWQSFYRKKLKEVWKPAV

SEQ ID NO: 38621 - protein, 978 aa, synthetic construct
  REGION 1..978: note = engineered CasX variant
QEIKRLNKIRRRLVKDSNTKKAGKTGPMKTLLVRVMTPDLRERLENLRKKPENIPQPISNTSRANLNKLLTDYTEMKKAILHVYWEEFQKDPVGLMSRVAQPASKKIDQNKLKPEMDEKGNLTTAGFACSQCGQPLFVYKLEQVSEKGKAYTNYFGRCNVAEHEKLILLAQLKPEKDSDEAVTYSLGKFGQRALDFYSIHVTKESTHPVKPLAQIAGNRYASAPVGKALSDACMGTIASFLSKYQDIIIEHQKVVKGNQKRLESLRELAGKENLEYPSVTLPPQPHTKEGVDAYNEVIARVRMWVNLNLWQKLKLSRDDAKPLLRLKGFPSFPLVERQANEVDWWDMVCNVKKLINEKKEDGKVFWQNLAGYKRQEALRPYLSSEEDRKKGKKFARYQLGDLLLHLEKKHGEDWGKVYDEAWERIDKKVEGLSKHIKLEEERRSEDAQSKAALTDWLRAKASFVIEGLKEADKDEFCRCELKLQKWYGDLRGKPFAIEAENSILDISGFSKQYNCAFIWQKDGVKKLNLYLIINYFKGGKLRFKKIKPEAFEANRFYTVINKKSGEIVPMEVNFNFDDPNLIILPLAFGKRQGREFIWNDLLSLETGSLKLANGRVIEKTLYNRRTRQDEPALFVALTFERREVLDSSNIKPMNLIGVDRGENIPAVIALTDPEGCPLSRFKDSLGNPTHILRIGESYKEKQRTIQAKKEVEQRRAGGYSRKYASKAKNLADDMVRNTARDLLYYAVTQDAMLIFENLSRGFGRQGKRTFMAERQYTRMEDWLTAKLAYEGLPSKTYLSKTLAQYTSKTCSNCGFTITSADYDRVLEKLKKTATGWMTTINGKELKVEGQITYYNRYKRQNVVKDLSVELDRLSEESVNNDISSWTKGRSGEALSLLKKRFSHRPVQEKFVCLNCEFETHADEQAALNIARSWLFLRSQEYKKYQTNKTTGNTDKRAFVETWQSFYRKKLKEVWKPAV

SEQ ID NO: 38622 - protein, 978 aa, synthetic construct
  REGION 1..978: note = engineered CasX variant
QEIKRLNKIRRRLVKDSNTKKAGKTGPMKTLLVRVMTPDLRERLENLRKKPENIPQPISNTSRANLNKLLTDYTEMKKAILHVYWEEFQKDPVGLMSRVAQPASKKIDQNKLKPEMDEKGNLTTAGFACSQCGQPLFVYKLEQVSEKGKAYTNYFGRCNVAEHEKLILLAQLKPEKDSDEAVTYSLGKFGQRALDFYSIHVTKESTHPVKPLAQIAGNRYASVPVGKALSDACMGTIASFLSKYQDIIIEHQKVVKGNQKRLESLRELAGKENLEYPSVTLPPQPHTKEGVDAYNEVIARVRMWVNLNLWQKLKLSRDDAKPLLRLKGFPSFPLVERQANEVDWWDMVCNVKKLINEKKEDGKVFWQNLAGYKRQEALRPYLSSEEDRKKGKKFARYQLGDLLLHLEKKHGEDWGKVYDEAWERIDKKVEGLSKHIKLEEERRSEDAQSKAALTDWLRAKASFVIEGLKEADKDEFCRCELKLQKWYGDLRGKPFAIEAENSILDISGFSKQYNCAFIWQKDGVKKLNLYLIINYFKGGKLRFKKIKPEAFEANRFYTVINKKSGEIVPMEVNFNFDDPNLIILPLAFGKRQGREFIWNDLLSLETGSLKLANGRVIEKTLYNRRTRQDEPALFVALTFERREVLDSSNIKPMNLIGVDRGENIPAVIALTDPEGCPLSRFKDSLGNPTHILRIGESYKEKQRTIQAKKEVEQRRAGGYSRKYASKAKNLADDMVRNTARDLLYYAVTQDAMLIFENLSRGFGRQGKRTFMAERQYTRMEDWLTAKLAYEGLPSKTYLSKTLAQYTSKTCSNCGFTITSADYDRVLEKLKKTATGWMTTINGKELKVEGQITYYNRYKRQNVVKDLSVELDRLSEESVNNDISSWTKGRSGEALSLLKKRFSHRPVQEKFVCLNCEFETHADEQAALNIARSWLFLRSQEYKKYQTNKTTGNTDKRAFVETWQSFYRKKLKEVWKPAV

SEQ ID NO: 38623 - protein, 978 aa, synthetic construct
  REGION 1..978: note = engineered CasX variant
QEIKRLNKIRRRLVKDSNTKKAGKTGPMKTLLVRVMTPDLRERLENLRKKPENIPQPISNTSRANLNKLLTDYTEMKKAILHVYWEEFQKDPVGLMSRVAQPASKKIDQNKLKPEMDEKGNLTTAGFACSQCGQPLFVYKLEQVSEKGKAYTNYFGRCNVAEHEKLIKLAQLKPEKDSDEAVTYSLGKFGQRALDFYSIHVTKESTHPVKPLAQIAGNRYASGPVGKALSDACMGTIASFLSKYQDIIIEHQKVVKGNQKRLESLRELAGKENLEYPSVTLPPQPHTKEGVDAYNEVIARVRMWVNLNLWQKLKLSRDDAKPLLRLKGFPSFPLVERQANEVDWWDMVCNVKKLINEKKEDGKVFWQNLAGYKRQEALRPYLSSEEDRKKGKKFARYQLGDLLLHLEKKHGEDWGKVYDEAWERIDKKVEGLSKHIKLEEERRSEDAQSKAALTDWLRAKASFVIEGLKEADKDEFCRCELKLQKWYGDLRGKPFAIEAENSILDISGFSKQYNCAFIWQKDGVKKLNLYLIINYFKGGKLRFKKIKPEAFEANRFYTVINKKSGEIVPMEVNFNFDDPNLIILPLAFGKRQGREFIWNDLLSLETGSLKLANGRVIEKTLYNRRTRQDEPALFVALTFERREVLDSSNIKPMNLIGVDRGENIPAVIALTDPEGCPLSRFKDSLGNPTHILRIGESYKEKQRTIQAKKEVEQRRAGGYSRKYASKAKNLADDMVRNTARDLLYYAVTQDAMLIFENLSRGFGRQGKRTFMAERQYTRMEDWLTAKLAYEGLPSKTYLSKTLAQYTSKTCSNCGFTITSADYDRVLEKLKKTATGWMTTINGKELKVEGQITYYNRYKRQNVVKDLSVELDRLSEESVNNDISSWTKGRSGEALSLLKKRFSHRPVQEKFVCLNCEFETHADEQAALNIARSWLFLRSQEYKKYQTNKTTGNTDKRAFVETWQSFYRKKLKEVWKPAV

SEQ ID NO: 38624 - protein, 977 aa, synthetic construct
  REGION 1..977: note = engineered CasX variant
QEIKRLNKIRRRLVKDSNTKKAGKTGPMKTLLVRVMTPDLRERLENLRKKPENIPQPISNTSRANLNKLLTDYTEMKKAILHVYWEEFQKDPVGLMSRVAQPASKKIDQNKLKPEMDEKGNLTTAGFACSQCGQPLFVYKLEQVSEKGKAYTNYFGRCNVAEHEKLILLAQLKPEKDSDEAVTYSLGKFGQRALDFYSIHVTKESTHPVKPLAQIAGNRYASPVGKALSDACMGTIASFLSKYQDIIIEHQKVVKGNQKRLESLRELAGKENLEYPSVTLPPQPHTKEGVDAYNEVIARVRMWVNLNLWQKLKLSRDDAKPLLRLKGFPSFPLVERQANEVDWWDMVCNVKKLINEKKEDGKVFWQNLAGYKRQEALRPYLSSEEDRKKGKKFARYQLGDLLLHLEKKHGEDWGKVYDEAWERIDKKVEGLSKHIKLEEERRSEDAQSKAALTDWLRAKASFVIEGLKEADKDEFCRCELKLQKWYGDLRGKPFAIEAENSILDISGFSKQYNCAFIWQKDGVKKLNLYLIINYFKGGKLRFKKIKPEAFEANRFYTVINKKSGEIVPMEVNFNFDDPNLIILPLAFGKRQGREFIWNDLLSLETGSLKLANGRVIEKTLYNRRTRQDEPALFVALTFERREVLDSSNIKPMNLIGVDRGENIPAVIALTDPEGCPLSRFKDSLGNPTHILRIGESYKEKQRTIQAKKEVEQRRAGGYSRKYASKAKNLADDMVRNTARDLLYYAVTQDAMLIFENLSRGFGRQGKRTFMAERQYTRMEDWLTAKLAYEGLPSKTYLSKTLAQYTSKTCSNCGFTITSADYDRVLEKLKKTATGWMTTINGKELKVEGQITYYNRYKRQNVVKDLSVELDRLSEESVNNDISSWTKGRSGEALSLLKKRFSHRPVQEKFVCLNCEFETHADEQAALNIARSWLFLRSQEYKKYQTNKTTGNTDKRAFVETWQSFYRKKLKEVWKPAV

SEQ ID NO: 38625 - protein, 979 aa, synthetic construct
  REGION 1..979: note = engineered CasX variant
QEIKRLNKIRRRLVKDSNTKKAGKTGPMKTLLVRVMTPDLRERLENLRKKPENIPQPISNTSRANLNKLLTDYTEMKKAILHVYWEEFQKDPVGLMSRVAQPASKKIDQNKLKPEMDEKGNLTTAGFACSQCGQPLFVYKLEQVSEKGKAYTNYFGRCNVAEHEKLILLAQLKPEKDSDEAVTYSLGKFGQRALDFYSIHVTKESTHPVKPLAQIAGNRYASYPVGKALSDACMGTIASFLSKYQDIIIEHQKVVKGNQKRLESLRELAGKENLEYPSVTLPPQPHTKEGVDAYNEVIARVRMWVNLNLWQKLKLSRDDAKPLLRLKGFPSFPLVERQANEVDWWDMVCNVKKLINEKKEDGKVFWQNLAGYKRQEALRPYLSSEEDRKKGKKFARYQLGDLLLHLEKKHGEDWGKVYDEAWERIDKKVEGLSKHIKLEEERRSEDAQSKAALTDWLRAKASFVIEGLKEADKDEFCRCELKLQKWYGDLRGKPFAIEAENSILDISGFSKQYNCAFIWQKDGVKKLNLYLIINYFKGGKLRFKKIKPEAFEANRFYTVINKKSGEIVPMEVNFNFDDPNLIILPLAFGKRQGREFIWNDLLSLETGSLKLANGRVIEKTLYNRRTRQDEPALFVALTFERREVLDSSNIKPMNLIGVDRGENIPAVIALTDPEGCPLSRFKDSLGNPTHILRIGESYKEKQRTIQAKKEVEQRRAGGYSRKYASKAKNLADDMVRNTARDLLYYAVTQDAMLIFENLSRGFGRQGKRTFMAERQYTRMEDWLTAKLAYEGLPSKTYLSKTLAQYTSKTCSNCGFTITSADYDRVLEKLKKTATGWMTTINGKELKVEGQITYYNRYKRQNVVKDLSVELDRLSEESVNNDISSWTKGRSGEALSLLKKRFSHRPVQEKFVCLNCGFETHADEQAALNIARSWLFLRSQEYKKYQTNKTSTGNTDKRAFVETWQSFYRKKLKEVWKPAV

SEQ ID NO: 38626 - protein, 979 aa, synthetic construct
  REGION 1..979: note = engineered CasX variant
QEIKRLNKIRRRLVKDSNTKKAGKTGPMKTLLVRVMTPDLRERLENLRKKPENIPQPISNTSRANLNKLLTDYTEMKKAILHVYWEEFQKDPVGLMSRVAQPASKKIDQNKLKPEMDEKGNLTTAGFACSQCGQPLFVYKLEQVSEKGKAYTNYFGRCNVAEHEKLILLAQLKPEKDSDEAVTYSLGKFGQRALDFYSIHVTKESTHPVKPLAQIAGNRYASHPVGKALSDACMGTIASFLSKYQDIIIEHQKVVKGNQKRLESLRELAGKENLEYPSVTLPPQPHTKEGVDAYNEVIARVRMWVNLNLWQKLKLSRDDAKPLLRLKGFPSFPLVERQANEVDWWDMVCNVKKLINEKKEDGKVFWQNLAGYKRQEALRPYLSSEEDRKKGKKFARYQLGDLLLHLEKKHGEDWGKVYDEAWERIDKKVEGLSKHIKLEEERRSEDAQSKAALTDWLRAKASFVIEGLKEADKDEFCRCELKLQKWYGDLRGKPFAIEAENSILDISGFSKQYNCAFIWQKDGVKKLNLYLIINYFKGGKLRFKKIKPEAFEANRFYTVINKKSGEIVPMEVNFNFDDPNLIILPLAFGKRQGREFIWNDLLSLETGSLKLANGRVIEKTLYNRRTRQDEPALFVALTFERREVLDSSNIKPMNLIGVDRGENIPAVIALTDPEGCPLSRFKDSLGNPTHILRIGESYKEKQRTIQAKKEVEQRRAGGYSRKYASKAKNLADDMVRNTARDLLYYAVTQDAMLIFENLSRGFGRQGKRTFMAERQYTRMEDWLTAKLAYEGLPSKTYLSKTLAQYTSKTCSNCGFTITSADYDRVLEKLKKTATGWMTTINGKELKVEGQITYYNRYKRQNVVKDLSVELDRLSEESVNNDISSWTKGRSGEALSLLKKRFSHRPVQEKFVCLNCGFETHADEQAALNIARSWLFLRSQEYKKYQTNKTSTGNTDKRAFVETWQSFYRKKLKEVWKPAV

SEQ ID NO: 38627 - protein, 979 aa, synthetic construct
  REGION 1..979: note = engineered CasX variant
QEIKRLNKIRRRLVKDSNTKKAGKTGPMKTLLVRVMTPDLRERLENLRKKPENIPQPISNTSRANLNKLLTDYTEMKKAILHVYWEEFQKDPVGLMSRVAQPASKKIDQNKLKPEMDEKGNLTTAGFACSQCGQPLFVYKLEQVSEKGKAYTNYFGRCNVAEHEKLILLAQLKPEKDSDEAVTYSLGKFGQRALDFYSIHVTKESTHPVKPLAQIAGNRYASSPVGKALSDACMGTIASFLSKYQDIIIEHQKVVKGNQKRLESLRELAGKENLEYPSVTLPPQPHTKEGVDAYNEVIARVRMWVNLNLWQKLKLSRDDAKPLLRLKGFPSFPLVERQANEVDWWDMVCNVKKLINEKKEDGKVFWQNLAGYKRQEALRPYLSSEEDRKKGKKFARYQLGDLLLHLEKKHGEDWGKVYDEAWERIDKKVEGLSKHIKLEEERRSEDAQSKAALTDWLRAKASFVIEGLKEADKDEFCRCELKLQKWYGDLRGKPFAIEAENSILDISGFSKQYNCAFIWQKDGVKKLNLYLIINYFKGGKLRFKKIKPEAFEANRFYTVINKKSGEIVPMEVNFNFDDPNLIILPLAFGKRQGREFIWNDLLSLETGSLKLANGRVIEKTLYNRRTRQDEPALFVALTFERREVLDSSNIKPMNLIGVDRGENIPAVIALTDPEGCPLSRFKDSLGNPTHILRIGESYKEKQRTIQAKKEVEQRRAGGYSRKYASKAKNLADDMVRNTARDLLYYAVTQDAMLIFENLSRGFGRQGKRTFMAERQYTRMEDWLTAKLAYEGLPSKTYLSKTLAQYTSKTCSNCGFTITSADYDRVLEKLKKTATGWMTTINGKELKVEGQITYYNRYKRQNVVKDLSVELDRLSEESVNNDISSWTKGRSGEALSLLKKRFSHRPVQEKFVCLNCGFETHADEQAALNIARSWLFLRSQEYKKYQTNKTSTGNTDKRAFVETWQSFYRKKLKEVWKPAV

SEQ ID NO: 38628 - protein, 979 aa, synthetic construct
  REGION 1..979: note = engineered CasX variant
QEIKRLNKIRRRLVKDSNTKKAGKTGPMKTLLVRVMTPDLRERLENLRKKPENIPQPISNTSRANLNKLLTDYTEMKKAILHVYWEEFQKDPVGLMSRVAQPASKKIDQNKLKPEMDEKGNLTTAGFACSQCGQPLFVYKLEQVSEKGKAYTNYFGRCNVAEHEKLILLAQLKPEKDSDEAVTYSLGKFGQRALDFYSIHVTKESTHPVKPLAQIAGNRYASTPVGKALSDACMGTIASFLSKYQDIIIEHQKVVKGNQKRLESLRELAGKENLEYPSVTLPPQPHTKEGVDAYNEVIARVRMWVNLNLWQKLKLSRDDAKPLLRLKGFPSFPLVERQANEVDWWDMVCNVKKLINEKKEDGKVFWQNLAGYKRQEALRPYLSSEEDRKKGKKFARYQLGDLLLHLEKKHGEDWGKVYDEAWERIDKKVEGLSKHIKLEEERRSEDAQSKAALTDWLRAKASFVIEGLKEADKDEFCRCELKLQKWYGDLRGKPFAIEAENSILDISGFSKQYNCAFIWQKDGVKKLNLYLIINYFKGGKLRFKKIKPEAFEANRFYTVINKKSGEIVPMEVNFNFDDPNLIILPLAFGKRQGREFIWNDLLSLETGSLKLANGRVIEKTLYNRRTRQDEPALFVALTFERREVLDSSNIKPMNLIGVDRGENIPAVIALTDPEGCPLSRFKDSLGNPTHILRIGESYKEKQRTIQAKKEVEQRRAGGYSRKYASKAKNLADDMVRNTARDLLYYAVTQDAMLIFENLSRGFGRQGKRTFMAERQYTRMEDWLTAKLAYEGLPSKTYLSKTLAQYTSKTCSNCGFTITSADYDRVLEKLKKTATGWMTTINGKELKVEGQITYYNRYKRQNVVKDLSVELDRLSEESVNNDISSWTKGRSGEALSLLKKRFSHRPVQEKFVCLNCGFETHADEQAALNIARSWLFLRSQEYKKYQTNKTSTGNTDKRAFVETWQSFYRKKLKEVWKPAV

SEQ ID NO: 38629 - protein, 979 aa, synthetic construct
  REGION 1..979: note = engineered CasX variant
QEIKRLNKIRRRLVKDSNTKKAGKTGPMKTLLVRVMTPDLRERLENLRKKPENIPQPISNTSRANLNKLLTDYTEMKKAILHVYWEEFQKDPVGLMSRVAQPASKKIDQNKLKPEMDEKGNLTTAGFACSQCGQPLFVYKLEQVSEKGKAYTNYFGRCNVAEHEKLILLAQLKPEKDSDEAVTYSLGKFGQRALDFYSIHVTKESTHPVKPLAQIAGNRYASAPVGKALSDACMGTIASFLSKYQDIIIEHQKVVKGNQKRLESLRELAGKENLEYPSVTLPPQPHTKEGVDAYNEVIARVRMWVNLNLWQKLKLSRDDAKPLLRLKGFPSFPLVERQANEVDWWDMVCNVKKLINEKKEDGKVFWQNLAGYKRQEALRPYLSSEEDRKKGKKFARYQLGDLLLHLEKKHGEDWGKVYDEAWERIDKKVEGLSKHIKLEEERRSEDAQSKAALTDWLRAKASFVIEGLKEADKDEFCRCELKLQKWYGDLRGKPFAIEAENSILDISGFSKQYNCAFIWQKDGVKKLNLYLIINYFKGGKLRFKKIKPEAFEANRFYTVINKKSGEIVPMEVNFNFDDPNLIILPLAFGKRQGREFIWNDLLSLETGSLKLANGRVIEKTLYNRRTRQDEPALFVALTFERREVLDSSNIKPMNLIGVDRGENIPAVIALTDPEGCPLSRFKDSLGNPTHILRIGESYKEKQRTIQAKKEVEQRRAGGYSRKYASKAKNLADDMVRNTARDLLYYAVTQDAMLIFENLSRGFGRQGKRTFMAERQYTRMEDWLTAKLAYEGLPSKTYLSKTLAQYTSKTCSNCGFTITSADYDRVLEKLKKTATGWMTTINGKELKVEGQITYYNRYKRQNVVKDLSVELDRLSEESVNNDISSWTKGRSGEALSLLKKRFSHRPVQEKFVCLNCGFETHADEQAALNIARSWLFLRSQEYKKYQTNKTSTGNTDKRAFVETWQSFYRKKLKEVWKPAV

SEQ ID NO: 38630 - protein, 979 aa, synthetic construct
  REGION 1..979: note = engineered CasX variant
QEIKRLNKIRRRLVKDSNTKKAGKTGPMKTLLVRVMTPDLRERLENLRKKPENIPQPISNTSRANLNKLLTDYTEMKKAILHVYWEEFQKDPVGLMSRVAQPASKKIDQNKLKPEMDEKGNLTTAGFACSQCGQPLFVYKLEQVSEKGKAYTNYFGRCNVAEHEKLILLAQLKPEKDSDEAVTYSLGKFGQRALDFYSIHVTKESTHPVKPLAQIAGNRYASVPVGKALSDACMGTIASFLSKYQDIIIEHQKVVKGNQKRLESLRELAGKENLEYPSVTLPPQPHTKEGVDAYNEVIARVRMWVNLNLWQKLKLSRDDAKPLLRLKGFPSFPLVERQANEVDWWDMVCNVKKLINEKKEDGKVFWQNLAGYKRQEALRPYLSSEEDRKKGKKFARYQLGDLLLHLEKKHGEDWGKVYDEAWERIDKKVEGLSKHIKLEEERRSEDAQSKAALTDWLRAKASFVIEGLKEADKDEFCRCELKLQKWYGDLRGKPFAIEAENSILDISGFSKQYNCAFIWQKDGVKKLNLYLIINYFKGGKLRFKKIKPEAFEANRFYTVINKKSGEIVPMEVNFNFDDPNLIILPLAFGKRQGREFIWNDLLSLETGSLKLANGRVIEKTLYNRRTRQDEPALFVALTFERREVLDSSNIKPMNLIGVDRGENIPAVIALTDPEGCPLSRFKDSLGNPTHILRIGESYKEKQRTIQAKKEVEQRRAGGYSRKYASKAKNLADDMVRNTARDLLYYAVTQDAMLIFENLSRGFGRQGKRTFMAERQYTRMEDWLTAKLAYEGLPSKTYLSKTLAQYTSKTCSNCGFTITSADYDRVLEKLKKTATGWMTTINGKELKVEGQITYYNRYKRQNVVKDLSVELDRLSEESVNNDISSWTKGRSGEALSLLKKRFSHRPVQEKFVCLNCGFETHADEQAALNIARSWLFLRSQEYKKYQTNKTSTGNTDKRAFVETWQSFYRKKLKEVWKPAV

SEQ ID NO: 38631 - protein, 979 aa, synthetic construct
  REGION 1..979: note = engineered CasX variant
QEIKRLNKIRRRLVKDSNTKKAGKTGPMKTLLVRVMTPDLRERLENLRKKPENIPQPISNTSRANLNKLLTDYTEMKKAILHVYWEEFQKDPVGLMSRVAQPASKKIDQNKLKPEMDEKGNLTTAGFACSQCGQPLFVYKLEQVSEKGKAYTNYFGRCNVAEHEKLIKLAQLKPEKDSDEAVTYSLGKFGQRALDFYSIHVTKESTHPVKPLAQIAGNRYASGPVGKALSDACMGTIASFLSKYQDIIIEHQKVVKGNQKRLESLRELAGKENLEYPSVTLPPQPHTKEGVDAYNEVIARVRMWVNLNLWQKLKLSRDDAKPLLRLKGFPSFPLVERQANEVDWWDMVCNVKKLINEKKEDGKVFWQNLAGYKRQEALRPYLSSEEDRKKGKKFARYQLGDLLLHLEKKHGEDWGKVYDEAWERIDKKVEGLSKHIKLEEERRSEDAQSKAALTDWLRAKASFVIEGLKEADKDEFCRCELKLQKWYGDLRGKPFAIEAENSILDISGFSKQYNCAFIWQKDGVKKLNLYLIINYFKGGKLRFKKIKPEAFEANRFYTVINKKSGEIVPMEVNFNFDDPNLIILPLAFGKRQGREFIWNDLLSLETGSLKLANGRVIEKTLYNRRTRQDEPALFVALTFERREVLDSSNIKPMNLIGVDRGENIPAVIALTDPEGCPLSRFKDSLGNPTHILRIGESYKEKQRTIQAKKEVEQRRAGGYSRKYASKAKNLADDMVRNTARDLLYYAVTQDAMLIFENLSRGFGRQGKRTFMAERQYTRMEDWLTAKLAYEGLPSKTYLSKTLAQYTSKTCSNCGFTITSADYDRVLEKLKKTATGWMTTINGKELKVEGQITYYNRYKRQNVVKDLSVELDRLSEESVNNDISSWTKGRSGEALSLLKKRFSHRPVQEKFVCLNCGFETHADEQAALNIARSWLFLRSQEYKKYQTNKTSTGNTDKRAFVETWQSFYRKKLKEVWKPAV

SEQ ID NO: 38632 - protein, 978 aa, synthetic construct
  REGION 1..978: note = engineered CasX variant
QEIKRLNKIRRRLVKDSNTKKAGKTGPMKTLLVRVMTPDLRERLENLRKKPENIPQPISNTSRANLNKLLTDYTEMKKAILHVYWEEFQKDPVGLMSRVAQPASKKIDQNKLKPEMDEKGNLTTAGFACSQCGQPLFVYKLEQVSEKGKAYTNYFGRCNVAEHEKLILLAQLKPEKDSDEAVTYSLGKFGQRALDFYSIHVTKESTHPVKPLAQIAGNRYASPVGKALSDACMGTIASFLSKYQDIIIEHQKVVKGNQKRLESLRELAGKENLEYPSVTLPPQPHTKEGVDAYNEVIARVRMWVNLNLWQKLKLSRDDAKPLLRLKGFPSFPLVERQANEVDWWDMVCNVKKLINEKKEDGKVFWQNLAGYKRQEALRPYLSSEEDRKKGKKFARYQLGDLLLHLEKKHGEDWGKVYDEAWERIDKKVEGLSKHIKLEEERRSEDAQSKAALTDWLRAKASFVIEGLKEADKDEFCRCELKLQKWYGDLRGKPFAIEAENSILDISGFSKQYNCAFIWQKDGVKKLNLYLIINYFKGGKLRFKKIKPEAFEANRFYTVINKKSGEIVPMEVNFNFDDPNLIILPLAFGKRQGREFIWNDLLSLETGSLKLANGRVIEKTLYNRRTRQDEPALFVALTFERREVLDSSNIKPMNLIGVDRGENIPAVIALTDPEGCPLSRFKDSLGNPTHILRIGESYKEKQRTIQAKKEVEQRRAGGYSRKYASKAKNLADDMVRNTARDLLYYAVTQDAMLIFENLSRGFGRQGKRTFMAERQYTRMEDWLTAKLAYEGLPSKTYLSKTLAQYTSKTCSNCGFTITSADYDRVLEKLKKTATGWMTTINGKELKVEGQITYYNRYKRQNVVKDLSVELDRLSEESVNNDISSWTKGRSGEALSLLKKRFSHRPVQEKFVCLNCGFETHADEQAALNIARSWLFLRSQEYKKYQTNKTSTGNTDKRAFVETWQSFYRKKLKEVWKPAV

SEQ ID NO: 38633 - protein, 979 aa, synthetic construct
  REGION 1..979: note = engineered CasX variant
QEIKRLNKIRRRLVKDSNTKKAGKTGPMKTLLVRVMTPDLRERLENLRKKPENIPQPISNTSRANLNKLLTDYTEMKKAILHVYWEEFQKDPVGLMSRVAQPASKKIDQNKLKPEMDEKGNLTTAGFACSQCGQPLFVYKLEQVSEKGKAYTNYFGRCNVAEHEKLILLAQLKPEKDSDEAVTYSLGKFGQRALDFYSIHVTKESTHPVKPLAQIAGNRYASYPVGKALSDACMGTIASFLSKYQDIIIEHQKVVKGNQKRLESLRELAGKENLEYPSVTLPPQPHTKEGVDAYNEVIARVRMWVNLNLWQKLKLSRDDAKPLLRLKGFPSFPLVERQANEVDWWDMVCNVKKLINEKKEDGKVFWQNLAGYKRQEALRPYLSSEEDRKKGKKFARYQLGDLLLHLEKKHGEDWGKVYDEAWERIDKKVEGLSKHIKLEEERRSEDAQSKAALTDWLRAKASFVIEGLKEADKDEFCRCELKLQKWYGDLRGKPFAIEAENSILDISGFSKQYNCAFIWQKDGVKKLNLYLIINYFKGGKLRFKKIKPEAFEANRFYTVINKKSGEIVPMEVNFNFDDPNLIILPLAFGKRQGREFIWNDLLSLETGSLKLANGRVIEKTLYNRRTRQDEPALFVALTFERREVLDSSNIKPMNLIGVDRGENIPAVIALTDPEGCPLSRFKDSLGNPTHILRIGESYKEKQRTIQAKKEVEQRRAGGYSRKYASKAKNLADDMVRNTARDLLYYAVTQDAMLIFENLSRGFGRQGKRTFMAERQYTRMEDWLTAKLAYEGLPSKTYLSKTLAQYTSKTCSNCGFTITSADYDRVLEKLKKTATGWMTTINGKELKVEGQITYYNRYKRQNVVKDLSVELDRLSEESVNNDISSWTKGRSGEALSLLKKRFSHRPVQEKFVCLNCGFETHADEQAALNIARSWLFLRSQEYKKYQTNKTTGKNTDKRAFVETWQSFYRKKLKEVWKPAV

SEQ ID NO: 38634 - protein, 979 aa, synthetic construct
  REGION 1..979: note = engineered CasX variant
QEIKRLNKIRRRLVKDSNTKKAGKTGPMKTLLVRVMTPDLRERLENLRKKPENIPQPISNTSRANLNKLLTDYTEMKKAILHVYWEEFQKDPVGLMSRVAQPASKKIDQNKLKPEMDEKGNLTTAGFACSQCGQPLFVYKLEQVSEKGKAYTNYFGRCNVAEHEKLILLAQLKPEKDSDEAVTYSLGKFGQRALDFYSIHVTKESTHPVKPLAQIAGNRYASHPVGKALSDACMGTIASFLSKYQDIIIEHQKVVKGNQKRLESLRELAGKENLEYPSVTLPPQPHTKEGVDAYNEVIARVRMWVNLNLWQKLKLSRDDAKPLLRLKGFPSFPLVERQANEVDWWDMVCNVKKLINEKKEDGKVFWQNLAGYKRQEALRPYLSSEEDRKKGKKFARYQLGDLLLHLEKKHGEDWGKVYDEAWERIDKKVEGLSKHIKLEEERRSEDAQSKAALTDWLRAKASFVIEGLKEADKDEFCRCELKLQKWYGDLRGKPFAIEAENSILDISGFSKQYNCAFIWQKDGVKKLNLYLIINYFKGGKLRFKKIKPEAFEANRFYTVINKKSGEIVPMEVNFNFDDPNLIILPLAFGKRQGREFIWNDLLSLETGSLKLANGRVIEKTLYNRRTRQDEPALFVALTFERREVLDSSNIKPMNLIGVDRGENIPAVIALTDPEGCPLSRFKDSLGNPTHILRIGESYKEKQRTIQAKKEVEQRRAGGYSRKYASKAKNLADDMVRNTARDLLYYAVTQDAMLIFENLSRGFGRQGKRTFMAERQYTRMEDWLTAKLAYEGLPSKTYLSKTLAQYTSKTCSNCGFTITSADYDRVLEKLKKTATGWMTTINGKELKVEGQITYYNRYKRQNVVKDLSVELDRLSEESVNNDISSWTKGRSGEALSLLKKRFSHRPVQEKFVCLNCGFETHADEQAALNIARSWLFLRSQEYKKYQTNKTTGKNTDKRAFVETWQSFYRKKLKEVWKPAV

SEQ ID NO: 38635 - protein, 979 aa, synthetic construct
  REGION 1..979: note = engineered CasX variant
QEIKRLNKIRRRLVKDSNTKKAGKTGPMKTLLVRVMTPDLRERLENLRKKPENIPQPISNTSRANLNKLLTDYTEMKKAILHVYWEEFQKDPVGLMSRVAQPASKKIDQNKLKPEMDEKGNLTTAGFACSQCGQPLFVYKLEQVSEKGKAYTNYFGRCNVAEHEKLILLAQLKPEKDSDEAVTYSLGKFGQRALDFYSIHVTKESTHPVKPLAQIAGNRYASSPVGKALSDACMGTIASFLSKYQDIIIEHQKVVKGNQKRLESLRELAGKENLEYPSVTLPPQPHTKEGVDAYNEVIARVRMWVNLNLWQKLKLSRDDAKPLLRLKGFPSFPLVERQANEVDWWDMVCNVKKLINEKKEDGKVFWQNLAGYKRQEALRPYLSSEEDRKKGKKFARYQLGDLLLHLEKKHGEDWGKVYDEAWERIDKKVEGLSKHIKLEEERRSEDAQSKAALTDWLRAKASFVIEGLKEADKDEFCRCELKLQKWYGDLRGKPFAIEAENSILDISGFSKQYNCAFIWQKDGVKKLNLYLIINYFKGGKLRFKKIKPEAFEANRFYTVINKKSGEIVPMEVNFNFDDPNLIILPLAFGKRQGREFIWNDLLSLETGSLKLANGRVIEKTLYNRRTRQDEPALFVALTFERREVLDSSNIKPMNLIGVDRGENIPAVIALTDPEGCPLSRFKDSLGNPTHILRIGESYKEKQRTIQAKKEVEQRRAGGYSRKYASKAKNLADDMVRNTARDLLYYAVTQDAMLIFENLSRGFGRQGKRTFMAERQYTRMEDWLTAKLAYEGLPSKTYLSKTLAQYTSKTCSNCGFTITSADYDRVLEKLKKTATGWMTTINGKELKVEGQITYYNRYKRQNVVKDLSVELDRLSEESVNNDISSWTKGRSGEALSLLKKRFSHRPVQEKFVCLNCGFETHADEQAALNIARSWLFLRSQEYKKYQTNKTTGKNTDKRAFVETWQSFYRKKLKEVWKPAV

SEQ ID NO: 38636 - protein, 979 aa, synthetic construct
  REGION 1..979: note = engineered CasX variant
QEIKRLNKIRRRLVKDSNTKKAGKTGPMKTLLVRVMTPDLRERLENLRKKPENIPQPISNTSRANLNKLLTDYTEMKKAILHVYWEEFQKDPVGLMSRVAQPASKKIDQNKLKPEMDEKGNLTTAGFACSQCGQPLFVYKLEQVSEKGKAYTNYFGRCNVAEHEKLILLAQLKPEKDSDEAVTYSLGKFGQRALDFYSIHVTKESTHPVKPLAQIAGNRYASTPVGKALSDACMGTIASFLSKYQDIIIEHQKVVKGNQKRLESLRELAGKENLEYPSVTLPPQPHTKEGVDAYNEVIARVRMWVNLNLWQKLKLSRDDAKPLLRLKGFPSFPLVERQANEVDWWDMVCNVKKLINEKKEDGKVFWQNLAGYKRQEALRPYLSSEEDRKKGKKFARYQLGDLLLHLEKKHGEDWGKVYDEAWERIDKKVEGLSKHIKLEEERRSEDAQSKAALTDWLRAKASFVIEGLKEADKDEFCRCELKLQKWYGDLRGKPFAIEAENSILDISGFSKQYNCAFIWQKDGVKKLNLYLIINYFKGGKLRFKKIKPEAFEANRFYTVINKKSGEIVPMEVNFNFDDPNLIILPLAFGKRQGREFIWNDLLSLETGSLKLANGRVIEKTLYNRRTRQDEPALFVALTFERREVLDSSNIKPMNLIGVDRGENIPAVIALTDPEGCPLSRFKDSLGNPTHILRIGESYKEKQRTIQAKKEVEQRRAGGYSRKYASKAKNLADDMVRNTARDLLYYAVTQDAMLIFENLSRGFGRQGKRTFMAERQYTRMEDWLTAKLAYEGLPSKTYLSKTLAQYTSKTCSNCGFTITSADYDRVLEKLKKTATGWMTTINGKELKVEGQITYYNRYKRQNVVKDLSVELDRLSEESVNNDISSWTKGRSGEALSLLKKRFSHRPVQEKFVCLNCGFETHADEQAALNIARSWLFLRSQEYKKYQTNKTTGKNTDKRAFVETWQSFYRKKLKEVWKPAV

SEQ ID NO: 38637 - protein, 979 aa, synthetic construct
  REGION 1..979: note = engineered CasX variant
QEIKRLNKIRRRLVKDSNTKKAGKTGPMKTLLVRVMTPDLRERLENLRKKPENIPQPISNTSRANLNKLLTDYTEMKKAILHVYWEEFQKDPVGLMSRVAQPASKKIDQNKLKPEMDEKGNLTTAGFACSQCGQPLFVYKLEQVSEKGKAYTNYFGRCNVAEHEKLILLAQLKPEKDSDEAVTYSLGKFGQRALDFYSIHVTKESTHPVKPLAQIAGNRYASAPVGKALSDACMGTIASFLSKYQDIIIEHQKVVKGNQKRLESLRELAGKENLEYPSVTLPPQPHTKEGVDAYNEVIARVRMWVNLNLWQKLKLSRDDAKPLLRLKGFPSFPLVERQANEVDWWDMVCNVKKLINEKKEDGKVFWQNLAGYKRQEALRPYLSSEEDRKKGKKFARYQLGDLLLHLEKKHGEDWGKVYDEAWERIDKKVEGLSKHIKLEEERRSEDAQSKAALTDWLRAKASFVIEGLKEADKDEFCRCELKLQKWYGDLRGKPFAIEAENSILDISGFSKQYNCAFIWQKDGVKKLNLYLIINYFKGGKLRFKKIKPEAFEANRFYTVINKKSGEIVPMEVNFNFDDPNLIILPLAFGKRQGREFIWNDLLSLETGSLKLANGRVIEKTLYNRRTRQDEPALFVALTFERREVLDSSNIKPMNLIGVDRGENIPAVIALTDPEGCPLSRFKDSLGNPTHILRIGESYKEKQRTIQAKKEVEQRRAGGYSRKYASKAKNLADDMVRNTARDLLYYAVTQDAMLIFENLSRGFGRQGKRTFMAERQYTRMEDWLTAKLAYEGLPSKTYLSKTLAQYTSKTCSNCGFTITSADYDRVLEKLKKTATGWMTTINGKELKVEGQITYYNRYKRQNVVKDLSVELDRLSEESVNNDISSWTKGRSGEALSLLKKRFSHRPVQEKFVCLNCGFETHADEQAALNIARSWLFLRSQEYKKYQTNKTTGKNTDKRAFVETWQSFYRKKLKEVWKPAV

SEQ ID NO: 38638 - protein, 979 aa, synthetic construct
  REGION 1..979: note = engineered CasX variant
QEIKRLNKIRRRLVKDSNTKKAGKTGPMKTLLVRVMTPDLRERLENLRKKPENIPQPISNTSRANLNKLLTDYTEMKKAILHVYWEEFQKDPVGLMSRVAQPASKKIDQNKLKPEMDEKGNLTTAGFACSQCGQPLFVYKLEQVSEKGKAYTNYFGRCNVAEHEKLILLAQLKPEKDSDEAVTYSLGKFGQRALDFYSIHVTKESTHPVKPLAQIAGNRYASVPVGKALSDACMGTIASFLSKYQDIIIEHQKVVKGNQKRLESLRELAGKENLEYPSVTLPPQPHTKEGVDAYNEVIARVRMWVNLNLWQKLKLSRDDAKPLLRLKGFPSFPLVERQANEVDWWDMVCNVKKLINEKKEDGKVFWQNLAGYKRQEALRPYLSSEEDRKKGKKFARYQLGDLLLHLEKKHGEDWGKVYDEAWERIDKKVEGLSKHIKLEEERRSEDAQSKAALTDWLRAKASFVIEGLKEADKDEFCRCELKLQKWYGDLRGKPFAIEAENSILDISGFSKQYNCAFIWQKDGVKKLNLYLIINYFKGGKLRFKKIKPEAFEANRFYTVINKKSGEIVPMEVNFNFDDPNLIILPLAFGKRQGREFIWNDLLSLETGSLKLANGRVIEKTLYNRRTRQDEPALFVALTFERREVLDSSNIKPMNLIGVDRGENIPAVIALTDPEGCPLSRFKDSLGNPTHILRIGESYKEKQRTIQAKKEVEQRRAGGYSRKYASKAKNLADDMVRNTARDLLYYAVTQDAMLIFENLSRGFGRQGKRTFMAERQYTRMEDWLTAKLAYEGLPSKTYLSKTLAQYTSKTCSNCGFTITSADYDRVLEKLKKTATGWMTTINGKELKVEGQITYYNRYKRQNVVKDLSVELDRLSEESVNNDISSWTKGRSGEALSLLKKRFSHRPVQEKFVCLNCGFETHADEQAALNIARSWLFLRSQEYKKYQTNKTTGKNTDKRAFVETWQSFYRKKLKEVWKPAV

SEQ ID NO: 38639 - protein, 979 aa, synthetic construct
  REGION 1..979: note = engineered CasX variant
QEIKRLNKIRRRLVKDSNTKKAGKTGPMKTLLVRVMTPDLRERLENLRKKPENIPQPISNTSRANLNKLLTDYTEMKKAILHVYWEEFQKDPVGLMSRVAQPASKKIDQNKLKPEMDEKGNLTTAGFACSQCGQPLFVYKLEQVSEKGKAYTNYFGRCNVAEHEKLIKLAQLKPEKDSDEAVTYSLGKFGQRALDFYSIHVTKESTHPVKPLAQIAGNRYASGPVGKALSDACMGTIASFLSKYQDIIIEHQKVVKGNQKRLESLRELAGKENLEYPSVTLPPQPHTKEGVDAYNEVIARVRMWVNLNLWQKLKLSRDDAKPLLRLKGFPSFPLVERQANEVDWWDMVCNVKKLINEKKEDGKVFWQNLAGYKRQEALRPYLSSEEDRKKGKKFARYQLGDLLLHLEKKHGEDWGKVYDEAWERIDKKVEGLSKHIKLEEERRSEDAQSKAALTDWLRAKASFVIEGLKEADKDEFCRCELKLQKWYGDLRGKPFAIEAENSILDISGFSKQYNCAFIWQKDGVKKLNLYLIINYFKGGKLRFKKIKPEAFEANRFYTVINKKSGEIVPMEVNFNFDDPNLIILPLAFGKRQGREFIWNDLLSLETGSLKLANGRVIEKTLYNRRTRQDEPALFVALTFERREVLDSSNIKPMNLIGVDRGENIPAVIALTDPEGCPLSRFKDSLGNPTHILRIGESYKEKQRTIQAKKEVEQRRAGGYSRKYASKAKNLADDMVRNTARDLLYYAVTQDAMLIFENLSRGFGRQGKRTFMAERQYTRMEDWLTAKLAYEGLPSKTYLSKTLAQYTSKTCSNCGFTITSADYDRVLEKLKKTATGWMTTINGKELKVEGQITYYNRYKRQNVVKDLSVELDRLSEESVNNDISSWTKGRSGEALSLLKKRFSHRPVQEKFVCLNCGFETHADEQAALNIARSWLFLRSQEYKKYQTNKTTGKNTDKRAFVETWQSFYRKKLKEVWKPAV

SEQ ID NO: 38640 - protein, 978 aa, synthetic construct
  REGION 1..978: note = engineered CasX variant
QEIKRLNKIRRRLVKDSNTKKAGKTGPMKTLLVRVMTPDLRERLENLRKKPENIPQPISNTSRANLNKLLTDYTEMKKAILHVYWEEFQKDPVGLMSRVAQPASKKIDQNKLKPEMDEKGNLTTAGFACSQCGQPLFVYKLEQVSEKGKAYTNYFGRCNVAEHEKLILLAQLKPEKDSDEAVTYSLGKFGQRALDFYSIHVTKESTHPVKPLAQIAGNRYASPVGKALSDACMGTIASFLSKYQDIIIEHQKVVKGNQKRLESLRELAGKENLEYPSVTLPPQPHTKEGVDAYNEVIARVRMWVNLNLWQKLKLSRDDAKPLLRLKGFPSFPLVERQANEVDWWDMVCNVKKLINEKKEDGKVFWQNLAGYKRQEALRPYLSSEEDRKKGKKFARYQLGDLLLHLEKKHGEDWGKVYDEAWERIDKKVEGLSKHIKLEEERRSEDAQSKAALTDWLRAKASFVIEGLKEADKDEFCRCELKLQKWYGDLRGKPFAIEAENSILDISGFSKQYNCAFIWQKDGVKKLNLYLIINYFKGGKLRFKKIKPEAFEANRFYTVINKKSGEIVPMEVNFNFDDPNLIILPLAFGKRQGREFIWNDLLSLETGSLKLANGRVIEKTLYNRRTRQDEPALFVALTFERREVLDSSNIKPMNLIGVDRGENIPAVIALTDPEGCPLSRFKDSLGNPTHILRIGESYKEKQRTIQAKKEVEQRRAGGYSRKYASKAKNLADDMVRNTARDLLYYAVTQDAMLIFENLSRGFGRQGKRTFMAERQYTRMEDWLTAKLAYEGLPSKTYLSKTLAQYTSKTCSNCGFTITSADYDRVLEKLKKTATGWMTTINGKELKVEGQITYYNRYKRQNVVKDLSVELDRLSEESVNNDISSWTKGRSGEALSLLKKRFSHRPVQEKFVCLNCGFETHADEQAALNIARSWLFLRSQEYKKYQTNKTTGKNTDKRAFVETWQSFYRKKLKEVWKPAV

SEQ ID NO: 38641 - protein, 978 aa, synthetic construct
  REGION 1..978: note = engineered CasX variant
QEIKRLNKIRRRLVKDSNTKKAGKTGPMKTLLVRVMTPDLRERLENLRKKPENIPQPISNTSRANLNKLLTDYTEMKKAILHVYWEEFQKDPVGLMSRVAQPASKKIDQNKLKPEMDEKGNLTTAGFACSQCGQPLFVYKLEQVSEKGKAYTNYFGRCNVAEHEKLILLAQLKPEKDSDEAVTYSLGKFGQRALDFYSIHVTKESTHPVKPLAQIAGNRYASYPVGKALSDACMGTIASFLSKYQDIIIEHQKVVKGNQKRLESLRELAGKENLEYPSVTLPPQPHTKEGVDAYNEVIARVRMWVNLNLWQKLKLSRDDAKPLLRLKKFPSFPLVERQANEVDWWDMVCNVKKLINEKKEDGKVFWQNLAGYKRQEALRPYLSSEEDRKKGKKFARYQLGDLLLHLEKKHGEDWGKVYDEAWERIDKKVEGLSKHIKLEEERRSEDAQSKAALTDWLRAKASFVIEGLKEADKDEFCRCELKLQKWYGDLRGKPFAIEAENSILDISGFSKQYNCAFIWQKDGVKKLNLYLIINYFKGGKLRFKKIKPEAFEANRFYTVINKKSGEIVPMEVNFNFDDPNLIILPLAFGKRQGREFIWNDLLSLETGSLKLANGRVIEKTLYNRRTRQDEPALFVALTFERREVLDSSNIKPMNLIGVDRGENIPAVIALTDPEGCPLSRFKDSLGNPTHILRIGESYKEKQRTIQAKKEVEQRRAGGYSRKYASKAKNLADDMVRNTARDLLYYAVTQDAMLIFENLSRGFGRQGKRTFMAERQYTRMEDWLTAKLAYEGLPSKTYLSKTLAQYTSKTCSNCGFTITSADYDRVLEKLKKTATGWMTTINGKELKVEGQITYYNRYKRQNVVKDLSVELDRLSEESVNNDISSWTKGRSGEALSLLKKRFSHRPVQEKFVCLNCGFETHADEQAALNIARSWLFLRSQEYKKYQTNKTTGNTDKRAFVETWQSFYRKKLKEVWKPAV

SEQ ID NO: 38642 - protein, 978 aa, synthetic construct
  REGION 1..978: note = engineered CasX variant
QEIKRLNKIRRRLVKDSNTKKAGKTGPMKTLLVRVMTPDLRERLENLRKKPENIPQPISNTSRANLNKLLTDYTEMKKAILHVYWEEFQKDPVGLMSRVAQPASKKIDQNKLKPEMDEKGNLTTAGFACSQCGQPLFVYKLEQVSEKGKAYTNYFGRCNVAEHEKLILLAQLKPEKDSDEAVTYSLGKFGQRALDFYSIHVTKESTHPVKPLAQIAGNRYASHPVGKALSDACMGTIASFLSKYQDIIIEHQKVVKGNQKRLESLRELAGKENLEYPSVTLPPQPHTKEGVDAYNEVIARVRMWVNLNLWQKLKLSRDDAKPLLRLKKFPSFPLVERQANEVDWWDMVCNVKKLINEKKEDGKVFWQNLAGYKRQEALRPYLSSEEDRKKGKKFARYQLGDLLLHLEKKHGEDWGKVYDEAWERIDKKVEGLSKHIKLEEERRSEDAQSKAALTDWLRAKASFVIEGLKEADKDEFCRCELKLQKWYGDLRGKPFAIEAENSILDISGFSKQYNCAFIWQKDGVKKLNLYLIINYFKGGKLRFKKIKPEAFEANRFYTVINKKSGEIVPMEVNFNFDDPNLIILPLAFGKRQGREFIWNDLLSLETGSLKLANGRVIEKTLYNRRTRQDEPALFVALTFERREVLDSSNIKPMNLIGVDRGENIPAVIALTDPEGCPLSRFKDSLGNPTHILRIGESYKEKQRTIQAKKEVEQRRAGGYSRKYASKAKNLADDMVRNTARDLLYYAVTQDAMLIFENLSRGFGRQGKRTFMAERQYTRMEDWLTAKLAYEGLPSKTYLSKTLAQYTSKTCSNCGFTITSADYDRVLEKLKKTATGWMTTINGKELKVEGQITYYNRYKRQNVVKDLSVELDRLSEESVNNDISSWTKGRSGEALSLLKKRFSHRPVQEKFVCLNCGFETHADEQAALNIARSWLFLRSQEYKKYQTNKTTGNTDKRAFVETWQSFYRKKLKEVWKPAV

SEQ ID NO: 38643 - protein, 978 aa, synthetic construct
  REGION 1..978: note = engineered CasX variant
QEIKRLNKIRRRLVKDSNTKKAGKTGPMKTLLVRVMTPDLRERLENLRKKPENIPQPISNTSRANLNKLLTDYTEMKKAILHVYWEEFQKDPVGLMSRVAQPASKKIDQNKLKPEMDEKGNLTTAGFACSQCGQPLFVYKLEQVSEKGKAYTNYFGRCNVAEHEKLILLAQLKPEKDSDEAVTYSLGKFGQRALDFYSIHVTKESTHPVKPLAQIAGNRYASSPVGKALSDACMGTIASFLSKYQDIIIEHQKVVKGNQKRLESLRELAGKENLEYPSVTLPPQPHTKEGVDAYNEVIARVRMWVNLNLWQKLKLSRDDAKPLLRLKKFPSFPLVERQANEVDWWDMVCNVKKLINEKKEDGKVFWQNLAGYKRQEALRPYLSSEEDRKKGKKFARYQLGDLLLHLEKKHGEDWGKVYDEAWERIDKKVEGLSKHIKLEEERRSEDAQSKAALTDWLRAKASFVIEGLKEADKDEFCRCELKLQKWYGDLRGKPFAIEAENSILDISGFSKQYNCAFIWQKDGVKKLNLYLIINYFKGGKLRFKKIKPEAFEANRFYTVINKKSGEIVPMEVNFNFDDPNLIILPLAFGKRQGREFIWNDLLSLETGSLKLANGRVIEKTLYNRRTRQDEPALFVALTFERREVLDSSNIKPMNLIGVDRGENIPAVIALTDPEGCPLSRFKDSLGNPTHILRIGESYKEKQRTIQAKKEVEQRRAGGYSRKYASKAKNLADDMVRNTARDLLYYAVTQDAMLIFENLSRGFGRQGKRTFMAERQYTRMEDWLTAKLAYEGLPSKTYLSKTLAQYTSKTCSNCGFTITSADYDRVLEKLKKTATGWMTTINGKELKVEGQITYYNRYKRQNVVKDLSVELDRLSEESVNNDISSWTKGRSGEALSLLKKRFSHRPVQEKFVCLNCGFETHADEQAALNIARSWLFLRSQEYKKYQTNKTTGNTDKRAFVETWQSFYRKKLKEVWKPAV

SEQ ID NO: 38644 - protein, 978 aa, synthetic construct
  REGION 1..978: note = engineered CasX variant
QEIKRLNKIRRRLVKDSNTKKAGKTGPMKTLLVRVMTPDLRERLENLRKKPENIPQPISNTSRANLNKLLTDYTEMKKAILHVYWEEFQKDPVGLMSRVAQPASKKIDQNKLKPEMDEKGNLTTAGFACSQCGQPLFVYKLEQVSEKGKAYTNYFGRCNVAEHEKLILLAQLKPEKDSDEAVTYSLGKFGQRALDFYSIHVTKESTHPVKPLAQIAGNRYASTPVGKALSDACMGTIASFLSKYQDIIIEHQKVVKGNQKRLESLRELAGKENLEYPSVTLPPQPHTKEGVDAYNEVIARVRMWVNLNLWQKLKLSRDDAKPLLRLKKFPSFPLVERQANEVDWWDMVCNVKKLINEKKEDGKVFWQNLAGYKRQEALRPYLSSEEDRKKGKKFARYQLGDLLLHLEKKHGEDWGKVYDEAWERIDKKVEGLSKHIKLEEERRSEDAQSKAALTDWLRAKASFVIEGLKEADKDEFCRCELKLQKWYGDLRGKPFAIEAENSILDISGFSKQYNCAFIWQKDGVKKLNLYLIINYFKGGKLRFKKIKPEAFEANRFYTVINKKSGEIVPMEVNFNFDDPNLIILPLAFGKRQGREFIWNDLLSLETGSLKLANGRVIEKTLYNRRTRQDEPALFVALTFERREVLDSSNIKPMNLIGVDRGENIPAVIALTDPEGCPLSRFKDSLGNPTHILRIGESYKEKQRTIQAKKEVEQRRAGGYSRKYASKAKNLADDMVRNTARDLLYYAVTQDAMLIFENLSRGFGRQGKRTFMAERQYTRMEDWLTAKLAYEGLPSKTYLSKTLAQYTSKTCSNCGFTITSADYDRVLEKLKKTATGWMTTINGKELKVEGQITYYNRYKRQNVVKDLSVELDRLSEESVNNDISSWTKGRSGEALSLLKKRFSHRPVQEKFVCLNCGFETHADEQAALNIARSWLFLRSQEYKKYQTNKTTGNTDKRAFVETWQSFYRKKLKEVWKPAV

SEQ ID NO: 38645 - protein, 978 aa, synthetic construct
  REGION 1..978: note = engineered CasX variant
QEIKRLNKIRRRLVKDSNTKKAGKTGPMKTLLVRVMTPDLRERLENLRKKPENIPQPISNTSRANLNKLLTDYTEMKKAILHVYWEEFQKDPVGLMSRVAQPASKKIDQNKLKPEMDEKGNLTTAGFACSQCGQPLFVYKLEQVSEKGKAYTNYFGRCNVAEHEKLILLAQLKPEKDSDEAVTYSLGKFGQRALDFYSIHVTKESTHPVKPLAQIAGNRYASAPVGKALSDACMGTIASFLSKYQDIIIEHQKVVKGNQKRLESLRELAGKENLEYPSVTLPPQPHTKEGVDAYNEVIARVRMWVNLNLWQKLKLSRDDAKPLLRLKKFPSFPLVERQANEVDWWDMVCNVKKLINEKKEDGKVFWQNLAGYKRQEALRPYLSSEEDRKKGKKFARYQLGDLLLHLEKKHGEDWGKVYDEAWERIDKKVEGLSKHIKLEEERRSEDAQSKAALTDWLRAKASFVIEGLKEADKDEFCRCELKLQKWYGDLRGKPFAIEAENSILDISGFSKQYNCAFIWQKDGVKKLNLYLIINYFKGGKLRFKKIKPEAFEANRFYTVINKKSGEIVPMEVNFNFDDPNLIILPLAFGKRQGREFIWNDLLSLETGSLKLANGRVIEKTLYNRRTRQDEPALFVALTFERREVLDSSNIKPMNLIGVDRGENIPAVIALTDPEGCPLSRFKDSLGNPTHILRIGESYKEKQRTIQAKKEVEQRRAGGYSRKYASKAKNLADDMVRNTARDLLYYAVTQDAMLIFENLSRGFGRQGKRTFMAERQYTRMEDWLTAKLAYEGLPSKTYLSKTLAQYTSKTCSNCGFTITSADYDRVLEKLKKTATGWMTTINGKELKVEGQITYYNRYKRQNVVKDLSVELDRLSEESVNNDISSWTKGRSGEALSLLKKRFSHRPVQEKFVCLNCGFETHADEQAALNIARSWLFLRSQEYKKYQTNKTTGNTDKRAFVETWQSFYRKKLKEVWKPAV

SEQ ID NO: 38646 - protein, 978 aa, synthetic construct
  REGION 1..978: note = engineered CasX variant
QEIKRLNKIRRRLVKDSNTKKAGKTGPMKTLLVRVMTPDLRERLENLRKKPENIPQPISNTSRANLNKLLTDYTEMKKAILHVYWEEFQKDPVGLMSRVAQPASKKIDQNKLKPEMDEKGNLTTAGFACSQCGQPLFVYKLEQVSEKGKAYTNYFGRCNVAEHEKLILLAQLKPEKDSDEAVTYSLGKFGQRALDFYSIHVTKESTHPVKPLAQIAGNRYASVPVGKALSDACMGTIASFLSKYQDIIIEHQKVVKGNQKRLESLRELAGKENLEYPSVTLPPQPHTKEGVDAYNEVIARVRMWVNLNLWQKLKLSRDDAKPLLRLKKFPSFPLVERQANEVDWWDMVCNVKKLINEKKEDGKVFWQNLAGYKRQEALRPYLSSEEDRKKGKKFARYQLGDLLLHLEKKHGEDWGKVYDEAWERIDKKVEGLSKHIKLEEERRSEDAQSKAALTDWLRAKASFVIEGLKEADKDEFCRCELKLQKWYGDLRGKPFAIEAENSILDISGFSKQYNCAFIWQKDGVKKLNLYLIINYFKGGKLRFKKIKPEAFEANRFYTVINKKSGEIVPMEVNFNFDDPNLIILPLAFGKRQGREFIWNDLLSLETGSLKLANGRVIEKTLYNRRTRQDEPALFVALTFERREVLDSSNIKPMNLIGVDRGENIPAVIALTDPEGCPLSRFKDSLGNPTHILRIGESYKEKQRTIQAKKEVEQRRAGGYSRKYASKAKNLADDMVRNTARDLLYYAVTQDAMLIFENLSRGFGRQGKRTFMAERQYTRMEDWLTAKLAYEGLPSKTYLSKTLAQYTSKTCSNCGFTITSADYDRVLEKLKKTATGWMTTINGKELKVEGQITYYNRYKRQNVVKDLSVELDRLSEESVNNDISSWTKGRSGEALSLLKKRFSHRPVQEKFVCLNCGFETHADEQAALNIARSWLFLRSQEYKKYQTNKTTGNTDKRAFVETWQSFYRKKLKEVWKPAV

SEQ ID NO: 38647 - protein, 978 aa, synthetic construct
  REGION 1..978: note = engineered CasX variant
QEIKRLNKIRRRLVKDSNTKKAGKTGPMKTLLVRVMTPDLRERLENLRKKPENIPQPISNTSRANLNKLLTDYTEMKKAILHVYWEEFQKDPVGLMSRVAQPASKKIDQNKLKPEMDEKGNLTTAGFACSQCGQPLFVYKLEQVSEKGKAYTNYFGRCNVAEHEKLIKLAQLKPEKDSDEAVTYSLGKFGQRALDFYSIHVTKESTHPVKPLAQIAGNRYASGPVGKALSDACMGTIASFLSKYQDIIIEHQKVVKGNQKRLESLRELAGKENLEYPSVTLPPQPHTKEGVDAYNEVIARVRMWVNLNLWQKLKLSRDDAKPLLRLKKFPSFPLVERQANEVDWWDMVCNVKKLINEKKEDGKVFWQNLAGYKRQEALRPYLSSEEDRKKGKKFARYQLGDLLLHLEKKHGEDWGKVYDEAWERIDKKVEGLSKHIKLEEERRSEDAQSKAALTDWLRAKASFVIEGLKEADKDEFCRCELKLQKWYGDLRGKPFAIEAENSILDISGFSKQYNCAFIWQKDGVKKLNLYLIINYFKGGKLRFKKIKPEAFEANRFYTVINKKSGEIVPMEVNFNFDDPNLIILPLAFGKRQGREFIWNDLLSLETGSLKLANGRVIEKTLYNRRTRQDEPALFVALTFERREVLDSSNIKPMNLIGVDRGENIPAVIALTDPEGCPLSRFKDSLGNPTHILRIGESYKEKQRTIQAKKEVEQRRAGGYSRKYASKAKNLADDMVRNTARDLLYYAVTQDAMLIFENLSRGFGRQGKRTFMAERQYTRMEDWLTAKLAYEGLPSKTYLSKTLAQYTSKTCSNCGFTITSADYDRVLEKLKKTATGWMTTINGKELKVEGQITYYNRYKRQNVVKDLSVELDRLSEESVNNDISSWTKGRSGEALSLLKKRFSHRPVQEKFVCLNCGFETHADEQAALNIARSWLFLRSQEYKKYQTNKTTGNTDKRAFVETWQSFYRKKLKEVWKPAV

SEQ ID NO: 38648 - protein, 977 aa, synthetic construct
  REGION 1..977: note = engineered CasX variant
QEIKRLNKIRRRLVKDSNTKKAGKTGPMKTLLVRVMTPDLRERLENLRKKPENIPQPISNTSRANLNKLLTDYTEMKKAILHVYWEEFQKDPVGLMSRVAQPASKKIDQNKLKPEMDEKGNLTTAGFACSQCGQPLFVYKLEQVSEKGKAYTNYFGRCNVAEHEKLILLAQLKPEKDSDEAVTYSLGKFGQRALDFYSIHVTKESTHPVKPLAQIAGNRYASPVGKALSDACMGTIASFLSKYQDIIIEHQKVVKGNQKRLESLRELAGKENLEYPSVTLPPQPHTKEGVDAYNEVIARVRMWVNLNLWQKLKLSRDDAKPLLRLKKFPSFPLVERQANEVDWWDMVCNVKKLINEKKEDGKVFWQNLAGYKRQEALRPYLSSEEDRKKGKKFARYQLGDLLLHLEKKHGEDWGKVYDEAWERIDKKVEGLSKHIKLEEERRSEDAQSKAALTDWLRAKASFVIEGLKEADKDEFCRCELKLQKWYGDLRGKPFAIEAENSILDISGFSKQYNCAFIWQKDGVKKLNLYLIINYFKGGKLRFKKIKPEAFEANRFYTVINKKSGEIVPMEVNFNFDDPNLIILPLAFGKRQGREFIWNDLLSLETGSLKLANGRVIEKTLYNRRTRQDEPALFVALTFERREVLDSSNIKPMNLIGVDRGENIPAVIALTDPEGCPLSRFKDSLGNPTHILRIGESYKEKQRTIQAKKEVEQRRAGGYSRKYASKAKNLADDMVRNTARDLLYYAVTQDAMLIFENLSRGFGRQGKRTFMAERQYTRMEDWLTAKLAYEGLPSKTYLSKTLAQYTSKTCSNCGFTITSADYDRVLEKLKKTATGWMTTINGKELKVEGQITYYNRYKRQNVVKDLSVELDRLSEESVNNDISSWTKGRSGEALSLLKKRFSHRPVQEKFVCLNCGFETHADEQAALNIARSWLFLRSQEYKKYQTNKTTGNTDKRAFVETWQSFYRKKLKEVWKPAV

SEQ ID NO: 38649 - protein, 978 aa, synthetic construct
  REGION 1..978: note = engineered CasX variant
QEIKRLNKIRRRLVKDSNTKKAGKTGPMKTLLVRVMTPDLRERLENLRKKPENIPQPISNTSRANLNKLLTDYTEMKKAILHVYWEEFQKDPVGLMSRVAQPASKKIDQNKLKPEMDEKGNLTTAGFACSQCGQPLFVYKLEQVSEKGKAYTNYFGRCNVAEHEKLILLAQLKPEKDSDEAVTYSLGKFGQRALDFYSIHVTKESTHPVKPLAQIAGNRYASYPVGKALSDACMGTIASFLSKYQDIIIEHQKVVKGNQKRLESLRELAGKENLEYPSVTLPPQPHTKEGVDAYNEVIARVRMWVNLNLWQKLKLSRDDAKPLLRLKGFPSFPLVERQANEVDWWDMVCNVKKLINEKKEDGKVFWQNLAGYKRQEALRPYLSSEEDRKKGKKFARYQLGDLLLHLEKKHGEDWGKVYDEAWERIDKKVEGLSKHIKLEEERRSEDAQSKAALTDWLRAKASFVIEGLKEADKDEFCRCELKLQKWYGDLRGKPFAIEAENSILDISGFSKQYNCAFIWQKDGVKKLNLYLIINYFKGGKLRFKKIKPEAFEANRFYTVINKKSGEIVPMEVNFNFDDPNLIILPLAFGKRQGREFIWNDLLSLETGSLKLANGRVIEKTLYNRRTRQDEPALFVALTFERREVLDSSNIKPMNLIGVDRGENIPAVIALTDPEGCPLSRFKDSLGNPTHILRIGERYKEKQRTIQAKKEVEQRRAGGYSRKYASKAKNLADDMVRNTARDLLYYAVTQDAMLIFENLSRGFGRQGKRTFMAERQYTRMEDWLTAKLAYEGLPSKTYLSKTLAQYTSKTCSNCGFTITSADYDRVLEKLKKTATGWMTTINGKELKVEGQITYYNRYKRQNVVKDLSVELDRLSEESVNNDISSWTKGRSGEALSLLKKRFSHRPVQEKFVCLNCGFETHADEQAALNIARSWLFLRSQEYKKYQTNKTTGNTDKRAFVETWQSFYRKKLKEVWKPAV

SEQ ID NO: 38650 - protein, 978 aa, synthetic construct
  REGION 1..978: note = engineered CasX variant
QEIKRLNKIRRRLVKDSNTKKAGKTGPMKTLLVRVMTPDLRERLENLRKKPENIPQPISNTSRANLNKLLTDYTEMKKAILHVYWEEFQKDPVGLMSRVAQPASKKIDQNKLKPEMDEKGNLTTAGFACSQCGQPLFVYKLEQVSEKGKAYTNYFGRCNVAEHEKLILLAQLKPEKDSDEAVTYSLGKFGQRALDFYSIHVTKESTHPVKPLAQIAGNRYASHPVGKALSDACMGTIASFLSKYQDIIIEHQKVVKGNQKRLESLRELAGKENLEYPSVTLPPQPHTKEGVDAYNEVIARVRMWVNLNLWQKLKLSRDDAKPLLRLKGFPSFPLVERQANEVDWWDMVCNVKKLINEKKEDGKVFWQNLAGYKRQEALRPYLSSEEDRKKGKKFARYQLGDLLLHLEKKHGEDWGKVYDEAWERIDKKVEGLSKHIKLEEERRSEDAQSKAALTDWLRAKASFVIEGLKEADKDEFCRCELKLQKWYGDLRGKPFAIEAENSILDISGFSKQYNCAFIWQKDGVKKLNLYLIINYFKGGKLRFKKIKPEAFEANRFYTVINKKSGEIVPMEVNFNFDDPNLIILPLAFGKRQGREFIWNDLLSLETGSLKLANGRVIEKTLYNRRTRQDEPALFVALTFERREVLDSSNIKPMNLIGVDRGENIPAVIALTDPEGCPLSRFKDSLGNPTHILRIGERYKEKQRTIQAKKEVEQRRAGGYSRKYASKAKNLADDMVRNTARDLLYYAVTQDAMLIFENLSRGFGRQGKRTFMAERQYTRMEDWLTAKLAYEGLPSKTYLSKTLAQYTSKTCSNCGFTITSADYDRVLEKLKKTATGWMTTINGKELKVEGQITYYNRYKRQNVVKDLSVELDRLSEESVNNDISSWTKGRSGEALSLLKKRFSHRPVQEKFVCLNCGFETHADEQAALNIARSWLFLRSQEYKKYQTNKTTGNTDKRAFVETWQSFYRKKLKEVWKPAV

SEQ ID NO: 38651 - protein, 978 aa, synthetic construct
  REGION 1..978: note = engineered CasX variant
QEIKRLNKIRRRLVKDSNTKKAGKTGPMKTLLVRVMTPDLRERLENLRKKPENIPQPISNTSRANLNKLLTDYTEMKKAILHVYWEEFQKDPVGLMSRVAQPASKKIDQNKLKPEMDEKGNLTTAGFACSQCGQPLFVYKLEQVSEKGKAYTNYFGRCNVAEHEKLILLAQLKPEKDSDEAVTYSLGKFGQRALDFYSIHVTKESTHPVKPLAQIAGNRYASSPVGKALSDACMGTIASFLSKYQDIIIEHQKVVKGNQKRLESLRELAGKENLEYPSVTLPPQPHTKEGVDAYNEVIARVRMWVNLNLWQKLKLSRDDAKPLLRLKGFPSFPLVERQANEVDWWDMVCNVKKLINEKKEDGKVFWQNLAGYKRQEALRPYLSSEEDRKKGKKFARYQLGDLLLHLEKKHGEDWGKVYDEAWERIDKKVEGLSKHIKLEEERRSEDAQSKAALTDWLRAKASFVIEGLKEADKDEFCRCELKLQKWYGDLRGKPFAIEAENSILDISGFSKQYNCAFIWQKDGVKKLNLYLIINYFKGGKLRFKKIKPEAFEANRFYTVINKKSGEIVPMEVNFNFDDPNLIILPLAFGKRQGREFIWNDLLSLETGSLKLANGRVIEKTLYNRRTRQDEPALFVALTFERREVLDSSNIKPMNLIGVDRGENIPAVIALTDPEGCPLSRFKDSLGNPTHILRIGERYKEKQRTIQAKKEVEQRRAGGYSRKYASKAKNLADDMVRNTARDLLYYAVTQDAMLIFENLSRGFGRQGKRTFMAERQYTRMEDWLTAKLAYEGLPSKTYLSKTLAQYTSKTCSNCGFTITSADYDRVLEKLKKTATGWMTTINGKELKVEGQITYYNRYKRQNVVKDLSVELDRLSEESVNNDISSWTKGRSGEALSLLKKRFSHRPVQEKFVCLNCGFETHADEQAALNIARSWLFLRSQEYKKYQTNKTTGNTDKRAFVETWQSFYRKKLKEVWKPAV

SEQ ID NO: 38652 - protein, 978 aa, synthetic construct
  REGION 1..978: note = engineered CasX variant
QEIKRLNKIRRRLVKDSNTKKAGKTGPMKTLLVRVMTPDLRERLENLRKKPENIPQPISNTSRANLNKLLTDYTEMKKAILHVYWEEFQKDPVGLMSRVAQPASKKIDQNKLKPEMDEKGNLTTAGFACSQCGQPLFVYKLEQVSEKGKAYTNYFGRCNVAEHEKLILLAQLKPEKDSDEAVTYSLGKFGQRALDFYSIHVTKESTHPVKPLAQIAGNRYASTPVGKALSDACMGTIASFLSKYQDIIIEHQKVVKGNQKRLESLRELAGKENLEYPSVTLPPQPHTKEGVDAYNEVIARVRMWVNLNLWQKLKLSRDDAKPLLRLKGFPSFPLVERQANEVDWWDMVCNVKKLINEKKEDGKVFWQNLAGYKRQEALRPYLSSEEDRKKGKKFARYQLGDLLLHLEKKHGEDWGKVYDEAWERIDKKVEGLSKHIKLEEERRSEDAQSKAALTDWLRAKASFVIEGLKEADKDEFCRCELKLQKWYGDLRGKPFAIEAENSILDISGFSKQYNCAFIWQKDGVKKLNLYLIINYFKGGKLRFKKIKPEAFEANRFYTVINKKSGEIVPMEVNFNFDDPNLIILPLAFGKRQGREFIWNDLLSLETGSLKLANGRVIEKTLYNRRTRQDEPALFVALTFERREVLDSSNIKPMNLIGVDRGENIPAVIALTDPEGCPLSRFKDSLGNPTHILRIGERYKEKQRTIQAKKEVEQRRAGGYSRKYASKAKNLADDMVRNTARDLLYYAVTQDAMLIFENLSRGFGRQGKRTFMAERQYTRMEDWLTAKLAYEGLPSKTYLSKTLAQYTSKTCSNCGFTITSADYDRVLEKLKKTATGWMTTINGKELKVEGQITYYNRYKRQNVVKDLSVELDRLSEESVNNDISSWTKGRSGEALSLLKKRFSHRPVQEKFVCLNCGFETHADEQAALNIARSWLFLRSQEYKKYQTNKTTGNTDKRAFVETWQSFYRKKLKEVWKPAV

SEQ ID NO: 38653 - protein, 978 aa, synthetic construct
  REGION 1..978: note = engineered CasX variant
QEIKRLNKIRRRLVKDSNTKKAGKTGPMKTLLVRVMTPDLRERLENLRKKPENIPQPISNTSRANLNKLLTDYTEMKKAILHVYWEEFQKDPVGLMSRVAQPASKKIDQNKLKPEMDEKGNLTTAGFACSQCGQPLFVYKLEQVSEKGKAYTNYFGRCNVAEHEKLILLAQLKPEKDSDEAVTYSLGKFGQRALDFYSIHVTKESTHPVKPLAQIAGNRYASAPVGKALSDACMGTIASFLSKYQDIIIEHQKVVKGNQKRLESLRELAGKENLEYPSVTLPPQPHTKEGVDAYNEVIARVRMWVNLNLWQKLKLSRDDAKPLLRLKGFPSFPLVERQANEVDWWDMVCNVKKLINEKKEDGKVFWQNLAGYKRQEALRPYLSSEEDRKKGKKFARYQLGDLLLHLEKKHGEDWGKVYDEAWERIDKKVEGLSKHIKLEEERRSEDAQSKAALTDWLRAKASFVIEGLKEADKDEFCRCELKLQKWYGDLRGKPFAIEAENSILDISGFSKQYNCAFIWQKDGVKKLNLYLIINYFKGGKLRFKKIKPEAFEANRFYTVINKKSGEIVPMEVNFNFDDPNLIILPLAFGKRQGREFIWNDLLSLETGSLKLANGRVIEKTLYNRRTRQDEPALFVALTFERREVLDSSNIKPMNLIGVDRGENIPAVIALTDPEGCPLSRFKDSLGNPTHILRIGERYKEKQRTIQAKKEVEQRRAGGYSRKYASKAKNLADDMVRNTARDLLYYAVTQDAMLIFENLSRGFGRQGKRTFMAERQYTRMEDWLTAKLAYEGLPSKTYLSKTLAQYTSKTCSNCGFTITSADYDRVLEKLKKTATGWMTTINGKELKVEGQITYYNRYKRQNVVKDLSVELDRLSEESVNNDISSWTKGRSGEALSLLKKRFSHRPVQEKFVCLNCGFETHADEQAALNIARSWLFLRSQEYKKYQTNKTTGNTDKRAFVETWQSFYRKKLKEVWKPAV

SEQ ID NO: 38654 - protein, 978 aa, synthetic construct
  REGION 1..978: note = engineered CasX variant
QEIKRLNKIRRRLVKDSNTKKAGKTGPMKTLLVRVMTPDLRERLENLRKKPENIPQPISNTSRANLNKLLTDYTEMKKAILHVYWEEFQKDPVGLMSRVAQPASKKIDQNKLKPEMDEKGNLTTAGFACSQCGQPLFVYKLEQVSEKGKAYTNYFGRCNVAEHEKLILLAQLKPEKDSDEAVTYSLGKFGQRALDFYSIHVTKESTHPVKPLAQIAGNRYASVPVGKALSDACMGTIASFLSKYQDIIIEHQKVVKGNQKRLESLRELAGKENLEYPSVTLPPQPHTKEGVDAYNEVIARVRMWVNLNLWQKLKLSRDDAKPLLRLKGFPSFPLVERQANEVDWWDMVCNVKKLINEKKEDGKVFWQNLAGYKRQEALRPYLSSEEDRKKGKKFARYQLGDLLLHLEKKHGEDWGKVYDEAWERIDKKVEGLSKHIKLEEERRSEDAQSKAALTDWLRAKASFVIEGLKEADKDEFCRCELKLQKWYGDLRGKPFAIEAENSILDISGFSKQYNCAFIWQKDGVKKLNLYLIINYFKGGKLRFKKIKPEAFEANRFYTVINKKSGEIVPMEVNFNFDDPNLIILPLAFGKRQGREFIWNDLLSLETGSLKLANGRVIEKTLYNRRTRQDEPALFVALTFERREVLDSSNIKPMNLIGVDRGENIPAVIALTDPEGCPLSRFKDSLGNPTHILRIGERYKEKQRTIQAKKEVEQRRAGGYSRKYASKAKNLADDMVRNTARDLLYYAVTQDAMLIFENLSRGFGRQGKRTFMAERQYTRMEDWLTAKLAYEGLPSKTYLSKTLAQYTSKTCSNCGFTITSADYDRVLEKLKKTATGWMTTINGKELKVEGQITYYNRYKRQNVVKDLSVELDRLSEESVNNDISSWTKGRSGEALSLLKKRFSHRPVQEKFVCLNCGFETHADEQAALNIARSWLFLRSQEYKKYQTNKTTGNTDKRAFVETWQSFYRKKLKEVWKPAV

SEQ ID NO: 38655 - protein, 978 aa, synthetic construct
  REGION 1..978: note = engineered CasX variant
QEIKRLNKIRRRLVKDSNTKKAGKTGPMKTLLVRVMTPDLRERLENLRKKPENIPQPISNTSRANLNKLLTDYTEMKKAILHVYWEEFQKDPVGLMSRVAQPASKKIDQNKLKPEMDEKGNLTTAGFACSQCGQPLFVYKLEQVSEKGKAYTNYFGRCNVAEHEKLIKLAQLKPEKDSDEAVTYSLGKFGQRALDFYSIHVTKESTHPVKPLAQIAGNRYASGPVGKALSDACMGTIASFLSKYQDIIIEHQKVVKGNQKRLESLRELAGKENLEYPSVTLPPQPHTKEGVDAYNEVIARVRMWVNLNLWQKLKLSRDDAKPLLRLKGFPSFPLVERQANEVDWWDMVCNVKKLINEKKEDGKVFWQNLAGYKRQEALRPYLSSEEDRKKGKKFARYQLGDLLLHLEKKHGEDWGKVYDEAWERIDKKVEGLSKHIKLEEERRSEDAQSKAALTDWLRAKASFVIEGLKEADKDEFCRCELKLQKWYGDLRGKPFAIEAENSILDISGFSKQYNCAFIWQKDGVKKLNLYLIINYFKGGKLRFKKIKPEAFEANRFYTVINKKSGEIVPMEVNFNFDDPNLIILPLAFGKRQGREFIWNDLLSLETGSLKLANGRVIEKTLYNRRTRQDEPALFVALTFERREVLDSSNIKPMNLIGVDRGENIPAVIALTDPEGCPLSRFKDSLGNPTHILRIGERYKEKQRTIQAKKEVEQRRAGGYSRKYASKAKNLADDMVRNTARDLLYYAVTQDAMLIFENLSRGFGRQGKRTFMAERQYTRMEDWLTAKLAYEGLPSKTYLSKTLAQYTSKTCSNCGFTITSADYDRVLEKLKKTATGWMTTINGKELKVEGQITYYNRYKRQNVVKDLSVELDRLSEESVNNDISSWTKGRSGEALSLLKKRFSHRPVQEKFVCLNCGFETHADEQAALNIARSWLFLRSQEYKKYQTNKTTGNTDKRAFVETWQSFYRKKLKEVWKPAV

SEQ ID NO: 38656 - protein, 977 aa, synthetic construct
  REGION 1..977: note = engineered CasX variant
QEIKRLNKIRRRLVKDSNTKKAGKTGPMKTLLVRVMTPDLRERLENLRKKPENIPQPISNTSRANLNKLLTDYTEMKKAILHVYWEEFQKDPVGLMSRVAQPASKKIDQNKLKPEMDEKGNLTTAGFACSQCGQPLFVYKLEQVSEKGKAYTNYFGRCNVAEHEKLILLAQLKPEKDSDEAVTYSLGKFGQRALDFYSIHVTKESTHPVKPLAQIAGNRYASPVGKALSDACMGTIASFLSKYQDIIIEHQKVVKGNQKRLESLRELAGKENLEYPSVTLPPQPHTKEGVDAYNEVIARVRMWVNLNLWQKLKLSRDDAKPLLRLKGFPSFPLVERQANEVDWWDMVCNVKKLINEKKEDGKVFWQNLAGYKRQEALRPYLSSEEDRKKGKKFARYQLGDLLLHLEKKHGEDWGKVYDEAWERIDKKVEGLSKHIKLEEERRSEDAQSKAALTDWLRAKASFVIEGLKEADKDEFCRCELKLQKWYGDLRGKPFAIEAENSILDISGFSKQYNCAFIWQKDGVKKLNLYLIINYFKGGKLRFKKIKPEAFEANRFYTVINKKSGEIVPMEVNFNFDDPNLIILPLAFGKRQGREFIWNDLLSLETGSLKLANGRVIEKTLYNRRTRQDEPALFVALTFERREVLDSSNIKPMNLIGVDRGENIPAVIALTDPEGCPLSRFKDSLGNPTHILRIGERYKEKQRTIQAKKEVEQRRAGGYSRKYASKAKNLADDMVRNTARDLLYYAVTQDAMLIFENLSRGFGRQGKRTFMAERQYTRMEDWLTAKLAYEGLPSKTYLSKTLAQYTSKTCSNCGFTITSADYDRVLEKLKKTATGWMTTINGKELKVEGQITYYNRYKRQNVVKDLSVELDRLSEESVNNDISSWTKGRSGEALSLLKKRFSHRPVQEKFVCLNCGFETHADEQAALNIARSWLFLRSQEYKKYQTNKTTGNTDKRAFVETWQSFYRKKLKEVWKPAV

SEQ ID NO: 38657 - protein, 978 aa, synthetic construct
  REGION 1..978: note = engineered CasX variant
QEIKRLNKIRRRLVKDSNTKKAGKTGPMKTLLVRVMTPDLRERLENLRKKPENIPQPISNTSRANLNKLLTDYTEMKKAILHVYWEEFQKDPVGLMSRVAQPASKKIDQNKLKPEMDEKGNLTTAGFACSQCGQPLFVYKLEQVSEKGKAYTNYFGRCNVAEHEKLILLAQLKPEKDSDEAVTYSLGKFGQRALDFYSIHVTKESTHPVKPLAQIAGNRYASYPVGKALSDACMGTIASFLSKYQDIIIEHQKVVKGNQKRLESLRELAGKENLEYPSVTLPPQPHTKEGVDAYNEVIARVRMWVNLNLWQKLKLSRDDAKPLLRLKGFPSFPLVERQANEVDWWDMVCNVKKLINEKKEDGKVFWQNLAGYKRQEALRPYLSSEEDRKKGKKFARYQLGDLLLHLEKKHGEDWGKVYDEAWERIDKKVEGLSKHIKLEEERRSEDAQSKAALTDWLRAKASFVIEGLKEADKDEFCRCELKLQKWYGDLRGKPFAIEAENSILDISGFSKQYNCAFIWQKDGVKKLNLYLIINYFKGGKLRFKKIKPEAFEANRFYTVINKKSGEIVPMEVNFNFDDPNLIILPLAFGKRQGREFIWNDLLSLETGSLQLANGRVIEKTLYNRRTRQDEPALFVALTFERREVLDSSNIKPMNLIGVDRGENIPAVIALTDPEGCPLSRFKDSLGNPTHILRIGESYKEKQRTIQAKKEVEQRRAGGYSRKYASKAKNLADDMVRNTARDLLYYAVTQDAMLIFENLSRGFGRQGKRTFMAERQYTRMEDWLTAKLAYEGLPSKTYLSKTLAQYTSKTCSNCGFTITSADYDRVLEKLKKTATGWMTTINGKELKVEGQITYYNRYKRQNVVKDLSVELDRLSEESVNNDISSWTKGRSGEALSLLKKRFSHRPVQEKFVCLNCGFETHADEQAALNIARSWLFLRSQEYKKYQTNKTTGNTDKRAFVETWQSFYRKKLKEVWKPAV

SEQ ID NO: 38658 - protein, 978 aa, synthetic construct
  REGION 1..978: note = engineered CasX variant
QEIKRLNKIRRRLVKDSNTKKAGKTGPMKTLLVRVMTPDLRERLENLRKKPENIPQPISNTSRANLNKLLTDYTEMKKAILHVYWEEFQKDPVGLMSRVAQPASKKIDQNKLKPEMDEKGNLTTAGFACSQCGQPLFVYKLEQVSEKGKAYTNYFGRCNVAEHEKLILLAQLKPEKDSDEAVTYSLGKFGQRALDFYSIHVTKESTHPVKPLAQIAGNRYASHPVGKALSDACMGTIASFLSKYQDIIIEHQKVVKGNQKRLESLRELAGKENLEYPSVTLPPQPHTKEGVDAYNEVIARVRMWVNLNLWQKLKLSRDDAKPLLRLKGFPSFPLVERQANEVDWWDMVCNVKKLINEKKEDGKVFWQNLAGYKRQEALRPYLSSEEDRKKGKKFARYQLGDLLLHLEKKHGEDWGKVYDEAWERIDKKVEGLSKHIKLEEERRSEDAQSKAALTDWLRAKASFVIEGLKEADKDEFCRCELKLQKWYGDLRGKPFAIEAENSILDISGFSKQYNCAFIWQKDGVKKLNLYLIINYFKGGKLRFKKIKPEAFEANRFYTVINKKSGEIVPMEVNFNFDDPNLIILPLAFGKRQGREFIWNDLLSLETGSLQLANGRVIEKTLYNRRTRQDEPALFVALTFERREVLDSSNIKPMNLIGVDRGENIPAVIALTDPEGCPLSRFKDSLGNPTHILRIGESYKEKQRTIQAKKEVEQRRAGGYSRKYASKAKNLADDMVRNTARDLLYYAVTQDAMLIFENLSRGFGRQGKRTFMAERQYTRMEDWLTAKLAYEGLPSKTYLSKTLAQYTSKTCSNCGFTITSADYDRVLEKLKKTATGWMTTINGKELKVEGQITYYNRYKRQNVVKDLSVELDRLSEESVNNDISSWTKGRSGEALSLLKKRFSHRPVQEKFVCLNCGFETHADEQAALNIARSWLFLRSQEYKKYQTNKTTGNTDKRAFVETWQSFYRKKLKEVWKPAV

SEQ ID NO: 38659 - protein, 978 aa, synthetic construct
  REGION 1..978: note = engineered CasX variant
QEIKRLNKIRRRLVKDSNTKKAGKTGPMKTLLVRVMTPDLRERLENLRKKPENIPQPISNTSRANLNKLLTDYTEMKKAILHVYWEEFQKDPVGLMSRVAQPASKKIDQNKLKPEMDEKGNLTTAGFACSQCGQPLFVYKLEQVSEKGKAYTNYFGRCNVAEHEKLILLAQLKPEKDSDEAVTYSLGKFGQRALDFYSIHVTKESTHPVKPLAQIAGNRYASSPVGKALSDACMGTIASFLSKYQDIIIEHQKVVKGNQKRLESLRELAGKENLEYPSVTLPPQPHTKEGVDAYNEVIARVRMWVNLNLWQKLKLSRDDAKPLLRLKGFPSFPLVERQANEVDWWDMVCNVKKLINEKKEDGKVFWQNLAGYKRQEALRPYLSSEEDRKKGKKFARYQLGDLLLHLEKKHGEDWGKVYDEAWERIDKKVEGLSKHIKLEEERRSEDAQSKAALTDWLRAKASFVIEGLKEADKDEFCRCELKLQKWYGDLRGKPFAIEAENSILDISGFSKQYNCAFIWQKDGVKKLNLYLIINYFKGGKLRFKKIKPEAFEANRFYTVINKKSGEIVPMEVNFNFDDPNLIILPLAFGKRQGREFIWNDLLSLETGSLQLANGRVIEKTLYNRRTRQDEPALFVALTFERREVLDSSNIKPMNLIGVDRGENIPAVIALTDPEGCPLSRFKDSLGNPTHILRIGESYKEKQRTIQAKKEVEQRRAGGYSRKYASKAKNLADDMVRNTARDLLYYAVTQDAMLIFENLSRGFGRQGKRTFMAERQYTRMEDWLTAKLAYEGLPSKTYLSKTLAQYTSKTCSNCGFTITSADYDRVLEKLKKTATGWMTTINGKELKVEGQITYYNRYKRQNVVKDLSVELDRLSEESVNNDISSWTKGRSGEALSLLKKRFSHRPVQEKFVCLNCGFETHADEQAALNIARSWLFLRSQEYKKYQTNKTTGNTDKRAFVETWQSFYRKKLKEVWKPAV

SEQ ID NO: 38660 - protein, 978 aa, synthetic construct
  REGION 1..978: note = engineered CasX variant
QEIKRLNKIRRRLVKDSNTKKAGKTGPMKTLLVRVMTPDLRERLENLRKKPENIPQPISNTSRANLNKLLTDYTEMKKAILHVYWEEFQKDPVGLMSRVAQPASKKIDQNKLKPEMDEKGNLTTAGFACSQCGQPLFVYKLEQVSEKGKAYTNYFGRCNVAEHEKLILLAQLKPEKDSDEAVTYSLGKFGQRALDFYSIHVTKESTHPVKPLAQIAGNRYASTPVGKALSDACMGTIASFLSKYQDIIIEHQKVVKGNQKRLESLRELAGKENLEYPSVTLPPQPHTKEGVDAYNEVIARVRMWVNLNLWQKLKLSRDDAKPLLRLKGFPSFPLVERQANEVDWWDMVCNVKKLINEKKEDGKVFWQNLAGYKRQEALRPYLSSEEDRKKGKKFARYQLGDLLLHLEKKHGEDWGKVYDEAWERIDKKVEGLSKHIKLEEERRSEDAQSKAALTDWLRAKASFVIEGLKEADKDEFCRCELKLQKWYGDLRGKPFAIEAENSILDISGFSKQYNCAFIWQKDGVKKLNLYLIINYFKGGKLRFKKIKPEAFEANRFYTVINKKSGEIVPMEVNFNFDDPNLIILPLAFGKRQGREFIWNDLLSLETGSLQLANGRVIEKTLYNRRTRQDEPALFVALTFERREVLDSSNIKPMNLIGVDRGENIPAVIALTDPEGCPLSRFKDSLGNPTHILRIGESYKEKQRTIQAKKEVEQRRAGGYSRKYASKAKNLADDMVRNTARDLLYYAVTQDAMLIFENLSRGFGRQGKRTFMAERQYTRMEDWLTAKLAYEGLPSKTYLSKTLAQYTSKTCSNCGFTITSADYDRVLEKLKKTATGWMTTINGKELKVEGQITYYNRYKRQNVVKDLSVELDRLSEESVNNDISSWTKGRSGEALSLLKKRFSHRPVQEKFVCLNCGFETHADEQAALNIARSWLFLRSQEYKKYQTNKTTGNTDKRAFVETWQSFYRKKLKEVWKPAV

SEQ ID NO: 38661 - protein, 978 aa, synthetic construct
  REGION 1..978: note = engineered CasX variant
QEIKRLNKIRRRLVKDSNTKKAGKTGPMKTLLVRVMTPDLRERLENLRKKPENIPQPISNTSRANLNKLLTDYTEMKKAILHVYWEEFQKDPVGLMSRVAQPASKKIDQNKLKPEMDEKGNLTTAGFACSQCGQPLFVYKLEQVSEKGKAYTNYFGRCNVAEHEKLILLAQLKPEKDSDEAVTYSLGKFGQRALDFYSIHVTKESTHPVKPLAQIAGNRYASAPVGKALSDACMGTIASFLSKYQDIIIEHQKVVKGNQKRLESLRELAGKENLEYPSVTLPPQPHTKEGVDAYNEVIARVRMWVNLNLWQKLKLSRDDAKPLLRLKGFPSFPLVERQANEVDWWDMVCNVKKLINEKKEDGKVFWQNLAGYKRQEALRPYLSSEEDRKKGKKFARYQLGDLLLHLEKKHGEDWGKVYDEAWERIDKKVEGLSKHIKLEEERRSEDAQSKAALTDWLRAKASFVIEGLKEADKDEFCRCELKLQKWYGDLRGKPFAIEAENSILDISGFSKQYNCAFIWQKDGVKKLNLYLIINYFKGGKLRFKKIKPEAFEANRFYTVINKKSGEIVPMEVNFNFDDPNLIILPLAFGKRQGREFIWNDLLSLETGSLQLANGRVIEKTLYNRRTRQDEPALFVALTFERREVLDSSNIKPMNLIGVDRGENIPAVIALTDPEGCPLSRFKDSLGNPTHILRIGESYKEKQRTIQAKKEVEQRRAGGYSRKYASKAKNLADDMVRNTARDLLYYAVTQDAMLIFENLSRGFGRQGKRTFMAERQYTRMEDWLTAKLAYEGLPSKTYLSKTLAQYTSKTCSNCGFTITSADYDRVLEKLKKTATGWMTTINGKELKVEGQITYYNRYKRQNVVKDLSVELDRLSEESVNNDISSWTKGRSGEALSLLKKRFSHRPVQEKFVCLNCGFETHADEQAALNIARSWLFLRSQEYKKYQTNKTTGNTDKRAFVETWQSFYRKKLKEVWKPAV

SEQ ID NO: 38662 - protein, 978 aa, synthetic construct
  REGION 1..978: note = engineered CasX variant
QEIKRLNKIRRRLVKDSNTKKAGKTGPMKTLLVRVMTPDLRERLENLRKKPENIPQPISNTSRANLNKLLTDYTEMKKAILHVYWEEFQKDPVGLMSRVAQPASKKIDQNKLKPEMDEKGNLTTAGFACSQCGQPLFVYKLEQVSEKGKAYTNYFGRCNVAEHEKLILLAQLKPEKDSDEAVTYSLGKFGQRALDFYSIHVTKESTHPVKPLAQIAGNRYASVPVGKALSDACMGTIASFLSKYQDIIIEHQKVVKGNQKRLESLRELAGKENLEYPSVTLPPQPHTKEGVDAYNEVIARVRMWVNLNLWQKLKLSRDDAKPLLRLKGFPSFPLVERQANEVDWWDMVCNVKKLINEKKEDGKVFWQNLAGYKRQEALRPYLSSEEDRKKGKKFARYQLGDLLLHLEKKHGEDWGKVYDEAWERIDKKVEGLSKHIKLEEERRSEDAQSKAALTDWLRAKASFVIEGLKEADKDEFCRCELKLQKWYGDLRGKPFAIEAENSILDISGFSKQYNCAFIWQKDGVKKLNLYLIINYFKGGKLRFKKIKPEAFEANRFYTVINKKSGEIVPMEVNFNFDDPNLIILPLAFGKRQGREFIWNDLLSLETGSLQLANGRVIEKTLYNRRTRQDEPALFVALTFERREVLDSSNIKPMNLIGVDRGENIPAVIALTDPEGCPLSRFKDSLGNPTHILRIGESYKEKQRTIQAKKEVEQRRAGGYSRKYASKAKNLADDMVRNTARDLLYYAVTQDAMLIFENLSRGFGRQGKRTFMAERQYTRMEDWLTAKLAYEGLPSKTYLSKTLAQYTSKTCSNCGFTITSADYDRVLEKLKKTATGWMTTINGKELKVEGQITYYNRYKRQNVVKDLSVELDRLSEESVNNDISSWTKGRSGEALSLLKKRFSHRPVQEKFVCLNCGFETHADEQAALNIARSWLFLRSQEYKKYQTNKTTGNTDKRAFVETWQSFYRKKLKEVWKPAV

SEQ ID NO: 38663 - protein, 978 aa, synthetic construct
  REGION 1..978: note = engineered CasX variant
QEIKRLNKIRRRLVKDSNTKKAGKTGPMKTLLVRVMTPDLRERLENLRKKPENIPQPISNTSRANLNKLLTDYTEMKKAILHVYWEEFQKDPVGLMSRVAQPASKKIDQNKLKPEMDEKGNLTTAGFACSQCGQPLFVYKLEQVSEKGKAYTNYFGRCNVAEHEKLIKLAQLKPEKDSDEAVTYSLGKFGQRALDFYSIHVTKESTHPVKPLAQIAGNRYASGPVGKALSDACMGTIASFLSKYQDIIIEHQKVVKGNQKRLESLRELAGKENLEYPSVTLPPQPHTKEGVDAYNEVIARVRMWVNLNLWQKLKLSRDDAKPLLRLKGFPSFPLVERQANEVDWWDMVCNVKKLINEKKEDGKVFWQNLAGYKRQEALRPYLSSEEDRKKGKKFARYQLGDLLLHLEKKHGEDWGKVYDEAWERIDKKVEGLSKHIKLEEERRSEDAQSKAALTDWLRAKASFVIEGLKEADKDEFCRCELKLQKWYGDLRGKPFAIEAENSILDISGFSKQYNCAFIWQKDGVKKLNLYLIINYFKGGKLRFKKIKPEAFEANRFYTVINKKSGEIVPMEVNFNFDDPNLIILPLAFGKRQGREFIWNDLLSLETGSLQLANGRVIEKTLYNRRTRQDEPALFVALTFERREVLDSSNIKPMNLIGVDRGENIPAVIALTDPEGCPLSRFKDSLGNPTHILRIGESYKEKQRTIQAKKEVEQRRAGGYSRKYASKAKNLADDMVRNTARDLLYYAVTQDAMLIFENLSRGFGRQGKRTFMAERQYTRMEDWLTAKLAYEGLPSKTYLSKTLAQYTSKTCSNCGFTITSADYDRVLEKLKKTATGWMTTINGKELKVEGQITYYNRYKRQNVVKDLSVELDRLSEESVNNDISSWTKGRSGEALSLLKKRFSHRPVQEKFVCLNCGFETHADEQAALNIARSWLFLRSQEYKKYQTNKTTGNTDKRAFVETWQSFYRKKLKEVWKPAV

SEQ ID NO: 38664 - protein, 977 aa, synthetic construct
  REGION 1..977: note = engineered CasX variant
QEIKRLNKIRRRLVKDSNTKKAGKTGPMKTLLVRVMTPDLRERLENLRKKPENIPQPISNTSRANLNKLLTDYTEMKKAILHVYWEEFQKDPVGLMSRVAQPASKKIDQNKLKPEMDEKGNLTTAGFACSQCGQPLFVYKLEQVSEKGKAYTNYFGRCNVAEHEKLILLAQLKPEKDSDEAVTYSLGKFGQRALDFYSIHVTKESTHPVKPLAQIAGNRYASPVGKALSDACMGTIASFLSKYQDIIIEHQKVVKGNQKRLESLRELAGKENLEYPSVTLPPQPHTKEGVDAYNEVIARVRMWVNLNLWQKLKLSRDDAKPLLRLKGFPSFPLVERQANEVDWWDMVCNVKKLINEKKEDGKVFWQNLAGYKRQEALRPYLSSEEDRKKGKKFARYQLGDLLLHLEKKHGEDWGKVYDEAWERIDKKVEGLSKHIKLEEERRSEDAQSKAALTDWLRAKASFVIEGLKEADKDEFCRCELKLQKWYGDLRGKPFAIEAENSILDISGFSKQYNCAFIWQKDGVKKLNLYLIINYFKGGKLRFKKIKPEAFEANRFYTVINKKSGEIVPMEVNFNFDDPNLIILPLAFGKRQGREFIWNDLLSLETGSLQLANGRVIEKTLYNRRTRQDEPALFVALTFERREVLDSSNIKPMNLIGVDRGENIPAVIALTDPEGCPLSRFKDSLGNPTHILRIGESYKEKQRTIQAKKEVEQRRAGGYSRKYASKAKNLADDMVRNTARDLLYYAVTQDAMLIFENLSRGFGRQGKRTFMAERQYTRMEDWLTAKLAYEGLPSKTYLSKTLAQYTSKTCSNCGFTITSADYDRVLEKLKKTATGWMTTINGKELKVEGQITYYNRYKRQNVVKDLSVELDRLSEESVNNDISSWTKGRSGEALSLLKKRFSHRPVQEKFVCLNCGFETHADEQAALNIARSWLFLRSQEYKKYQTNKTTGNTDKRAFVETWQSFYRKKLKEVWKPAV

SEQ ID NO: 38665 - protein, 978 aa, synthetic construct
  REGION 1..978: note = engineered CasX variant
QEIKRINKIRRRLVKDSNTKKAGKTGPMKTLLVRVMTPDLRERLENLRKKPENIPQPISNTSRANLNKLLTDYTEMKKAILHVYWEEFQKDPVGLMSRVAQPASKKIDQNKLKPEMDEKGNLTTAGFACSQCGQPLFVYKLEQVSEKGKAYTNYVGRCNVAEHEKLILLAQLKPEKDSDEAVTYSLGKFGQRALDFYSIHVTKESTHPVKPLAQIAGNRYASYPVGKALSDACMGTIASFLSKYQDIIIEHQKVVKGNQKRLESLRELAGKENLEYPSVTLPPQPHTKEGVDAYNEVIARVRMWVNLNLWQKLKLSRDDAKPLLRLKGFPSFPLVERQANEVDWWDMVCNVKKLINEKKEDGKVFWQNLAGYKRQEALRPYLSSEEDRKKGKKFARYQLGDLLLHLEKKHGEDWGKVYDEAWERIDKKVEGLSKHIKLEEERRSEDAQSKAALTDWLRAKASFVIEGLKEADKDEFCRCELKLQKWYGDLRGKPFAIEAENSILDISGFSKQYNCAFIWQKDGVKKLNLYLIINYFKGGKLRFKKIKPEAFEANRFYTVINKKSGEIVPMEVNFNFDDPNLIILPLAFGKRQGREFIWNDLLSLETGSLKLANGRVIEKTLYNRRTRQDEPALFVALTFERREVLDSSNIKPMNLIGVDRGENIPAVIALTDPEGCPLSRFKDSLGNPTHILRIGESYKEKQRTIQAKKEVEQRRAGGYSRKYASKAKNLADDMVRNTARDLLYYAVTQDAMLIFENLSRGFGRQGKRTFMAERQYTRMEDWLTAKLAYEGLASKTYLSKTLAQYTSKTCSNCGFTITSADYDRVLEKLKKTATGWMTTINGKELKVEGQITYYNRYKRQNVVKDLSVELDRLSEESVNNDISSWTKGRSGEALSLLKKRFSHRPVQEKFVCLNCGFETHADEQAALNIARSWLFLRSQEYKKYQTNKTTGNTDKRAFVETWQSFYRKKLKEVWKPAV

SEQ ID NO: 38666 - protein, 978 aa, synthetic construct
  REGION 1..978: note = engineered CasX variant
QEIKRINKIRRRLVKDSNTKKAGKTGPMKTLLVRVMTPDLRERLENLRKKPENIPQPISNTSRANLNKLLTDYTEMKKAILHVYWEEFQKDPVGLMSRVAQPASKKIDQNKLKPEMDEKGNLTTAGFACSQCGQPLFVYKLEQVSEKGKAYTNYVGRCNVAEHEKLILLAQLKPEKDSDEAVTYSLGKFGQRALDFYSIHVTKESTHPVKPLAQIAGNRYASHPVGKALSDACMGTIASFLSKYQDIIIEHQKVVKGNQKRLESLRELAGKENLEYPSVTLPPQPHTKEGVDAYNEVIARVRMWVNLNLWQKLKLSRDDAKPLLRLKGFPSFPLVERQANEVDWWDMVCNVKKLINEKKEDGKVFWQNLAGYKRQEALRPYLSSEEDRKKGKKFARYQLGDLLLHLEKKHGEDWGKVYDEAWERIDKKVEGLSKHIKLEEERRSEDAQSKAALTDWLRAKASFVIEGLKEADKDEFCRCELKLQKWYGDLRGKPFAIEAENSILDISGFSKQYNCAFIWQKDGVKKLNLYLIINYFKGGKLRFKKIKPEAFEANRFYTVINKKSGEIVPMEVNFNFDDPNLIILPLAFGKRQGREFIWNDLLSLETGSLKLANGRVIEKTLYNRRTRQDEPALFVALTFERREVLDSSNIKPMNLIGVDRGENIPAVIALTDPEGCPLSRFKDSLGNPTHILRIGESYKEKQRTIQAKKEVEQRRAGGYSRKYASKAKNLADDMVRNTARDLLYYAVTQDAMLIFENLSRGFGRQGKRTFMAERQYTRMEDWLTAKLAYEGLASKTYLSKTLAQYTSKTCSNCGFTITSADYDRVLEKLKKTATGWMTTINGKELKVEGQITYYNRYKRQNVVKDLSVELDRLSEESVNNDISSWTKGRSGEALSLLKKRFSHRPVQEKFVCLNCGFETHADEQAALNIARSWLFLRSQEYKKYQTNKTTGNTDKRAFVETWQSFYRKKLKEVWKPAV

SEQ ID NO: 38667 - protein, 978 aa, synthetic construct
  REGION 1..978: note = engineered CasX variant
QEIKRINKIRRRLVKDSNTKKAGKTGPMKTLLVRVMTPDLRERLENLRKKPENIPQPISNTSRANLNKLLTDYTEMKKAILHVYWEEFQKDPVGLMSRVAQPASKKIDQNKLKPEMDEKGNLTTAGFACSQCGQPLFVYKLEQVSEKGKAYTNYVGRCNVAEHEKLILLAQLKPEKDSDEAVTYSLGKFGQRALDFYSIHVTKESTHPVKPLAQIAGNRYASSPVGKALSDACMGTIASFLSKYQDIIIEHQKVVKGNQKRLESLRELAGKENLEYPSVTLPPQPHTKEGVDAYNEVIARVRMWVNLNLWQKLKLSRDDAKPLLRLKGFPSFPLVERQANEVDWWDMVCNVKKLINEKKEDGKVFWQNLAGYKRQEALRPYLSSEEDRKKGKKFARYQLGDLLLHLEKKHGEDWGKVYDEAWERIDKKVEGLSKHIKLEEERRSEDAQSKAALTDWLRAKASFVIEGLKEADKDEFCRCELKLQKWYGDLRGKPFAIEAENSILDISGFSKQYNCAFIWQKDGVKKLNLYLIINYFKGGKLRFKKIKPEAFEANRFYTVINKKSGEIVPMEVNFNFDDPNLIILPLAFGKRQGREFIWNDLLSLETGSLKLANGRVIEKTLYNRRTRQDEPALFVALTFERREVLDSSNIKPMNLIGVDRGENIPAVIALTDPEGCPLSRFKDSLGNPTHILRIGESYKEKQRTIQAKKEVEQRRAGGYSRKYASKAKNLADDMVRNTARDLLYYAVTQDAMLIFENLSRGFGRQGKRTFMAERQYTRMEDWLTAKLAYEGLASKTYLSKTLAQYTSKTCSNCGFTITSADYDRVLEKLKKTATGWMTTINGKELKVEGQITYYNRYKRQNVVKDLSVELDRLSEESVNNDISSWTKGRSGEALSLLKKRFSHRPVQEKFVCLNCGFETHADEQAALNIARSWLFLRSQEYKKYQTNKTTGNTDKRAFVETWQSFYRKKLKEVWKPAV

SEQ ID NO: 38668 - protein, 978 aa, synthetic construct
  REGION 1..978: note = engineered CasX variant
QEIKRINKIRRRLVKDSNTKKAGKTGPMKTLLVRVMTPDLRERLENLRKKPENIPQPISNTSRANLNKLLTDYTEMKKAILHVYWEEFQKDPVGLMSRVAQPASKKIDQNKLKPEMDEKGNLTTAGFACSQCGQPLFVYKLEQVSEKGKAYTNYVGRCNVAEHEKLILLAQLKPEKDSDEAVTYSLGKFGQRALDFYSIHVTKESTHPVKPLAQIAGNRYASTPVGKALSDACMGTIASFLSKYQDIIIEHQKVVKGNQKRLESLRELAGKENLEYPSVTLPPQPHTKEGVDAYNEVIARVRMWVNLNLWQKLKLSRDDAKPLLRLKGFPSFPLVERQANEVDWWDMVCNVKKLINEKKEDGKVFWQNLAGYKRQEALRPYLSSEEDRKKGKKFARYQLGDLLLHLEKKHGEDWGKVYDEAWERIDKKVEGLSKHIKLEEERRSEDAQSKAALTDWLRAKASFVIEGLKEADKDEFCRCELKLQKWYGDLRGKPFAIEAENSILDISGFSKQYNCAFIWQKDGVKKLNLYLIINYFKGGKLRFKKIKPEAFEANRFYTVINKKSGEIVPMEVNFNFDDPNLIILPLAFGKRQGREFIWNDLLSLETGSLKLANGRVIEKTLYNRRTRQDEPALFVALTFERREVLDSSNIKPMNLIGVDRGENIPAVIALTDPEGCPLSRFKDSLGNPTHILRIGESYKEKQRTIQAKKEVEQRRAGGYSRKYASKAKNLADDMVRNTARDLLYYAVTQDAMLIFENLSRGFGRQGKRTFMAERQYTRMEDWLTAKLAYEGLASKTYLSKTLAQYTSKTCSNCGFTITSADYDRVLEKLKKTATGWMTTINGKELKVEGQITYYNRYKRQNVVKDLSVELDRLSEESVNNDISSWTKGRSGEALSLLKKRFSHRPVQEKFVCLNCGFETHADEQAALNIARSWLFLRSQEYKKYQTNKTTGNTDKRAFVETWQSFYRKKLKEVWKPAV

SEQ ID NO: 38669 - protein, 978 aa, synthetic construct
  REGION 1..978: note = engineered CasX variant
QEIKRINKIRRRLVKDSNTKKAGKTGPMKTLLVRVMTPDLRERLENLRKKPENIPQPISNTSRANLNKLLTDYTEMKKAILHVYWEEFQKDPVGLMSRVAQPASKKIDQNKLKPEMDEKGNLTTAGFACSQCGQPLFVYKLEQVSEKGKAYTNYVGRCNVAEHEKLILLAQLKPEKDSDEAVTYSLGKFGQRALDFYSIHVTKESTHPVKPLAQIAGNRYASAPVGKALSDACMGTIASFLSKYQDIIIEHQKVVKGNQKRLESLRELAGKENLEYPSVTLPPQPHTKEGVDAYNEVIARVRMWVNLNLWQKLKLSRDDAKPLLRLKGFPSFPLVERQANEVDWWDMVCNVKKLINEKKEDGKVFWQNLAGYKRQEALRPYLSSEEDRKKGKKFARYQLGDLLLHLEKKHGEDWGKVYDEAWERIDKKVEGLSKHIKLEEERRSEDAQSKAALTDWLRAKASFVIEGLKEADKDEFCRCELKLQKWYGDLRGKPFAIEAENSILDISGFSKQYNCAFIWQKDGVKKLNLYLIINYFKGGKLRFKKIKPEAFEANRFYTVINKKSGEIVPMEVNFNFDDPNLIILPLAFGKRQGREFIWNDLLSLETGSLKLANGRVIEKTLYNRRTRQDEPALFVALTFERREVLDSSNIKPMNLIGVDRGENIPAVIALTDPEGCPLSRFKDSLGNPTHILRIGESYKEKQRTIQAKKEVEQRRAGGYSRKYASKAKNLADDMVRNTARDLLYYAVTQDAMLIFENLSRGFGRQGKRTFMAERQYTRMEDWLTAKLAYEGLASKTYLSKTLAQYTSKTCSNCGFTITSADYDRVLEKLKKTATGWMTTINGKELKVEGQITYYNRYKRQNVVKDLSVELDRLSEESVNNDISSWTKGRSGEALSLLKKRFSHRPVQEKFVCLNCGFETHADEQAALNIARSWLFLRSQEYKKYQTNKTTGNTDKRAFVETWQSFYRKKLKEVWKPAV

SEQ ID NO: 38670 - protein, 978 aa, synthetic construct
  REGION 1..978: note = engineered CasX variant
QEIKRINKIRRRLVKDSNTKKAGKTGPMKTLLVRVMTPDLRERLENLRKKPENIPQPISNTSRANLNKLLTDYTEMKKAILHVYWEEFQKDPVGLMSRVAQPASKKIDQNKLKPEMDEKGNLTTAGFACSQCGQPLFVYKLEQVSEKGKAYTNYVGRCNVAEHEKLILLAQLKPEKDSDEAVTYSLGKFGQRALDFYSIHVTKESTHPVKPLAQIAGNRYASVPVGKALSDACMGTIASFLSKYQDIIIEHQKVVKGNQKRLESLRELAGKENLEYPSVTLPPQPHTKEGVDAYNEVIARVRMWVNLNLWQKLKLSRDDAKPLLRLKGFPSFPLVERQANEVDWWDMVCNVKKLINEKKEDGKVFWQNLAGYKRQEALRPYLSSEEDRKKGKKFARYQLGDLLLHLEKKHGEDWGKVYDEAWERIDKKVEGLSKHIKLEEERRSEDAQSKAALTDWLRAKASFVIEGLKEADKDEFCRCELKLQKWYGDLRGKPFAIEAENSILDISGFSKQYNCAFIWQKDGVKKLNLYLIINYFKGGKLRFKKIKPEAFEANRFYTVINKKSGEIVPMEVNFNFDDPNLIILPLAFGKRQGREFIWNDLLSLETGSLKLANGRVIEKTLYNRRTRQDEPALFVALTFERREVLDSSNIKPMNLIGVDRGENIPAVIALTDPEGCPLSRFKDSLGNPTHILRIGESYKEKQRTIQAKKEVEQRRAGGYSRKYASKAKNLADDMVRNTARDLLYYAVTQDAMLIFENLSRGFGRQGKRTFMAERQYTRMEDWLTAKLAYEGLASKTYLSKTLAQYTSKTCSNCGFTITSADYDRVLEKLKKTATGWMTTINGKELKVEGQITYYNRYKRQNVVKDLSVELDRLSEESVNNDISSWTKGRSGEALSLLKKRFSHRPVQEKFVCLNCGFETHADEQAALNIARSWLFLRSQEYKKYQTNKTTGNTDKRAFVETWQSFYRKKLKEVWKPAV

SEQ ID NO: 38671 - protein, 978 aa, synthetic construct
  REGION 1..978: note = engineered CasX variant
QEIKRINKIRRRLVKDSNTKKAGKTGPMKTLLVRVMTPDLRERLENLRKKPENIPQPISNTSRANLNKLLTDYTEMKKAILHVYWEEFQKDPVGLMSRVAQPASKKIDQNKLKPEMDEKGNLTTAGFACSQCGQPLFVYKLEQVSEKGKAYTNYVGRCNVAEHEKLIKLAQLKPEKDSDEAVTYSLGKFGQRALDFYSIHVTKESTHPVKPLAQIAGNRYASGPVGKALSDACMGTIASFLSKYQDIIIEHQKVVKGNQKRLESLRELAGKENLEYPSVTLPPQPHTKEGVDAYNEVIARVRMWVNLNLWQKLKLSRDDAKPLLRLKGFPSFPLVERQANEVDWWDMVCNVKKLINEKKEDGKVFWQNLAGYKRQEALRPYLSSEEDRKKGKKFARYQLGDLLLHLEKKHGEDWGKVYDEAWERIDKKVEGLSKHIKLEEERRSEDAQSKAALTDWLRAKASFVIEGLKEADKDEFCRCELKLQKWYGDLRGKPFAIEAENSILDISGFSKQYNCAFIWQKDGVKKLNLYLIINYFKGGKLRFKKIKPEAFEANRFYTVINKKSGEIVPMEVNFNFDDPNLIILPLAFGKRQGREFIWNDLLSLETGSLKLANGRVIEKTLYNRRTRQDEPALFVALTFERREVLDSSNIKPMNLIGVDRGENIPAVIALTDPEGCPLSRFKDSLGNPTHILRIGESYKEKQRTIQAKKEVEQRRAGGYSRKYASKAKNLADDMVRNTARDLLYYAVTQDAMLIFENLSRGFGRQGKRTFMAERQYTRMEDWLTAKLAYEGLASKTYLSKTLAQYTSKTCSNCGFTITSADYDRVLEKLKKTATGWMTTINGKELKVEGQITYYNRYKRQNVVKDLSVELDRLSEESVNNDISSWTKGRSGEALSLLKKRFSHRPVQEKFVCLNCGFETHADEQAALNIARSWLFLRSQEYKKYQTNKTTGNTDKRAFVETWQSFYRKKLKEVWKPAV

SEQ ID NO: 38672 - protein, 977 aa, synthetic construct
  REGION 1..977: note = engineered CasX variant
QEIKRINKIRRRLVKDSNTKKAGKTGPMKTLLVRVMTPDLRERLENLRKKPENIPQPISNTSRANLNKLLTDYTEMKKAILHVYWEEFQKDPVGLMSRVAQPASKKIDQNKLKPEMDEKGNLTTAGFACSQCGQPLFVYKLEQVSEKGKAYTNYVGRCNVAEHEKLILLAQLKPEKDSDEAVTYSLGKFGQRALDFYSIHVTKESTHPVKPLAQIAGNRYASPVGKALSDACMGTIASFLSKYQDIIIEHQKVVKGNQKRLESLRELAGKENLEYPSVTLPPQPHTKEGVDAYNEVIARVRMWVNLNLWQKLKLSRDDAKPLLRLKGFPSFPLVERQANEVDWWDMVCNVKKLINEKKEDGKVFWQNLAGYKRQEALRPYLSSEEDRKKGKKFARYQLGDLLLHLEKKHGEDWGKVYDEAWERIDKKVEGLSKHIKLEEERRSEDAQSKAALTDWLRAKASFVIEGLKEADKDEFCRCELKLQKWYGDLRGKPFAIEAENSILDISGFSKQYNCAFIWQKDGVKKLNLYLIINYFKGGKLRFKKIKPEAFEANRFYTVINKKSGEIVPMEVNFNFDDPNLIILPLAFGKRQGREFIWNDLLSLETGSLKLANGRVIEKTLYNRRTRQDEPALFVALTFERREVLDSSNIKPMNLIGVDRGENIPAVIALTDPEGCPLSRFKDSLGNPTHILRIGESYKEKQRTIQAKKEVEQRRAGGYSRKYASKAKNLADDMVRNTARDLLYYAVTQDAMLIFENLSRGFGRQGKRTFMAERQYTRMEDWLTAKLAYEGLASKTYLSKTLAQYTSKTCSNCGFTITSADYDRVLEKLKKTATGWMTTINGKELKVEGQITYYNRYKRQNVVKDLSVELDRLSEESVNNDISSWTKGRSGEALSLLKKRFSHRPVQEKFVCLNCGFETHADEQAALNIARSWLFLRSQEYKKYQTNKTTGNTDKRAFVETWQSFYRKKLKEVWKPAV

SEQ ID NO: 38673 - protein, 978 aa, synthetic construct
  REGION 1..978: note = engineered CasX variant
QEIKRINKIRRRLVKDSNTKKAGKTGPMKTLLVRVMTPDLRERLENLRKKPENIPQPISNTSRANLNKLLTDYTEMKKAILHVYWEEFQKDPVGLMSRVAQPASKKIDQNKLKPEMDEKGNLTTAGFACSQCGQPLFVYKLEQVSEKGKAYTNYVGRCNVAEHEKLILLAQLKPEKDSDEAVTYSLGKFGQRALDFYSIHVTKESTHPVKPLAQIAGNRYASYPVGKALSDACMGTIASFLSKYQDIIIEHQKVVKGNQKRLESLRELAGKENLEYPSVTLPPQPHTKEGVDAYNEVIARVRMWVNLNLWQKLKLSRDDAKPLLRLKGFPSFPLVERQANEVDWWDMVCNVKKLINEKKEDGKVFWQNLAGYKRQEALRPYLSSEEDRKKGKKFARYQLGDLLLHLEKKHGEDWGKVYDEAWERIDKKVEGLSKHIKLEEERRSEDAQSKAALTDWLRAKASFVIEGLKEADKDEFCRCELKLQKWYGDLRGKPFAIEAENSILDISGFSKQYNCAFIWQKDGVKKLNLYLIINYFKGGKLRFKKIKPEAFEANRFYTVINKKSGEIVPMEVNFNFDDPNLIILPLAFGKRQGREFIWNDLLSLETGSLKLANGRVIEKTLYNRRTRQDEPALFVALTFERREVLDSSNIKPMNLIGVDRGENIPAVIALTDPEGCPLSRFKDSLGNPTHILRIGESYKEKQRTIQAKKEVEQRRAGGYSRKYASKAKNLADDMVRNTARDLLYYAVTQDAMLIFENLSRGFGRQGKRTFMAERQYTRMEDWLTAKLAYEGLPSKVYLSKTLAQYTSKTCSNCGFTITSADYDRVLEKLKKTATGWMTTINGKELKVEGQITYYNRYKRQNVVKDLSVELDRLSEESVNNDISSWTKGRSGEALSLLKKRFSHRPVQEKFVCLNCGFETHADEQAALNIARSWLFLRSQEYKKYQTNKTTGNTDKRAFVETWQSFYRKKLKEVWKPAV

SEQ ID NO: 38674 - protein, 978 aa, synthetic construct
  REGION 1..978: note = engineered CasX variant
QEIKRINKIRRRLVKDSNTKKAGKTGPMKTLLVRVMTPDLRERLENLRKKPENIPQPISNTSRANLNKLLTDYTEMKKAILHVYWEEFQKDPVGLMSRVAQPASKKIDQNKLKPEMDEKGNLTTAGFACSQCGQPLFVYKLEQVSEKGKAYTNYVGRCNVAEHEKLILLAQLKPEKDSDEAVTYSLGKFGQRALDFYSIHVTKESTHPVKPLAQIAGNRYASHPVGKALSDACMGTIASFLSKYQDIIIEHQKVVKGNQKRLESLRELAGKENLEYPSVTLPPQPHTKEGVDAYNEVIARVRMWVNLNLWQKLKLSRDDAKPLLRLKGFPSFPLVERQANEVDWWDMVCNVKKLINEKKEDGKVFWQNLAGYKRQEALRPYLSSEEDRKKGKKFARYQLGDLLLHLEKKHGEDWGKVYDEAWERIDKKVEGLSKHIKLEEERRSEDAQSKAALTDWLRAKASFVIEGLKEADKDEFCRCELKLQKWYGDLRGKPFAIEAENSILDISGFSKQYNCAFIWQKDGVKKLNLYLIINYFKGGKLRFKKIKPEAFEANRFYTVINKKSGEIVPMEVNFNFDDPNLIILPLAFGKRQGREFIWNDLLSLETGSLKLANGRVIEKTLYNRRTRQDEPALFVALTFERREVLDSSNIKPMNLIGVDRGENIPAVIALTDPEGCPLSRFKDSLGNPTHILRIGESYKEKQRTIQAKKEVEQRRAGGYSRKYASKAKNLADDMVRNTARDLLYYAVTQDAMLIFENLSRGFGRQGKRTFMAERQYTRMEDWLTAKLAYEGLPSKVYLSKTLAQYTSKTCSNCGFTITSADYDRVLEKLKKTATGWMTTINGKELKVEGQITYYNRYKRQNVVKDLSVELDRLSEESVNNDISSWTKGRSGEALSLLKKRFSHRPVQEKFVCLNCGFETHADEQAALNIARSWLFLRSQEYKKYQTNKTTGNTDKRAFVETWQSFYRKKLKEVWKPAV

SEQ ID NO: 38675 - protein, 978 aa, synthetic construct
  REGION 1..978: note = engineered CasX variant
QEIKRINKIRRRLVKDSNTKKAGKTGPMKTLLVRVMTPDLRERLENLRKKPENIPQPISNTSRANLNKLLTDYTEMKKAILHVYWEEFQKDPVGLMSRVAQPASKKIDQNKLKPEMDEKGNLTTAGFACSQCGQPLFVYKLEQVSEKGKAYTNYVGRCNVAEHEKLILLAQLKPEKDSDEAVTYSLGKFGQRALDFYSIHVTKESTHPVKPLAQIAGNRYASSPVGKALSDACMGTIASFLSKYQDIIIEHQKVVKGNQKRLESLRELAGKENLEYPSVTLPPQPHTKEGVDAYNEVIARVRMWVNLNLWQKLKLSRDDAKPLLRLKGFPSFPLVERQANEVDWWDMVCNVKKLINEKKEDGKVFWQNLAGYKRQEALRPYLSSEEDRKKGKKFARYQLGDLLLHLEKKHGEDWGKVYDEAWERIDKKVEGLSKHIKLEEERRSEDAQSKAALTDWLRAKASFVIEGLKEADKDEFCRCELKLQKWYGDLRGKPFAIEAENSILDISGFSKQYNCAFIWQKDGVKKLNLYLIINYFKGGKLRFKKIKPEAFEANRFYTVINKKSGEIVPMEVNFNFDDPNLIILPLAFGKRQGREFIWNDLLSLETGSLKLANGRVIEKTLYNRRTRQDEPALFVALTFERREVLDSSNIKPMNLIGVDRGENIPAVIALTDPEGCPLSRFKDSLGNPTHILRIGESYKEKQRTIQAKKEVEQRRAGGYSRKYASKAKNLADDMVRNTARDLLYYAVTQDAMLIFENLSRGFGRQGKRTFMAERQYTRMEDWLTAKLAYEGLPSKVYLSKTLAQYTSKTCSNCGFTITSADYDRVLEKLKKTATGWMTTINGKELKVEGQITYYNRYKRQNVVKDLSVELDRLSEESVNNDISSWTKGRSGEALSLLKKRFSHRPVQEKFVCLNCGFETHADEQAALNIARSWLFLRSQEYKKYQTNKTTGNTDKRAFVETWQSFYRKKLKEVWKPAV

SEQ ID NO: 38676 - protein, 978 aa, synthetic construct
  REGION 1..978: note = engineered CasX variant
QEIKRINKIRRRLVKDSNTKKAGKTGPMKTLLVRVMTPDLRERLENLRKKPENIPQPISNTSRANLNKLLTDYTEMKKAILHVYWEEFQKDPVGLMSRVAQPASKKIDQNKLKPEMDEKGNLTTAGFACSQCGQPLFVYKLEQVSEKGKAYTNYVGRCNVAEHEKLILLAQLKPEKDSDEAVTYSLGKFGQRALDFYSIHVTKESTHPVKPLAQIAGNRYASTPVGKALSDACMGTIASFLSKYQDIIIEHQKVVKGNQKRLESLRELAGKENLEYPSVTLPPQPHTKEGVDAYNEVIARVRMWVNLNLWQKLKLSRDDAKPLLRLKGFPSFPLVERQANEVDWWDMVCNVKKLINEKKEDGKVFWQNLAGYKRQEALRPYLSSEEDRKKGKKFARYQLGDLLLHLEKKHGEDWGKVYDEAWERIDKKVEGLSKHIKLEEERRSEDAQSKAALTDWLRAKASFVIEGLKEADKDEFCRCELKLQKWYGDLRGKPFAIEAENSILDISGFSKQYNCAFIWQKDGVKKLNLYLIINYFKGGKLRFKKIKPEAFEANRFYTVINKKSGEIVPMEVNFNFDDPNLIILPLAFGKRQGREFIWNDLLSLETGSLKLANGRVIEKTLYNRRTRQDEPALFVALTFERREVLDSSNIKPMNLIGVDRGENIPAVIALTDPEGCPLSRFKDSLGNPTHILRIGESYKEKQRTIQAKKEVEQRRAGGYSRKYASKAKNLADDMVRNTARDLLYYAVTQDAMLIFENLSRGFGRQGKRTFMAERQYTRMEDWLTAKLAYEGLPSKVYLSKTLAQYTSKTCSNCGFTITSADYDRVLEKLKKTATGWMTTINGKELKVEGQITYYNRYKRQNVVKDLSVELDRLSEESVNNDISSWTKGRSGEALSLLKKRFSHRPVQEKFVCLNCGFETHADEQAALNIARSWLFLRSQEYKKYQTNKTTGNTDKRAFVETWQSFYRKKLKEVWKPAV

SEQ ID NO: 38677 - protein, 978 aa, synthetic construct
  REGION 1..978: note = engineered CasX variant
QEIKRINKIRRRLVKDSNTKKAGKTGPMKTLLVRVMTPDLRERLENLRKKPENIPQPISNTSRANLNKLLTDYTEMKKAILHVYWEEFQKDPVGLMSRVAQPASKKIDQNKLKPEMDEKGNLTTAGFACSQCGQPLFVYKLEQVSEKGKAYTNYVGRCNVAEHEKLILLAQLKPEKDSDEAVTYSLGKFGQRALDFYSIHVTKESTHPVKPLAQIAGNRYASAPVGKALSDACMGTIASFLSKYQDIIIEHQKVVKGNQKRLESLRELAGKENLEYPSVTLPPQPHTKEGVDAYNEVIARVRMWVNLNLWQKLKLSRDDAKPLLRLKGFPSFPLVERQANEVDWWDMVCNVKKLINEKKEDGKVFWQNLAGYKRQEALRPYLSSEEDRKKGKKFARYQLGDLLLHLEKKHGEDWGKVYDEAWERIDKKVEGLSKHIKLEEERRSEDAQSKAALTDWLRAKASFVIEGLKEADKDEFCRCELKLQKWYGDLRGKPFAIEAENSILDISGFSKQYNCAFIWQKDGVKKLNLYLIINYFKGGKLRFKKIKPEAFEANRFYTVINKKSGEIVPMEVNFNFDDPNLIILPLAFGKRQGREFIWNDLLSLETGSLKLANGRVIEKTLYNRRTRQDEPALFVALTFERREVLDSSNIKPMNLIGVDRGENIPAVIALTDPEGCPLSRFKDSLGNPTHILRIGESYKEKQRTIQAKKEVEQRRAGGYSRKYASKAKNLADDMVRNTARDLLYYAVTQDAMLIFENLSRGFGRQGKRTFMAERQYTRMEDWLTAKLAYEGLPSKVYLSKTLAQYTSKTCSNCGFTITSADYDRVLEKLKKTATGWMTTINGKELKVEGQITYYNRYKRQNVVKDLSVELDRLSEESVNNDISSWTKGRSGEALSLLKKRFSHRPVQEKFVCLNCGFETHADEQAALNIARSWLFLRSQEYKKYQTNKTTGNTDKRAFVETWQSFYRKKLKEVWKPAV

SEQ ID NO: 38678 - protein, 978 aa, synthetic construct
  REGION 1..978: note = engineered CasX variant
QEIKRINKIRRRLVKDSNTKKAGKTGPMKTLLVRVMTPDLRERLENLRKKPENIPQPISNTSRANLNKLLTDYTEMKKAILHVYWEEFQKDPVGLMSRVAQPASKKIDQNKLKPEMDEKGNLTTAGFACSQCGQPLFVYKLEQVSEKGKAYTNYVGRCNVAEHEKLILLAQLKPEKDSDEAVTYSLGKFGQRALDFYSIHVTKESTHPVKPLAQIAGNRYASVPVGKALSDACMGTIASFLSKYQDIIIEHQKVVKGNQKRLESLRELAGKENLEYPSVTLPPQPHTKEGVDAYNEVIARVRMWVNLNLWQKLKLSRDDAKPLLRLKGFPSFPLVERQANEVDWWDMVCNVKKLINEKKEDGKVFWQNLAGYKRQEALRPYLSSEEDRKKGKKFARYQLGDLLLHLEKKHGEDWGKVYDEAWERIDKKVEGLSKHIKLEEERRSEDAQSKAALTDWLRAKASFVIEGLKEADKDEFCRCELKLQKWYGDLRGKPFAIEAENSILDISGFSKQYNCAFIWQKDGVKKLNLYLIINYFKGGKLRFKKIKPEAFEANRFYTVINKKSGEIVPMEVNFNFDDPNLIILPLAFGKRQGREFIWNDLLSLETGSLKLANGRVIEKTLYNRRTRQDEPALFVALTFERREVLDSSNIKPMNLIGVDRGENIPAVIALTDPEGCPLSRFKDSLGNPTHILRIGESYKEKQRTIQAKKEVEQRRAGGYSRKYASKAKNLADDMVRNTARDLLYYAVTQDAMLIFENLSRGFGRQGKRTFMAERQYTRMEDWLTAKLAYEGLPSKVYLSKTLAQYTSKTCSNCGFTITSADYDRVLEKLKKTATGWMTTINGKELKVEGQITYYNRYKRQNVVKDLSVELDRLSEESVNNDISSWTKGRSGEALSLLKKRFSHRPVQEKFVCLNCGFETHADEQAALNIARSWLFLRSQEYKKYQTNKTTGNTDKRAFVETWQSFYRKKLKEVWKPAV

SEQ ID NO: 38679 - protein, 978 aa, synthetic construct
  REGION 1..978: note = engineered CasX variant
QEIKRINKIRRRLVKDSNTKKAGKTGPMKTLLVRVMTPDLRERLENLRKKPENIPQPISNTSRANLNKLLTDYTEMKKAILHVYWEEFQKDPVGLMSRVAQPASKKIDQNKLKPEMDEKGNLTTAGFACSQCGQPLFVYKLEQVSEKGKAYTNYVGRCNVAEHEKLIKLAQLKPEKDSDEAVTYSLGKFGQRALDFYSIHVTKESTHPVKPLAQIAGNRYASGPVGKALSDACMGTIASFLSKYQDIIIEHQKVVKGNQKRLESLRELAGKENLEYPSVTLPPQPHTKEGVDAYNEVIARVRMWVNLNLWQKLKLSRDDAKPLLRLKGFPSFPLVERQANEVDWWDMVCNVKKLINEKKEDGKVFWQNLAGYKRQEALRPYLSSEEDRKKGKKFARYQLGDLLLHLEKKHGEDWGKVYDEAWERIDKKVEGLSKHIKLEEERRSEDAQSKAALTDWLRAKASFVIEGLKEADKDEFCRCELKLQKWYGDLRGKPFAIEAENSILDISGFSKQYNCAFIWQKDGVKKLNLYLIINYFKGGKLRFKKIKPEAFEANRFYTVINKKSGEIVPMEVNFNFDDPNLIILPLAFGKRQGREFIWNDLLSLETGSLKLANGRVIEKTLYNRRTRQDEPALFVALTFERREVLDSSNIKPMNLIGVDRGENIPAVIALTDPEGCPLSRFKDSLGNPTHILRIGESYKEKQRTIQAKKEVEQRRAGGYSRKYASKAKNLADDMVRNTARDLLYYAVTQDAMLIFENLSRGFGRQGKRTFMAERQYTRMEDWLTAKLAYEGLPSKVYLSKTLAQYTSKTCSNCGFTITSADYDRVLEKLKKTATGWMTTINGKELKVEGQITYYNRYKRQNVVKDLSVELDRLSEESVNNDISSWTKGRSGEALSLLKKRFSHRPVQEKFVCLNCGFETHADEQAALNIARSWLFLRSQEYKKYQTNKTTGNTDKRAFVETWQSFYRKKLKEVWKPAV

SEQ ID NO: 38680 - protein, 977 aa, synthetic construct
  REGION 1..977: note = engineered CasX variant
QEIKRINKIRRRLVKDSNTKKAGKTGPMKTLLVRVMTPDLRERLENLRKKPENIPQPISNTSRANLNKLLTDYTEMKKAILHVYWEEFQKDPVGLMSRVAQPASKKIDQNKLKPEMDEKGNLTTAGFACSQCGQPLFVYKLEQVSEKGKAYTNYVGRCNVAEHEKLILLAQLKPEKDSDEAVTYSLGKFGQRALDFYSIHVTKESTHPVKPLAQIAGNRYASPVGKALSDACMGTIASFLSKYQDIIIEHQKVVKGNQKRLESLRELAGKENLEYPSVTLPPQPHTKEGVDAYNEVIARVRMWVNLNLWQKLKLSRDDAKPLLRLKGFPSFPLVERQANEVDWWDMVCNVKKLINEKKEDGKVFWQNLAGYKRQEALRPYLSSEEDRKKGKKFARYQLGDLLLHLEKKHGEDWGKVYDEAWERIDKKVEGLSKHIKLEEERRSEDAQSKAALTDWLRAKASFVIEGLKEADKDEFCRCELKLQKWYGDLRGKPFAIEAENSILDISGFSKQYNCAFIWQKDGVKKLNLYLIINYFKGGKLRFKKIKPEAFEANRFYTVINKKSGEIVPMEVNFNFDDPNLIILPLAFGKRQGREFIWNDLLSLETGSLKLANGRVIEKTLYNRRTRQDEPALFVALTFERREVLDSSNIKPMNLIGVDRGENIPAVIALTDPEGCPLSRFKDSLGNPTHILRIGESYKEKQRTIQAKKEVEQRRAGGYSRKYASKAKNLADDMVRNTARDLLYYAVTQDAMLIFENLSRGFGRQGKRTFMAERQYTRMEDWLTAKLAYEGLPSKVYLSKTLAQYTSKTCSNCGFTITSADYDRVLEKLKKTATGWMTTINGKELKVEGQITYYNRYKRQNVVKDLSVELDRLSEESVNNDISSWTKGRSGEALSLLKKRFSHRPVQEKFVCLNCGFETHADEQAALNIARSWLFLRSQEYKKYQTNKTTGNTDKRAFVETWQSFYRKKLKEVWKPAV

SEQ ID NO: 38681 - protein, 979 aa, synthetic construct
  REGION 1..979: note = engineered CasX variant
QEIKRINKIRRRLVKDSNTKKAGKTGPMKTLLVRVMTPDLRERLENLRKKPENIPQPISNTSRANLNKLLTDYTEMKKAILHVYWEEFQKDPVGLMSRVAQPASKKIDQNKLKPEMDEKGNLTTAGFACSQCGQPLFVYKLEQVSEKGKAYTNYVGRCNVAEHEKLILLAQLKPEKDSDEAVTYSLGKFGQRALDFYSIHVTKESTHPVKPLAQIAGNRYASYPVGKALSDACMGTIASFLSKYQDIIIEHQKVVKGNQKRLESLRELAGKENLEYPSVTLPPQPHTKEGVDAYNEVIARVRMWVNLNLWQKLKLSRDDAKPLLRLKGFPSFPLVERQANEVDWWDMVCNVKKLINEKKEDGKVFWQNLAGYKRQEALRPYLSSEEDRKKGKKFARYQLGDLLLHLEKKHGEDWGKVYDEAWERIDKKVEGLSKHIKLEEERRSEDAQSKAALTDWLRAKASFVIEGLKEADKDEFCRCELKLQKWYGDLRGKPFAIEAENSILDISGFSKQYNCAFIWQKDGVKKLNLYLIINYFKGGKLRFKKIKPEAFEANRFYTVINKKSGEIVPMEVNFNFDDPNLIILPLAFGKRQGREFIWNDLLSLETGSLKLANGRVIEKTLYNRRTRQDEPALFVALTFERREVLDSSNIKPMNLIGVDRGENIPAVIALTDPEGCPLSRFKDSLGNPTHILRIGESYKEKQRTIQAKKEVEQRRAGGYSRKYASKAKNLADDMVRNTARDLLYYAVTQDAMLIFENLSRGFGRQGKRTFMAERQYTRMEDWLTAKLAYEGPLPSKTYLSKTLAQYTSKTCSNCGFTITSADYDRVLEKLKKTATGWMTTINGKELKVEGQITYYNRYKRQNVVKDLSVELDRLSEESVNNDISSWTKGRSGEALSLLKKRFSHRPVQEKFVCLNCGFETHADEQAALNIARSWLFLRSQEYKKYQTNKTTGNTDKRAFVETWQSFYRKKLKEVWKPAV

SEQ ID NO: 38682 - protein, 979 aa, synthetic construct
  REGION 1..979: note = engineered CasX variant
QEIKRINKIRRRLVKDSNTKKAGKTGPMKTLLVRVMTPDLRERLENLRKKPENIPQPISNTSRANLNKLLTDYTEMKKAILHVYWEEFQKDPVGLMSRVAQPASKKIDQNKLKPEMDEKGNLTTAGFACSQCGQPLFVYKLEQVSEKGKAYTNYVGRCNVAEHEKLILLAQLKPEKDSDEAVTYSLGKFGQRALDFYSIHVTKESTHPVKPLAQIAGNRYASHPVGKALSDACMGTIASFLSKYQDIIIEHQKVVKGNQKRLESLRELAGKENLEYPSVTLPPQPHTKEGVDAYNEVIARVRMWVNLNLWQKLKLSRDDAKPLLRLKGFPSFPLVERQANEVDWWDMVCNVKKLINEKKEDGKVFWQNLAGYKRQEALRPYLSSEEDRKKGKKFARYQLGDLLLHLEKKHGEDWGKVYDEAWERIDKKVEGLSKHIKLEEERRSEDAQSKAALTDWLRAKASFVIEGLKEADKDEFCRCELKLQKWYGDLRGKPFAIEAENSILDISGFSKQYNCAFIWQKDGVKKLNLYLIINYFKGGKLRFKKIKPEAFEANRFYTVINKKSGEIVPMEVNFNFDDPNLIILPLAFGKRQGREFIWNDLLSLETGSLKLANGRVIEKTLYNRRTRQDEPALFVALTFERREVLDSSNIKPMNLIGVDRGENIPAVIALTDPEGCPLSRFKDSLGNPTHILRIGESYKEKQRTIQAKKEVEQRRAGGYSRKYASKAKNLADDMVRNTARDLLYYAVTQDAMLIFENLSRGFGRQGKRTFMAERQYTRMEDWLTAKLAYEGPLPSKTYLSKTLAQYTSKTCSNCGFTITSADYDRVLEKLKKTATGWMTTINGKELKVEGQITYYNRYKRQNVVKDLSVELDRLSEESVNNDISSWTKGRSGEALSLLKKRFSHRPVQEKFVCLNCGFETHADEQAALNIARSWLFLRSQEYKKYQTNKTTGNTDKRAFVETWQSFYRKKLKEVWKPAV

SEQ ID NO: 38683 - protein, 979 aa, synthetic construct
  REGION 1..979: note = engineered CasX variant
QEIKRINKIRRRLVKDSNTKKAGKTGPMKTLLVRVMTPDLRERLENLRKKPENIPQPISNTSRANLNKLLTDYTEMKKAILHVYWEEFQKDPVGLMSRVAQPASKKIDQNKLKPEMDEKGNLTTAGFACSQCGQPLFVYKLEQVSEKGKAYTNYVGRCNVAEHEKLILLAQLKPEKDSDEAVTYSLGKFGQRALDFYSIHVTKESTHPVKPLAQIAGNRYASSPVGKALSDACMGTIASFLSKYQDIIIEHQKVVKGNQKRLESLRELAGKENLEYPSVTLPPQPHTKEGVDAYNEVIARVRMWVNLNLWQKLKLSRDDAKPLLRLKGFPSFPLVERQANEVDWWDMVCNVKKLINEKKEDGKVFWQNLAGYKRQEALRPYLSSEEDRKKGKKFARYQLGDLLLHLEKKHGEDWGKVYDEAWERIDKKVEGLSKHIKLEEERRSEDAQSKAALTDWLRAKASFVIEGLKEADKDEFCRCELKLQKWYGDLRGKPFAIEAENSILDISGFSKQYNCAFIWQKDGVKKLNLYLIINYFKGGKLRFKKIKPEAFEANRFYTVINKKSGEIVPMEVNFNFDDPNLIILPLAFGKRQGREFIWNDLLSLETGSLKLANGRVIEKTLYNRRTRQDEPALFVALTFERREVLDSSNIKPMNLIGVDRGENIPAVIALTDPEGCPLSRFKDSLGNPTHILRIGESYKEKQRTIQAKKEVEQRRAGGYSRKYASKAKNLADDMVRNTARDLLYYAVTQDAMLIFENLSRGFGRQGKRTFMAERQYTRMEDWLTAKLAYEGPLPSKTYLSKTLAQYTSKTCSNCGFTITSADYDRVLEKLKKTATGWMTTINGKELKVEGQITYYNRYKRQNVVKDLSVELDRLSEESVNNDISSWTKGRSGEALSLLKKRFSHRPVQEKFVCLNCGFETHADEQAALNIARSWLFLRSQEYKKYQTNKTTGNTDKRAFVETWQSFYRKKLKEVWKPAV

SEQ ID NO: 38684 - protein, 979 aa, synthetic construct
  REGION 1..979: note = engineered CasX variant
QEIKRINKIRRRLVKDSNTKKAGKTGPMKTLLVRVMTPDLRERLENLRKKPENIPQPISNTSRANLNKLLTDYTEMKKAILHVYWEEFQKDPVGLMSRVAQPASKKIDQNKLKPEMDEKGNLTTAGFACSQCGQPLFVYKLEQVSEKGKAYTNYVGRCNVAEHEKLILLAQLKPEKDSDEAVTYSLGKFGQRALDFYSIHVTKESTHPVKPLAQIAGNRYASTPVGKALSDACMGTIASFLSKYQDIIIEHQKVVKGNQKRLESLRELAGKENLEYPSVTLPPQPHTKEGVDAYNEVIARVRMWVNLNLWQKLKLSRDDAKPLLRLKGFPSFPLVERQANEVDWWDMVCNVKKLINEKKEDGKVFWQNLAGYKRQEALRPYLSSEEDRKKGKKFARYQLGDLLLHLEKKHGEDWGKVYDEAWERIDKKVEGLSKHIKLEEERRSEDAQSKAALTDWLRAKASFVIEGLKEADKDEFCRCELKLQKWYGDLRGKPFAIEAENSILDISGFSKQYNCAFIWQKDGVKKLNLYLIINYFKGGKLRFKKIKPEAFEANRFYTVINKKSGEIVPMEVNFNFDDPNLIILPLAFGKRQGREFIWNDLLSLETGSLKLANGRVIEKTLYNRRTRQDEPALFVALTFERREVLDSSNIKPMNLIGVDRGENIPAVIALTDPEGCPLSRFKDSLGNPTHILRIGESYKEKQRTIQAKKEVEQRRAGGYSRKYASKAKNLADDMVRNTARDLLYYAVTQDAMLIFENLSRGFGRQGKRTFMAERQYTRMEDWLTAKLAYEGPLPSKTYLSKTLAQYTSKTCSNCGFTITSADYDRVLEKLKKTATGWMTTINGKELKVEGQITYYNRYKRQNVVKDLSVELDRLSEESVNNDISSWTKGRSGEALSLLKKRFSHRPVQEKFVCLNCGFETHADEQAALNIARSWLFLRSQEYKKYQTNKTTGNTDKRAFVETWQSFYRKKLKEVWKPAV

SEQ ID NO: 38685 - protein, 979 aa, synthetic construct
  REGION 1..979: note = engineered CasX variant
QEIKRINKIRRRLVKDSNTKKAGKTGPMKTLLVRVMTPDLRERLENLRKKPENIPQPISNTSRANLNKLLTDYTEMKKAILHVYWEEFQKDPVGLMSRVAQPASKKIDQNKLKPEMDEKGNLTTAGFACSQCGQPLFVYKLEQVSEKGKAYTNYVGRCNVAEHEKLILLAQLKPEKDSDEAVTYSLGKFGQRALDFYSIHVTKESTHPVKPLAQIAGNRYASAPVGKALSDACMGTIASFLSKYQDIIIEHQKVVKGNQKRLESLRELAGKENLEYPSVTLPPQPHTKEGVDAYNEVIARVRMWVNLNLWQKLKLSRDDAKPLLRLKGFPSFPLVERQANEVDWWDMVCNVKKLINEKKEDGKVFWQNLAGYKRQEALRPYLSSEEDRKKGKKFARYQLGDLLLHLEKKHGEDWGKVYDEAWERIDKKVEGLSKHIKLEEERRSEDAQSKAALTDWLRAKASFVIEGLKEADKDEFCRCELKLQKWYGDLRGKPFAIEAENSILDISGFSKQYNCAFIWQKDGVKKLNLYLIINYFKGGKLRFKKIKPEAFEANRFYTVINKKSGEIVPMEVNFNFDDPNLIILPLAFGKRQGREFIWNDLLSLETGSLKLANGRVIEKTLYNRRTRQDEPALFVALTFERREVLDSSNIKPMNLIGVDRGENIPAVIALTDPEGCPLSRFKDSLGNPTHILRIGESYKEKQRTIQAKKEVEQRRAGGYSRKYASKAKNLADDMVRNTARDLLYYAVTQDAMLIFENLSRGFGRQGKRTFMAERQYTRMEDWLTAKLAYEGPLPSKTYLSKTLAQYTSKTCSNCGFTITSADYDRVLEKLKKTATGWMTTINGKELKVEGQITYYNRYKRQNVVKDLSVELDRLSEESVNNDISSWTKGRSGEALSLLKKRFSHRPVQEKFVCLNCGFETHADEQAALNIARSWLFLRSQEYKKYQTNKTTGNTDKRAFVETWQSFYRKKLKEVWKPAV

SEQ ID NO: 38686 - protein, 979 aa, synthetic construct
  REGION 1..979: note = engineered CasX variant
QEIKRINKIRRRLVKDSNTKKAGKTGPMKTLLVRVMTPDLRERLENLRKKPENIPQPISNTSRANLNKLLTDYTEMKKAILHVYWEEFQKDPVGLMSRVAQPASKKIDQNKLKPEMDEKGNLTTAGFACSQCGQPLFVYKLEQVSEKGKAYTNYVGRCNVAEHEKLILLAQLKPEKDSDEAVTYSLGKFGQRALDFYSIHVTKESTHPVKPLAQIAGNRYASVPVGKALSDACMGTIASFLSKYQDIIIEHQKVVKGNQKRLESLRELAGKENLEYPSVTLPPQPHTKEGVDAYNEVIARVRMWVNLNLWQKLKLSRDDAKPLLRLKGFPSFPLVERQANEVDWWDMVCNVKKLINEKKEDGKVFWQNLAGYKRQEALRPYLSSEEDRKKGKKFARYQLGDLLLHLEKKHGEDWGKVYDEAWERIDKKVEGLSKHIKLEEERRSEDAQSKAALTDWLRAKASFVIEGLKEADKDEFCRCELKLQKWYGDLRGKPFAIEAENSILDISGFSKQYNCAFIWQKDGVKKLNLYLIINYFKGGKLRFKKIKPEAFEANRFYTVINKKSGEIVPMEVNFNFDDPNLIILPLAFGKRQGREFIWNDLLSLETGSLKLANGRVIEKTLYNRRTRQDEPALFVALTFERREVLDSSNIKPMNLIGVDRGENIPAVIALTDPEGCPLSRFKDSLGNPTHILRIGESYKEKQRTIQAKKEVEQRRAGGYSRKYASKAKNLADDMVRNTARDLLYYAVTQDAMLIFENLSRGFGRQGKRTFMAERQYTRMEDWLTAKLAYEGPLPSKTYLSKTLAQYTSKTCSNCGFTITSADYDRVLEKLKKTATGWMTTINGKELKVEGQITYYNRYKRQNVVKDLSVELDRLSEESVNNDISSWTKGRSGEALSLLKKRFSHRPVQEKFVCLNCGFETHADEQAALNIARSWLFLRSQEYKKYQTNKTTGNTDKRAFVETWQSFYRKKLKEVWKPAV

SEQ ID NO: 38687 - protein, 979 aa, synthetic construct
  REGION 1..979: note = engineered CasX variant
QEIKRINKIRRRLVKDSNTKKAGKTGPMKTLLVRVMTPDLRERLENLRKKPENIPQPISNTSRANLNKLLTDYTEMKKAILHVYWEEFQKDPVGLMSRVAQPASKKIDQNKLKPEMDEKGNLTTAGFACSQCGQPLFVYKLEQVSEKGKAYTNYVGRCNVAEHEKLIKLAQLKPEKDSDEAVTYSLGKFGQRALDFYSIHVTKESTHPVKPLAQIAGNRYASGPVGKALSDACMGTIASFLSKYQDIIIEHQKVVKGNQKRLESLRELAGKENLEYPSVTLPPQPHTKEGVDAYNEVIARVRMWVNLNLWQKLKLSRDDAKPLLRLKGFPSFPLVERQANEVDWWDMVCNVKKLINEKKEDGKVFWQNLAGYKRQEALRPYLSSEEDRKKGKKFARYQLGDLLLHLEKKHGEDWGKVYDEAWERIDKKVEGLSKHIKLEEERRSEDAQSKAALTDWLRAKASFVIEGLKEADKDEFCRCELKLQKWYGDLRGKPFAIEAENSILDISGFSKQYNCAFIWQKDGVKKLNLYLIINYFKGGKLRFKKIKPEAFEANRFYTVINKKSGEIVPMEVNFNFDDPNLIILPLAFGKRQGREFIWNDLLSLETGSLKLANGRVIEKTLYNRRTRQDEPALFVALTFERREVLDSSNIKPMNLIGVDRGENIPAVIALTDPEGCPLSRFKDSLGNPTHILRIGESYKEKQRTIQAKKEVEQRRAGGYSRKYASKAKNLADDMVRNTARDLLYYAVTQDAMLIFENLSRGFGRQGKRTFMAERQYTRMEDWLTAKLAYEGPLPSKTYLSKTLAQYTSKTCSNCGFTITSADYDRVLEKLKKTATGWMTTINGKELKVEGQITYYNRYKRQNVVKDLSVELDRLSEESVNNDISSWTKGRSGEALSLLKKRFSHRPVQEKFVCLNCGFETHADEQAALNIARSWLFLRSQEYKKYQTNKTTGNTDKRAFVETWQSFYRKKLKEVWKPAV

SEQ ID NO: 38688 - protein, 978 aa, synthetic construct
  REGION 1..978: note = engineered CasX variant
QEIKRINKIRRRLVKDSNTKKAGKTGPMKTLLVRVMTPDLRERLENLRKKPENIPQPISNTSRANLNKLLTDYTEMKKAILHVYWEEFQKDPVGLMSRVAQPASKKIDQNKLKPEMDEKGNLTTAGFACSQCGQPLFVYKLEQVSEKGKAYTNYVGRCNVAEHEKLILLAQLKPEKDSDEAVTYSLGKFGQRALDFYSIHVTKESTHPVKPLAQIAGNRYASPVGKALSDACMGTIASFLSKYQDIIIEHQKVVKGNQKRLESLRELAGKENLEYPSVTLPPQPHTKEGVDAYNEVIARVRMWVNLNLWQKLKLSRDDAKPLLRLKGFPSFPLVERQANEVDWWDMVCNVKKLINEKKEDGKVFWQNLAGYKRQEALRPYLSSEEDRKKGKKFARYQLGDLLLHLEKKHGEDWGKVYDEAWERIDKKVEGLSKHIKLEEERRSEDAQSKAALTDWLRAKASFVIEGLKEADKDEFCRCELKLQKWYGDLRGKPFAIEAENSILDISGFSKQYNCAFIWQKDGVKKLNLYLIINYFKGGKLRFKKIKPEAFEANRFYTVINKKSGEIVPMEVNFNFDDPNLIILPLAFGKRQGREFIWNDLLSLETGSLKLANGRVIEKTLYNRRTRQDEPALFVALTFERREVLDSSNIKPMNLIGVDRGENIPAVIALTDPEGCPLSRFKDSLGNPTHILRIGESYKEKQRTIQAKKEVEQRRAGGYSRKYASKAKNLADDMVRNTARDLLYYAVTQDAMLIFENLSRGFGRQGKRTFMAERQYTRMEDWLTAKLAYEGPLPSKTYLSKTLAQYTSKTCSNCGFTITSADYDRVLEKLKKTATGWMTTINGKELKVEGQITYYNRYKRQNVVKDLSVELDRLSEESVNNDISSWTKGRSGEALSLLKKRFSHRPVQEKFVCLNCGFETHADEQAALNIARSWLFLRSQEYKKYQTNKTTGNTDKRAFVETWQSFYRKKLKEVWKPAV

SEQ ID NO: 38689 - protein, 979 aa, synthetic construct
  REGION 1..979: note = engineered CasX variant
QEIKRINKIRRRLVKDSNTKKAGKTGPMKTLLVRVMTPDLRERLENLRKKPENIPQPISNTSRANLNKLLTDYTEMKKAILHVYWEEFQKDPVGLMSRVAQPASKKIDQNKLKPEMDEKGNLTTAGFACSQCGQPLFVYKLEQVSEKGKAYTNYVGRCNVAEHEKLILLAQLKPEKDSDEAVTYSLGKFGQRALDFYSIHVTKESTHPVKPLAQIAGNRYASYPVGKALSDACMGTIASFLSKYQDIIIEHQKVVKGNQKRLESLRELAGKENLEYPSVTLPPQPHTKEGVDAYNEVIARVRMWVNLNLWQKLKLSRDDAKPLLRLKGFPSFPLVERQANEVDWWDMVCNVKKLINEKKEDGKVFWQNLAGYKRQEALRPYLSSEEDVRKKGKKFARYQLGDLLLHLEKKHGEDWGKVYDEAWERIDKKVEGLSKHIKLEEERRSEDAQSKAALTDWLRAKASFVIEGLKEADKDEFCRCELKLQKWYGDLRGKPFAIEAENSILDISGFSKQYNCAFIWQKDGVKKLNLYLIINYFKGGKLRFKKIKPEAFEANRFYTVINKKSGEIVPMEVNFNFDDPNLIILPLAFGKRQGREFIWNDLLSLETGSLKLANGRVIEKTLYNRRTRQDEPALFVALTFERREVLDSSNIKPMNLIGVDRGENIPAVIALTDPEGCPLSRFKDSLGNPTHILRIGESYKEKQRTIQAKKEVEQRRAGGYSRKYASKAKNLADDMVRNTARDLLYYAVTQDAMLIFENLSRGFGRQGKRTFMAERQYTRMEDWLTAKLAYEGLPSKTYLSKTLAQYTSKTCSNCGFTITSADYDRVLEKLKKTATGWMTTINGKELKVEGQITYYNRYKRQNVVKDLSVELDRLSEESVNNDISSWTKGRSGEALSLLKKRFSHRPVQEKFVCLNCGFETHADEQAALNIARSWLFLRSQEYKKYQTNKTTGNTDKRAFVETWQSFYRKKLKEVWKPAV

SEQ ID NO: 38690 - protein, 979 aa, synthetic construct
  REGION 1..979: note = engineered CasX variant
QEIKRINKIRRRLVKDSNTKKAGKTGPMKTLLVRVMTPDLRERLENLRKKPENIPQPISNTSRANLNKLLTDYTEMKKAILHVYWEEFQKDPVGLMSRVAQPASKKIDQNKLKPEMDEKGNLTTAGFACSQCGQPLFVYKLEQVSEKGKAYTNYVGRCNVAEHEKLILLAQLKPEKDSDEAVTYSLGKFGQRALDFYSIHVTKESTHPVKPLAQIAGNRYASHPVGKALSDACMGTIASFLSKYQDIIIEHQKVVKGNQKRLESLRELAGKENLEYPSVTLPPQPHTKEGVDAYNEVIARVRMWVNLNLWQKLKLSRDDAKPLLRLKGFPSFPLVERQANEVDWWDMVCNVKKLINEKKEDGKVFWQNLAGYKRQEALRPYLSSEEDVRKKGKKFARYQLGDLLLHLEKKHGEDWGKVYDEAWERIDKKVEGLSKHIKLEEERRSEDAQSKAALTDWLRAKASFVIEGLKEADKDEFCRCELKLQKWYGDLRGKPFAIEAENSILDISGFSKQYNCAFIWQKDGVKKLNLYLIINYFKGGKLRFKKIKPEAFEANRFYTVINKKSGEIVPMEVNFNFDDPNLIILPLAFGKRQGREFIWNDLLSLETGSLKLANGRVIEKTLYNRRTRQDEPALFVALTFERREVLDSSNIKPMNLIGVDRGENIPAVIALTDPEGCPLSRFKDSLGNPTHILRIGESYKEKQRTIQAKKEVEQRRAGGYSRKYASKAKNLADDMVRNTARDLLYYAVTQDAMLIFENLSRGFGRQGKRTFMAERQYTRMEDWLTAKLAYEGLPSKTYLSKTLAQYTSKTCSNCGFTITSADYDRVLEKLKKTATGWMTTINGKELKVEGQITYYNRYKRQNVVKDLSVELDRLSEESVNNDISSWTKGRSGEALSLLKKRFSHRPVQEKFVCLNCGFETHADEQAALNIARSWLFLRSQEYKKYQTNKTTGNTDKRAFVETWQSFYRKKLKEVWKPAV

SEQ ID NO: 38691 - protein, 979 aa, synthetic construct
  REGION 1..979: note = engineered CasX variant
QEIKRINKIRRRLVKDSNTKKAGKTGPMKTLLVRVMTPDLRERLENLRKKPENIPQPISNTSRANLNKLLTDYTEMKKAILHVYWEEFQKDPVGLMSRVAQPASKKIDQNKLKPEMDEKGNLTTAGFACSQCGQPLFVYKLEQVSEKGKAYTNYVGRCNVAEHEKLILLAQLKPEKDSDEAVTYSLGKFGQRALDFYSIHVTKESTHPVKPLAQIAGNRYASSPVGKALSDACMGTIASFLSKYQDIIIEHQKVVKGNQKRLESLRELAGKENLEYPSVTLPPQPHTKEGVDAYNEVIARVRMWVNLNLWQKLKLSRDDAKPLLRLKGFPSFPLVERQANEVDWWDMVCNVKKLINEKKEDGKVFWQNLAGYKRQEALRPYLSSEEDVRKKGKKFARYQLGDLLLHLEKKHGEDWGKVYDEAWERIDKKVEGLSKHIKLEEERRSEDAQSKAALTDWLRAKASFVIEGLKEADKDEFCRCELKLQKWYGDLRGKPFAIEAENSILDISGFSKQYNCAFIWQKDGVKKLNLYLIINYFKGGKLRFKKIKPEAFEANRFYTVINKKSGEIVPMEVNFNFDDPNLIILPLAFGKRQGREFIWNDLLSLETGSLKLANGRVIEKTLYNRRTRQDEPALFVALTFERREVLDSSNIKPMNLIGVDRGENIPAVIALTDPEGCPLSRFKDSLGNPTHILRIGESYKEKQRTIQAKKEVEQRRAGGYSRKYASKAKNLADDMVRNTARDLLYYAVTQDAMLIFENLSRGFGRQGKRTFMAERQYTRMEDWLTAKLAYEGLPSKTYLSKTLAQYTSKTCSNCGFTITSADYDRVLEKLKKTATGWMTTINGKELKVEGQITYYNRYKRQNVVKDLSVELDRLSEESVNNDISSWTKGRSGEALSLLKKRFSHRPVQEKFVCLNCGFETHADEQAALNIARSWLFLRSQEYKKYQTNKTTGNTDKRAFVETWQSFYRKKLKEVWKPAV

SEQ ID NO: 38692 - protein, 979 aa, synthetic construct
  REGION 1..979: note = engineered CasX variant
QEIKRINKIRRRLVKDSNTKKAGKTGPMKTLLVRVMTPDLRERLENLRKKPENIPQPISNTSRANLNKLLTDYTEMKKAILHVYWEEFQKDPVGLMSRVAQPASKKIDQNKLKPEMDEKGNLTTAGFACSQCGQPLFVYKLEQVSEKGKAYTNYVGRCNVAEHEKLILLAQLKPEKDSDEAVTYSLGKFGQRALDFYSIHVTKESTHPVKPLAQIAGNRYASTPVGKALSDACMGTIASFLSKYQDIIIEHQKVVKGNQKRLESLRELAGKENLEYPSVTLPPQPHTKEGVDAYNEVIARVRMWVNLNLWQKLKLSRDDAKPLLRLKGFPSFPLVERQANEVDWWDMVCNVKKLINEKKEDGKVFWQNLAGYKRQEALRPYLSSEEDVRKKGKKFARYQLGDLLLHLEKKHGEDWGKVYDEAWERIDKKVEGLSKHIKLEEERRSEDAQSKAALTDWLRAKASFVIEGLKEADKDEFCRCELKLQKWYGDLRGKPFAIEAENSILDISGFSKQYNCAFIWQKDGVKKLNLYLIINYFKGGKLRFKKIKPEAFEANRFYTVINKKSGEIVPMEVNFNFDDPNLIILPLAFGKRQGREFIWNDLLSLETGSLKLANGRVIEKTLYNRRTRQDEPALFVALTFERREVLDSSNIKPMNLIGVDRGENIPAVIALTDPEGCPLSRFKDSLGNPTHILRIGESYKEKQRTIQAKKEVEQRRAGGYSRKYASKAKNLADDMVRNTARDLLYYAVTQDAMLIFENLSRGFGRQGKRTFMAERQYTRMEDWLTAKLAYEGLPSKTYLSKTLAQYTSKTCSNCGFTITSADYDRVLEKLKKTATGWMTTINGKELKVEGQITYYNRYKRQNVVKDLSVELDRLSEESVNNDISSWTKGRSGEALSLLKKRFSHRPVQEKFVCLNCGFETHADEQAALNIARSWLFLRSQEYKKYQTNKTTGNTDKRAFVETWQSFYRKKLKEVWKPAV

SEQ ID NO: 38693 - protein, 979 aa, synthetic construct
  REGION 1..979: note = engineered CasX variant
QEIKRINKIRRRLVKDSNTKKAGKTGPMKTLLVRVMTPDLRERLENLRKKPENIPQPISNTSRANLNKLLTDYTEMKKAILHVYWEEFQKDPVGLMSRVAQPASKKIDQNKLKPEMDEKGNLTTAGFACSQCGQPLFVYKLEQVSEKGKAYTNYVGRCNVAEHEKLILLAQLKPEKDSDEAVTYSLGKFGQRALDFYSIHVTKESTHPVKPLAQIAGNRYASAPVGKALSDACMGTIASFLSKYQDIIIEHQKVVKGNQKRLESLRELAGKENLEYPSVTLPPQPHTKEGVDAYNEVIARVRMWVNLNLWQKLKLSRDDAKPLLRLKGFPSFPLVERQANEVDWWDMVCNVKKLINEKKEDGKVFWQNLAGYKRQEALRPYLSSEEDVRKKGKKFARYQLGDLLLHLEKKHGEDWGKVYDEAWERIDKKVEGLSKHIKLEEERRSEDAQSKAALTDWLRAKASFVIEGLKEADKDEFCRCELKLQKWYGDLRGKPFAIEAENSILDISGFSKQYNCAFIWQKDGVKKLNLYLIINYFKGGKLRFKKIKPEAFEANRFYTVINKKSGEIVPMEVNFNFDDPNLIILPLAFGKRQGREFIWNDLLSLETGSLKLANGRVIEKTLYNRRTRQDEPALFVALTFERREVLDSSNIKPMNLIGVDRGENIPAVIALTDPEGCPLSRFKDSLGNPTHILRIGESYKEKQRTIQAKKEVEQRRAGGYSRKYASKAKNLADDMVRNTARDLLYYAVTQDAMLIFENLSRGFGRQGKRTFMAERQYTRMEDWLTAKLAYEGLPSKTYLSKTLAQYTSKTCSNCGFTITSADYDRVLEKLKKTATGWMTTINGKELKVEGQITYYNRYKRQNVVKDLSVELDRLSEESVNNDISSWTKGRSGEALSLLKKRFSHRPVQEKFVCLNCGFETHADEQAALNIARSWLFLRSQEYKKYQTNKTTGNTDKRAFVETWQSFYRKKLKEVWKPAV

SEQ ID NO: 38694 - protein, 979 aa, synthetic construct
  REGION 1..979: note = engineered CasX variant
QEIKRINKIRRRLVKDSNTKKAGKTGPMKTLLVRVMTPDLRERLENLRKKPENIPQPISNTSRANLNKLLTDYTEMKKAILHVYWEEFQKDPVGLMSRVAQPASKKIDQNKLKPEMDEKGNLTTAGFACSQCGQPLFVYKLEQVSEKGKAYTNYVGRCNVAEHEKLILLAQLKPEKDSDEAVTYSLGKFGQRALDFYSIHVTKESTHPVKPLAQIAGNRYASVPVGKALSDACMGTIASFLSKYQDIIIEHQKVVKGNQKRLESLRELAGKENLEYPSVTLPPQPHTKEGVDAYNEVIARVRMWVNLNLWQKLKLSRDDAKPLLRLKGFPSFPLVERQANEVDWWDMVCNVKKLINEKKEDGKVFWQNLAGYKRQEALRPYLSSEEDVRKKGKKFARYQLGDLLLHLEKKHGEDWGKVYDEAWERIDKKVEGLSKHIKLEEERRSEDAQSKAALTDWLRAKASFVIEGLKEADKDEFCRCELKLQKWYGDLRGKPFAIEAENSILDISGFSKQYNCAFIWQKDGVKKLNLYLIINYFKGGKLRFKKIKPEAFEANRFYTVINKKSGEIVPMEVNFNFDDPNLIILPLAFGKRQGREFIWNDLLSLETGSLKLANGRVIEKTLYNRRTRQDEPALFVALTFERREVLDSSNIKPMNLIGVDRGENIPAVIALTDPEGCPLSRFKDSLGNPTHILRIGESYKEKQRTIQAKKEVEQRRAGGYSRKYASKAKNLADDMVRNTARDLLYYAVTQDAMLIFENLSRGFGRQGKRTFMAERQYTRMEDWLTAKLAYEGLPSKTYLSKTLAQYTSKTCSNCGFTITSADYDRVLEKLKKTATGWMTTINGKELKVEGQITYYNRYKRQNVVKDLSVELDRLSEESVNNDISSWTKGRSGEALSLLKKRFSHRPVQEKFVCLNCGFETHADEQAALNIARSWLFLRSQEYKKYQTNKTTGNTDKRAFVETWQSFYRKKLKEVWKPAV

SEQ ID NO: 38695 - protein, 979 aa, synthetic construct
  REGION 1..979: note = engineered CasX variant
QEIKRINKIRRRLVKDSNTKKAGKTGPMKTLLVRVMTPDLRERLENLRKKPENIPQPISNTSRANLNKLLTDYTEMKKAILHVYWEEFQKDPVGLMSRVAQPASKKIDQNKLKPEMDEKGNLTTAGFACSQCGQPLFVYKLEQVSEKGKAYTNYVGRCNVAEHEKLIKLAQLKPEKDSDEAVTYSLGKFGQRALDFYSIHVTKESTHPVKPLAQIAGNRYASGPVGKALSDACMGTIASFLSKYQDIIIEHQKVVKGNQKRLESLRELAGKENLEYPSVTLPPQPHTKEGVDAYNEVIARVRMWVNLNLWQKLKLSRDDAKPLLRLKGFPSFPLVERQANEVDWWDMVCNVKKLINEKKEDGKVFWQNLAGYKRQEALRPYLSSEEDVRKKGKKFARYQLGDLLLHLEKKHGEDWGKVYDEAWERIDKKVEGLSKHIKLEEERRSEDAQSKAALTDWLRAKASFVIEGLKEADKDEFCRCELKLQKWYGDLRGKPFAIEAENSILDISGFSKQYNCAFIWQKDGVKKLNLYLIINYFKGGKLRFKKIKPEAFEANRFYTVINKKSGEIVPMEVNFNFDDPNLIILPLAFGKRQGREFIWNDLLSLETGSLKLANGRVIEKTLYNRRTRQDEPALFVALTFERREVLDSSNIKPMNLIGVDRGENIPAVIALTDPEGCPLSRFKDSLGNPTHILRIGESYKEKQRTIQAKKEVEQRRAGGYSRKYASKAKNLADDMVRNTARDLLYYAVTQDAMLIFENLSRGFGRQGKRTFMAERQYTRMEDWLTAKLAYEGLPSKTYLSKTLAQYTSKTCSNCGFTITSADYDRVLEKLKKTATGWMTTINGKELKVEGQITYYNRYKRQNVVKDLSVELDRLSEESVNNDISSWTKGRSGEALSLLKKRFSHRPVQEKFVCLNCGFETHADEQAALNIARSWLFLRSQEYKKYQTNKTTGNTDKRAFVETWQSFYRKKLKEVWKPAV

SEQ ID NO: 38696 - protein, 978 aa, synthetic construct
  REGION 1..978: note = engineered CasX variant
QEIKRINKIRRRLVKDSNTKKAGKTGPMKTLLVRVMTPDLRERLENLRKKPENIPQPISNTSRANLNKLLTDYTEMKKAILHVYWEEFQKDPVGLMSRVAQPASKKIDQNKLKPEMDEKGNLTTAGFACSQCGQPLFVYKLEQVSEKGKAYTNYVGRCNVAEHEKLILLAQLKPEKDSDEAVTYSLGKFGQRALDFYSIHVTKESTHPVKPLAQIAGNRYASPVGKALSDACMGTIASFLSKYQDIIIEHQKVVKGNQKRLESLRELAGKENLEYPSVTLPPQPHTKEGVDAYNEVIARVRMWVNLNLWQKLKLSRDDAKPLLRLKGFPSFPLVERQANEVDWWDMVCNVKKLINEKKEDGKVFWQNLAGYKRQEALRPYLSSEEDVRKKGKKFARYQLGDLLLHLEKKHGEDWGKVYDEAWERIDKKVEGLSKHIKLEEERRSEDAQSKAALTDWLRAKASFVIEGLKEADKDEFCRCELKLQKWYGDLRGKPFAIEAENSILDISGFSKQYNCAFIWQKDGVKKLNLYLIINYFKGGKLRFKKIKPEAFEANRFYTVINKKSGEIVPMEVNFNFDDPNLIILPLAFGKRQGREFIWNDLLSLETGSLKLANGRVIEKTLYNRRTRQDEPALFVALTFERREVLDSSNIKPMNLIGVDRGENIPAVIALTDPEGCPLSRFKDSLGNPTHILRIGESYKEKQRTIQAKKEVEQRRAGGYSRKYASKAKNLADDMVRNTARDLLYYAVTQDAMLIFENLSRGFGRQGKRTFMAERQYTRMEDWLTAKLAYEGLPSKTYLSKTLAQYTSKTCSNCGFTITSADYDRVLEKLKKTATGWMTTINGKELKVEGQITYYNRYKRQNVVKDLSVELDRLSEESVNNDISSWTKGRSGEALSLLKKRFSHRPVQEKFVCLNCGFETHADEQAALNIARSWLFLRSQEYKKYQTNKTTGNTDKRAFVETWQSFYRKKLKEVWKPAV

SEQ ID NO: 38697 - protein, 978 aa, synthetic construct
  REGION 1..978: note = engineered CasX variant
QEIKRINKIRRRLVKDSNTKKAGKTGPMKTLLVRVMTPDLRERLENLRKKPENIPQPISNTSRANLNKLLTDYTEMKKAILHVYWEEFQKDPVGLMSRVAQPASKKIDQNKLKPEMDEKGNLTTAGFACSQCGQPLFVYKLEQVSEKGKAYTNYVGRCNVAEHEKLILLAQLKPEKDSDEAVTYSLGKFGQRALDFYSIHVTKESTHPVKPLAQIAGNRYASYPVGKALSDACMGTIASFLSKYQDIIIEHQKVVKGNQKRLESLRELAGKENLEYPSVTLPPQPHTKEGVDAYNEVIARVRMWVNLNLWQKLKLSRDDAKPLLRLKGFPSFPLVERQANEVDWWDMVCNVKKLINEKKEDGKVFWQNLAGYKRQEALRPYLSSEEDRKKGKKFARYQLGDLLLHLEKKHGEDWGKVYDEAWERIDKKVEGLSKHIKLEEERRSEDAQSKAALTDWLRAKASFVIEGLKEADKDEFCRCELKLQKWYGDLRGKPFAIEAENSILDISGFSKQYNCAFIWQKDGVKKLNLYLIINYFKGGKLRFKKIKPEAFEANRFYTVINKKSGEIVPMEVNFNFDDPNLIILPLAFGKRQGREFIWNDLLSLETGSLKLANGRVIEKTLYNRRTRQDEPALFVALTFERREVLDSSNIKPMNLIGVDRGENIPAVIALTDPEGCPLSRFKDSLGNPTHILRIGESYKEKQRTIQAKKEVEQRRAGGYSRKYASKAKNLADDMVRNTARDLLYYAVTQDAMLIFENLSRGFGRQGKRTFMAERQYTRMEDWLTAKLAYEGLPSKTYLSKTLAQYTSKTCSNCGFTITSADYDRMLEKLKKTATGWMTTINGKELKVEGQITYYNRYKRQNVVKDLSVELDRLSEESVNNDISSWTKGRSGEALSLLKKRFSHRPVQEKFVCLNCGFETHADEQAALNIARSWLFLRSQEYKKYQTNKTTGNTDKRAFVETWQSFYRKKLKEVWKPAV

SEQ ID NO: 38698 - protein, 978 aa, synthetic construct
  REGION 1..978: note = engineered CasX variant
QEIKRINKIRRRLVKDSNTKKAGKTGPMKTLLVRVMTPDLRERLENLRKKPENIPQPISNTSRANLNKLLTDYTEMKKAILHVYWEEFQKDPVGLMSRVAQPASKKIDQNKLKPEMDEKGNLTTAGFACSQCGQPLFVYKLEQVSEKGKAYTNYVGRCNVAEHEKLILLAQLKPEKDSDEAVTYSLGKFGQRALDFYSIHVTKESTHPVKPLAQIAGNRYASHPVGKALSDACMGTIASFLSKYQDIIIEHQKVVKGNQKRLESLRELAGKENLEYPSVTLPPQPHTKEGVDAYNEVIARVRMWVNLNLWQKLKLSRDDAKPLLRLKGFPSFPLVERQANEVDWWDMVCNVKKLINEKKEDGKVFWQNLAGYKRQEALRPYLSSEEDRKKGKKFARYQLGDLLLHLEKKHGEDWGKVYDEAWERIDKKVEGLSKHIKLEEERRSEDAQSKAALTDWLRAKASFVIEGLKEADKDEFCRCELKLQKWYGDLRGKPFAIEAENSILDISGFSKQYNCAFIWQKDGVKKLNLYLIINYFKGGKLRFKKIKPEAFEANRFYTVINKKSGEIVPMEVNFNFDDPNLIILPLAFGKRQGREFIWNDLLSLETGSLKLANGRVIEKTLYNRRTRQDEPALFVALTFERREVLDSSNIKPMNLIGVDRGENIPAVIALTDPEGCPLSRFKDSLGNPTHILRIGESYKEKQRTIQAKKEVEQRRAGGYSRKYASKAKNLADDMVRNTARDLLYYAVTQDAMLIFENLSRGFGRQGKRTFMAERQYTRMEDWLTAKLAYEGLPSKTYLSKTLAQYTSKTCSNCGFTITSADYDRMLEKLKKTATGWMTTINGKELKVEGQITYYNRYKRQNVVKDLSVELDRLSEESVNNDISSWTKGRSGEALSLLKKRFSHRPVQEKFVCLNCGFETHADEQAALNIARSWLFLRSQEYKKYQTNKTTGNTDKRAFVETWQSFYRKKLKEVWKPAV

SEQ ID NO: 38699 - protein, 978 aa, synthetic construct
  REGION 1..978: note = engineered CasX variant
QEIKRINKIRRRLVKDSNTKKAGKTGPMKTLLVRVMTPDLRERLENLRKKPENIPQPISNTSRANLNKLLTDYTEMKKAILHVYWEEFQKDPVGLMSRVAQPASKKIDQNKLKPEMDEKGNLTTAGFACSQCGQPLFVYKLEQVSEKGKAYTNYVGRCNVAEHEKLILLAQLKPEKDSDEAVTYSLGKFGQRALDFYSIHVTKESTHPVKPLAQIAGNRYASSPVGKALSDACMGTIASFLSKYQDIIIEHQKVVKGNQKRLESLRELAGKENLEYPSVTLPPQPHTKEGVDAYNEVIARVRMWVNLNLWQKLKLSRDDAKPLLRLKGFPSFPLVERQANEVDWWDMVCNVKKLINEKKEDGKVFWQNLAGYKRQEALRPYLSSEEDRKKGKKFARYQLGDLLLHLEKKHGEDWGKVYDEAWERIDKKVEGLSKHIKLEEERRSEDAQSKAALTDWLRAKASFVIEGLKEADKDEFCRCELKLQKWYGDLRGKPFAIEAENSILDISGFSKQYNCAFIWQKDGVKKLNLYLIINYFKGGKLRFKKIKPEAFEANRFYTVINKKSGEIVPMEVNFNFDDPNLIILPLAFGKRQGREFIWNDLLSLETGSLKLANGRVIEKTLYNRRTRQDEPALFVALTFERREVLDSSNIKPMNLIGVDRGENIPAVIALTDPEGCPLSRFKDSLGNPTHILRIGESYKEKQRTIQAKKEVEQRRAGGYSRKYASKAKNLADDMVRNTARDLLYYAVTQDAMLIFENLSRGFGRQGKRTFMAERQYTRMEDWLTAKLAYEGLPSKTYLSKTLAQYTSKTCSNCGFTITSADYDRMLEKLKKTATGWMTTINGKELKVEGQITYYNRYKRQNVVKDLSVELDRLSEESVNNDISSWTKGRSGEALSLLKKRFSHRPVQEKFVCLNCGFETHADEQAALNIARSWLFLRSQEYKKYQTNKTTGNTDKRAFVETWQSFYRKKLKEVWKPAV

SEQ ID NO: 38700 - protein, 978 aa, synthetic construct
  REGION 1..978: note = engineered CasX variant
QEIKRINKIRRRLVKDSNTKKAGKTGPMKTLLVRVMTPDLRERLENLRKKPENIPQPISNTSRANLNKLLTDYTEMKKAILHVYWEEFQKDPVGLMSRVAQPASKKIDQNKLKPEMDEKGNLTTAGFACSQCGQPLFVYKLEQVSEKGKAYTNYVGRCNVAEHEKLILLAQLKPEKDSDEAVTYSLGKFGQRALDFYSIHVTKESTHPVKPLAQIAGNRYASTPVGKALSDACMGTIASFLSKYQDIIIEHQKVVKGNQKRLESLRELAGKENLEYPSVTLPPQPHTKEGVDAYNEVIARVRMWVNLNLWQKLKLSRDDAKPLLRLKGFPSFPLVERQANEVDWWDMVCNVKKLINEKKEDGKVFWQNLAGYKRQEALRPYLSSEEDRKKGKKFARYQLGDLLLHLEKKHGEDWGKVYDEAWERIDKKVEGLSKHIKLEEERRSEDAQSKAALTDWLRAKASFVIEGLKEADKDEFCRCELKLQKWYGDLRGKPFAIEAENSILDISGFSKQYNCAFIWQKDGVKKLNLYLIINYFKGGKLRFKKIKPEAFEANRFYTVINKKSGEIVPMEVNFNFDDPNLIILPLAFGKRQGREFIWNDLLSLETGSLKLANGRVIEKTLYNRRTRQDEPALFVALTFERREVLDSSNIKPMNLIGVDRGENIPAVIALTDPEGCPLSRFKDSLGNPTHILRIGESYKEKQRTIQAKKEVEQRRAGGYSRKYASKAKNLADDMVRNTARDLLYYAVTQDAMLIFENLSRGFGRQGKRTFMAERQYTRMEDWLTAKLAYEGLPSKTYLSKTLAQYTSKTCSNCGFTITSADYDRMLEKLKKTATGWMTTINGKELKVEGQITYYNRYKRQNVVKDLSVELDRLSEESVNNDISSWTKGRSGEALSLLKKRFSHRPVQEKFVCLNCGFETHADEQAALNIARSWLFLRSQEYKKYQTNKTTGNTDKRAFVETWQSFYRKKLKEVWKPAV

SEQ ID NO: 38701 - protein, 978 aa, synthetic construct
  REGION 1..978: note = engineered CasX variant
QEIKRINKIRRRLVKDSNTKKAGKTGPMKTLLVRVMTPDLRERLENLRKKPENIPQPISNTSRANLNKLLTDYTEMKKAILHVYWEEFQKDPVGLMSRVAQPASKKIDQNKLKPEMDEKGNLTTAGFACSQCGQPLFVYKLEQVSEKGKAYTNYVGRCNVAEHEKLILLAQLKPEKDSDEAVTYSLGKFGQRALDFYSIHVTKESTHPVKPLAQIAGNRYASAPVGKALSDACMGTIASFLSKYQDIIIEHQKVVKGNQKRLESLRELAGKENLEYPSVTLPPQPHTKEGVDAYNEVIARVRMWVNLNLWQKLKLSRDDAKPLLRLKGFPSFPLVERQANEVDWWDMVCNVKKLINEKKEDGKVFWQNLAGYKRQEALRPYLSSEEDRKKGKKFARYQLGDLLLHLEKKHGEDWGKVYDEAWERIDKKVEGLSKHIKLEEERRSEDAQSKAALTDWLRAKASFVIEGLKEADKDEFCRCELKLQKWYGDLRGKPFAIEAENSILDISGFSKQYNCAFIWQKDGVKKLNLYLIINYFKGGKLRFKKIKPEAFEANRFYTVINKKSGEIVPMEVNFNFDDPNLIILPLAFGKRQGREFIWNDLLSLETGSLKLANGRVIEKTLYNRRTRQDEPALFVALTFERREVLDSSNIKPMNLIGVDRGENIPAVIALTDPEGCPLSRFKDSLGNPTHILRIGESYKEKQRTIQAKKEVEQRRAGGYSRKYASKAKNLADDMVRNTARDLLYYAVTQDAMLIFENLSRGFGRQGKRTFMAERQYTRMEDWLTAKLAYEGLPSKTYLSKTLAQYTSKTCSNCGFTITSADYDRMLEKLKKTATGWMTTINGKELKVEGQITYYNRYKRQNVVKDLSVELDRLSEESVNNDISSWTKGRSGEALSLLKKRFSHRPVQEKFVCLNCGFETHADEQAALNIARSWLFLRSQEYKKYQTNKTTGNTDKRAFVETWQSFYRKKLKEVWKPAV

SEQ ID NO: 38702 - protein, 978 aa, synthetic construct
  REGION 1..978: note = engineered CasX variant
QEIKRINKIRRRLVKDSNTKKAGKTGPMKTLLVRVMTPDLRERLENLRKKPENIPQPISNTSRANLNKLLTDYTEMKKAILHVYWEEFQKDPVGLMSRVAQPASKKIDQNKLKPEMDEKGNLTTAGFACSQCGQPLFVYKLEQVSEKGKAYTNYVGRCNVAEHEKLILLAQLKPEKDSDEAVTYSLGKFGQRALDFYSIHVTKESTHPVKPLAQIAGNRYASVPVGKALSDACMGTIASFLSKYQDIIIEHQKVVKGNQKRLESLRELAGKENLEYPSVTLPPQPHTKEGVDAYNEVIARVRMWVNLNLWQKLKLSRDDAKPLLRLKGFPSFPLVERQANEVDWWDMVCNVKKLINEKKEDGKVFWQNLAGYKRQEALRPYLSSEEDRKKGKKFARYQLGDLLLHLEKKHGEDWGKVYDEAWERIDKKVEGLSKHIKLEEERRSEDAQSKAALTDWLRAKASFVIEGLKEADKDEFCRCELKLQKWYGDLRGKPFAIEAENSILDISGFSKQYNCAFIWQKDGVKKLNLYLIINYFKGGKLRFKKIKPEAFEANRFYTVINKKSGEIVPMEVNFNFDDPNLIILPLAFGKRQGREFIWNDLLSLETGSLKLANGRVIEKTLYNRRTRQDEPALFVALTFERREVLDSSNIKPMNLIGVDRGENIPAVIALTDPEGCPLSRFKDSLGNPTHILRIGESYKEKQRTIQAKKEVEQRRAGGYSRKYASKAKNLADDMVRNTARDLLYYAVTQDAMLIFENLSRGFGRQGKRTFMAERQYTRMEDWLTAKLAYEGLPSKTYLSKTLAQYTSKTCSNCGFTITSADYDRMLEKLKKTATGWMTTINGKELKVEGQITYYNRYKRQNVVKDLSVELDRLSEESVNNDISSWTKGRSGEALSLLKKRFSHRPVQEKFVCLNCGFETHADEQAALNIARSWLFLRSQEYKKYQTNKTTGNTDKRAFVETWQSFYRKKLKEVWKPAV

SEQ ID NO: 38703 - protein, 978 aa, synthetic construct
  REGION 1..978: note = engineered CasX variant
QEIKRINKIRRRLVKDSNTKKAGKTGPMKTLLVRVMTPDLRERLENLRKKPENIPQPISNTSRANLNKLLTDYTEMKKAILHVYWEEFQKDPVGLMSRVAQPASKKIDQNKLKPEMDEKGNLTTAGFACSQCGQPLFVYKLEQVSEKGKAYTNYVGRCNVAEHEKLIKLAQLKPEKDSDEAVTYSLGKFGQRALDFYSIHVTKESTHPVKPLAQIAGNRYASGPVGKALSDACMGTIASFLSKYQDIIIEHQKVVKGNQKRLESLRELAGKENLEYPSVTLPPQPHTKEGVDAYNEVIARVRMWVNLNLWQKLKLSRDDAKPLLRLKGFPSFPLVERQANEVDWWDMVCNVKKLINEKKEDGKVFWQNLAGYKRQEALRPYLSSEEDRKKGKKFARYQLGDLLLHLEKKHGEDWGKVYDEAWERIDKKVEGLSKHIKLEEERRSEDAQSKAALTDWLRAKASFVIEGLKEADKDEFCRCELKLQKWYGDLRGKPFAIEAENSILDISGFSKQYNCAFIWQKDGVKKLNLYLIINYFKGGKLRFKKIKPEAFEANRFYTVINKKSGEIVPMEVNFNFDDPNLIILPLAFGKRQGREFIWNDLLSLETGSLKLANGRVIEKTLYNRRTRQDEPALFVALTFERREVLDSSNIKPMNLIGVDRGENIPAVIALTDPEGCPLSRFKDSLGNPTHILRIGESYKEKQRTIQAKKEVEQRRAGGYSRKYASKAKNLADDMVRNTARDLLYYAVTQDAMLIFENLSRGFGRQGKRTFMAERQYTRMEDWLTAKLAYEGLPSKTYLSKTLAQYTSKTCSNCGFTITSADYDRMLEKLKKTATGWMTTINGKELKVEGQITYYNRYKRQNVVKDLSVELDRLSEESVNNDISSWTKGRSGEALSLLKKRFSHRPVQEKFVCLNCGFETHADEQAALNIARSWLFLRSQEYKKYQTNKTTGNTDKRAFVETWQSFYRKKLKEVWKPAV

SEQ ID NO: 38704 - protein, 977 aa, synthetic construct
  REGION 1..977: note = engineered CasX variant
QEIKRINKIRRRLVKDSNTKKAGKTGPMKTLLVRVMTPDLRERLENLRKKPENIPQPISNTSRANLNKLLTDYTEMKKAILHVYWEEFQKDPVGLMSRVAQPASKKIDQNKLKPEMDEKGNLTTAGFACSQCGQPLFVYKLEQVSEKGKAYTNYVGRCNVAEHEKLILLAQLKPEKDSDEAVTYSLGKFGQRALDFYSIHVTKESTHPVKPLAQIAGNRYASPVGKALSDACMGTIASFLSKYQDIIIEHQKVVKGNQKRLESLRELAGKENLEYPSVTLPPQPHTKEGVDAYNEVIARVRMWVNLNLWQKLKLSRDDAKPLLRLKGFPSFPLVERQANEVDWWDMVCNVKKLINEKKEDGKVFWQNLAGYKRQEALRPYLSSEEDRKKGKKFARYQLGDLLLHLEKKHGEDWGKVYDEAWERIDKKVEGLSKHIKLEEERRSEDAQSKAALTDWLRAKASFVIEGLKEADKDEFCRCELKLQKWYGDLRGKPFAIEAENSILDISGFSKQYNCAFIWQKDGVKKLNLYLIINYFKGGKLRFKKIKPEAFEANRFYTVINKKSGEIVPMEVNFNFDDPNLIILPLAFGKRQGREFIWNDLLSLETGSLKLANGRVIEKTLYNRRTRQDEPALFVALTFERREVLDSSNIKPMNLIGVDRGENIPAVIALTDPEGCPLSRFKDSLGNPTHILRIGESYKEKQRTIQAKKEVEQRRAGGYSRKYASKAKNLADDMVRNTARDLLYYAVTQDAMLIFENLSRGFGRQGKRTFMAERQYTRMEDWLTAKLAYEGLPSKTYLSKTLAQYTSKTCSNCGFTITSADYDRMLEKLKKTATGWMTTINGKELKVEGQITYYNRYKRQNVVKDLSVELDRLSEESVNNDISSWTKGRSGEALSLLKKRFSHRPVQEKFVCLNCGFETHADEQAALNIARSWLFLRSQEYKKYQTNKTTGNTDKRAFVETWQSFYRKKLKEVWKPAV

SEQ ID NO: 38705 - protein, 978 aa, synthetic construct
  REGION 1..978: note = engineered CasX variant
QEIKRINKIRRRLVKDSNTKKAGKTGPMKTLLVRVMTPDLRERLENLRKKPENIPQPISNTSRANLNKLLTDYTEMKKAILHVYWEEFQKDPVGLMSRVAQPASKKIDQNKLKPEMDEKGNLTTAGFACSQCGQPLFVYKLEQVSEKGKAYTNYVGRCNVAEHEKLILLAQLKPEKDSDEAVTYSLGKFGQRALDFYSIHVTKESTHPVKPLAQIAGNRYASYPVGKALSDACMGTIASFLSKYQDIIIEHQKVVKGNQKRLESLRELAGKENLEYPSVTLPPQPHTKEGVDAYNEVIARVRMWVNLNLWQKLKLSRDDAKPLLRLKGFPSFPLVERQANEVDWWDMVCNVKKLINEKKEDGKVFWQNLAGYKRQEALRPYLSSEEDRKKGKKFARYQLGDLLLHLEKKHGEDWGKVYDEAWERIDKKVEGLSKHIKLEEERRSEDAQSKAALTDWLRAKASFVIEGLKEADKDEFCRCELKLQKWYGDLRGKPFAIEAENSILDISGFSKQYNCAFIWQKDGVKKLNLYLIINYFKGGKLRFKKIKPEAFEANRFYTVINKKSGEIVPMEVNFNFDDPNLIILPLAFGKRQGREFIWNDLLSLETGSLKLANGRVIEKTLYNRRTRQDEPALFVALTFERREVLDSSNIKPMNLIGVDRGENIPAVIALTDPEGCPLSRFKDSLGNPTHILRIGESYKEKQRTIQAKKEVEQRRAGGYSRKYASKAKNLADDMVRNTARDLLYYAVTQDAMLIFENLSRGFGRQGKRTFMAERQYTRMEDWLTAKLAYEGLPSKTYLSKTLAQYTSKTCSNCGFTITSADYDRVLEKLKKTATGWMTTINGKELKVEGQITYYNRYKRQNVVKDLSVELDRLSEESVNNDISSWTKGRQGEALSLLKKRFSHRPVQEKFVCLNCGFETHADEQAALNIARSWLFLRSQEYKKYQTNKTTGNTDKRAFVETWQSFYRKKLKEVWKPAV

SEQ ID NO: 38706 - protein, 978 aa, synthetic construct
  REGION 1..978: note = engineered CasX variant
QEIKRINKIRRRLVKDSNTKKAGKTGPMKTLLVRVMTPDLRERLENLRKKPENIPQPISNTSRANLNKLLTDYTEMKKAILHVYWEEFQKDPVGLMSRVAQPASKKIDQNKLKPEMDEKGNLTTAGFACSQCGQPLFVYKLEQVSEKGKAYTNYVGRCNVAEHEKLILLAQLKPEKDSDEAVTYSLGKFGQRALDFYSIHVTKESTHPVKPLAQIAGNRYASHPVGKALSDACMGTIASFLSKYQDIIIEHQKVVKGNQKRLESLRELAGKENLEYPSVTLPPQPHTKEGVDAYNEVIARVRMWVNLNLWQKLKLSRDDAKPLLRLKGFPSFPLVERQANEVDWWDMVCNVKKLINEKKEDGKVFWQNLAGYKRQEALRPYLSSEEDRKKGKKFARYQLGDLLLHLEKKHGEDWGKVYDEAWERIDKKVEGLSKHIKLEEERRSEDAQSKAALTDWLRAKASFVIEGLKEADKDEFCRCELKLQKWYGDLRGKPFAIEAENSILDISGFSKQYNCAFIWQKDGVKKLNLYLIINYFKGGKLRFKKIKPEAFEANRFYTVINKKSGEIVPMEVNFNFDDPNLIILPLAFGKRQGREFIWNDLLSLETGSLKLANGRVIEKTLYNRRTRQDEPALFVALTFERREVLDSSNIKPMNLIGVDRGENIPAVIALTDPEGCPLSRFKDSLGNPTHILRIGESYKEKQRTIQAKKEVEQRRAGGYSRKYASKAKNLADDMVRNTARDLLYYAVTQDAMLIFENLSRGFGRQGKRTFMAERQYTRMEDWLTAKLAYEGLPSKTYLSKTLAQYTSKTCSNCGFTITSADYDRVLEKLKKTATGWMTTINGKELKVEGQITYYNRYKRQNVVKDLSVELDRLSEESVNNDISSWTKGRQGEALSLLKKRFSHRPVQEKFVCLNCGFETHADEQAALNIARSWLFLRSQEYKKYQTNKTTGNTDKRAFVETWQSFYRKKLKEVWKPAV

SEQ ID NO: 38707 - protein, 978 aa, synthetic construct
  REGION 1..978: note = engineered CasX variant
QEIKRINKIRRRLVKDSNTKKAGKTGPMKTLLVRVMTPDLRERLENLRKKPENIPQPISNTSRANLNKLLTDYTEMKKAILHVYWEEFQKDPVGLMSRVAQPASKKIDQNKLKPEMDEKGNLTTAGFACSQCGQPLFVYKLEQVSEKGKAYTNYVGRCNVAEHEKLILLAQLKPEKDSDEAVTYSLGKFGQRALDFYSIHVTKESTHPVKPLAQIAGNRYASSPVGKALSDACMGTIASFLSKYQDIIIEHQKVVKGNQKRLESLRELAGKENLEYPSVTLPPQPHTKEGVDAYNEVIARVRMWVNLNLWQKLKLSRDDAKPLLRLKGFPSFPLVERQANEVDWWDMVCNVKKLINEKKEDGKVFWQNLAGYKRQEALRPYLSSEEDRKKGKKFARYQLGDLLLHLEKKHGEDWGKVYDEAWERIDKKVEGLSKHIKLEEERRSEDAQSKAALTDWLRAKASFVIEGLKEADKDEFCRCELKLQKWYGDLRGKPFAIEAENSILDISGFSKQYNCAFIWQKDGVKKLNLYLIINYFKGGKLRFKKIKPEAFEANRFYTVINKKSGEIVPMEVNFNFDDPNLIILPLAFGKRQGREFIWNDLLSLETGSLKLANGRVIEKTLYNRRTRQDEPALFVALTFERREVLDSSNIKPMNLIGVDRGENIPAVIALTDPEGCPLSRFKDSLGNPTHILRIGESYKEKQRTIQAKKEVEQRRAGGYSRKYASKAKNLADDMVRNTARDLLYYAVTQDAMLIFENLSRGFGRQGKRTFMAERQYTRMEDWLTAKLAYEGLPSKTYLSKTLAQYTSKTCSNCGFTITSADYDRVLEKLKKTATGWMTTINGKELKVEGQITYYNRYKRQNVVKDLSVELDRLSEESVNNDISSWTKGRQGEALSLLKKRFSHRPVQEKFVCLNCGFETHADEQAALNIARSWLFLRSQEYKKYQTNKTTGNTDKRAFVETWQSFYRKKLKEVWKPAV

SEQ ID NO: 38708 - protein, 978 aa, synthetic construct
  REGION 1..978: note = engineered CasX variant
QEIKRINKIRRRLVKDSNTKKAGKTGPMKTLLVRVMTPDLRERLENLRKKPENIPQPISNTSRANLNKLLTDYTEMKKAILHVYWEEFQKDPVGLMSRVAQPASKKIDQNKLKPEMDEKGNLTTAGFACSQCGQPLFVYKLEQVSEKGKAYTNYVGRCNVAEHEKLILLAQLKPEKDSDEAVTYSLGKFGQRALDFYSIHVTKESTHPVKPLAQIAGNRYASTPVGKALSDACMGTIASFLSKYQDIIIEHQKVVKGNQKRLESLRELAGKENLEYPSVTLPPQPHTKEGVDAYNEVIARVRMWVNLNLWQKLKLSRDDAKPLLRLKGFPSFPLVERQANEVDWWDMVCNVKKLINEKKEDGKVFWQNLAGYKRQEALRPYLSSEEDRKKGKKFARYQLGDLLLHLEKKHGEDWGKVYDEAWERIDKKVEGLSKHIKLEEERRSEDAQSKAALTDWLRAKASFVIEGLKEADKDEFCRCELKLQKWYGDLRGKPFAIEAENSILDISGFSKQYNCAFIWQKDGVKKLNLYLIINYFKGGKLRFKKIKPEAFEANRFYTVINKKSGEIVPMEVNFNFDDPNLIILPLAFGKRQGREFIWNDLLSLETGSLKLANGRVIEKTLYNRRTRQDEPALFVALTFERREVLDSSNIKPMNLIGVDRGENIPAVIALTDPEGCPLSRFKDSLGNPTHILRIGESYKEKQRTIQAKKEVEQRRAGGYSRKYASKAKNLADDMVRNTARDLLYYAVTQDAMLIFENLSRGFGRQGKRTFMAERQYTRMEDWLTAKLAYEGLPSKTYLSKTLAQYTSKTCSNCGFTITSADYDRVLEKLKKTATGWMTTINGKELKVEGQITYYNRYKRQNVVKDLSVELDRLSEESVNNDISSWTKGRQGEALSLLKKRFSHRPVQEKFVCLNCGFETHADEQAALNIARSWLFLRSQEYKKYQTNKTTGNTDKRAFVETWQSFYRKKLKEVWKPAV

SEQ ID NO: 38709 - protein, 978 aa, synthetic construct
  REGION 1..978: note = engineered CasX variant
QEIKRINKIRRRLVKDSNTKKAGKTGPMKTLLVRVMTPDLRERLENLRKKPENIPQPISNTSRANLNKLLTDYTEMKKAILHVYWEEFQKDPVGLMSRVAQPASKKIDQNKLKPEMDEKGNLTTAGFACSQCGQPLFVYKLEQVSEKGKAYTNYVGRCNVAEHEKLILLAQLKPEKDSDEAVTYSLGKFGQRALDFYSIHVTKESTHPVKPLAQIAGNRYASAPVGKALSDACMGTIASFLSKYQDIIIEHQKVVKGNQKRLESLRELAGKENLEYPSVTLPPQPHTKEGVDAYNEVIARVRMWVNLNLWQKLKLSRDDAKPLLRLKGFPSFPLVERQANEVDWWDMVCNVKKLINEKKEDGKVFWQNLAGYKRQEALRPYLSSEEDRKKGKKFARYQLGDLLLHLEKKHGEDWGKVYDEAWERIDKKVEGLSKHIKLEEERRSEDAQSKAALTDWLRAKASFVIEGLKEADKDEFCRCELKLQKWYGDLRGKPFAIEAENSILDISGFSKQYNCAFIWQKDGVKKLNLYLIINYFKGGKLRFKKIKPEAFEANRFYTVINKKSGEIVPMEVNFNFDDPNLIILPLAFGKRQGREFIWNDLLSLETGSLKLANGRVIEKTLYNRRTRQDEPALFVALTFERREVLDSSNIKPMNLIGVDRGENIPAVIALTDPEGCPLSRFKDSLGNPTHILRIGESYKEKQRTIQAKKEVEQRRAGGYSRKYASKAKNLADDMVRNTARDLLYYAVTQDAMLIFENLSRGFGRQGKRTFMAERQYTRMEDWLTAKLAYEGLPSKTYLSKTLAQYTSKTCSNCGFTITSADYDRVLEKLKKTATGWMTTINGKELKVEGQITYYNRYKRQNVVKDLSVELDRLSEESVNNDISSWTKGRQGEALSLLKKRFSHRPVQEKFVCLNCGFETHADEQAALNIARSWLFLRSQEYKKYQTNKTTGNTDKRAFVETWQSFYRKKLKEVWKPAV

SEQ ID NO: 38710 - protein, 978 aa, synthetic construct
  REGION 1..978: note = engineered CasX variant
QEIKRINKIRRRLVKDSNTKKAGKTGPMKTLLVRVMTPDLRERLENLRKKPENIPQPISNTSRANLNKLLTDYTEMKKAILHVYWEEFQKDPVGLMSRVAQPASKKIDQNKLKPEMDEKGNLTTAGFACSQCGQPLFVYKLEQVSEKGKAYTNYVGRCNVAEHEKLILLAQLKPEKDSDEAVTYSLGKFGQRALDFYSIHVTKESTHPVKPLAQIAGNRYASVPVGKALSDACMGTIASFLSKYQDIIIEHQKVVKGNQKRLESLRELAGKENLEYPSVTLPPQPHTKEGVDAYNEVIARVRMWVNLNLWQKLKLSRDDAKPLLRLKGFPSFPLVERQANEVDWWDMVCNVKKLINEKKEDGKVFWQNLAGYKRQEALRPYLSSEEDRKKGKKFARYQLGDLLLHLEKKHGEDWGKVYDEAWERIDKKVEGLSKHIKLEEERRSEDAQSKAALTDWLRAKASFVIEGLKEADKDEFCRCELKLQKWYGDLRGKPFAIEAENSILDISGFSKQYNCAFIWQKDGVKKLNLYLIINYFKGGKLRFKKIKPEAFEANRFYTVINKKSGEIVPMEVNFNFDDPNLIILPLAFGKRQGREFIWNDLLSLETGSLKLANGRVIEKTLYNRRTRQDEPALFVALTFERREVLDSSNIKPMNLIGVDRGENIPAVIALTDPEGCPLSRFKDSLGNPTHILRIGESYKEKQRTIQAKKEVEQRRAGGYSRKYASKAKNLADDMVRNTARDLLYYAVTQDAMLIFENLSRGFGRQGKRTFMAERQYTRMEDWLTAKLAYEGLPSKTYLSKTLAQYTSKTCSNCGFTITSADYDRVLEKLKKTATGWMTTINGKELKVEGQITYYNRYKRQNVVKDLSVELDRLSEESVNNDISSWTKGRQGEALSLLKKRFSHRPVQEKFVCLNCGFETHADEQAALNIARSWLFLRSQEYKKYQTNKTTGNTDKRAFVETWQSFYRKKLKEVWKPAV

SEQ ID NO: 38711 - protein, 978 aa, synthetic construct
  REGION 1..978: note = engineered CasX variant
QEIKRINKIRRRLVKDSNTKKAGKTGPMKTLLVRVMTPDLRERLENLRKKPENIPQPISNTSRANLNKLLTDYTEMKKAILHVYWEEFQKDPVGLMSRVAQPASKKIDQNKLKPEMDEKGNLTTAGFACSQCGQPLFVYKLEQVSEKGKAYTNYVGRCNVAEHEKLIKLAQLKPEKDSDEAVTYSLGKFGQRALDFYSIHVTKESTHPVKPLAQIAGNRYASGPVGKALSDACMGTIASFLSKYQDIIIEHQKVVKGNQKRLESLRELAGKENLEYPSVTLPPQPHTKEGVDAYNEVIARVRMWVNLNLWQKLKLSRDDAKPLLRLKGFPSFPLVERQANEVDWWDMVCNVKKLINEKKEDGKVFWQNLAGYKRQEALRPYLSSEEDRKKGKKFARYQLGDLLLHLEKKHGEDWGKVYDEAWERIDKKVEGLSKHIKLEEERRSEDAQSKAALTDWLRAKASFVIEGLKEADKDEFCRCELKLQKWYGDLRGKPFAIEAENSILDISGFSKQYNCAFIWQKDGVKKLNLYLIINYFKGGKLRFKKIKPEAFEANRFYTVINKKSGEIVPMEVNFNFDDPNLIILPLAFGKRQGREFIWNDLLSLETGSLKLANGRVIEKTLYNRRTRQDEPALFVALTFERREVLDSSNIKPMNLIGVDRGENIPAVIALTDPEGCPLSRFKDSLGNPTHILRIGESYKEKQRTIQAKKEVEQRRAGGYSRKYASKAKNLADDMVRNTARDLLYYAVTQDAMLIFENLSRGFGRQGKRTFMAERQYTRMEDWLTAKLAYEGLPSKTYLSKTLAQYTSKTCSNCGFTITSADYDRVLEKLKKTATGWMTTINGKELKVEGQITYYNRYKRQNVVKDLSVELDRLSEESVNNDISSWTKGRQGEALSLLKKRFSHRPVQEKFVCLNCGFETHADEQAALNIARSWLFLRSQEYKKYQTNKTTGNTDKRAFVETWQSFYRKKLKEVWKPAV

SEQ ID NO: 38712 - protein, 977 aa, synthetic construct
  REGION 1..977: note = engineered CasX variant
QEIKRINKIRRRLVKDSNTKKAGKTGPMKTLLVRVMTPDLRERLENLRKKPENIPQPISNTSRANLNKLLTDYTEMKKAILHVYWEEFQKDPVGLMSRVAQPASKKIDQNKLKPEMDEKGNLTTAGFACSQCGQPLFVYKLEQVSEKGKAYTNYVGRCNVAEHEKLILLAQLKPEKDSDEAVTYSLGKFGQRALDFYSIHVTKESTHPVKPLAQIAGNRYASPVGKALSDACMGTIASFLSKYQDIIIEHQKVVKGNQKRLESLRELAGKENLEYPSVTLPPQPHTKEGVDAYNEVIARVRMWVNLNLWQKLKLSRDDAKPLLRLKGFPSFPLVERQANEVDWWDMVCNVKKLINEKKEDGKVFWQNLAGYKRQEALRPYLSSEEDRKKGKKFARYQLGDLLLHLEKKHGEDWGKVYDEAWERIDKKVEGLSKHIKLEEERRSEDAQSKAALTDWLRAKASFVIEGLKEADKDEFCRCELKLQKWYGDLRGKPFAIEAENSILDISGFSKQYNCAFIWQKDGVKKLNLYLIINYFKGGKLRFKKIKPEAFEANRFYTVINKKSGEIVPMEVNFNFDDPNLIILPLAFGKRQGREFIWNDLLSLETGSLKLANGRVIEKTLYNRRTRQDEPALFVALTFERREVLDSSNIKPMNLIGVDRGENIPAVIALTDPEGCPLSRFKDSLGNPTHILRIGESYKEKQRTIQAKKEVEQRRAGGYSRKYASKAKNLADDMVRNTARDLLYYAVTQDAMLIFENLSRGFGRQGKRTFMAERQYTRMEDWLTAKLAYEGLPSKTYLSKTLAQYTSKTCSNCGFTITSADYDRVLEKLKKTATGWMTTINGKELKVEGQITYYNRYKRQNVVKDLSVELDRLSEESVNNDISSWTKGRQGEALSLLKKRFSHRPVQEKFVCLNCGFETHADEQAALNIARSWLFLRSQEYKKYQTNKTTGNTDKRAFVETWQSFYRKKLKEVWKPAV

SEQ ID NO: 38713 - protein, 978 aa, synthetic construct
  REGION 1..978: note = engineered CasX variant
QEIKRINKIRRRLVKDSNTKKAGKTGPMKTLLVRVMTPDLRERLENLRKKPENIPQPISNTSRANLNKLLTDYTEMKKAILHVYWEEFQKDPVGLMSRVAQPASKKIDQNKLKPEMDEKGNLTTAGFACSQCGQPLFVYKLEQVSEKGKAYTNYVGRCNVAEHEKLILLAQLKPEKDSDEAVTYSLGKFGQRALDFYSIHVTKESTHPVKPLAQIAGNRYASYPVGKALSDACMGTIASFLSKYQDIIIEHQKVVKGNQKRLESLRELAGKENLEYPSVTLPPQPHTKEGVDAYNEVIARVRMWVNLNLWQKLKLSRDDAKPLLRLKGFPSFPLVERQANEVDWWDMVCNVKKLINEKKEDGKVFWQNLAGYKRQEALRPYLSSEEDRKKGKKFARYQLGDLLLHLEKKHGEDWGKVYDEAWERIDKKVEGLSKHIKLEEERRSEDAQSKAALTDWLRAKASFVIEGLKEADKDEFCRCELKLQKWYGDLRGKPFAIEAENSILDISGFSKQYNCAFIWQKDGVKKLNLYLIINYFKGGKLRFKKIKPEAFEANRFYTVINKKSGEIVPMEVNFNFDDPNLIILPLAFGKRQGREFIWNDLLSLETGSLKLANGRVIEKTLYNRRTRQDEPALFVALTFERREVLDSSNIKPMNLIGVDRGENIPAVIALTDPEGCPLSRFKDSLGNPTHILRIGESYKEKQRTIQAKKEVEQRRAGGYSRKYASKAKNLADDMVRNTARDLLYYAVTQDAMLIFENLSRGFGRQGKRTFMAERQYTRMEDWLTAKLAYEGLPSKTYLSKTLAQYTSKTCSNCGFTITSADYDRVLEKLKKTATGWMTTINGKELKVEGQITYYNRYKRQNVVKDLSVELDRLSEESVNNDISSWTKGRSGEALSLLKKRFSHRPVQEKFVCLNCEFETHADEQAALNIARSWLFLRSQEYKKYQTNKTTGNTDKRAFVETWQSFYRKKLKEVWKPAV

SEQ ID NO: 38714 - protein, 978 aa, synthetic construct
  REGION 1..978: note = engineered CasX variant
QEIKRINKIRRRLVKDSNTKKAGKTGPMKTLLVRVMTPDLRERLENLRKKPENIPQPISNTSRANLNKLLTDYTEMKKAILHVYWEEFQKDPVGLMSRVAQPASKKIDQNKLKPEMDEKGNLTTAGFACSQCGQPLFVYKLEQVSEKGKAYTNYVGRCNVAEHEKLILLAQLKPEKDSDEAVTYSLGKFGQRALDFYSIHVTKESTHPVKPLAQIAGNRYASHPVGKALSDACMGTIASFLSKYQDIIIEHQKVVKGNQKRLESLRELAGKENLEYPSVTLPPQPHTKEGVDAYNEVIARVRMWVNLNLWQKLKLSRDDAKPLLRLKGFPSFPLVERQANEVDWWDMVCNVKKLINEKKEDGKVFWQNLAGYKRQEALRPYLSSEEDRKKGKKFARYQLGDLLLHLEKKHGEDWGKVYDEAWERIDKKVEGLSKHIKLEEERRSEDAQSKAALTDWLRAKASFVIEGLKEADKDEFCRCELKLQKWYGDLRGKPFAIEAENSILDISGFSKQYNCAFIWQKDGVKKLNLYLIINYFKGGKLRFKKIKPEAFEANRFYTVINKKSGEIVPMEVNFNFDDPNLIILPLAFGKRQGREFIWNDLLSLETGSLKLANGRVIEKTLYNRRTRQDEPALFVALTFERREVLDSSNIKPMNLIGVDRGENIPAVIALTDPEGCPLSRFKDSLGNPTHILRIGESYKEKQRTIQAKKEVEQRRAGGYSRKYASKAKNLADDMVRNTARDLLYYAVTQDAMLIFENLSRGFGRQGKRTFMAERQYTRMEDWLTAKLAYEGLPSKTYLSKTLAQYTSKTCSNCGFTITSADYDRVLEKLKKTATGWMTTINGKELKVEGQITYYNRYKRQNVVKDLSVELDRLSEESVNNDISSWTKGRSGEALSLLKKRFSHRPVQEKFVCLNCEFETHADEQAALNIARSWLFLRSQEYKKYQTNKTTGNTDKRAFVETWQSFYRKKLKEVWKPAV

SEQ ID NO: 38715 - protein, 978 aa, synthetic construct
  REGION 1..978: note = engineered CasX variant
QEIKRINKIRRRLVKDSNTKKAGKTGPMKTLLVRVMTPDLRERLENLRKKPENIPQPISNTSRANLNKLLTDYTEMKKAILHVYWEEFQKDPVGLMSRVAQPASKKIDQNKLKPEMDEKGNLTTAGFACSQCGQPLFVYKLEQVSEKGKAYTNYVGRCNVAEHEKLILLAQLKPEKDSDEAVTYSLGKFGQRALDFYSIHVTKESTHPVKPLAQIAGNRYASSPVGKALSDACMGTIASFLSKYQDIIIEHQKVVKGNQKRLESLRELAGKENLEYPSVTLPPQPHTKEGVDAYNEVIARVRMWVNLNLWQKLKLSRDDAKPLLRLKGFPSFPLVERQANEVDWWDMVCNVKKLINEKKEDGKVFWQNLAGYKRQEALRPYLSSEEDRKKGKKFARYQLGDLLLHLEKKHGEDWGKVYDEAWERIDKKVEGLSKHIKLEEERRSEDAQSKAALTDWLRAKASFVIEGLKEADKDEFCRCELKLQKWYGDLRGKPFAIEAENSILDISGFSKQYNCAFIWQKDGVKKLNLYLIINYFKGGKLRFKKIKPEAFEANRFYTVINKKSGEIVPMEVNFNFDDPNLIILPLAFGKRQGREFIWNDLLSLETGSLKLANGRVIEKTLYNRRTRQDEPALFVALTFERREVLDSSNIKPMNLIGVDRGENIPAVIALTDPEGCPLSRFKDSLGNPTHILRIGESYKEKQRTIQAKKEVEQRRAGGYSRKYASKAKNLADDMVRNTARDLLYYAVTQDAMLIFENLSRGFGRQGKRTFMAERQYTRMEDWLTAKLAYEGLPSKTYLSKTLAQYTSKTCSNCGFTITSADYDRVLEKLKKTATGWMTTINGKELKVEGQITYYNRYKRQNVVKDLSVELDRLSEESVNNDISSWTKGRSGEALSLLKKRFSHRPVQEKFVCLNCEFETHADEQAALNIARSWLFLRSQEYKKYQTNKTTGNTDKRAFVETWQSFYRKKLKEVWKPAV

SEQ ID NO: 38716 - protein, 978 aa, synthetic construct
  REGION 1..978: note = engineered CasX variant
QEIKRINKIRRRLVKDSNTKKAGKTGPMKTLLVRVMTPDLRERLENLRKKPENIPQPISNTSRANLNKLLTDYTEMKKAILHVYWEEFQKDPVGLMSRVAQPASKKIDQNKLKPEMDEKGNLTTAGFACSQCGQPLFVYKLEQVSEKGKAYTNYVGRCNVAEHEKLILLAQLKPEKDSDEAVTYSLGKFGQRALDFYSIHVTKESTHPVKPLAQIAGNRYASTPVGKALSDACMGTIASFLSKYQDIIIEHQKVVKGNQKRLESLRELAGKENLEYPSVTLPPQPHTKEGVDAYNEVIARVRMWVNLNLWQKLKLSRDDAKPLLRLKGFPSFPLVERQANEVDWWDMVCNVKKLINEKKEDGKVFWQNLAGYKRQEALRPYLSSEEDRKKGKKFARYQLGDLLLHLEKKHGEDWGKVYDEAWERIDKKVEGLSKHIKLEEERRSEDAQSKAALTDWLRAKASFVIEGLKEADKDEFCRCELKLQKWYGDLRGKPFAIEAENSILDISGFSKQYNCAFIWQKDGVKKLNLYLIINYFKGGKLRFKKIKPEAFEANRFYTVINKKSGEIVPMEVNFNFDDPNLIILPLAFGKRQGREFIWNDLLSLETGSLKLANGRVIEKTLYNRRTRQDEPALFVALTFERREVLDSSNIKPMNLIGVDRGENIPAVIALTDPEGCPLSRFKDSLGNPTHILRIGESYKEKQRTIQAKKEVEQRRAGGYSRKYASKAKNLADDMVRNTARDLLYYAVTQDAMLIFENLSRGFGRQGKRTFMAERQYTRMEDWLTAKLAYEGLPSKTYLSKTLAQYTSKTCSNCGFTITSADYDRVLEKLKKTATGWMTTINGKELKVEGQITYYNRYKRQNVVKDLSVELDRLSEESVNNDISSWTKGRSGEALSLLKKRFSHRPVQEKFVCLNCEFETHADEQAALNIARSWLFLRSQEYKKYQTNKTTGNTDKRAFVETWQSFYRKKLKEVWKPAV

SEQ ID NO: 38717 - protein, 978 aa, synthetic construct
  REGION 1..978: note = engineered CasX variant
QEIKRINKIRRRLVKDSNTKKAGKTGPMKTLLVRVMTPDLRERLENLRKKPENIPQPISNTSRANLNKLLTDYTEMKKAILHVYWEEFQKDPVGLMSRVAQPASKKIDQNKLKPEMDEKGNLTTAGFACSQCGQPLFVYKLEQVSEKGKAYTNYVGRCNVAEHEKLILLAQLKPEKDSDEAVTYSLGKFGQRALDFYSIHVTKESTHPVKPLAQIAGNRYASAPVGKALSDACMGTIASFLSKYQDIIIEHQKVVKGNQKRLESLRELAGKENLEYPSVTLPPQPHTKEGVDAYNEVIARVRMWVNLNLWQKLKLSRDDAKPLLRLKGFPSFPLVERQANEVDWWDMVCNVKKLINEKKEDGKVFWQNLAGYKRQEALRPYLSSEEDRKKGKKFARYQLGDLLLHLEKKHGEDWGKVYDEAWERIDKKVEGLSKHIKLEEERRSEDAQSKAALTDWLRAKASFVIEGLKEADKDEFCRCELKLQKWYGDLRGKPFAIEAENSILDISGFSKQYNCAFIWQKDGVKKLNLYLIINYFKGGKLRFKKIKPEAFEANRFYTVINKKSGEIVPMEVNFNFDDPNLIILPLAFGKRQGREFIWNDLLSLETGSLKLANGRVIEKTLYNRRTRQDEPALFVALTFERREVLDSSNIKPMNLIGVDRGENIPAVIALTDPEGCPLSRFKDSLGNPTHILRIGESYKEKQRTIQAKKEVEQRRAGGYSRKYASKAKNLADDMVRNTARDLLYYAVTQDAMLIFENLSRGFGRQGKRTFMAERQYTRMEDWLTAKLAYEGLPSKTYLSKTLAQYTSKTCSNCGFTITSADYDRVLEKLKKTATGWMTTINGKELKVEGQITYYNRYKRQNVVKDLSVELDRLSEESVNNDISSWTKGRSGEALSLLKKRFSHRPVQEKFVCLNCEFETHADEQAALNIARSWLFLRSQEYKKYQTNKTTGNTDKRAFVETWQSFYRKKLKEVWKPAV

SEQ ID NO: 38718 - protein, 978 aa, synthetic construct
  REGION 1..978: note = engineered CasX variant
QEIKRINKIRRRLVKDSNTKKAGKTGPMKTLLVRVMTPDLRERLENLRKKPENIPQPISNTSRANLNKLLTDYTEMKKAILHVYWEEFQKDPVGLMSRVAQPASKKIDQNKLKPEMDEKGNLTTAGFACSQCGQPLFVYKLEQVSEKGKAYTNYVGRCNVAEHEKLILLAQLKPEKDSDEAVTYSLGKFGQRALDFYSIHVTKESTHPVKPLAQIAGNRYASVPVGKALSDACMGTIASFLSKYQDIIIEHQKVVKGNQKRLESLRELAGKENLEYPSVTLPPQPHTKEGVDAYNEVIARVRMWVNLNLWQKLKLSRDDAKPLLRLKGFPSFPLVERQANEVDWWDMVCNVKKLINEKKEDGKVFWQNLAGYKRQEALRPYLSSEEDRKKGKKFARYQLGDLLLHLEKKHGEDWGKVYDEAWERIDKKVEGLSKHIKLEEERRSEDAQSKAALTDWLRAKASFVIEGLKEADKDEFCRCELKLQKWYGDLRGKPFAIEAENSILDISGFSKQYNCAFIWQKDGVKKLNLYLIINYFKGGKLRFKKIKPEAFEANRFYTVINKKSGEIVPMEVNFNFDDPNLIILPLAFGKRQGREFIWNDLLSLETGSLKLANGRVIEKTLYNRRTRQDEPALFVALTFERREVLDSSNIKPMNLIGVDRGENIPAVIALTDPEGCPLSRFKDSLGNPTHILRIGESYKEKQRTIQAKKEVEQRRAGGYSRKYASKAKNLADDMVRNTARDLLYYAVTQDAMLIFENLSRGFGRQGKRTFMAERQYTRMEDWLTAKLAYEGLPSKTYLSKTLAQYTSKTCSNCGFTITSADYDRVLEKLKKTATGWMTTINGKELKVEGQITYYNRYKRQNVVKDLSVELDRLSEESVNNDISSWTKGRSGEALSLLKKRFSHRPVQEKFVCLNCEFETHADEQAALNIARSWLFLRSQEYKKYQTNKTTGNTDKRAFVETWQSFYRKKLKEVWKPAV

SEQ ID NO: 38719 - protein, 978 aa, synthetic construct
  REGION 1..978: note = engineered CasX variant
QEIKRINKIRRRLVKDSNTKKAGKTGPMKTLLVRVMTPDLRERLENLRKKPENIPQPISNTSRANLNKLLTDYTEMKKAILHVYWEEFQKDPVGLMSRVAQPASKKIDQNKLKPEMDEKGNLTTAGFACSQCGQPLFVYKLEQVSEKGKAYTNYVGRCNVAEHEKLIKLAQLKPEKDSDEAVTYSLGKFGQRALDFYSIHVTKESTHPVKPLAQIAGNRYASGPVGKALSDACMGTIASFLSKYQDIIIEHQKVVKGNQKRLESLRELAGKENLEYPSVTLPPQPHTKEGVDAYNEVIARVRMWVNLNLWQKLKLSRDDAKPLLRLKGFPSFPLVERQANEVDWWDMVCNVKKLINEKKEDGKVFWQNLAGYKRQEALRPYLSSEEDRKKGKKFARYQLGDLLLHLEKKHGEDWGKVYDEAWERIDKKVEGLSKHIKLEEERRSEDAQSKAALTDWLRAKASFVIEGLKEADKDEFCRCELKLQKWYGDLRGKPFAIEAENSILDISGFSKQYNCAFIWQKDGVKKLNLYLIINYFKGGKLRFKKIKPEAFEANRFYTVINKKSGEIVPMEVNFNFDDPNLIILPLAFGKRQGREFIWNDLLSLETGSLKLANGRVIEKTLYNRRTRQDEPALFVALTFERREVLDSSNIKPMNLIGVDRGENIPAVIALTDPEGCPLSRFKDSLGNPTHILRIGESYKEKQRTIQAKKEVEQRRAGGYSRKYASKAKNLADDMVRNTARDLLYYAVTQDAMLIFENLSRGFGRQGKRTFMAERQYTRMEDWLTAKLAYEGLPSKTYLSKTLAQYTSKTCSNCGFTITSADYDRVLEKLKKTATGWMTTINGKELKVEGQITYYNRYKRQNVVKDLSVELDRLSEESVNNDISSWTKGRSGEALSLLKKRFSHRPVQEKFVCLNCEFETHADEQAALNIARSWLFLRSQEYKKYQTNKTTGNTDKRAFVETWQSFYRKKLKEVWKPAV

SEQ ID NO: 38720 - protein, 977 aa, synthetic construct
  REGION 1..977: note = engineered CasX variant
QEIKRINKIRRRLVKDSNTKKAGKTGPMKTLLVRVMTPDLRERLENLRKKPENIPQPISNTSRANLNKLLTDYTEMKKAILHVYWEEFQKDPVGLMSRVAQPASKKIDQNKLKPEMDEKGNLTTAGFACSQCGQPLFVYKLEQVSEKGKAYTNYVGRCNVAEHEKLILLAQLKPEKDSDEAVTYSLGKFGQRALDFYSIHVTKESTHPVKPLAQIAGNRYASPVGKALSDACMGTIASFLSKYQDIIIEHQKVVKGNQKRLESLRELAGKENLEYPSVTLPPQPHTKEGVDAYNEVIARVRMWVNLNLWQKLKLSRDDAKPLLRLKGFPSFPLVERQANEVDWWDMVCNVKKLINEKKEDGKVFWQNLAGYKRQEALRPYLSSEEDRKKGKKFARYQLGDLLLHLEKKHGEDWGKVYDEAWERIDKKVEGLSKHIKLEEERRSEDAQSKAALTDWLRAKASFVIEGLKEADKDEFCRCELKLQKWYGDLRGKPFAIEAENSILDISGFSKQYNCAFIWQKDGVKKLNLYLIINYFKGGKLRFKKIKPEAFEANRFYTVINKKSGEIVPMEVNFNFDDPNLIILPLAFGKRQGREFIWNDLLSLETGSLKLANGRVIEKTLYNRRTRQDEPALFVALTFERREVLDSSNIKPMNLIGVDRGENIPAVIALTDPEGCPLSRFKDSLGNPTHILRIGESYKEKQRTIQAKKEVEQRRAGGYSRKYASKAKNLADDMVRNTARDLLYYAVTQDAMLIFENLSRGFGRQGKRTFMAERQYTRMEDWLTAKLAYEGLPSKTYLSKTLAQYTSKTCSNCGFTITSADYDRVLEKLKKTATGWMTTINGKELKVEGQITYYNRYKRQNVVKDLSVELDRLSEESVNNDISSWTKGRSGEALSLLKKRFSHRPVQEKFVCLNCEFETHADEQAALNIARSWLFLRSQEYKKYQTNKTTGNTDKRAFVETWQSFYRKKLKEVWKPAV

SEQ ID NO: 38721 - protein, 979 aa, synthetic construct
  REGION 1..979: note = engineered CasX variant
QEIKRINKIRRRLVKDSNTKKAGKTGPMKTLLVRVMTPDLRERLENLRKKPENIPQPISNTSRANLNKLLTDYTEMKKAILHVYWEEFQKDPVGLMSRVAQPASKKIDQNKLKPEMDEKGNLTTAGFACSQCGQPLFVYKLEQVSEKGKAYTNYVGRCNVAEHEKLILLAQLKPEKDSDEAVTYSLGKFGQRALDFYSIHVTKESTHPVKPLAQIAGNRYASYPVGKALSDACMGTIASFLSKYQDIIIEHQKVVKGNQKRLESLRELAGKENLEYPSVTLPPQPHTKEGVDAYNEVIARVRMWVNLNLWQKLKLSRDDAKPLLRLKGFPSFPLVERQANEVDWWDMVCNVKKLINEKKEDGKVFWQNLAGYKRQEALRPYLSSEEDRKKGKKFARYQLGDLLLHLEKKHGEDWGKVYDEAWERIDKKVEGLSKHIKLEEERRSEDAQSKAALTDWLRAKASFVIEGLKEADKDEFCRCELKLQKWYGDLRGKPFAIEAENSILDISGFSKQYNCAFIWQKDGVKKLNLYLIINYFKGGKLRFKKIKPEAFEANRFYTVINKKSGEIVPMEVNFNFDDPNLIILPLAFGKRQGREFIWNDLLSLETGSLKLANGRVIEKTLYNRRTRQDEPALFVALTFERREVLDSSNIKPMNLIGVDRGENIPAVIALTDPEGCPLSRFKDSLGNPTHILRIGESYKEKQRTIQAKKEVEQRRAGGYSRKYASKAKNLADDMVRNTARDLLYYAVTQDAMLIFENLSRGFGRQGKRTFMAERQYTRMEDWLTAKLAYEGLPSKTYLSKTLAQYTSKTCSNCGFTITSADYDRVLEKLKKTATGWMTTINGKELKVEGQITYYNRYKRQNVVKDLSVELDRLSEESVNNDISSWTKGRSGEALSLLKKRFSHRPVQEKFVCLNCGFETHADEQAALNIARSWLFLRSQEYKKYQTNKTSTGNTDKRAFVETWQSFYRKKLKEVWKPAV

SEQ ID NO: 38722 - protein, 979 aa, synthetic construct
  REGION 1..979: note = engineered CasX variant
QEIKRINKIRRRLVKDSNTKKAGKTGPMKTLLVRVMTPDLRERLENLRKKPENIPQPISNTSRANLNKLLTDYTEMKKAILHVYWEEFQKDPVGLMSRVAQPASKKIDQNKLKPEMDEKGNLTTAGFACSQCGQPLFVYKLEQVSEKGKAYTNYVGRCNVAEHEKLILLAQLKPEKDSDEAVTYSLGKFGQRALDFYSIHVTKESTHPVKPLAQIAGNRYASHPVGKALSDACMGTIASFLSKYQDIIIEHQKVVKGNQKRLESLRELAGKENLEYPSVTLPPQPHTKEGVDAYNEVIARVRMWVNLNLWQKLKLSRDDAKPLLRLKGFPSFPLVERQANEVDWWDMVCNVKKLINEKKEDGKVFWQNLAGYKRQEALRPYLSSEEDRKKGKKFARYQLGDLLLHLEKKHGEDWGKVYDEAWERIDKKVEGLSKHIKLEEERRSEDAQSKAALTDWLRAKASFVIEGLKEADKDEFCRCELKLQKWYGDLRGKPFAIEAENSILDISGFSKQYNCAFIWQKDGVKKLNLYLIINYFKGGKLRFKKIKPEAFEANRFYTVINKKSGEIVPMEVNFNFDDPNLIILPLAFGKRQGREFIWNDLLSLETGSLKLANGRVIEKTLYNRRTRQDEPALFVALTFERREVLDSSNIKPMNLIGVDRGENIPAVIALTDPEGCPLSRFKDSLGNPTHILRIGESYKEKQRTIQAKKEVEQRRAGGYSRKYASKAKNLADDMVRNTARDLLYYAVTQDAMLIFENLSRGFGRQGKRTFMAERQYTRMEDWLTAKLAYEGLPSKTYLSKTLAQYTSKTCSNCGFTITSADYDRVLEKLKKTATGWMTTINGKELKVEGQITYYNRYKRQNVVKDLSVELDRLSEESVNNDISSWTKGRSGEALSLLKKRFSHRPVQEKFVCLNCGFETHADEQAALNIARSWLFLRSQEYKKYQTNKTSTGNTDKRAFVETWQSFYRKKLKEVWKPAV

SEQ ID NO: 38723 - protein, 979 aa, synthetic construct
  REGION 1..979: note = engineered CasX variant
QEIKRINKIRRRLVKDSNTKKAGKTGPMKTLLVRVMTPDLRERLENLRKKPENIPQPISNTSRANLNKLLTDYTEMKKAILHVYWEEFQKDPVGLMSRVAQPASKKIDQNKLKPEMDEKGNLTTAGFACSQCGQPLFVYKLEQVSEKGKAYTNYVGRCNVAEHEKLILLAQLKPEKDSDEAVTYSLGKFGQRALDFYSIHVTKESTHPVKPLAQIAGNRYASSPVGKALSDACMGTIASFLSKYQDIIIEHQKVVKGNQKRLESLRELAGKENLEYPSVTLPPQPHTKEGVDAYNEVIARVRMWVNLNLWQKLKLSRDDAKPLLRLKGFPSFPLVERQANEVDWWDMVCNVKKLINEKKEDGKVFWQNLAGYKRQEALRPYLSSEEDRKKGKKFARYQLGDLLLHLEKKHGEDWGKVYDEAWERIDKKVEGLSKHIKLEEERRSEDAQSKAALTDWLRAKASFVIEGLKEADKDEFCRCELKLQKWYGDLRGKPFAIEAENSILDISGFSKQYNCAFIWQKDGVKKLNLYLIINYFKGGKLRFKKIKPEAFEANRFYTVINKKSGEIVPMEVNFNFDDPNLIILPLAFGKRQGREFIWNDLLSLETGSLKLANGRVIEKTLYNRRTRQDEPALFVALTFERREVLDSSNIKPMNLIGVDRGENIPAVIALTDPEGCPLSRFKDSLGNPTHILRIGESYKEKQRTIQAKKEVEQRRAGGYSRKYASKAKNLADDMVRNTARDLLYYAVTQDAMLIFENLSRGFGRQGKRTFMAERQYTRMEDWLTAKLAYEGLPSKTYLSKTLAQYTSKTCSNCGFTITSADYDRVLEKLKKTATGWMTTINGKELKVEGQITYYNRYKRQNVVKDLSVELDRLSEESVNNDISSWTKGRSGEALSLLKKRFSHRPVQEKFVCLNCGFETHADEQAALNIARSWLFLRSQEYKKYQTNKTSTGNTDKRAFVETWQSFYRKKLKEVWKPAV

SEQ ID NO: 38724 - protein, 979 aa, synthetic construct
  REGION 1..979: note = engineered CasX variant
QEIKRINKIRRRLVKDSNTKKAGKTGPMKTLLVRVMTPDLRERLENLRKKPENIPQPISNTSRANLNKLLTDYTEMKKAILHVYWEEFQKDPVGLMSRVAQPASKKIDQNKLKPEMDEKGNLTTAGFACSQCGQPLFVYKLEQVSEKGKAYTNYVGRCNVAEHEKLILLAQLKPEKDSDEAVTYSLGKFGQRALDFYSIHVTKESTHPVKPLAQIAGNRYASTPVGKALSDACMGTIASFLSKYQDIIIEHQKVVKGNQKRLESLRELAGKENLEYPSVTLPPQPHTKEGVDAYNEVIARVRMWVNLNLWQKLKLSRDDAKPLLRLKGFPSFPLVERQANEVDWWDMVCNVKKLINEKKEDGKVFWQNLAGYKRQEALRPYLSSEEDRKKGKKFARYQLGDLLLHLEKKHGEDWGKVYDEAWERIDKKVEGLSKHIKLEEERRSEDAQSKAALTDWLRAKASFVIEGLKEADKDEFCRCELKLQKWYGDLRGKPFAIEAENSILDISGFSKQYNCAFIWQKDGVKKLNLYLIINYFKGGKLRFKKIKPEAFEANRFYTVINKKSGEIVPMEVNFNFDDPNLIILPLAFGKRQGREFIWNDLLSLETGSLKLANGRVIEKTLYNRRTRQDEPALFVALTFERREVLDSSNIKPMNLIGVDRGENIPAVIALTDPEGCPLSRFKDSLGNPTHILRIGESYKEKQRTIQAKKEVEQRRAGGYSRKYASKAKNLADDMVRNTARDLLYYAVTQDAMLIFENLSRGFGRQGKRTFMAERQYTRMEDWLTAKLAYEGLPSKTYLSKTLAQYTSKTCSNCGFTITSADYDRVLEKLKKTATGWMTTINGKELKVEGQITYYNRYKRQNVVKDLSVELDRLSEESVNNDISSWTKGRSGEALSLLKKRFSHRPVQEKFVCLNCGFETHADEQAALNIARSWLFLRSQEYKKYQTNKTSTGNTDKRAFVETWQSFYRKKLKEVWKPAV

SEQ ID NO: 38725 - protein, 979 aa, synthetic construct
  REGION 1..979: note = engineered CasX variant
QEIKRINKIRRRLVKDSNTKKAGKTGPMKTLLVRVMTPDLRERLENLRKKPENIPQPISNTSRANLNKLLTDYTEMKKAILHVYWEEFQKDPVGLMSRVAQPASKKIDQNKLKPEMDEKGNLTTAGFACSQCGQPLFVYKLEQVSEKGKAYTNYVGRCNVAEHEKLILLAQLKPEKDSDEAVTYSLGKFGQRALDFYSIHVTKESTHPVKPLAQIAGNRYASAPVGKALSDACMGTIASFLSKYQDIIIEHQKVVKGNQKRLESLRELAGKENLEYPSVTLPPQPHTKEGVDAYNEVIARVRMWVNLNLWQKLKLSRDDAKPLLRLKGFPSFPLVERQANEVDWWDMVCNVKKLINEKKEDGKVFWQNLAGYKRQEALRPYLSSEEDRKKGKKFARYQLGDLLLHLEKKHGEDWGKVYDEAWERIDKKVEGLSKHIKLEEERRSEDAQSKAALTDWLRAKASFVIEGLKEADKDEFCRCELKLQKWYGDLRGKPFAIEAENSILDISGFSKQYNCAFIWQKDGVKKLNLYLIINYFKGGKLRFKKIKPEAFEANRFYTVINKKSGEIVPMEVNFNFDDPNLIILPLAFGKRQGREFIWNDLLSLETGSLKLANGRVIEKTLYNRRTRQDEPALFVALTFERREVLDSSNIKPMNLIGVDRGENIPAVIALTDPEGCPLSRFKDSLGNPTHILRIGESYKEKQRTIQAKKEVEQRRAGGYSRKYASKAKNLADDMVRNTARDLLYYAVTQDAMLIFENLSRGFGRQGKRTFMAERQYTRMEDWLTAKLAYEGLPSKTYLSKTLAQYTSKTCSNCGFTITSADYDRVLEKLKKTATGWMTTINGKELKVEGQITYYNRYKRQNVVKDLSVELDRLSEESVNNDISSWTKGRSGEALSLLKKRFSHRPVQEKFVCLNCGFETHADEQAALNIARSWLFLRSQEYKKYQTNKTSTGNTDKRAFVETWQSFYRKKLKEVWKPAV

SEQ ID NO: 38726 - protein, 979 aa, synthetic construct
  REGION 1..979: note = engineered CasX variant
QEIKRINKIRRRLVKDSNTKKAGKTGPMKTLLVRVMTPDLRERLENLRKKPENIPQPISNTSRANLNKLLTDYTEMKKAILHVYWEEFQKDPVGLMSRVAQPASKKIDQNKLKPEMDEKGNLTTAGFACSQCGQPLFVYKLEQVSEKGKAYTNYVGRCNVAEHEKLILLAQLKPEKDSDEAVTYSLGKFGQRALDFYSIHVTKESTHPVKPLAQIAGNRYASVPVGKALSDACMGTIASFLSKYQDIIIEHQKVVKGNQKRLESLRELAGKENLEYPSVTLPPQPHTKEGVDAYNEVIARVRMWVNLNLWQKLKLSRDDAKPLLRLKGFPSFPLVERQANEVDWWDMVCNVKKLINEKKEDGKVFWQNLAGYKRQEALRPYLSSEEDRKKGKKFARYQLGDLLLHLEKKHGEDWGKVYDEAWERIDKKVEGLSKHIKLEEERRSEDAQSKAALTDWLRAKASFVIEGLKEADKDEFCRCELKLQKWYGDLRGKPFAIEAENSILDISGFSKQYNCAFIWQKDGVKKLNLYLIINYFKGGKLRFKKIKPEAFEANRFYTVINKKSGEIVPMEVNFNFDDPNLIILPLAFGKRQGREFIWNDLLSLETGSLKLANGRVIEKTLYNRRTRQDEPALFVALTFERREVLDSSNIKPMNLIGVDRGENIPAVIALTDPEGCPLSRFKDSLGNPTHILRIGESYKEKQRTIQAKKEVEQRRAGGYSRKYASKAKNLADDMVRNTARDLLYYAVTQDAMLIFENLSRGFGRQGKRTFMAERQYTRMEDWLTAKLAYEGLPSKTYLSKTLAQYTSKTCSNCGFTITSADYDRVLEKLKKTATGWMTTINGKELKVEGQITYYNRYKRQNVVKDLSVELDRLSEESVNNDISSWTKGRSGEALSLLKKRFSHRPVQEKFVCLNCGFETHADEQAALNIARSWLFLRSQEYKKYQTNKTSTGNTDKRAFVETWQSFYRKKLKEVWKPAV

SEQ ID NO: 38727 - protein, 979 aa, synthetic construct
  REGION 1..979: note = engineered CasX variant
QEIKRINKIRRRLVKDSNTKKAGKTGPMKTLLVRVMTPDLRERLENLRKKPENIPQPISNTSRANLNKLLTDYTEMKKAILHVYWEEFQKDPVGLMSRVAQPASKKIDQNKLKPEMDEKGNLTTAGFACSQCGQPLFVYKLEQVSEKGKAYTNYVGRCNVAEHEKLIKLAQLKPEKDSDEAVTYSLGKFGQRALDFYSIHVTKESTHPVKPLAQIAGNRYASGPVGKALSDACMGTIASFLSKYQDIIIEHQKVVKGNQKRLESLRELAGKENLEYPSVTLPPQPHTKEGVDAYNEVIARVRMWVNLNLWQKLKLSRDDAKPLLRLKGFPSFPLVERQANEVDWWDMVCNVKKLINEKKEDGKVFWQNLAGYKRQEALRPYLSSEEDRKKGKKFARYQLGDLLLHLEKKHGEDWGKVYDEAWERIDKKVEGLSKHIKLEEERRSEDAQSKAALTDWLRAKASFVIEGLKEADKDEFCRCELKLQKWYGDLRGKPFAIEAENSILDISGFSKQYNCAFIWQKDGVKKLNLYLIINYFKGGKLRFKKIKPEAFEANRFYTVINKKSGEIVPMEVNFNFDDPNLIILPLAFGKRQGREFIWNDLLSLETGSLKLANGRVIEKTLYNRRTRQDEPALFVALTFERREVLDSSNIKPMNLIGVDRGENIPAVIALTDPEGCPLSRFKDSLGNPTHILRIGESYKEKQRTIQAKKEVEQRRAGGYSRKYASKAKNLADDMVRNTARDLLYYAVTQDAMLIFENLSRGFGRQGKRTFMAERQYTRMEDWLTAKLAYEGLPSKTYLSKTLAQYTSKTCSNCGFTITSADYDRVLEKLKKTATGWMTTINGKELKVEGQITYYNRYKRQNVVKDLSVELDRLSEESVNNDISSWTKGRSGEALSLLKKRFSHRPVQEKFVCLNCGFETHADEQAALNIARSWLFLRSQEYKKYQTNKTSTGNTDKRAFVETWQSFYRKKLKEVWKPAV

SEQ ID NO: 38728 - protein, 978 aa, synthetic construct
  REGION 1..978: note = engineered CasX variant
QEIKRINKIRRRLVKDSNTKKAGKTGPMKTLLVRVMTPDLRERLENLRKKPENIPQPISNTSRANLNKLLTDYTEMKKAILHVYWEEFQKDPVGLMSRVAQPASKKIDQNKLKPEMDEKGNLTTAGFACSQCGQPLFVYKLEQVSEKGKAYTNYVGRCNVAEHEKLILLAQLKPEKDSDEAVTYSLGKFGQRALDFYSIHVTKESTHPVKPLAQIAGNRYASPVGKALSDACMGTIASFLSKYQDIIIEHQKVVKGNQKRLESLRELAGKENLEYPSVTLPPQPHTKEGVDAYNEVIARVRMWVNLNLWQKLKLSRDDAKPLLRLKGFPSFPLVERQANEVDWWDMVCNVKKLINEKKEDGKVFWQNLAGYKRQEALRPYLSSEEDRKKGKKFARYQLGDLLLHLEKKHGEDWGKVYDEAWERIDKKVEGLSKHIKLEEERRSEDAQSKAALTDWLRAKASFVIEGLKEADKDEFCRCELKLQKWYGDLRGKPFAIEAENSILDISGFSKQYNCAFIWQKDGVKKLNLYLIINYFKGGKLRFKKIKPEAFEANRFYTVINKKSGEIVPMEVNFNFDDPNLIILPLAFGKRQGREFIWNDLLSLETGSLKLANGRVIEKTLYNRRTRQDEPALFVALTFERREVLDSSNIKPMNLIGVDRGENIPAVIALTDPEGCPLSRFKDSLGNPTHILRIGESYKEKQRTIQAKKEVEQRRAGGYSRKYASKAKNLADDMVRNTARDLLYYAVTQDAMLIFENLSRGFGRQGKRTFMAERQYTRMEDWLTAKLAYEGLPSKTYLSKTLAQYTSKTCSNCGFTITSADYDRVLEKLKKTATGWMTTINGKELKVEGQITYYNRYKRQNVVKDLSVELDRLSEESVNNDISSWTKGRSGEALSLLKKRFSHRPVQEKFVCLNCGFETHADEQAALNIARSWLFLRSQEYKKYQTNKTSTGNTDKRAFVETWQSFYRKKLKEVWKPAV

SEQ ID NO: 38729 - protein, 979 aa, synthetic construct
  REGION 1..979: note = engineered CasX variant
QEIKRINKIRRRLVKDSNTKKAGKTGPMKTLLVRVMTPDLRERLENLRKKPENIPQPISNTSRANLNKLLTDYTEMKKAILHVYWEEFQKDPVGLMSRVAQPASKKIDQNKLKPEMDEKGNLTTAGFACSQCGQPLFVYKLEQVSEKGKAYTNYVGRCNVAEHEKLILLAQLKPEKDSDEAVTYSLGKFGQRALDFYSIHVTKESTHPVKPLAQIAGNRYASYPVGKALSDACMGTIASFLSKYQDIIIEHQKVVKGNQKRLESLRELAGKENLEYPSVTLPPQPHTKEGVDAYNEVIARVRMWVNLNLWQKLKLSRDDAKPLLRLKGFPSFPLVERQANEVDWWDMVCNVKKLINEKKEDGKVFWQNLAGYKRQEALRPYLSSEEDRKKGKKFARYQLGDLLLHLEKKHGEDWGKVYDEAWERIDKKVEGLSKHIKLEEERRSEDAQSKAALTDWLRAKASFVIEGLKEADKDEFCRCELKLQKWYGDLRGKPFAIEAENSILDISGFSKQYNCAFIWQKDGVKKLNLYLIINYFKGGKLRFKKIKPEAFEANRFYTVINKKSGEIVPMEVNFNFDDPNLIILPLAFGKRQGREFIWNDLLSLETGSLKLANGRVIEKTLYNRRTRQDEPALFVALTFERREVLDSSNIKPMNLIGVDRGENIPAVIALTDPEGCPLSRFKDSLGNPTHILRIGESYKEKQRTIQAKKEVEQRRAGGYSRKYASKAKNLADDMVRNTARDLLYYAVTQDAMLIFENLSRGFGRQGKRTFMAERQYTRMEDWLTAKLAYEGLPSKTYLSKTLAQYTSKTCSNCGFTITSADYDRVLEKLKKTATGWMTTINGKELKVEGQITYYNRYKRQNVVKDLSVELDRLSEESVNNDISSWTKGRSGEALSLLKKRFSHRPVQEKFVCLNCGFETHADEQAALNIARSWLFLRSQEYKKYQTNKTTGKNTDKRAFVETWQSFYRKKLKEVWKPAV

SEQ ID NO: 38730 - protein, 979 aa, synthetic construct
  REGION 1..979: note = engineered CasX variant
QEIKRINKIRRRLVKDSNTKKAGKTGPMKTLLVRVMTPDLRERLENLRKKPENIPQPISNTSRANLNKLLTDYTEMKKAILHVYWEEFQKDPVGLMSRVAQPASKKIDQNKLKPEMDEKGNLTTAGFACSQCGQPLFVYKLEQVSEKGKAYTNYVGRCNVAEHEKLILLAQLKPEKDSDEAVTYSLGKFGQRALDFYSIHVTKESTHPVKPLAQIAGNRYASHPVGKALSDACMGTIASFLSKYQDIIIEHQKVVKGNQKRLESLRELAGKENLEYPSVTLPPQPHTKEGVDAYNEVIARVRMWVNLNLWQKLKLSRDDAKPLLRLKGFPSFPLVERQANEVDWWDMVCNVKKLINEKKEDGKVFWQNLAGYKRQEALRPYLSSEEDRKKGKKFARYQLGDLLLHLEKKHGEDWGKVYDEAWERIDKKVEGLSKHIKLEEERRSEDAQSKAALTDWLRAKASFVIEGLKEADKDEFCRCELKLQKWYGDLRGKPFAIEAENSILDISGFSKQYNCAFIWQKDGVKKLNLYLIINYFKGGKLRFKKIKPEAFEANRFYTVINKKSGEIVPMEVNFNFDDPNLIILPLAFGKRQGREFIWNDLLSLETGSLKLANGRVIEKTLYNRRTRQDEPALFVALTFERREVLDSSNIKPMNLIGVDRGENIPAVIALTDPEGCPLSRFKDSLGNPTHILRIGESYKEKQRTIQAKKEVEQRRAGGYSRKYASKAKNLADDMVRNTARDLLYYAVTQDAMLIFENLSRGFGRQGKRTFMAERQYTRMEDWLTAKLAYEGLPSKTYLSKTLAQYTSKTCSNCGFTITSADYDRVLEKLKKTATGWMTTINGKELKVEGQITYYNRYKRQNVVKDLSVELDRLSEESVNNDISSWTKGRSGEALSLLKKRFSHRPVQEKFVCLNCGFETHADEQAALNIARSWLFLRSQEYKKYQTNKTTGKNTDKRAFVETWQSFYRKKLKEVWKPAV

SEQ ID NO: 38731 - protein, 979 aa, synthetic construct
  REGION 1..979: note = engineered CasX variant
QEIKRINKIRRRLVKDSNTKKAGKTGPMKTLLVRVMTPDLRERLENLRKKPENIPQPISNTSRANLNKLLTDYTEMKKAILHVYWEEFQKDPVGLMSRVAQPASKKIDQNKLKPEMDEKGNLTTAGFACSQCGQPLFVYKLEQVSEKGKAYTNYVGRCNVAEHEKLILLAQLKPEKDSDEAVTYSLGKFGQRALDFYSIHVTKESTHPVKPLAQIAGNRYASSPVGKALSDACMGTIASFLSKYQDIIIEHQKVVKGNQKRLESLRELAGKENLEYPSVTLPPQPHTKEGVDAYNEVIARVRMWVNLNLWQKLKLSRDDAKPLLRLKGFPSFPLVERQANEVDWWDMVCNVKKLINEKKEDGKVFWQNLAGYKRQEALRPYLSSEEDRKKGKKFARYQLGDLLLHLEKKHGEDWGKVYDEAWERIDKKVEGLSKHIKLEEERRSEDAQSKAALTDWLRAKASFVIEGLKEADKDEFCRCELKLQKWYGDLRGKPFAIEAENSILDISGFSKQYNCAFIWQKDGVKKLNLYLIINYFKGGKLRFKKIKPEAFEANRFYTVINKKSGEIVPMEVNFNFDDPNLIILPLAFGKRQGREFIWNDLLSLETGSLKLANGRVIEKTLYNRRTRQDEPALFVALTFERREVLDSSNIKPMNLIGVDRGENIPAVIALTDPEGCPLSRFKDSLGNPTHILRIGESYKEKQRTIQAKKEVEQRRAGGYSRKYASKAKNLADDMVRNTARDLLYYAVTQDAMLIFENLSRGFGRQGKRTFMAERQYTRMEDWLTAKLAYEGLPSKTYLSKTLAQYTSKTCSNCGFTITSADYDRVLEKLKKTATGWMTTINGKELKVEGQITYYNRYKRQNVVKDLSVELDRLSEESVNNDISSWTKGRSGEALSLLKKRFSHRPVQEKFVCLNCGFETHADEQAALNIARSWLFLRSQEYKKYQTNKTTGKNTDKRAFVETWQSFYRKKLKEVWKPAV

SEQ ID NO: 38732 - protein, 979 aa, synthetic construct
  REGION 1..979: note = engineered CasX variant
QEIKRINKIRRRLVKDSNTKKAGKTGPMKTLLVRVMTPDLRERLENLRKKPENIPQPISNTSRANLNKLLTDYTEMKKAILHVYWEEFQKDPVGLMSRVAQPASKKIDQNKLKPEMDEKGNLTTAGFACSQCGQPLFVYKLEQVSEKGKAYTNYVGRCNVAEHEKLILLAQLKPEKDSDEAVTYSLGKFGQRALDFYSIHVTKESTHPVKPLAQIAGNRYASTPVGKALSDACMGTIASFLSKYQDIIIEHQKVVKGNQKRLESLRELAGKENLEYPSVTLPPQPHTKEGVDAYNEVIARVRMWVNLNLWQKLKLSRDDAKPLLRLKGFPSFPLVERQANEVDWWDMVCNVKKLINEKKEDGKVFWQNLAGYKRQEALRPYLSSEEDRKKGKKFARYQLGDLLLHLEKKHGEDWGKVYDEAWERIDKKVEGLSKHIKLEEERRSEDAQSKAALTDWLRAKASFVIEGLKEADKDEFCRCELKLQKWYGDLRGKPFAIEAENSILDISGFSKQYNCAFIWQKDGVKKLNLYLIINYFKGGKLRFKKIKPEAFEANRFYTVINKKSGEIVPMEVNFNFDDPNLIILPLAFGKRQGREFIWNDLLSLETGSLKLANGRVIEKTLYNRRTRQDEPALFVALTFERREVLDSSNIKPMNLIGVDRGENIPAVIALTDPEGCPLSRFKDSLGNPTHILRIGESYKEKQRTIQAKKEVEQRRAGGYSRKYASKAKNLADDMVRNTARDLLYYAVTQDAMLIFENLSRGFGRQGKRTFMAERQYTRMEDWLTAKLAYEGLPSKTYLSKTLAQYTSKTCSNCGFTITSADYDRVLEKLKKTATGWMTTINGKELKVEGQITYYNRYKRQNVVKDLSVELDRLSEESVNNDISSWTKGRSGEALSLLKKRFSHRPVQEKFVCLNCGFETHADEQAALNIARSWLFLRSQEYKKYQTNKTTGKNTDKRAFVETWQSFYRKKLKEVWKPAV

SEQ ID NO: 38733 - protein, 979 aa, synthetic construct
  REGION 1..979: note = engineered CasX variant
QEIKRINKIRRRLVKDSNTKKAGKTGPMKTLLVRVMTPDLRERLENLRKKPENIPQPISNTSRANLNKLLTDYTEMKKAILHVYWEEFQKDPVGLMSRVAQPASKKIDQNKLKPEMDEKGNLTTAGFACSQCGQPLFVYKLEQVSEKGKAYTNYVGRCNVAEHEKLILLAQLKPEKDSDEAVTYSLGKFGQRALDFYSIHVTKESTHPVKPLAQIAGNRYASAPVGKALSDACMGTIASFLSKYQDIIIEHQKVVKGNQKRLESLRELAGKENLEYPSVTLPPQPHTKEGVDAYNEVIARVRMWVNLNLWQKLKLSRDDAKPLLRLKGFPSFPLVERQANEVDWWDMVCNVKKLINEKKEDGKVFWQNLAGYKRQEALRPYLSSEEDRKKGKKFARYQLGDLLLHLEKKHGEDWGKVYDEAWERIDKKVEGLSKHIKLEEERRSEDAQSKAALTDWLRAKASFVIEGLKEADKDEFCRCELKLQKWYGDLRGKPFAIEAENSILDISGFSKQYNCAFIWQKDGVKKLNLYLIINYFKGGKLRFKKIKPEAFEANRFYTVINKKSGEIVPMEVNFNFDDPNLIILPLAFGKRQGREFIWNDLLSLETGSLKLANGRVIEKTLYNRRTRQDEPALFVALTFERREVLDSSNIKPMNLIGVDRGENIPAVIALTDPEGCPLSRFKDSLGNPTHILRIGESYKEKQRTIQAKKEVEQRRAGGYSRKYASKAKNLADDMVRNTARDLLYYAVTQDAMLIFENLSRGFGRQGKRTFMAERQYTRMEDWLTAKLAYEGLPSKTYLSKTLAQYTSKTCSNCGFTITSADYDRVLEKLKKTATGWMTTINGKELKVEGQITYYNRYKRQNVVKDLSVELDRLSEESVNNDISSWTKGRSGEALSLLKKRFSHRPVQEKFVCLNCGFETHADEQAALNIARSWLFLRSQEYKKYQTNKTTGKNTDKRAFVETWQSFYRKKLKEVWKPAV

SEQ ID NO: 38734 - protein, 979 aa, synthetic construct
  REGION 1..979: note = engineered CasX variant
QEIKRINKIRRRLVKDSNTKKAGKTGPMKTLLVRVMTPDLRERLENLRKKPENIPQPISNTSRANLNKLLTDYTEMKKAILHVYWEEFQKDPVGLMSRVAQPASKKIDQNKLKPEMDEKGNLTTAGFACSQCGQPLFVYKLEQVSEKGKAYTNYVGRCNVAEHEKLILLAQLKPEKDSDEAVTYSLGKFGQRALDFYSIHVTKESTHPVKPLAQIAGNRYASVPVGKALSDACMGTIASFLSKYQDIIIEHQKVVKGNQKRLESLRELAGKENLEYPSVTLPPQPHTKEGVDAYNEVIARVRMWVNLNLWQKLKLSRDDAKPLLRLKGFPSFPLVERQANEVDWWDMVCNVKKLINEKKEDGKVFWQNLAGYKRQEALRPYLSSEEDRKKGKKFARYQLGDLLLHLEKKHGEDWGKVYDEAWERIDKKVEGLSKHIKLEEERRSEDAQSKAALTDWLRAKASFVIEGLKEADKDEFCRCELKLQKWYGDLRGKPFAIEAENSILDISGFSKQYNCAFIWQKDGVKKLNLYLIINYFKGGKLRFKKIKPEAFEANRFYTVINKKSGEIVPMEVNFNFDDPNLIILPLAFGKRQGREFIWNDLLSLETGSLKLANGRVIEKTLYNRRTRQDEPALFVALTFERREVLDSSNIKPMNLIGVDRGENIPAVIALTDPEGCPLSRFKDSLGNPTHILRIGESYKEKQRTIQAKKEVEQRRAGGYSRKYASKAKNLADDMVRNTARDLLYYAVTQDAMLIFENLSRGFGRQGKRTFMAERQYTRMEDWLTAKLAYEGLPSKTYLSKTLAQYTSKTCSNCGFTITSADYDRVLEKLKKTATGWMTTINGKELKVEGQITYYNRYKRQNVVKDLSVELDRLSEESVNNDISSWTKGRSGEALSLLKKRFSHRPVQEKFVCLNCGFETHADEQAALNIARSWLFLRSQEYKKYQTNKTTGKNTDKRAFVETWQSFYRKKLKEVWKPAV

SEQ ID NO: 38735 - protein, 979 aa, synthetic construct
  REGION 1..979: note = engineered CasX variant
QEIKRINKIRRRLVKDSNTKKAGKTGPMKTLLVRVMTPDLRERLENLRKKPENIPQPISNTSRANLNKLLTDYTEMKKAILHVYWEEFQKDPVGLMSRVAQPASKKIDQNKLKPEMDEKGNLTTAGFACSQCGQPLFVYKLEQVSEKGKAYTNYVGRCNVAEHEKLIKLAQLKPEKDSDEAVTYSLGKFGQRALDFYSIHVTKESTHPVKPLAQIAGNRYASGPVGKALSDACMGTIASFLSKYQDIIIEHQKVVKGNQKRLESLRELAGKENLEYPSVTLPPQPHTKEGVDAYNEVIARVRMWVNLNLWQKLKLSRDDAKPLLRLKGFPSFPLVERQANEVDWWDMVCNVKKLINEKKEDGKVFWQNLAGYKRQEALRPYLSSEEDRKKGKKFARYQLGDLLLHLEKKHGEDWGKVYDEAWERIDKKVEGLSKHIKLEEERRSEDAQSKAALTDWLRAKASFVIEGLKEADKDEFCRCELKLQKWYGDLRGKPFAIEAENSILDISGFSKQYNCAFIWQKDGVKKLNLYLIINYFKGGKLRFKKIKPEAFEANRFYTVINKKSGEIVPMEVNFNFDDPNLIILPLAFGKRQGREFIWNDLLSLETGSLKLANGRVIEKTLYNRRTRQDEPALFVALTFERREVLDSSNIKPMNLIGVDRGENIPAVIALTDPEGCPLSRFKDSLGNPTHILRIGESYKEKQRTIQAKKEVEQRRAGGYSRKYASKAKNLADDMVRNTARDLLYYAVTQDAMLIFENLSRGFGRQGKRTFMAERQYTRMEDWLTAKLAYEGLPSKTYLSKTLAQYTSKTCSNCGFTITSADYDRVLEKLKKTATGWMTTINGKELKVEGQITYYNRYKRQNVVKDLSVELDRLSEESVNNDISSWTKGRSGEALSLLKKRFSHRPVQEKFVCLNCGFETHADEQAALNIARSWLFLRSQEYKKYQTNKTTGKNTDKRAFVETWQSFYRKKLKEVWKPAV

SEQ ID NO: 38736 - protein, 978 aa, synthetic construct
  REGION 1..978: note = engineered CasX variant
QEIKRINKIRRRLVKDSNTKKAGKTGPMKTLLVRVMTPDLRERLENLRKKPENIPQPISNTSRANLNKLLTDYTEMKKAILHVYWEEFQKDPVGLMSRVAQPASKKIDQNKLKPEMDEKGNLTTAGFACSQCGQPLFVYKLEQVSEKGKAYTNYVGRCNVAEHEKLILLAQLKPEKDSDEAVTYSLGKFGQRALDFYSIHVTKESTHPVKPLAQIAGNRYASPVGKALSDACMGTIASFLSKYQDIIIEHQKVVKGNQKRLESLRELAGKENLEYPSVTLPPQPHTKEGVDAYNEVIARVRMWVNLNLWQKLKLSRDDAKPLLRLKGFPSFPLVERQANEVDWWDMVCNVKKLINEKKEDGKVFWQNLAGYKRQEALRPYLSSEEDRKKGKKFARYQLGDLLLHLEKKHGEDWGKVYDEAWERIDKKVEGLSKHIKLEEERRSEDAQSKAALTDWLRAKASFVIEGLKEADKDEFCRCELKLQKWYGDLRGKPFAIEAENSILDISGFSKQYNCAFIWQKDGVKKLNLYLIINYFKGGKLRFKKIKPEAFEANRFYTVINKKSGEIVPMEVNFNFDDPNLIILPLAFGKRQGREFIWNDLLSLETGSLKLANGRVIEKTLYNRRTRQDEPALFVALTFERREVLDSSNIKPMNLIGVDRGENIPAVIALTDPEGCPLSRFKDSLGNPTHILRIGESYKEKQRTIQAKKEVEQRRAGGYSRKYASKAKNLADDMVRNTARDLLYYAVTQDAMLIFENLSRGFGRQGKRTFMAERQYTRMEDWLTAKLAYEGLPSKTYLSKTLAQYTSKTCSNCGFTITSADYDRVLEKLKKTATGWMTTINGKELKVEGQITYYNRYKRQNVVKDLSVELDRLSEESVNNDISSWTKGRSGEALSLLKKRFSHRPVQEKFVCLNCGFETHADEQAALNIARSWLFLRSQEYKKYQTNKTTGKNTDKRAFVETWQSFYRKKLKEVWKPAV

SEQ ID NO: 38737 - protein, 978 aa, synthetic construct
  REGION 1..978: note = engineered CasX variant
QEIKRINKIRRRLVKDSNTKKAGKTGPMKTLLVRVMTPDLRERLENLRKKPENIPQPISNTSRANLNKLLTDYTEMKKAILHVYWEEFQKDPVGLMSRVAQPASKKIDQNKLKPEMDEKGNLTTAGFACSQCGQPLFVYKLEQVSEKGKAYTNYVGRCNVAEHEKLILLAQLKPEKDSDEAVTYSLGKFGQRALDFYSIHVTKESTHPVKPLAQIAGNRYASYPVGKALSDACMGTIASFLSKYQDIIIEHQKVVKGNQKRLESLRELAGKENLEYPSVTLPPQPHTKEGVDAYNEVIARVRMWVNLNLWQKLKLSRDDAKPLLRLKKFPSFPLVERQANEVDWWDMVCNVKKLINEKKEDGKVFWQNLAGYKRQEALRPYLSSEEDRKKGKKFARYQLGDLLLHLEKKHGEDWGKVYDEAWERIDKKVEGLSKHIKLEEERRSEDAQSKAALTDWLRAKASFVIEGLKEADKDEFCRCELKLQKWYGDLRGKPFAIEAENSILDISGFSKQYNCAFIWQKDGVKKLNLYLIINYFKGGKLRFKKIKPEAFEANRFYTVINKKSGEIVPMEVNFNFDDPNLIILPLAFGKRQGREFIWNDLLSLETGSLKLANGRVIEKTLYNRRTRQDEPALFVALTFERREVLDSSNIKPMNLIGVDRGENIPAVIALTDPEGCPLSRFKDSLGNPTHILRIGESYKEKQRTIQAKKEVEQRRAGGYSRKYASKAKNLADDMVRNTARDLLYYAVTQDAMLIFENLSRGFGRQGKRTFMAERQYTRMEDWLTAKLAYEGLPSKTYLSKTLAQYTSKTCSNCGFTITSADYDRVLEKLKKTATGWMTTINGKELKVEGQITYYNRYKRQNVVKDLSVELDRLSEESVNNDISSWTKGRSGEALSLLKKRFSHRPVQEKFVCLNCGFETHADEQAALNIARSWLFLRSQEYKKYQTNKTTGNTDKRAFVETWQSFYRKKLKEVWKPAV

SEQ ID NO: 38738 - protein, 978 aa, synthetic construct
  REGION 1..978: note = engineered CasX variant
QEIKRINKIRRRLVKDSNTKKAGKTGPMKTLLVRVMTPDLRERLENLRKKPENIPQPISNTSRANLNKLLTDYTEMKKAILHVYWEEFQKDPVGLMSRVAQPASKKIDQNKLKPEMDEKGNLTTAGFACSQCGQPLFVYKLEQVSEKGKAYTNYVGRCNVAEHEKLILLAQLKPEKDSDEAVTYSLGKFGQRALDFYSIHVTKESTHPVKPLAQIAGNRYASHPVGKALSDACMGTIASFLSKYQDIIIEHQKVVKGNQKRLESLRELAGKENLEYPSVTLPPQPHTKEGVDAYNEVIARVRMWVNLNLWQKLKLSRDDAKPLLRLKKFPSFPLVERQANEVDWWDMVCNVKKLINEKKEDGKVFWQNLAGYKRQEALRPYLSSEEDRKKGKKFARYQLGDLLLHLEKKHGEDWGKVYDEAWERIDKKVEGLSKHIKLEEERRSEDAQSKAALTDWLRAKASFVIEGLKEADKDEFCRCELKLQKWYGDLRGKPFAIEAENSILDISGFSKQYNCAFIWQKDGVKKLNLYLIINYFKGGKLRFKKIKPEAFEANRFYTVINKKSGEIVPMEVNFNFDDPNLIILPLAFGKRQGREFIWNDLLSLETGSLKLANGRVIEKTLYNRRTRQDEPALFVALTFERREVLDSSNIKPMNLIGVDRGENIPAVIALTDPEGCPLSRFKDSLGNPTHILRIGESYKEKQRTIQAKKEVEQRRAGGYSRKYASKAKNLADDMVRNTARDLLYYAVTQDAMLIFENLSRGFGRQGKRTFMAERQYTRMEDWLTAKLAYEGLPSKTYLSKTLAQYTSKTCSNCGFTITSADYDRVLEKLKKTATGWMTTINGKELKVEGQITYYNRYKRQNVVKDLSVELDRLSEESVNNDISSWTKGRSGEALSLLKKRFSHRPVQEKFVCLNCGFETHADEQAALNIARSWLFLRSQEYKKYQTNKTTGNTDKRAFVETWQSFYRKKLKEVWKPAV

SEQ ID NO: 38739 - protein, 978 aa, synthetic construct
  REGION 1..978: note = engineered CasX variant
QEIKRINKIRRRLVKDSNTKKAGKTGPMKTLLVRVMTPDLRERLENLRKKPENIPQPISNTSRANLNKLLTDYTEMKKAILHVYWEEFQKDPVGLMSRVAQPASKKIDQNKLKPEMDEKGNLTTAGFACSQCGQPLFVYKLEQVSEKGKAYTNYVGRCNVAEHEKLILLAQLKPEKDSDEAVTYSLGKFGQRALDFYSIHVTKESTHPVKPLAQIAGNRYASSPVGKALSDACMGTIASFLSKYQDIIIEHQKVVKGNQKRLESLRELAGKENLEYPSVTLPPQPHTKEGVDAYNEVIARVRMWVNLNLWQKLKLSRDDAKPLLRLKKFPSFPLVERQANEVDWWDMVCNVKKLINEKKEDGKVFWQNLAGYKRQEALRPYLSSEEDRKKGKKFARYQLGDLLLHLEKKHGEDWGKVYDEAWERIDKKVEGLSKHIKLEEERRSEDAQSKAALTDWLRAKASFVIEGLKEADKDEFCRCELKLQKWYGDLRGKPFAIEAENSILDISGFSKQYNCAFIWQKDGVKKLNLYLIINYFKGGKLRFKKIKPEAFEANRFYTVINKKSGEIVPMEVNFNFDDPNLIILPLAFGKRQGREFIWNDLLSLETGSLKLANGRVIEKTLYNRRTRQDEPALFVALTFERREVLDSSNIKPMNLIGVDRGENIPAVIALTDPEGCPLSRFKDSLGNPTHILRIGESYKEKQRTIQAKKEVEQRRAGGYSRKYASKAKNLADDMVRNTARDLLYYAVTQDAMLIFENLSRGFGRQGKRTFMAERQYTRMEDWLTAKLAYEGLPSKTYLSKTLAQYTSKTCSNCGFTITSADYDRVLEKLKKTATGWMTTINGKELKVEGQITYYNRYKRQNVVKDLSVELDRLSEESVNNDISSWTKGRSGEALSLLKKRFSHRPVQEKFVCLNCGFETHADEQAALNIARSWLFLRSQEYKKYQTNKTTGNTDKRAFVETWQSFYRKKLKEVWKPAV

SEQ ID NO: 38740 - protein, 978 aa, synthetic construct
  REGION 1..978: note = engineered CasX variant
QEIKRINKIRRRLVKDSNTKKAGKTGPMKTLLVRVMTPDLRERLENLRKKPENIPQPISNTSRANLNKLLTDYTEMKKAILHVYWEEFQKDPVGLMSRVAQPASKKIDQNKLKPEMDEKGNLTTAGFACSQCGQPLFVYKLEQVSEKGKAYTNYVGRCNVAEHEKLILLAQLKPEKDSDEAVTYSLGKFGQRALDFYSIHVTKESTHPVKPLAQIAGNRYASTPVGKALSDACMGTIASFLSKYQDIIIEHQKVVKGNQKRLESLRELAGKENLEYPSVTLPPQPHTKEGVDAYNEVIARVRMWVNLNLWQKLKLSRDDAKPLLRLKKFPSFPLVERQANEVDWWDMVCNVKKLINEKKEDGKVFWQNLAGYKRQEALRPYLSSEEDRKKGKKFARYQLGDLLLHLEKKHGEDWGKVYDEAWERIDKKVEGLSKHIKLEEERRSEDAQSKAALTDWLRAKASFVIEGLKEADKDEFCRCELKLQKWYGDLRGKPFAIEAENSILDISGFSKQYNCAFIWQKDGVKKLNLYLIINYFKGGKLRFKKIKPEAFEANRFYTVINKKSGEIVPMEVNFNFDDPNLIILPLAFGKRQGREFIWNDLLSLETGSLKLANGRVIEKTLYNRRTRQDEPALFVALTFERREVLDSSNIKPMNLIGVDRGENIPAVIALTDPEGCPLSRFKDSLGNPTHILRIGESYKEKQRTIQAKKEVEQRRAGGYSRKYASKAKNLADDMVRNTARDLLYYAVTQDAMLIFENLSRGFGRQGKRTFMAERQYTRMEDWLTAKLAYEGLPSKTYLSKTLAQYTSKTCSNCGFTITSADYDRVLEKLKKTATGWMTTINGKELKVEGQITYYNRYKRQNVVKDLSVELDRLSEESVNNDISSWTKGRSGEALSLLKKRFSHRPVQEKFVCLNCGFETHADEQAALNIARSWLFLRSQEYKKYQTNKTTGNTDKRAFVETWQSFYRKKLKEVWKPAV

SEQ ID NO: 38741 - protein, 978 aa, synthetic construct
  REGION 1..978: note = engineered CasX variant
QEIKRINKIRRRLVKDSNTKKAGKTGPMKTLLVRVMTPDLRERLENLRKKPENIPQPISNTSRANLNKLLTDYTEMKKAILHVYWEEFQKDPVGLMSRVAQPASKKIDQNKLKPEMDEKGNLTTAGFACSQCGQPLFVYKLEQVSEKGKAYTNYVGRCNVAEHEKLILLAQLKPEKDSDEAVTYSLGKFGQRALDFYSIHVTKESTHPVKPLAQIAGNRYASAPVGKALSDACMGTIASFLSKYQDIIIEHQKVVKGNQKRLESLRELAGKENLEYPSVTLPPQPHTKEGVDAYNEVIARVRMWVNLNLWQKLKLSRDDAKPLLRLKKFPSFPLVERQANEVDWWDMVCNVKKLINEKKEDGKVFWQNLAGYKRQEALRPYLSSEEDRKKGKKFARYQLGDLLLHLEKKHGEDWGKVYDEAWERIDKKVEGLSKHIKLEEERRSEDAQSKAALTDWLRAKASFVIEGLKEADKDEFCRCELKLQKWYGDLRGKPFAIEAENSILDISGFSKQYNCAFIWQKDGVKKLNLYLIINYFKGGKLRFKKIKPEAFEANRFYTVINKKSGEIVPMEVNFNFDDPNLIILPLAFGKRQGREFIWNDLLSLETGSLKLANGRVIEKTLYNRRTRQDEPALFVALTFERREVLDSSNIKPMNLIGVDRGENIPAVIALTDPEGCPLSRFKDSLGNPTHILRIGESYKEKQRTIQAKKEVEQRRAGGYSRKYASKAKNLADDMVRNTARDLLYYAVTQDAMLIFENLSRGFGRQGKRTFMAERQYTRMEDWLTAKLAYEGLPSKTYLSKTLAQYTSKTCSNCGFTITSADYDRVLEKLKKTATGWMTTINGKELKVEGQITYYNRYKRQNVVKDLSVELDRLSEESVNNDISSWTKGRSGEALSLLKKRFSHRPVQEKFVCLNCGFETHADEQAALNIARSWLFLRSQEYKKYQTNKTTGNTDKRAFVETWQSFYRKKLKEVWKPAV

SEQ ID NO: 38742 - protein, 978 aa, synthetic construct
  REGION 1..978: note = engineered CasX variant
QEIKRINKIRRRLVKDSNTKKAGKTGPMKTLLVRVMTPDLRERLENLRKKPENIPQPISNTSRANLNKLLTDYTEMKKAILHVYWEEFQKDPVGLMSRVAQPASKKIDQNKLKPEMDEKGNLTTAGFACSQCGQPLFVYKLEQVSEKGKAYTNYVGRCNVAEHEKLILLAQLKPEKDSDEAVTYSLGKFGQRALDFYSIHVTKESTHPVKPLAQIAGNRYASVPVGKALSDACMGTIASFLSKYQDIIIEHQKVVKGNQKRLESLRELAGKENLEYPSVTLPPQPHTKEGVDAYNEVIARVRMWVNLNLWQKLKLSRDDAKPLLRLKKFPSFPLVERQANEVDWWDMVCNVKKLINEKKEDGKVFWQNLAGYKRQEALRPYLSSEEDRKKGKKFARYQLGDLLLHLEKKHGEDWGKVYDEAWERIDKKVEGLSKHIKLEEERRSEDAQSKAALTDWLRAKASFVIEGLKEADKDEFCRCELKLQKWYGDLRGKPFAIEAENSILDISGFSKQYNCAFIWQKDGVKKLNLYLIINYFKGGKLRFKKIKPEAFEANRFYTVINKKSGEIVPMEVNFNFDDPNLIILPLAFGKRQGREFIWNDLLSLETGSLKLANGRVIEKTLYNRRTRQDEPALFVALTFERREVLDSSNIKPMNLIGVDRGENIPAVIALTDPEGCPLSRFKDSLGNPTHILRIGESYKEKQRTIQAKKEVEQRRAGGYSRKYASKAKNLADDMVRNTARDLLYYAVTQDAMLIFENLSRGFGRQGKRTFMAERQYTRMEDWLTAKLAYEGLPSKTYLSKTLAQYTSKTCSNCGFTITSADYDRVLEKLKKTATGWMTTINGKELKVEGQITYYNRYKRQNVVKDLSVELDRLSEESVNNDISSWTKGRSGEALSLLKKRFSHRPVQEKFVCLNCGFETHADEQAALNIARSWLFLRSQEYKKYQTNKTTGNTDKRAFVETWQSFYRKKLKEVWKPAV

SEQ ID NO: 38743 - protein, 978 aa, synthetic construct
  REGION 1..978: note = engineered CasX variant
QEIKRINKIRRRLVKDSNTKKAGKTGPMKTLLVRVMTPDLRERLENLRKKPENIPQPISNTSRANLNKLLTDYTEMKKAILHVYWEEFQKDPVGLMSRVAQPASKKIDQNKLKPEMDEKGNLTTAGFACSQCGQPLFVYKLEQVSEKGKAYTNYVGRCNVAEHEKLIKLAQLKPEKDSDEAVTYSLGKFGQRALDFYSIHVTKESTHPVKPLAQIAGNRYASGPVGKALSDACMGTIASFLSKYQDIIIEHQKVVKGNQKRLESLRELAGKENLEYPSVTLPPQPHTKEGVDAYNEVIARVRMWVNLNLWQKLKLSRDDAKPLLRLKKFPSFPLVERQANEVDWWDMVCNVKKLINEKKEDGKVFWQNLAGYKRQEALRPYLSSEEDRKKGKKFARYQLGDLLLHLEKKHGEDWGKVYDEAWERIDKKVEGLSKHIKLEEERRSEDAQSKAALTDWLRAKASFVIEGLKEADKDEFCRCELKLQKWYGDLRGKPFAIEAENSILDISGFSKQYNCAFIWQKDGVKKLNLYLIINYFKGGKLRFKKIKPEAFEANRFYTVINKKSGEIVPMEVNFNFDDPNLIILPLAFGKRQGREFIWNDLLSLETGSLKLANGRVIEKTLYNRRTRQDEPALFVALTFERREVLDSSNIKPMNLIGVDRGENIPAVIALTDPEGCPLSRFKDSLGNPTHILRIGESYKEKQRTIQAKKEVEQRRAGGYSRKYASKAKNLADDMVRNTARDLLYYAVTQDAMLIFENLSRGFGRQGKRTFMAERQYTRMEDWLTAKLAYEGLPSKTYLSKTLAQYTSKTCSNCGFTITSADYDRVLEKLKKTATGWMTTINGKELKVEGQITYYNRYKRQNVVKDLSVELDRLSEESVNNDISSWTKGRSGEALSLLKKRFSHRPVQEKFVCLNCGFETHADEQAALNIARSWLFLRSQEYKKYQTNKTTGNTDKRAFVETWQSFYRKKLKEVWKPAV

SEQ ID NO: 38744 - protein, 977 aa, synthetic construct
  REGION 1..977: note = engineered CasX variant
QEIKRINKIRRRLVKDSNTKKAGKTGPMKTLLVRVMTPDLRERLENLRKKPENIPQPISNTSRANLNKLLTDYTEMKKAILHVYWEEFQKDPVGLMSRVAQPASKKIDQNKLKPEMDEKGNLTTAGFACSQCGQPLFVYKLEQVSEKGKAYTNYVGRCNVAEHEKLILLAQLKPEKDSDEAVTYSLGKFGQRALDFYSIHVTKESTHPVKPLAQIAGNRYASPVGKALSDACMGTIASFLSKYQDIIIEHQKVVKGNQKRLESLRELAGKENLEYPSVTLPPQPHTKEGVDAYNEVIARVRMWVNLNLWQKLKLSRDDAKPLLRLKKFPSFPLVERQANEVDWWDMVCNVKKLINEKKEDGKVFWQNLAGYKRQEALRPYLSSEEDRKKGKKFARYQLGDLLLHLEKKHGEDWGKVYDEAWERIDKKVEGLSKHIKLEEERRSEDAQSKAALTDWLRAKASFVIEGLKEADKDEFCRCELKLQKWYGDLRGKPFAIEAENSILDISGFSKQYNCAFIWQKDGVKKLNLYLIINYFKGGKLRFKKIKPEAFEANRFYTVINKKSGEIVPMEVNFNFDDPNLIILPLAFGKRQGREFIWNDLLSLETGSLKLANGRVIEKTLYNRRTRQDEPALFVALTFERREVLDSSNIKPMNLIGVDRGENIPAVIALTDPEGCPLSRFKDSLGNPTHILRIGESYKEKQRTIQAKKEVEQRRAGGYSRKYASKAKNLADDMVRNTARDLLYYAVTQDAMLIFENLSRGFGRQGKRTFMAERQYTRMEDWLTAKLAYEGLPSKTYLSKTLAQYTSKTCSNCGFTITSADYDRVLEKLKKTATGWMTTINGKELKVEGQITYYNRYKRQNVVKDLSVELDRLSEESVNNDISSWTKGRSGEALSLLKKRFSHRPVQEKFVCLNCGFETHADEQAALNIARSWLFLRSQEYKKYQTNKTTGNTDKRAFVETWQSFYRKKLKEVWKPAV

SEQ ID NO: 38745 - protein, 978 aa, synthetic construct
  REGION 1..978: note = engineered CasX variant
QEIKRINKIRRRLVKDSNTKKAGKTGPMKTLLVRVMTPDLRERLENLRKKPENIPQPISNTSRANLNKLLTDYTEMKKAILHVYWEEFQKDPVGLMSRVAQPASKKIDQNKLKPEMDEKGNLTTAGFACSQCGQPLFVYKLEQVSEKGKAYTNYVGRCNVAEHEKLILLAQLKPEKDSDEAVTYSLGKFGQRALDFYSIHVTKESTHPVKPLAQIAGNRYASYPVGKALSDACMGTIASFLSKYQDIIIEHQKVVKGNQKRLESLRELAGKENLEYPSVTLPPQPHTKEGVDAYNEVIARVRMWVNLNLWQKLKLSRDDAKPLLRLKGFPSFPLVERQANEVDWWDMVCNVKKLINEKKEDGKVFWQNLAGYKRQEALRPYLSSEEDRKKGKKFARYQLGDLLLHLEKKHGEDWGKVYDEAWERIDKKVEGLSKHIKLEEERRSEDAQSKAALTDWLRAKASFVIEGLKEADKDEFCRCELKLQKWYGDLRGKPFAIEAENSILDISGFSKQYNCAFIWQKDGVKKLNLYLIINYFKGGKLRFKKIKPEAFEANRFYTVINKKSGEIVPMEVNFNFDDPNLIILPLAFGKRQGREFIWNDLLSLETGSLKLANGRVIEKTLYNRRTRQDEPALFVALTFERREVLDSSNIKPMNLIGVDRGENIPAVIALTDPEGCPLSRFKDSLGNPTHILRIGERYKEKQRTIQAKKEVEQRRAGGYSRKYASKAKNLADDMVRNTARDLLYYAVTQDAMLIFENLSRGFGRQGKRTFMAERQYTRMEDWLTAKLAYEGLPSKTYLSKTLAQYTSKTCSNCGFTITSADYDRVLEKLKKTATGWMTTINGKELKVEGQITYYNRYKRQNVVKDLSVELDRLSEESVNNDISSWTKGRSGEALSLLKKRFSHRPVQEKFVCLNCGFETHADEQAALNIARSWLFLRSQEYKKYQTNKTTGNTDKRAFVETWQSFYRKKLKEVWKPAV

SEQ ID NO: 38746 - protein, 978 aa, synthetic construct
  REGION 1..978: note = engineered CasX variant
QEIKRINKIRRRLVKDSNTKKAGKTGPMKTLLVRVMTPDLRERLENLRKKPENIPQPISNTSRANLNKLLTDYTEMKKAILHVYWEEFQKDPVGLMSRVAQPASKKIDQNKLKPEMDEKGNLTTAGFACSQCGQPLFVYKLEQVSEKGKAYTNYVGRCNVAEHEKLILLAQLKPEKDSDEAVTYSLGKFGQRALDFYSIHVTKESTHPVKPLAQIAGNRYASHPVGKALSDACMGTIASFLSKYQDIIIEHQKVVKGNQKRLESLRELAGKENLEYPSVTLPPQPHTKEGVDAYNEVIARVRMWVNLNLWQKLKLSRDDAKPLLRLKGFPSFPLVERQANEVDWWDMVCNVKKLINEKKEDGKVFWQNLAGYKRQEALRPYLSSEEDRKKGKKFARYQLGDLLLHLEKKHGEDWGKVYDEAWERIDKKVEGLSKHIKLEEERRSEDAQSKAALTDWLRAKASFVIEGLKEADKDEFCRCELKLQKWYGDLRGKPFAIEAENSILDISGFSKQYNCAFIWQKDGVKKLNLYLIINYFKGGKLRFKKIKPEAFEANRFYTVINKKSGEIVPMEVNFNFDDPNLIILPLAFGKRQGREFIWNDLLSLETGSLKLANGRVIEKTLYNRRTRQDEPALFVALTFERREVLDSSNIKPMNLIGVDRGENIPAVIALTDPEGCPLSRFKDSLGNPTHILRIGERYKEKQRTIQAKKEVEQRRAGGYSRKYASKAKNLADDMVRNTARDLLYYAVTQDAMLIFENLSRGFGRQGKRTFMAERQYTRMEDWLTAKLAYEGLPSKTYLSKTLAQYTSKTCSNCGFTITSADYDRVLEKLKKTATGWMTTINGKELKVEGQITYYNRYKRQNVVKDLSVELDRLSEESVNNDISSWTKGRSGEALSLLKKRFSHRPVQEKFVCLNCGFETHADEQAALNIARSWLFLRSQEYKKYQTNKTTGNTDKRAFVETWQSFYRKKLKEVWKPAV

SEQ ID NO: 38747 - protein, 978 aa, synthetic construct
  REGION 1..978: note = engineered CasX variant
QEIKRINKIRRRLVKDSNTKKAGKTGPMKTLLVRVMTPDLRERLENLRKKPENIPQPISNTSRANLNKLLTDYTEMKKAILHVYWEEFQKDPVGLMSRVAQPASKKIDQNKLKPEMDEKGNLTTAGFACSQCGQPLFVYKLEQVSEKGKAYTNYVGRCNVAEHEKLILLAQLKPEKDSDEAVTYSLGKFGQRALDFYSIHVTKESTHPVKPLAQIAGNRYASSPVGKALSDACMGTIASFLSKYQDIIIEHQKVVKGNQKRLESLRELAGKENLEYPSVTLPPQPHTKEGVDAYNEVIARVRMWVNLNLWQKLKLSRDDAKPLLRLKGFPSFPLVERQANEVDWWDMVCNVKKLINEKKEDGKVFWQNLAGYKRQEALRPYLSSEEDRKKGKKFARYQLGDLLLHLEKKHGEDWGKVYDEAWERIDKKVEGLSKHIKLEEERRSEDAQSKAALTDWLRAKASFVIEGLKEADKDEFCRCELKLQKWYGDLRGKPFAIEAENSILDISGFSKQYNCAFIWQKDGVKKLNLYLIINYFKGGKLRFKKIKPEAFEANRFYTVINKKSGEIVPMEVNFNFDDPNLIILPLAFGKRQGREFIWNDLLSLETGSLKLANGRVIEKTLYNRRTRQDEPALFVALTFERREVLDSSNIKPMNLIGVDRGENIPAVIALTDPEGCPLSRFKDSLGNPTHILRIGERYKEKQRTIQAKKEVEQRRAGGYSRKYASKAKNLADDMVRNTARDLLYYAVTQDAMLIFENLSRGFGRQGKRTFMAERQYTRMEDWLTAKLAYEGLPSKTYLSKTLAQYTSKTCSNCGFTITSADYDRVLEKLKKTATGWMTTINGKELKVEGQITYYNRYKRQNVVKDLSVELDRLSEESVNNDISSWTKGRSGEALSLLKKRFSHRPVQEKFVCLNCGFETHADEQAALNIARSWLFLRSQEYKKYQTNKTTGNTDKRAFVETWQSFYRKKLKEVWKPAV

SEQ ID NO: 38748 - protein, 978 aa, synthetic construct
  REGION 1..978: note = engineered CasX variant
QEIKRINKIRRRLVKDSNTKKAGKTGPMKTLLVRVMTPDLRERLENLRKKPENIPQPISNTSRANLNKLLTDYTEMKKAILHVYWEEFQKDPVGLMSRVAQPASKKIDQNKLKPEMDEKGNLTTAGFACSQCGQPLFVYKLEQVSEKGKAYTNYVGRCNVAEHEKLILLAQLKPEKDSDEAVTYSLGKFGQRALDFYSIHVTKESTHPVKPLAQIAGNRYASTPVGKALSDACMGTIASFLSKYQDIIIEHQKVVKGNQKRLESLRELAGKENLEYPSVTLPPQPHTKEGVDAYNEVIARVRMWVNLNLWQKLKLSRDDAKPLLRLKGFPSFPLVERQANEVDWWDMVCNVKKLINEKKEDGKVFWQNLAGYKRQEALRPYLSSEEDRKKGKKFARYQLGDLLLHLEKKHGEDWGKVYDEAWERIDKKVEGLSKHIKLEEERRSEDAQSKAALTDWLRAKASFVIEGLKEADKDEFCRCELKLQKWYGDLRGKPFAIEAENSILDISGFSKQYNCAFIWQKDGVKKLNLYLIINYFKGGKLRFKKIKPEAFEANRFYTVINKKSGEIVPMEVNFNFDDPNLIILPLAFGKRQGREFIWNDLLSLETGSLKLANGRVIEKTLYNRRTRQDEPALFVALTFERREVLDSSNIKPMNLIGVDRGENIPAVIALTDPEGCPLSRFKDSLGNPTHILRIGERYKEKQRTIQAKKEVEQRRAGGYSRKYASKAKNLADDMVRNTARDLLYYAVTQDAMLIFENLSRGFGRQGKRTFMAERQYTRMEDWLTAKLAYEGLPSKTYLSKTLAQYTSKTCSNCGFTITSADYDRVLEKLKKTATGWMTTINGKELKVEGQITYYNRYKRQNVVKDLSVELDRLSEESVNNDISSWTKGRSGEALSLLKKRFSHRPVQEKFVCLNCGFETHADEQAALNIARSWLFLRSQEYKKYQTNKTTGNTDKRAFVETWQSFYRKKLKEVWKPAV

SEQ ID NO: 38749 - protein, 978 aa, synthetic construct
  REGION 1..978: note = engineered CasX variant
QEIKRINKIRRRLVKDSNTKKAGKTGPMKTLLVRVMTPDLRERLENLRKKPENIPQPISNTSRANLNKLLTDYTEMKKAILHVYWEEFQKDPVGLMSRVAQPASKKIDQNKLKPEMDEKGNLTTAGFACSQCGQPLFVYKLEQVSEKGKAYTNYVGRCNVAEHEKLILLAQLKPEKDSDEAVTYSLGKFGQRALDFYSIHVTKESTHPVKPLAQIAGNRYASAPVGKALSDACMGTIASFLSKYQDIIIEHQKVVKGNQKRLESLRELAGKENLEYPSVTLPPQPHTKEGVDAYNEVIARVRMWVNLNLWQKLKLSRDDAKPLLRLKGFPSFPLVERQANEVDWWDMVCNVKKLINEKKEDGKVFWQNLAGYKRQEALRPYLSSEEDRKKGKKFARYQLGDLLLHLEKKHGEDWGKVYDEAWERIDKKVEGLSKHIKLEEERRSEDAQSKAALTDWLRAKASFVIEGLKEADKDEFCRCELKLQKWYGDLRGKPFAIEAENSILDISGFSKQYNCAFIWQKDGVKKLNLYLIINYFKGGKLRFKKIKPEAFEANRFYTVINKKSGEIVPMEVNFNFDDPNLIILPLAFGKRQGREFIWNDLLSLETGSLKLANGRVIEKTLYNRRTRQDEPALFVALTFERREVLDSSNIKPMNLIGVDRGENIPAVIALTDPEGCPLSRFKDSLGNPTHILRIGERYKEKQRTIQAKKEVEQRRAGGYSRKYASKAKNLADDMVRNTARDLLYYAVTQDAMLIFENLSRGFGRQGKRTFMAERQYTRMEDWLTAKLAYEGLPSKTYLSKTLAQYTSKTCSNCGFTITSADYDRVLEKLKKTATGWMTTINGKELKVEGQITYYNRYKRQNVVKDLSVELDRLSEESVNNDISSWTKGRSGEALSLLKKRFSHRPVQEKFVCLNCGFETHADEQAALNIARSWLFLRSQEYKKYQTNKTTGNTDKRAFVETWQSFYRKKLKEVWKPAV

SEQ ID NO: 38750 - protein, 978 aa, synthetic construct
  REGION 1..978: note = engineered CasX variant
QEIKRINKIRRRLVKDSNTKKAGKTGPMKTLLVRVMTPDLRERLENLRKKPENIPQPISNTSRANLNKLLTDYTEMKKAILHVYWEEFQKDPVGLMSRVAQPASKKIDQNKLKPEMDEKGNLTTAGFACSQCGQPLFVYKLEQVSEKGKAYTNYVGRCNVAEHEKLILLAQLKPEKDSDEAVTYSLGKFGQRALDFYSIHVTKESTHPVKPLAQIAGNRYASVPVGKALSDACMGTIASFLSKYQDIIIEHQKVVKGNQKRLESLRELAGKENLEYPSVTLPPQPHTKEGVDAYNEVIARVRMWVNLNLWQKLKLSRDDAKPLLRLKGFPSFPLVERQANEVDWWDMVCNVKKLINEKKEDGKVFWQNLAGYKRQEALRPYLSSEEDRKKGKKFARYQLGDLLLHLEKKHGEDWGKVYDEAWERIDKKVEGLSKHIKLEEERRSEDAQSKAALTDWLRAKASFVIEGLKEADKDEFCRCELKLQKWYGDLRGKPFAIEAENSILDISGFSKQYNCAFIWQKDGVKKLNLYLIINYFKGGKLRFKKIKPEAFEANRFYTVINKKSGEIVPMEVNFNFDDPNLIILPLAFGKRQGREFIWNDLLSLETGSLKLANGRVIEKTLYNRRTRQDEPALFVALTFERREVLDSSNIKPMNLIGVDRGENIPAVIALTDPEGCPLSRFKDSLGNPTHILRIGERYKEKQRTIQAKKEVEQRRAGGYSRKYASKAKNLADDMVRNTARDLLYYAVTQDAMLIFENLSRGFGRQGKRTFMAERQYTRMEDWLTAKLAYEGLPSKTYLSKTLAQYTSKTCSNCGFTITSADYDRVLEKLKKTATGWMTTINGKELKVEGQITYYNRYKRQNVVKDLSVELDRLSEESVNNDISSWTKGRSGEALSLLKKRFSHRPVQEKFVCLNCGFETHADEQAALNIARSWLFLRSQEYKKYQTNKTTGNTDKRAFVETWQSFYRKKLKEVWKPAV

SEQ ID NO: 38751 - protein, 978 aa, synthetic construct
  REGION 1..978: note = engineered CasX variant
QEIKRINKIRRRLVKDSNTKKAGKTGPMKTLLVRVMTPDLRERLENLRKKPENIPQPISNTSRANLNKLLTDYTEMKKAILHVYWEEFQKDPVGLMSRVAQPASKKIDQNKLKPEMDEKGNLTTAGFACSQCGQPLFVYKLEQVSEKGKAYTNYVGRCNVAEHEKLIKLAQLKPEKDSDEAVTYSLGKFGQRALDFYSIHVTKESTHPVKPLAQIAGNRYASGPVGKALSDACMGTIASFLSKYQDIIIEHQKVVKGNQKRLESLRELAGKENLEYPSVTLPPQPHTKEGVDAYNEVIARVRMWVNLNLWQKLKLSRDDAKPLLRLKGFPSFPLVERQANEVDWWDMVCNVKKLINEKKEDGKVFWQNLAGYKRQEALRPYLSSEEDRKKGKKFARYQLGDLLLHLEKKHGEDWGKVYDEAWERIDKKVEGLSKHIKLEEERRSEDAQSKAALTDWLRAKASFVIEGLKEADKDEFCRCELKLQKWYGDLRGKPFAIEAENSILDISGFSKQYNCAFIWQKDGVKKLNLYLIINYFKGGKLRFKKIKPEAFEANRFYTVINKKSGEIVPMEVNFNFDDPNLIILPLAFGKRQGREFIWNDLLSLETGSLKLANGRVIEKTLYNRRTRQDEPALFVALTFERREVLDSSNIKPMNLIGVDRGENIPAVIALTDPEGCPLSRFKDSLGNPTHILRIGERYKEKQRTIQAKKEVEQRRAGGYSRKYASKAKNLADDMVRNTARDLLYYAVTQDAMLIFENLSRGFGRQGKRTFMAERQYTRMEDWLTAKLAYEGLPSKTYLSKTLAQYTSKTCSNCGFTITSADYDRVLEKLKKTATGWMTTINGKELKVEGQITYYNRYKRQNVVKDLSVELDRLSEESVNNDISSWTKGRSGEALSLLKKRFSHRPVQEKFVCLNCGFETHADEQAALNIARSWLFLRSQEYKKYQTNKTTGNTDKRAFVETWQSFYRKKLKEVWKPAV

SEQ ID NO: 38752 - protein, 977 aa, synthetic construct
  REGION 1..977: note = engineered CasX variant
QEIKRINKIRRRLVKDSNTKKAGKTGPMKTLLVRVMTPDLRERLENLRKKPENIPQPISNTSRANLNKLLTDYTEMKKAILHVYWEEFQKDPVGLMSRVAQPASKKIDQNKLKPEMDEKGNLTTAGFACSQCGQPLFVYKLEQVSEKGKAYTNYVGRCNVAEHEKLILLAQLKPEKDSDEAVTYSLGKFGQRALDFYSIHVTKESTHPVKPLAQIAGNRYASPVGKALSDACMGTIASFLSKYQDIIIEHQKVVKGNQKRLESLRELAGKENLEYPSVTLPPQPHTKEGVDAYNEVIARVRMWVNLNLWQKLKLSRDDAKPLLRLKGFPSFPLVERQANEVDWWDMVCNVKKLINEKKEDGKVFWQNLAGYKRQEALRPYLSSEEDRKKGKKFARYQLGDLLLHLEKKHGEDWGKVYDEAWERIDKKVEGLSKHIKLEEERRSEDAQSKAALTDWLRAKASFVIEGLKEADKDEFCRCELKLQKWYGDLRGKPFAIEAENSILDISGFSKQYNCAFIWQKDGVKKLNLYLIINYFKGGKLRFKKIKPEAFEANRFYTVINKKSGEIVPMEVNFNFDDPNLIILPLAFGKRQGREFIWNDLLSLETGSLKLANGRVIEKTLYNRRTRQDEPALFVALTFERREVLDSSNIKPMNLIGVDRGENIPAVIALTDPEGCPLSRFKDSLGNPTHILRIGERYKEKQRTIQAKKEVEQRRAGGYSRKYASKAKNLADDMVRNTARDLLYYAVTQDAMLIFENLSRGFGRQGKRTFMAERQYTRMEDWLTAKLAYEGLPSKTYLSKTLAQYTSKTCSNCGFTITSADYDRVLEKLKKTATGWMTTINGKELKVEGQITYYNRYKRQNVVKDLSVELDRLSEESVNNDISSWTKGRSGEALSLLKKRFSHRPVQEKFVCLNCGFETHADEQAALNIARSWLFLRSQEYKKYQTNKTTGNTDKRAFVETWQSFYRKKLKEVWKPAV

SEQ ID NO: 38753 - protein, 978 aa, synthetic construct
  REGION 1..978: note = engineered CasX variant
QEIKRINKIRRRLVKDSNTKKAGKTGPMKTLLVRVMTPDLRERLENLRKKPENIPQPISNTSRANLNKLLTDYTEMKKAILHVYWEEFQKDPVGLMSRVAQPASKKIDQNKLKPEMDEKGNLTTAGFACSQCGQPLFVYKLEQVSEKGKAYTNYVGRCNVAEHEKLILLAQLKPEKDSDEAVTYSLGKFGQRALDFYSIHVTKESTHPVKPLAQIAGNRYASYPVGKALSDACMGTIASFLSKYQDIIIEHQKVVKGNQKRLESLRELAGKENLEYPSVTLPPQPHTKEGVDAYNEVIARVRMWVNLNLWQKLKLSRDDAKPLLRLKGFPSFPLVERQANEVDWWDMVCNVKKLINEKKEDGKVFWQNLAGYKRQEALRPYLSSEEDRKKGKKFARYQLGDLLLHLEKKHGEDWGKVYDEAWERIDKKVEGLSKHIKLEEERRSEDAQSKAALTDWLRAKASFVIEGLKEADKDEFCRCELKLQKWYGDLRGKPFAIEAENSILDISGFSKQYNCAFIWQKDGVKKLNLYLIINYFKGGKLRFKKIKPEAFEANRFYTVINKKSGEIVPMEVNFNFDDPNLIILPLAFGKRQGREFIWNDLLSLETGSLQLANGRVIEKTLYNRRTRQDEPALFVALTFERREVLDSSNIKPMNLIGVDRGENIPAVIALTDPEGCPLSRFKDSLGNPTHILRIGESYKEKQRTIQAKKEVEQRRAGGYSRKYASKAKNLADDMVRNTARDLLYYAVTQDAMLIFENLSRGFGRQGKRTFMAERQYTRMEDWLTAKLAYEGLPSKTYLSKTLAQYTSKTCSNCGFTITSADYDRVLEKLKKTATGWMTTINGKELKVEGQITYYNRYKRQNVVKDLSVELDRLSEESVNNDISSWTKGRSGEALSLLKKRFSHRPVQEKFVCLNCGFETHADEQAALNIARSWLFLRSQEYKKYQTNKTTGNTDKRAFVETWQSFYRKKLKEVWKPAV

SEQ ID NO: 38754 - protein, 978 aa, synthetic construct
  REGION 1..978: note = engineered CasX variant
QEIKRINKIRRRLVKDSNTKKAGKTGPMKTLLVRVMTPDLRERLENLRKKPENIPQPISNTSRANLNKLLTDYTEMKKAILHVYWEEFQKDPVGLMSRVAQPASKKIDQNKLKPEMDEKGNLTTAGFACSQCGQPLFVYKLEQVSEKGKAYTNYVGRCNVAEHEKLILLAQLKPEKDSDEAVTYSLGKFGQRALDFYSIHVTKESTHPVKPLAQIAGNRYASHPVGKALSDACMGTIASFLSKYQDIIIEHQKVVKGNQKRLESLRELAGKENLEYPSVTLPPQPHTKEGVDAYNEVIARVRMWVNLNLWQKLKLSRDDAKPLLRLKGFPSFPLVERQANEVDWWDMVCNVKKLINEKKEDGKVFWQNLAGYKRQEALRPYLSSEEDRKKGKKFARYQLGDLLLHLEKKHGEDWGKVYDEAWERIDKKVEGLSKHIKLEEERRSEDAQSKAALTDWLRAKASFVIEGLKEADKDEFCRCELKLQKWYGDLRGKPFAIEAENSILDISGFSKQYNCAFIWQKDGVKKLNLYLIINYFKGGKLRFKKIKPEAFEANRFYTVINKKSGEIVPMEVNFNFDDPNLIILPLAFGKRQGREFIWNDLLSLETGSLQLANGRVIEKTLYNRRTRQDEPALFVALTFERREVLDSSNIKPMNLIGVDRGENIPAVIALTDPEGCPLSRFKDSLGNPTHILRIGESYKEKQRTIQAKKEVEQRRAGGYSRKYASKAKNLADDMVRNTARDLLYYAVTQDAMLIFENLSRGFGRQGKRTFMAERQYTRMEDWLTAKLAYEGLPSKTYLSKTLAQYTSKTCSNCGFTITSADYDRVLEKLKKTATGWMTTINGKELKVEGQITYYNRYKRQNVVKDLSVELDRLSEESVNNDISSWTKGRSGEALSLLKKRFSHRPVQEKFVCLNCGFETHADEQAALNIARSWLFLRSQEYKKYQTNKTTGNTDKRAFVETWQSFYRKKLKEVWKPAV

SEQ ID NO: 38755 - protein, 978 aa, synthetic construct
  REGION 1..978: note = engineered CasX variant
QEIKRINKIRRRLVKDSNTKKAGKTGPMKTLLVRVMTPDLRERLENLRKKPENIPQPISNTSRANLNKLLTDYTEMKKAILHVYWEEFQKDPVGLMSRVAQPASKKIDQNKLKPEMDEKGNLTTAGFACSQCGQPLFVYKLEQVSEKGKAYTNYVGRCNVAEHEKLILLAQLKPEKDSDEAVTYSLGKFGQRALDFYSIHVTKESTHPVKPLAQIAGNRYASSPVGKALSDACMGTIASFLSKYQDIIIEHQKVVKGNQKRLESLRELAGKENLEYPSVTLPPQPHTKEGVDAYNEVIARVRMWVNLNLWQKLKLSRDDAKPLLRLKGFPSFPLVERQANEVDWWDMVCNVKKLINEKKEDGKVFWQNLAGYKRQEALRPYLSSEEDRKKGKKFARYQLGDLLLHLEKKHGEDWGKVYDEAWERIDKKVEGLSKHIKLEEERRSEDAQSKAALTDWLRAKASFVIEGLKEADKDEFCRCELKLQKWYGDLRGKPFAIEAENSILDISGFSKQYNCAFIWQKDGVKKLNLYLIINYFKGGKLRFKKIKPEAFEANRFYTVINKKSGEIVPMEVNFNFDDPNLIILPLAFGKRQGREFIWNDLLSLETGSLQLANGRVIEKTLYNRRTRQDEPALFVALTFERREVLDSSNIKPMNLIGVDRGENIPAVIALTDPEGCPLSRFKDSLGNPTHILRIGESYKEKQRTIQAKKEVEQRRAGGYSRKYASKAKNLADDMVRNTARDLLYYAVTQDAMLIFENLSRGFGRQGKRTFMAERQYTRMEDWLTAKLAYEGLPSKTYLSKTLAQYTSKTCSNCGFTITSADYDRVLEKLKKTATGWMTTINGKELKVEGQITYYNRYKRQNVVKDLSVELDRLSEESVNNDISSWTKGRSGEALSLLKKRFSHRPVQEKFVCLNCGFETHADEQAALNIARSWLFLRSQEYKKYQTNKTTGNTDKRAFVETWQSFYRKKLKEVWKPAV

SEQ ID NO: 38756 - protein, 978 aa, synthetic construct
  REGION 1..978: note = engineered CasX variant
QEIKRINKIRRRLVKDSNTKKAGKTGPMKTLLVRVMTPDLRERLENLRKKPENIPQPISNTSRANLNKLLTDYTEMKKAILHVYWEEFQKDPVGLMSRVAQPASKKIDQNKLKPEMDEKGNLTTAGFACSQCGQPLFVYKLEQVSEKGKAYTNYVGRCNVAEHEKLILLAQLKPEKDSDEAVTYSLGKFGQRALDFYSIHVTKESTHPVKPLAQIAGNRYASTPVGKALSDACMGTIASFLSKYQDIIIEHQKVVKGNQKRLESLRELAGKENLEYPSVTLPPQPHTKEGVDAYNEVIARVRMWVNLNLWQKLKLSRDDAKPLLRLKGFPSFPLVERQANEVDWWDMVCNVKKLINEKKEDGKVFWQNLAGYKRQEALRPYLSSEEDRKKGKKFARYQLGDLLLHLEKKHGEDWGKVYDEAWERIDKKVEGLSKHIKLEEERRSEDAQSKAALTDWLRAKASFVIEGLKEADKDEFCRCELKLQKWYGDLRGKPFAIEAENSILDISGFSKQYNCAFIWQKDGVKKLNLYLIINYFKGGKLRFKKIKPEAFEANRFYTVINKKSGEIVPMEVNFNFDDPNLIILPLAFGKRQGREFIWNDLLSLETGSLQLANGRVIEKTLYNRRTRQDEPALFVALTFERREVLDSSNIKPMNLIGVDRGENIPAVIALTDPEGCPLSRFKDSLGNPTHILRIGESYKEKQRTIQAKKEVEQRRAGGYSRKYASKAKNLADDMVRNTARDLLYYAVTQDAMLIFENLSRGFGRQGKRTFMAERQYTRMEDWLTAKLAYEGLPSKTYLSKTLAQYTSKTCSNCGFTITSADYDRVLEKLKKTATGWMTTINGKELKVEGQITYYNRYKRQNVVKDLSVELDRLSEESVNNDISSWTKGRSGEALSLLKKRFSHRPVQEKFVCLNCGFETHADEQAALNIARSWLFLRSQEYKKYQTNKTTGNTDKRAFVETWQSFYRKKLKEVWKPAV

SEQ ID NO: 38757 - protein, 978 aa, synthetic construct
  REGION 1..978: note = engineered CasX variant
QEIKRINKIRRRLVKDSNTKKAGKTGPMKTLLVRVMTPDLRERLENLRKKPENIPQPISNTSRANLNKLLTDYTEMKKAILHVYWEEFQKDPVGLMSRVAQPASKKIDQNKLKPEMDEKGNLTTAGFACSQCGQPLFVYKLEQVSEKGKAYTNYVGRCNVAEHEKLILLAQLKPEKDSDEAVTYSLGKFGQRALDFYSIHVTKESTHPVKPLAQIAGNRYASAPVGKALSDACMGTIASFLSKYQDIIIEHQKVVKGNQKRLESLRELAGKENLEYPSVTLPPQPHTKEGVDAYNEVIARVRMWVNLNLWQKLKLSRDDAKPLLRLKGFPSFPLVERQANEVDWWDMVCNVKKLINEKKEDGKVFWQNLAGYKRQEALRPYLSSEEDRKKGKKFARYQLGDLLLHLEKKHGEDWGKVYDEAWERIDKKVEGLSKHIKLEEERRSEDAQSKAALTDWLRAKASFVIEGLKEADKDEFCRCELKLQKWYGDLRGKPFAIEAENSILDISGFSKQYNCAFIWQKDGVKKLNLYLIINYFKGGKLRFKKIKPEAFEANRFYTVINKKSGEIVPMEVNFNFDDPNLIILPLAFGKRQGREFIWNDLLSLETGSLQLANGRVIEKTLYNRRTRQDEPALFVALTFERREVLDSSNIKPMNLIGVDRGENIPAVIALTDPEGCPLSRFKDSLGNPTHILRIGESYKEKQRTIQAKKEVEQRRAGGYSRKYASKAKNLADDMVRNTARDLLYYAVTQDAMLIFENLSRGFGRQGKRTFMAERQYTRMEDWLTAKLAYEGLPSKTYLSKTLAQYTSKTCSNCGFTITSADYDRVLEKLKKTATGWMTTINGKELKVEGQITYYNRYKRQNVVKDLSVELDRLSEESVNNDISSWTKGRSGEALSLLKKRFSHRPVQEKFVCLNCGFETHADEQAALNIARSWLFLRSQEYKKYQTNKTTGNTDKRAFVETWQSFYRKKLKEVWKPAV

SEQ ID NO: 38758 - protein, 978 aa, synthetic construct
  REGION 1..978: note = engineered CasX variant
QEIKRINKIRRRLVKDSNTKKAGKTGPMKTLLVRVMTPDLRERLENLRKKPENIPQPISNTSRANLNKLLTDYTEMKKAILHVYWEEFQKDPVGLMSRVAQPASKKIDQNKLKPEMDEKGNLTTAGFACSQCGQPLFVYKLEQVSEKGKAYTNYVGRCNVAEHEKLILLAQLKPEKDSDEAVTYSLGKFGQRALDFYSIHVTKESTHPVKPLAQIAGNRYASVPVGKALSDACMGTIASFLSKYQDIIIEHQKVVKGNQKRLESLRELAGKENLEYPSVTLPPQPHTKEGVDAYNEVIARVRMWVNLNLWQKLKLSRDDAKPLLRLKGFPSFPLVERQANEVDWWDMVCNVKKLINEKKEDGKVFWQNLAGYKRQEALRPYLSSEEDRKKGKKFARYQLGDLLLHLEKKHGEDWGKVYDEAWERIDKKVEGLSKHIKLEEERRSEDAQSKAALTDWLRAKASFVIEGLKEADKDEFCRCELKLQKWYGDLRGKPFAIEAENSILDISGFSKQYNCAFIWQKDGVKKLNLYLIINYFKGGKLRFKKIKPEAFEANRFYTVINKKSGEIVPMEVNFNFDDPNLIILPLAFGKRQGREFIWNDLLSLETGSLQLANGRVIEKTLYNRRTRQDEPALFVALTFERREVLDSSNIKPMNLIGVDRGENIPAVIALTDPEGCPLSRFKDSLGNPTHILRIGESYKEKQRTIQAKKEVEQRRAGGYSRKYASKAKNLADDMVRNTARDLLYYAVTQDAMLIFENLSRGFGRQGKRTFMAERQYTRMEDWLTAKLAYEGLPSKTYLSKTLAQYTSKTCSNCGFTITSADYDRVLEKLKKTATGWMTTINGKELKVEGQITYYNRYKRQNVVKDLSVELDRLSEESVNNDISSWTKGRSGEALSLLKKRFSHRPVQEKFVCLNCGFETHADEQAALNIARSWLFLRSQEYKKYQTNKTTGNTDKRAFVETWQSFYRKKLKEVWKPAV

SEQ ID NO: 38759 - protein, 978 aa, synthetic construct
  REGION 1..978: note = engineered CasX variant
QEIKRINKIRRRLVKDSNTKKAGKTGPMKTLLVRVMTPDLRERLENLRKKPENIPQPISNTSRANLNKLLTDYTEMKKAILHVYWEEFQKDPVGLMSRVAQPASKKIDQNKLKPEMDEKGNLTTAGFACSQCGQPLFVYKLEQVSEKGKAYTNYVGRCNVAEHEKLIKLAQLKPEKDSDEAVTYSLGKFGQRALDFYSIHVTKESTHPVKPLAQIAGNRYASGPVGKALSDACMGTIASFLSKYQDIIIEHQKVVKGNQKRLESLRELAGKENLEYPSVTLPPQPHTKEGVDAYNEVIARVRMWVNLNLWQKLKLSRDDAKPLLRLKGFPSFPLVERQANEVDWWDMVCNVKKLINEKKEDGKVFWQNLAGYKRQEALRPYLSSEEDRKKGKKFARYQLGDLLLHLEKKHGEDWGKVYDEAWERIDKKVEGLSKHIKLEEERRSEDAQSKAALTDWLRAKASFVIEGLKEADKDEFCRCELKLQKWYGDLRGKPFAIEAENSILDISGFSKQYNCAFIWQKDGVKKLNLYLIINYFKGGKLRFKKIKPEAFEANRFYTVINKKSGEIVPMEVNFNFDDPNLIILPLAFGKRQGREFIWNDLLSLETGSLQLANGRVIEKTLYNRRTRQDEPALFVALTFERREVLDSSNIKPMNLIGVDRGENIPAVIALTDPEGCPLSRFKDSLGNPTHILRIGESYKEKQRTIQAKKEVEQRRAGGYSRKYASKAKNLADDMVRNTARDLLYYAVTQDAMLIFENLSRGFGRQGKRTFMAERQYTRMEDWLTAKLAYEGLPSKTYLSKTLAQYTSKTCSNCGFTITSADYDRVLEKLKKTATGWMTTINGKELKVEGQITYYNRYKRQNVVKDLSVELDRLSEESVNNDISSWTKGRSGEALSLLKKRFSHRPVQEKFVCLNCGFETHADEQAALNIARSWLFLRSQEYKKYQTNKTTGNTDKRAFVETWQSFYRKKLKEVWKPAV

SEQ ID NO: 38760 - protein, 977 aa, synthetic construct
  REGION 1..977: note = engineered CasX variant
QEIKRINKIRRRLVKDSNTKKAGKTGPMKTLLVRVMTPDLRERLENLRKKPENIPQPISNTSRANLNKLLTDYTEMKKAILHVYWEEFQKDPVGLMSRVAQPASKKIDQNKLKPEMDEKGNLTTAGFACSQCGQPLFVYKLEQVSEKGKAYTNYVGRCNVAEHEKLILLAQLKPEKDSDEAVTYSLGKFGQRALDFYSIHVTKESTHPVKPLAQIAGNRYASPVGKALSDACMGTIASFLSKYQDIIIEHQKVVKGNQKRLESLRELAGKENLEYPSVTLPPQPHTKEGVDAYNEVIARVRMWVNLNLWQKLKLSRDDAKPLLRLKGFPSFPLVERQANEVDWWDMVCNVKKLINEKKEDGKVFWQNLAGYKRQEALRPYLSSEEDRKKGKKFARYQLGDLLLHLEKKHGEDWGKVYDEAWERIDKKVEGLSKHIKLEEERRSEDAQSKAALTDWLRAKASFVIEGLKEADKDEFCRCELKLQKWYGDLRGKPFAIEAENSILDISGFSKQYNCAFIWQKDGVKKLNLYLIINYFKGGKLRFKKIKPEAFEANRFYTVINKKSGEIVPMEVNFNFDDPNLIILPLAFGKRQGREFIWNDLLSLETGSLQLANGRVIEKTLYNRRTRQDEPALFVALTFERREVLDSSNIKPMNLIGVDRGENIPAVIALTDPEGCPLSRFKDSLGNPTHILRIGESYKEKQRTIQAKKEVEQRRAGGYSRKYASKAKNLADDMVRNTARDLLYYAVTQDAMLIFENLSRGFGRQGKRTFMAERQYTRMEDWLTAKLAYEGLPSKTYLSKTLAQYTSKTCSNCGFTITSADYDRVLEKLKKTATGWMTTINGKELKVEGQITYYNRYKRQNVVKDLSVELDRLSEESVNNDISSWTKGRSGEALSLLKKRFSHRPVQEKFVCLNCGFETHADEQAALNIARSWLFLRSQEYKKYQTNKTTGNTDKRAFVETWQSFYRKKLKEVWKPAV

SEQ ID NO: 38761 - protein, 978 aa, synthetic construct
  REGION 1..978: note = engineered CasX variant
QEIKRINKIRRRLVKDSNTKKAGKTGPMKTLLVRVMTPDLRERLENLRKKPENIPQPISNTSRANLNKLLTDYTEMKKAILHVYWEEFQKDPVGLMSRVAQPASKKIDQNKLKPEMDEKGNLTTAGFACSQCGQPLFVYKLEQVSEKGKAYTNYFGRCNVAEHEKLILLAQLKPEKDSDEAVTYSLGKFGQRALDFYSIHVTKESTHPVKPLAQIAGNRYASYPVGKALSDACMGTIASFLSKYQDIIIEHQKVVKGNQKRLESLRELAGKENLEYPSVTLPPQPHTKEGVDAYNEVIARVRMWVNLNLWQKLKLSRDDAKPLLRLKGFPSFPLVERQANEVDWWDMVCNVKKLINEKKEDGKVFWQNLAGYKRQEALRPYLSSEEDRKKGKKFARYQLGDLLLHLEKKHGEDWGKVYDEAWERIDKKVEGLSKHIKLEEERRSEDAQSKAALTDWLRAKASFVIEGLKEADKDEFCRCELKLQKWYGDLRGKPFAIEAENSILDISGFSKQYNCAFIWQKDGVKKLNLYLIINYFKGGKLRFKKIKPEAFEANRFYTVINKKSGEIVPMEVNFNFDDPNLIILPLAFGKRQGREFIWNDLLSLETGSLKLANGRVIEKTLYNRRTRQDEPALFVALTFERREVLDSSNIKPMNLIGVDRGENIPAVIALTDPEGCPLSRFKDSLGNPTHILRIGESYKEKQRTIQAKKEVEQRRAGGYSRKYASKAKNLADDMVRNTARDLLYYAVTQDAMLIFENLSRGFGRQGKRTFMAERQYTRMEDWLTAKLAYEGLASKVYLSKTLAQYTSKTCSNCGFTITSADYDRVLEKLKKTATGWMTTINGKELKVEGQITYYNRYKRQNVVKDLSVELDRLSEESVNNDISSWTKGRSGEALSLLKKRFSHRPVQEKFVCLNCGFETHADEQAALNIARSWLFLRSQEYKKYQTNKTTGNTDKRAFVETWQSFYRKKLKEVWKPAV

SEQ ID NO: 38762 - protein, 978 aa, synthetic construct
  REGION 1..978: note = engineered CasX variant
QEIKRINKIRRRLVKDSNTKKAGKTGPMKTLLVRVMTPDLRERLENLRKKPENIPQPISNTSRANLNKLLTDYTEMKKAILHVYWEEFQKDPVGLMSRVAQPASKKIDQNKLKPEMDEKGNLTTAGFACSQCGQPLFVYKLEQVSEKGKAYTNYFGRCNVAEHEKLILLAQLKPEKDSDEAVTYSLGKFGQRALDFYSIHVTKESTHPVKPLAQIAGNRYASHPVGKALSDACMGTIASFLSKYQDIIIEHQKVVKGNQKRLESLRELAGKENLEYPSVTLPPQPHTKEGVDAYNEVIARVRMWVNLNLWQKLKLSRDDAKPLLRLKGFPSFPLVERQANEVDWWDMVCNVKKLINEKKEDGKVFWQNLAGYKRQEALRPYLSSEEDRKKGKKFARYQLGDLLLHLEKKHGEDWGKVYDEAWERIDKKVEGLSKHIKLEEERRSEDAQSKAALTDWLRAKASFVIEGLKEADKDEFCRCELKLQKWYGDLRGKPFAIEAENSILDISGFSKQYNCAFIWQKDGVKKLNLYLIINYFKGGKLRFKKIKPEAFEANRFYTVINKKSGEIVPMEVNFNFDDPNLIILPLAFGKRQGREFIWNDLLSLETGSLKLANGRVIEKTLYNRRTRQDEPALFVALTFERREVLDSSNIKPMNLIGVDRGENIPAVIALTDPEGCPLSRFKDSLGNPTHILRIGESYKEKQRTIQAKKEVEQRRAGGYSRKYASKAKNLADDMVRNTARDLLYYAVTQDAMLIFENLSRGFGRQGKRTFMAERQYTRMEDWLTAKLAYEGLASKVYLSKTLAQYTSKTCSNCGFTITSADYDRVLEKLKKTATGWMTTINGKELKVEGQITYYNRYKRQNVVKDLSVELDRLSEESVNNDISSWTKGRSGEALSLLKKRFSHRPVQEKFVCLNCGFETHADEQAALNIARSWLFLRSQEYKKYQTNKTTGNTDKRAFVETWQSFYRKKLKEVWKPAV

SEQ ID NO: 38763 - protein, 978 aa, synthetic construct
  REGION 1..978: note = engineered CasX variant
QEIKRINKIRRRLVKDSNTKKAGKTGPMKTLLVRVMTPDLRERLENLRKKPENIPQPISNTSRANLNKLLTDYTEMKKAILHVYWEEFQKDPVGLMSRVAQPASKKIDQNKLKPEMDEKGNLTTAGFACSQCGQPLFVYKLEQVSEKGKAYTNYFGRCNVAEHEKLILLAQLKPEKDSDEAVTYSLGKFGQRALDFYSIHVTKESTHPVKPLAQIAGNRYASSPVGKALSDACMGTIASFLSKYQDIIIEHQKVVKGNQKRLESLRELAGKENLEYPSVTLPPQPHTKEGVDAYNEVIARVRMWVNLNLWQKLKLSRDDAKPLLRLKGFPSFPLVERQANEVDWWDMVCNVKKLINEKKEDGKVFWQNLAGYKRQEALRPYLSSEEDRKKGKKFARYQLGDLLLHLEKKHGEDWGKVYDEAWERIDKKVEGLSKHIKLEEERRSEDAQSKAALTDWLRAKASFVIEGLKEADKDEFCRCELKLQKWYGDLRGKPFAIEAENSILDISGFSKQYNCAFIWQKDGVKKLNLYLIINYFKGGKLRFKKIKPEAFEANRFYTVINKKSGEIVPMEVNFNFDDPNLIILPLAFGKRQGREFIWNDLLSLETGSLKLANGRVIEKTLYNRRTRQDEPALFVALTFERREVLDSSNIKPMNLIGVDRGENIPAVIALTDPEGCPLSRFKDSLGNPTHILRIGESYKEKQRTIQAKKEVEQRRAGGYSRKYASKAKNLADDMVRNTARDLLYYAVTQDAMLIFENLSRGFGRQGKRTFMAERQYTRMEDWLTAKLAYEGLASKVYLSKTLAQYTSKTCSNCGFTITSADYDRVLEKLKKTATGWMTTINGKELKVEGQITYYNRYKRQNVVKDLSVELDRLSEESVNNDISSWTKGRSGEALSLLKKRFSHRPVQEKFVCLNCGFETHADEQAALNIARSWLFLRSQEYKKYQTNKTTGNTDKRAFVETWQSFYRKKLKEVWKPAV

SEQ ID NO: 38764 - protein, 978 aa, synthetic construct
  REGION 1..978: note = engineered CasX variant
QEIKRINKIRRRLVKDSNTKKAGKTGPMKTLLVRVMTPDLRERLENLRKKPENIPQPISNTSRANLNKLLTDYTEMKKAILHVYWEEFQKDPVGLMSRVAQPASKKIDQNKLKPEMDEKGNLTTAGFACSQCGQPLFVYKLEQVSEKGKAYTNYFGRCNVAEHEKLILLAQLKPEKDSDEAVTYSLGKFGQRALDFYSIHVTKESTHPVKPLAQIAGNRYASTPVGKALSDACMGTIASFLSKYQDIIIEHQKVVKGNQKRLESLRELAGKENLEYPSVTLPPQPHTKEGVDAYNEVIARVRMWVNLNLWQKLKLSRDDAKPLLRLKGFPSFPLVERQANEVDWWDMVCNVKKLINEKKEDGKVFWQNLAGYKRQEALRPYLSSEEDRKKGKKFARYQLGDLLLHLEKKHGEDWGKVYDEAWERIDKKVEGLSKHIKLEEERRSEDAQSKAALTDWLRAKASFVIEGLKEADKDEFCRCELKLQKWYGDLRGKPFAIEAENSILDISGFSKQYNCAFIWQKDGVKKLNLYLIINYFKGGKLRFKKIKPEAFEANRFYTVINKKSGEIVPMEVNFNFDDPNLIILPLAFGKRQGREFIWNDLLSLETGSLKLANGRVIEKTLYNRRTRQDEPALFVALTFERREVLDSSNIKPMNLIGVDRGENIPAVIALTDPEGCPLSRFKDSLGNPTHILRIGESYKEKQRTIQAKKEVEQRRAGGYSRKYASKAKNLADDMVRNTARDLLYYAVTQDAMLIFENLSRGFGRQGKRTFMAERQYTRMEDWLTAKLAYEGLASKVYLSKTLAQYTSKTCSNCGFTITSADYDRVLEKLKKTATGWMTTINGKELKVEGQITYYNRYKRQNVVKDLSVELDRLSEESVNNDISSWTKGRSGEALSLLKKRFSHRPVQEKFVCLNCGFETHADEQAALNIARSWLFLRSQEYKKYQTNKTTGNTDKRAFVETWQSFYRKKLKEVWKPAV

SEQ ID NO: 38765 - protein, 978 aa, synthetic construct
  REGION 1..978: note = engineered CasX variant
QEIKRINKIRRRLVKDSNTKKAGKTGPMKTLLVRVMTPDLRERLENLRKKPENIPQPISNTSRANLNKLLTDYTEMKKAILHVYWEEFQKDPVGLMSRVAQPASKKIDQNKLKPEMDEKGNLTTAGFACSQCGQPLFVYKLEQVSEKGKAYTNYFGRCNVAEHEKLILLAQLKPEKDSDEAVTYSLGKFGQRALDFYSIHVTKESTHPVKPLAQIAGNRYASAPVGKALSDACMGTIASFLSKYQDIIIEHQKVVKGNQKRLESLRELAGKENLEYPSVTLPPQPHTKEGVDAYNEVIARVRMWVNLNLWQKLKLSRDDAKPLLRLKGFPSFPLVERQANEVDWWDMVCNVKKLINEKKEDGKVFWQNLAGYKRQEALRPYLSSEEDRKKGKKFARYQLGDLLLHLEKKHGEDWGKVYDEAWERIDKKVEGLSKHIKLEEERRSEDAQSKAALTDWLRAKASFVIEGLKEADKDEFCRCELKLQKWYGDLRGKPFAIEAENSILDISGFSKQYNCAFIWQKDGVKKLNLYLIINYFKGGKLRFKKIKPEAFEANRFYTVINKKSGEIVPMEVNFNFDDPNLIILPLAFGKRQGREFIWNDLLSLETGSLKLANGRVIEKTLYNRRTRQDEPALFVALTFERREVLDSSNIKPMNLIGVDRGENIPAVIALTDPEGCPLSRFKDSLGNPTHILRIGESYKEKQRTIQAKKEVEQRRAGGYSRKYASKAKNLADDMVRNTARDLLYYAVTQDAMLIFENLSRGFGRQGKRTFMAERQYTRMEDWLTAKLAYEGLASKVYLSKTLAQYTSKTCSNCGFTITSADYDRVLEKLKKTATGWMTTINGKELKVEGQITYYNRYKRQNVVKDLSVELDRLSEESVNNDISSWTKGRSGEALSLLKKRFSHRPVQEKFVCLNCGFETHADEQAALNIARSWLFLRSQEYKKYQTNKTTGNTDKRAFVETWQSFYRKKLKEVWKPAV

SEQ ID NO: 38766 - protein, 978 aa, synthetic construct
  REGION 1..978: note = engineered CasX variant
QEIKRINKIRRRLVKDSNTKKAGKTGPMKTLLVRVMTPDLRERLENLRKKPENIPQPISNTSRANLNKLLTDYTEMKKAILHVYWEEFQKDPVGLMSRVAQPASKKIDQNKLKPEMDEKGNLTTAGFACSQCGQPLFVYKLEQVSEKGKAYTNYFGRCNVAEHEKLILLAQLKPEKDSDEAVTYSLGKFGQRALDFYSIHVTKESTHPVKPLAQIAGNRYASVPVGKALSDACMGTIASFLSKYQDIIIEHQKVVKGNQKRLESLRELAGKENLEYPSVTLPPQPHTKEGVDAYNEVIARVRMWVNLNLWQKLKLSRDDAKPLLRLKGFPSFPLVERQANEVDWWDMVCNVKKLINEKKEDGKVFWQNLAGYKRQEALRPYLSSEEDRKKGKKFARYQLGDLLLHLEKKHGEDWGKVYDEAWERIDKKVEGLSKHIKLEEERRSEDAQSKAALTDWLRAKASFVIEGLKEADKDEFCRCELKLQKWYGDLRGKPFAIEAENSILDISGFSKQYNCAFIWQKDGVKKLNLYLIINYFKGGKLRFKKIKPEAFEANRFYTVINKKSGEIVPMEVNFNFDDPNLIILPLAFGKRQGREFIWNDLLSLETGSLKLANGRVIEKTLYNRRTRQDEPALFVALTFERREVLDSSNIKPMNLIGVDRGENIPAVIALTDPEGCPLSRFKDSLGNPTHILRIGESYKEKQRTIQAKKEVEQRRAGGYSRKYASKAKNLADDMVRNTARDLLYYAVTQDAMLIFENLSRGFGRQGKRTFMAERQYTRMEDWLTAKLAYEGLASKVYLSKTLAQYTSKTCSNCGFTITSADYDRVLEKLKKTATGWMTTINGKELKVEGQITYYNRYKRQNVVKDLSVELDRLSEESVNNDISSWTKGRSGEALSLLKKRFSHRPVQEKFVCLNCGFETHADEQAALNIARSWLFLRSQEYKKYQTNKTTGNTDKRAFVETWQSFYRKKLKEVWKPAV

SEQ ID NO: 38767 - protein, 978 aa, synthetic construct
  REGION 1..978: note = engineered CasX variant
QEIKRINKIRRRLVKDSNTKKAGKTGPMKTLLVRVMTPDLRERLENLRKKPENIPQPISNTSRANLNKLLTDYTEMKKAILHVYWEEFQKDPVGLMSRVAQPASKKIDQNKLKPEMDEKGNLTTAGFACSQCGQPLFVYKLEQVSEKGKAYTNYFGRCNVAEHEKLIKLAQLKPEKDSDEAVTYSLGKFGQRALDFYSIHVTKESTHPVKPLAQIAGNRYASGPVGKALSDACMGTIASFLSKYQDIIIEHQKVVKGNQKRLESLRELAGKENLEYPSVTLPPQPHTKEGVDAYNEVIARVRMWVNLNLWQKLKLSRDDAKPLLRLKGFPSFPLVERQANEVDWWDMVCNVKKLINEKKEDGKVFWQNLAGYKRQEALRPYLSSEEDRKKGKKFARYQLGDLLLHLEKKHGEDWGKVYDEAWERIDKKVEGLSKHIKLEEERRSEDAQSKAALTDWLRAKASFVIEGLKEADKDEFCRCELKLQKWYGDLRGKPFAIEAENSILDISGFSKQYNCAFIWQKDGVKKLNLYLIINYFKGGKLRFKKIKPEAFEANRFYTVINKKSGEIVPMEVNFNFDDPNLIILPLAFGKRQGREFIWNDLLSLETGSLKLANGRVIEKTLYNRRTRQDEPALFVALTFERREVLDSSNIKPMNLIGVDRGENIPAVIALTDPEGCPLSRFKDSLGNPTHILRIGESYKEKQRTIQAKKEVEQRRAGGYSRKYASKAKNLADDMVRNTARDLLYYAVTQDAMLIFENLSRGFGRQGKRTFMAERQYTRMEDWLTAKLAYEGLASKVYLSKTLAQYTSKTCSNCGFTITSADYDRVLEKLKKTATGWMTTINGKELKVEGQITYYNRYKRQNVVKDLSVELDRLSEESVNNDISSWTKGRSGEALSLLKKRFSHRPVQEKFVCLNCGFETHADEQAALNIARSWLFLRSQEYKKYQTNKTTGNTDKRAFVETWQSFYRKKLKEVWKPAV

SEQ ID NO: 38768 - protein, 977 aa, synthetic construct
  REGION 1..977: note = engineered CasX variant
QEIKRINKIRRRLVKDSNTKKAGKTGPMKTLLVRVMTPDLRERLENLRKKPENIPQPISNTSRANLNKLLTDYTEMKKAILHVYWEEFQKDPVGLMSRVAQPASKKIDQNKLKPEMDEKGNLTTAGFACSQCGQPLFVYKLEQVSEKGKAYTNYFGRCNVAEHEKLILLAQLKPEKDSDEAVTYSLGKFGQRALDFYSIHVTKESTHPVKPLAQIAGNRYASPVGKALSDACMGTIASFLSKYQDIIIEHQKVVKGNQKRLESLRELAGKENLEYPSVTLPPQPHTKEGVDAYNEVIARVRMWVNLNLWQKLKLSRDDAKPLLRLKGFPSFPLVERQANEVDWWDMVCNVKKLINEKKEDGKVFWQNLAGYKRQEALRPYLSSEEDRKKGKKFARYQLGDLLLHLEKKHGEDWGKVYDEAWERIDKKVEGLSKHIKLEEERRSEDAQSKAALTDWLRAKASFVIEGLKEADKDEFCRCELKLQKWYGDLRGKPFAIEAENSILDISGFSKQYNCAFIWQKDGVKKLNLYLIINYFKGGKLRFKKIKPEAFEANRFYTVINKKSGEIVPMEVNFNFDDPNLIILPLAFGKRQGREFIWNDLLSLETGSLKLANGRVIEKTLYNRRTRQDEPALFVALTFERREVLDSSNIKPMNLIGVDRGENIPAVIALTDPEGCPLSRFKDSLGNPTHILRIGESYKEKQRTIQAKKEVEQRRAGGYSRKYASKAKNLADDMVRNTARDLLYYAVTQDAMLIFENLSRGFGRQGKRTFMAERQYTRMEDWLTAKLAYEGLASKVYLSKTLAQYTSKTCSNCGFTITSADYDRVLEKLKKTATGWMTTINGKELKVEGQITYYNRYKRQNVVKDLSVELDRLSEESVNNDISSWTKGRSGEALSLLKKRFSHRPVQEKFVCLNCGFETHADEQAALNIARSWLFLRSQEYKKYQTNKTTGNTDKRAFVETWQSFYRKKLKEVWKPAV

SEQ ID NO: 38769 - protein, 979 aa, synthetic construct
  REGION 1..979: note = engineered CasX variant
QEIKRINKIRRRLVKDSNTKKAGKTGPMKTLLVRVMTPDLRERLENLRKKPENIPQPISNTSRANLNKLLTDYTEMKKAILHVYWEEFQKDPVGLMSRVAQPASKKIDQNKLKPEMDEKGNLTTAGFACSQCGQPLFVYKLEQVSEKGKAYTNYFGRCNVAEHEKLILLAQLKPEKDSDEAVTYSLGKFGQRALDFYSIHVTKESTHPVKPLAQIAGNRYASYPVGKALSDACMGTIASFLSKYQDIIIEHQKVVKGNQKRLESLRELAGKENLEYPSVTLPPQPHTKEGVDAYNEVIARVRMWVNLNLWQKLKLSRDDAKPLLRLKGFPSFPLVERQANEVDWWDMVCNVKKLINEKKEDGKVFWQNLAGYKRQEALRPYLSSEEDRKKGKKFARYQLGDLLLHLEKKHGEDWGKVYDEAWERIDKKVEGLSKHIKLEEERRSEDAQSKAALTDWLRAKASFVIEGLKEADKDEFCRCELKLQKWYGDLRGKPFAIEAENSILDISGFSKQYNCAFIWQKDGVKKLNLYLIINYFKGGKLRFKKIKPEAFEANRFYTVINKKSGEIVPMEVNFNFDDPNLIILPLAFGKRQGREFIWNDLLSLETGSLKLANGRVIEKTLYNRRTRQDEPALFVALTFERREVLDSSNIKPMNLIGVDRGENIPAVIALTDPEGCPLSRFKDSLGNPTHILRIGESYKEKQRTIQAKKEVEQRRAGGYSRKYASKAKNLADDMVRNTARDLLYYAVTQDAMLIFENLSRGFGRQGKRTFMAERQYTRMEDWLTAKLAYEGPLASKTYLSKTLAQYTSKTCSNCGFTITSADYDRVLEKLKKTATGWMTTINGKELKVEGQITYYNRYKRQNVVKDLSVELDRLSEESVNNDISSWTKGRSGEALSLLKKRFSHRPVQEKFVCLNCGFETHADEQAALNIARSWLFLRSQEYKKYQTNKTTGNTDKRAFVETWQSFYRKKLKEVWKPAV

SEQ ID NO: 38770 - protein, 979 aa, synthetic construct
  REGION 1..979: note = engineered CasX variant
QEIKRINKIRRRLVKDSNTKKAGKTGPMKTLLVRVMTPDLRERLENLRKKPENIPQPISNTSRANLNKLLTDYTEMKKAILHVYWEEFQKDPVGLMSRVAQPASKKIDQNKLKPEMDEKGNLTTAGFACSQCGQPLFVYKLEQVSEKGKAYTNYFGRCNVAEHEKLILLAQLKPEKDSDEAVTYSLGKFGQRALDFYSIHVTKESTHPVKPLAQIAGNRYASHPVGKALSDACMGTIASFLSKYQDIIIEHQKVVKGNQKRLESLRELAGKENLEYPSVTLPPQPHTKEGVDAYNEVIARVRMWVNLNLWQKLKLSRDDAKPLLRLKGFPSFPLVERQANEVDWWDMVCNVKKLINEKKEDGKVFWQNLAGYKRQEALRPYLSSEEDRKKGKKFARYQLGDLLLHLEKKHGEDWGKVYDEAWERIDKKVEGLSKHIKLEEERRSEDAQSKAALTDWLRAKASFVIEGLKEADKDEFCRCELKLQKWYGDLRGKPFAIEAENSILDISGFSKQYNCAFIWQKDGVKKLNLYLIINYFKGGKLRFKKIKPEAFEANRFYTVINKKSGEIVPMEVNFNFDDPNLIILPLAFGKRQGREFIWNDLLSLETGSLKLANGRVIEKTLYNRRTRQDEPALFVALTFERREVLDSSNIKPMNLIGVDRGENIPAVIALTDPEGCPLSRFKDSLGNPTHILRIGESYKEKQRTIQAKKEVEQRRAGGYSRKYASKAKNLADDMVRNTARDLLYYAVTQDAMLIFENLSRGFGRQGKRTFMAERQYTRMEDWLTAKLAYEGPLASKTYLSKTLAQYTSKTCSNCGFTITSADYDRVLEKLKKTATGWMTTINGKELKVEGQITYYNRYKRQNVVKDLSVELDRLSEESVNNDISSWTKGRSGEALSLLKKRFSHRPVQEKFVCLNCGFETHADEQAALNIARSWLFLRSQEYKKYQTNKTTGNTDKRAFVETWQSFYRKKLKEVWKPAV

SEQ ID NO: 38771 - protein, 979 aa, synthetic construct
  REGION 1..979: note = engineered CasX variant
QEIKRINKIRRRLVKDSNTKKAGKTGPMKTLLVRVMTPDLRERLENLRKKPENIPQPISNTSRANLNKLLTDYTEMKKAILHVYWEEFQKDPVGLMSRVAQPASKKIDQNKLKPEMDEKGNLTTAGFACSQCGQPLFVYKLEQVSEKGKAYTNYFGRCNVAEHEKLILLAQLKPEKDSDEAVTYSLGKFGQRALDFYSIHVTKESTHPVKPLAQIAGNRYASSPVGKALSDACMGTIASFLSKYQDIIIEHQKVVKGNQKRLESLRELAGKENLEYPSVTLPPQPHTKEGVDAYNEVIARVRMWVNLNLWQKLKLSRDDAKPLLRLKGFPSFPLVERQANEVDWWDMVCNVKKLINEKKEDGKVFWQNLAGYKRQEALRPYLSSEEDRKKGKKFARYQLGDLLLHLEKKHGEDWGKVYDEAWERIDKKVEGLSKHIKLEEERRSEDAQSKAALTDWLRAKASFVIEGLKEADKDEFCRCELKLQKWYGDLRGKPFAIEAENSILDISGFSKQYNCAFIWQKDGVKKLNLYLIINYFKGGKLRFKKIKPEAFEANRFYTVINKKSGEIVPMEVNFNFDDPNLIILPLAFGKRQGREFIWNDLLSLETGSLKLANGRVIEKTLYNRRTRQDEPALFVALTFERREVLDSSNIKPMNLIGVDRGENIPAVIALTDPEGCPLSRFKDSLGNPTHILRIGESYKEKQRTIQAKKEVEQRRAGGYSRKYASKAKNLADDMVRNTARDLLYYAVTQDAMLIFENLSRGFGRQGKRTFMAERQYTRMEDWLTAKLAYEGPLASKTYLSKTLAQYTSKTCSNCGFTITSADYDRVLEKLKKTATGWMTTINGKELKVEGQITYYNRYKRQNVVKDLSVELDRLSEESVNNDISSWTKGRSGEALSLLKKRFSHRPVQEKFVCLNCGFETHADEQAALNIARSWLFLRSQEYKKYQTNKTTGNTDKRAFVETWQSFYRKKLKEVWKPAV

SEQ ID NO: 38772 - protein, 979 aa, synthetic construct
  REGION 1..979: note = engineered CasX variant
QEIKRINKIRRRLVKDSNTKKAGKTGPMKTLLVRVMTPDLRERLENLRKKPENIPQPISNTSRANLNKLLTDYTEMKKAILHVYWEEFQKDPVGLMSRVAQPASKKIDQNKLKPEMDEKGNLTTAGFACSQCGQPLFVYKLEQVSEKGKAYTNYFGRCNVAEHEKLILLAQLKPEKDSDEAVTYSLGKFGQRALDFYSIHVTKESTHPVKPLAQIAGNRYASTPVGKALSDACMGTIASFLSKYQDIIIEHQKVVKGNQKRLESLRELAGKENLEYPSVTLPPQPHTKEGVDAYNEVIARVRMWVNLNLWQKLKLSRDDAKPLLRLKGFPSFPLVERQANEVDWWDMVCNVKKLINEKKEDGKVFWQNLAGYKRQEALRPYLSSEEDRKKGKKFARYQLGDLLLHLEKKHGEDWGKVYDEAWERIDKKVEGLSKHIKLEEERRSEDAQSKAALTDWLRAKASFVIEGLKEADKDEFCRCELKLQKWYGDLRGKPFAIEAENSILDISGFSKQYNCAFIWQKDGVKKLNLYLIINYFKGGKLRFKKIKPEAFEANRFYTVINKKSGEIVPMEVNFNFDDPNLIILPLAFGKRQGREFIWNDLLSLETGSLKLANGRVIEKTLYNRRTRQDEPALFVALTFERREVLDSSNIKPMNLIGVDRGENIPAVIALTDPEGCPLSRFKDSLGNPTHILRIGESYKEKQRTIQAKKEVEQRRAGGYSRKYASKAKNLADDMVRNTARDLLYYAVTQDAMLIFENLSRGFGRQGKRTFMAERQYTRMEDWLTAKLAYEGPLASKTYLSKTLAQYTSKTCSNCGFTITSADYDRVLEKLKKTATGWMTTINGKELKVEGQITYYNRYKRQNVVKDLSVELDRLSEESVNNDISSWTKGRSGEALSLLKKRFSHRPVQEKFVCLNCGFETHADEQAALNIARSWLFLRSQEYKKYQTNKTTGNTDKRAFVETWQSFYRKKLKEVWKPAV

SEQ ID NO: 38773 - protein, 979 aa, synthetic construct
  REGION 1..979: note = engineered CasX variant
QEIKRINKIRRRLVKDSNTKKAGKTGPMKTLLVRVMTPDLRERLENLRKKPENIPQPISNTSRANLNKLLTDYTEMKKAILHVYWEEFQKDPVGLMSRVAQPASKKIDQNKLKPEMDEKGNLTTAGFACSQCGQPLFVYKLEQVSEKGKAYTNYFGRCNVAEHEKLILLAQLKPEKDSDEAVTYSLGKFGQRALDFYSIHVTKESTHPVKPLAQIAGNRYASAPVGKALSDACMGTIASFLSKYQDIIIEHQKVVKGNQKRLESLRELAGKENLEYPSVTLPPQPHTKEGVDAYNEVIARVRMWVNLNLWQKLKLSRDDAKPLLRLKGFPSFPLVERQANEVDWWDMVCNVKKLINEKKEDGKVFWQNLAGYKRQEALRPYLSSEEDRKKGKKFARYQLGDLLLHLEKKHGEDWGKVYDEAWERIDKKVEGLSKHIKLEEERRSEDAQSKAALTDWLRAKASFVIEGLKEADKDEFCRCELKLQKWYGDLRGKPFAIEAENSILDISGFSKQYNCAFIWQKDGVKKLNLYLIINYFKGGKLRFKKIKPEAFEANRFYTVINKKSGEIVPMEVNFNFDDPNLIILPLAFGKRQGREFIWNDLLSLETGSLKLANGRVIEKTLYNRRTRQDEPALFVALTFERREVLDSSNIKPMNLIGVDRGENIPAVIALTDPEGCPLSRFKDSLGNPTHILRIGESYKEKQRTIQAKKEVEQRRAGGYSRKYASKAKNLADDMVRNTARDLLYYAVTQDAMLIFENLSRGFGRQGKRTFMAERQYTRMEDWLTAKLAYEGPLASKTYLSKTLAQYTSKTCSNCGFTITSADYDRVLEKLKKTATGWMTTINGKELKVEGQITYYNRYKRQNVVKDLSVELDRLSEESVNNDISSWTKGRSGEALSLLKKRFSHRPVQEKFVCLNCGFETHADEQAALNIARSWLFLRSQEYKKYQTNKTTGNTDKRAFVETWQSFYRKKLKEVWKPAV

SEQ ID NO: 38774 - protein, 979 aa, synthetic construct
  REGION 1..979: note = engineered CasX variant
QEIKRINKIRRRLVKDSNTKKAGKTGPMKTLLVRVMTPDLRERLENLRKKPENIPQPISNTSRANLNKLLTDYTEMKKAILHVYWEEFQKDPVGLMSRVAQPASKKIDQNKLKPEMDEKGNLTTAGFACSQCGQPLFVYKLEQVSEKGKAYTNYFGRCNVAEHEKLILLAQLKPEKDSDEAVTYSLGKFGQRALDFYSIHVTKESTHPVKPLAQIAGNRYASVPVGKALSDACMGTIASFLSKYQDIIIEHQKVVKGNQKRLESLRELAGKENLEYPSVTLPPQPHTKEGVDAYNEVIARVRMWVNLNLWQKLKLSRDDAKPLLRLKGFPSFPLVERQANEVDWWDMVCNVKKLINEKKEDGKVFWQNLAGYKRQEALRPYLSSEEDRKKGKKFARYQLGDLLLHLEKKHGEDWGKVYDEAWERIDKKVEGLSKHIKLEEERRSEDAQSKAALTDWLRAKASFVIEGLKEADKDEFCRCELKLQKWYGDLRGKPFAIEAENSILDISGFSKQYNCAFIWQKDGVKKLNLYLIINYFKGGKLRFKKIKPEAFEANRFYTVINKKSGEIVPMEVNFNFDDPNLIILPLAFGKRQGREFIWNDLLSLETGSLKLANGRVIEKTLYNRRTRQDEPALFVALTFERREVLDSSNIKPMNLIGVDRGENIPAVIALTDPEGCPLSRFKDSLGNPTHILRIGESYKEKQRTIQAKKEVEQRRAGGYSRKYASKAKNLADDMVRNTARDLLYYAVTQDAMLIFENLSRGFGRQGKRTFMAERQYTRMEDWLTAKLAYEGPLASKTYLSKTLAQYTSKTCSNCGFTITSADYDRVLEKLKKTATGWMTTINGKELKVEGQITYYNRYKRQNVVKDLSVELDRLSEESVNNDISSWTKGRSGEALSLLKKRFSHRPVQEKFVCLNCGFETHADEQAALNIARSWLFLRSQEYKKYQTNKTTGNTDKRAFVETWQSFYRKKLKEVWKPAV

SEQ ID NO: 38775 - protein, 979 aa, synthetic construct
  REGION 1..979: note = engineered CasX variant
QEIKRINKIRRRLVKDSNTKKAGKTGPMKTLLVRVMTPDLRERLENLRKKPENIPQPISNTSRANLNKLLTDYTEMKKAILHVYWEEFQKDPVGLMSRVAQPASKKIDQNKLKPEMDEKGNLTTAGFACSQCGQPLFVYKLEQVSEKGKAYTNYFGRCNVAEHEKLIKLAQLKPEKDSDEAVTYSLGKFGQRALDFYSIHVTKESTHPVKPLAQIAGNRYASGPVGKALSDACMGTIASFLSKYQDIIIEHQKVVKGNQKRLESLRELAGKENLEYPSVTLPPQPHTKEGVDAYNEVIARVRMWVNLNLWQKLKLSRDDAKPLLRLKGFPSFPLVERQANEVDWWDMVCNVKKLINEKKEDGKVFWQNLAGYKRQEALRPYLSSEEDRKKGKKFARYQLGDLLLHLEKKHGEDWGKVYDEAWERIDKKVEGLSKHIKLEEERRSEDAQSKAALTDWLRAKASFVIEGLKEADKDEFCRCELKLQKWYGDLRGKPFAIEAENSILDISGFSKQYNCAFIWQKDGVKKLNLYLIINYFKGGKLRFKKIKPEAFEANRFYTVINKKSGEIVPMEVNFNFDDPNLIILPLAFGKRQGREFIWNDLLSLETGSLKLANGRVIEKTLYNRRTRQDEPALFVALTFERREVLDSSNIKPMNLIGVDRGENIPAVIALTDPEGCPLSRFKDSLGNPTHILRIGESYKEKQRTIQAKKEVEQRRAGGYSRKYASKAKNLADDMVRNTARDLLYYAVTQDAMLIFENLSRGFGRQGKRTFMAERQYTRMEDWLTAKLAYEGPLASKTYLSKTLAQYTSKTCSNCGFTITSADYDRVLEKLKKTATGWMTTINGKELKVEGQITYYNRYKRQNVVKDLSVELDRLSEESVNNDISSWTKGRSGEALSLLKKRFSHRPVQEKFVCLNCGFETHADEQAALNIARSWLFLRSQEYKKYQTNKTTGNTDKRAFVETWQSFYRKKLKEVWKPAV

SEQ ID NO: 38776 - protein, 978 aa, synthetic construct
  REGION 1..978: note = engineered CasX variant
QEIKRINKIRRRLVKDSNTKKAGKTGPMKTLLVRVMTPDLRERLENLRKKPENIPQPISNTSRANLNKLLTDYTEMKKAILHVYWEEFQKDPVGLMSRVAQPASKKIDQNKLKPEMDEKGNLTTAGFACSQCGQPLFVYKLEQVSEKGKAYTNYFGRCNVAEHEKLILLAQLKPEKDSDEAVTYSLGKFGQRALDFYSIHVTKESTHPVKPLAQIAGNRYASPVGKALSDACMGTIASFLSKYQDIIIEHQKVVKGNQKRLESLRELAGKENLEYPSVTLPPQPHTKEGVDAYNEVIARVRMWVNLNLWQKLKLSRDDAKPLLRLKGFPSFPLVERQANEVDWWDMVCNVKKLINEKKEDGKVFWQNLAGYKRQEALRPYLSSEEDRKKGKKFARYQLGDLLLHLEKKHGEDWGKVYDEAWERIDKKVEGLSKHIKLEEERRSEDAQSKAALTDWLRAKASFVIEGLKEADKDEFCRCELKLQKWYGDLRGKPFAIEAENSILDISGFSKQYNCAFIWQKDGVKKLNLYLIINYFKGGKLRFKKIKPEAFEANRFYTVINKKSGEIVPMEVNFNFDDPNLIILPLAFGKRQGREFIWNDLLSLETGSLKLANGRVIEKTLYNRRTRQDEPALFVALTFERREVLDSSNIKPMNLIGVDRGENIPAVIALTDPEGCPLSRFKDSLGNPTHILRIGESYKEKQRTIQAKKEVEQRRAGGYSRKYASKAKNLADDMVRNTARDLLYYAVTQDAMLIFENLSRGFGRQGKRTFMAERQYTRMEDWLTAKLAYEGPLASKTYLSKTLAQYTSKTCSNCGFTITSADYDRVLEKLKKTATGWMTTINGKELKVEGQITYYNRYKRQNVVKDLSVELDRLSEESVNNDISSWTKGRSGEALSLLKKRFSHRPVQEKFVCLNCGFETHADEQAALNIARSWLFLRSQEYKKYQTNKTTGNTDKRAFVETWQSFYRKKLKEVWKPAV

SEQ ID NO: 38777 - protein, 979 aa, synthetic construct
  REGION 1..979: note = engineered CasX variant
QEIKRINKIRRRLVKDSNTKKAGKTGPMKTLLVRVMTPDLRERLENLRKKPENIPQPISNTSRANLNKLLTDYTEMKKAILHVYWEEFQKDPVGLMSRVAQPASKKIDQNKLKPEMDEKGNLTTAGFACSQCGQPLFVYKLEQVSEKGKAYTNYFGRCNVAEHEKLILLAQLKPEKDSDEAVTYSLGKFGQRALDFYSIHVTKESTHPVKPLAQIAGNRYASYPVGKALSDACMGTIASFLSKYQDIIIEHQKVVKGNQKRLESLRELAGKENLEYPSVTLPPQPHTKEGVDAYNEVIARVRMWVNLNLWQKLKLSRDDAKPLLRLKGFPSFPLVERQANEVDWWDMVCNVKKLINEKKEDGKVFWQNLAGYKRQEALRPYLSSEEDVRKKGKKFARYQLGDLLLHLEKKHGEDWGKVYDEAWERIDKKVEGLSKHIKLEEERRSEDAQSKAALTDWLRAKASFVIEGLKEADKDEFCRCELKLQKWYGDLRGKPFAIEAENSILDISGFSKQYNCAFIWQKDGVKKLNLYLIINYFKGGKLRFKKIKPEAFEANRFYTVINKKSGEIVPMEVNFNFDDPNLIILPLAFGKRQGREFIWNDLLSLETGSLKLANGRVIEKTLYNRRTRQDEPALFVALTFERREVLDSSNIKPMNLIGVDRGENIPAVIALTDPEGCPLSRFKDSLGNPTHILRIGESYKEKQRTIQAKKEVEQRRAGGYSRKYASKAKNLADDMVRNTARDLLYYAVTQDAMLIFENLSRGFGRQGKRTFMAERQYTRMEDWLTAKLAYEGLASKTYLSKTLAQYTSKTCSNCGFTITSADYDRVLEKLKKTATGWMTTINGKELKVEGQITYYNRYKRQNVVKDLSVELDRLSEESVNNDISSWTKGRSGEALSLLKKRFSHRPVQEKFVCLNCGFETHADEQAALNIARSWLFLRSQEYKKYQTNKTTGNTDKRAFVETWQSFYRKKLKEVWKPAV

SEQ ID NO: 38778 - protein, 979 aa, synthetic construct
  REGION 1..979: note = engineered CasX variant
QEIKRINKIRRRLVKDSNTKKAGKTGPMKTLLVRVMTPDLRERLENLRKKPENIPQPISNTSRANLNKLLTDYTEMKKAILHVYWEEFQKDPVGLMSRVAQPASKKIDQNKLKPEMDEKGNLTTAGFACSQCGQPLFVYKLEQVSEKGKAYTNYFGRCNVAEHEKLILLAQLKPEKDSDEAVTYSLGKFGQRALDFYSIHVTKESTHPVKPLAQIAGNRYASHPVGKALSDACMGTIASFLSKYQDIIIEHQKVVKGNQKRLESLRELAGKENLEYPSVTLPPQPHTKEGVDAYNEVIARVRMWVNLNLWQKLKLSRDDAKPLLRLKGFPSFPLVERQANEVDWWDMVCNVKKLINEKKEDGKVFWQNLAGYKRQEALRPYLSSEEDVRKKGKKFARYQLGDLLLHLEKKHGEDWGKVYDEAWERIDKKVEGLSKHIKLEEERRSEDAQSKAALTDWLRAKASFVIEGLKEADKDEFCRCELKLQKWYGDLRGKPFAIEAENSILDISGFSKQYNCAFIWQKDGVKKLNLYLIINYFKGGKLRFKKIKPEAFEANRFYTVINKKSGEIVPMEVNFNFDDPNLIILPLAFGKRQGREFIWNDLLSLETGSLKLANGRVIEKTLYNRRTRQDEPALFVALTFERREVLDSSNIKPMNLIGVDRGENIPAVIALTDPEGCPLSRFKDSLGNPTHILRIGESYKEKQRTIQAKKEVEQRRAGGYSRKYASKAKNLADDMVRNTARDLLYYAVTQDAMLIFENLSRGFGRQGKRTFMAERQYTRMEDWLTAKLAYEGLASKTYLSKTLAQYTSKTCSNCGFTITSADYDRVLEKLKKTATGWMTTINGKELKVEGQITYYNRYKRQNVVKDLSVELDRLSEESVNNDISSWTKGRSGEALSLLKKRFSHRPVQEKFVCLNCGFETHADEQAALNIARSWLFLRSQEYKKYQTNKTTGNTDKRAFVETWQSFYRKKLKEVWKPAV

SEQ ID NO: 38779 - protein, 979 aa, synthetic construct
  REGION 1..979: note = engineered CasX variant
QEIKRINKIRRRLVKDSNTKKAGKTGPMKTLLVRVMTPDLRERLENLRKKPENIPQPISNTSRANLNKLLTDYTEMKKAILHVYWEEFQKDPVGLMSRVAQPASKKIDQNKLKPEMDEKGNLTTAGFACSQCGQPLFVYKLEQVSEKGKAYTNYFGRCNVAEHEKLILLAQLKPEKDSDEAVTYSLGKFGQRALDFYSIHVTKESTHPVKPLAQIAGNRYASSPVGKALSDACMGTIASFLSKYQDIIIEHQKVVKGNQKRLESLRELAGKENLEYPSVTLPPQPHTKEGVDAYNEVIARVRMWVNLNLWQKLKLSRDDAKPLLRLKGFPSFPLVERQANEVDWWDMVCNVKKLINEKKEDGKVFWQNLAGYKRQEALRPYLSSEEDVRKKGKKFARYQLGDLLLHLEKKHGEDWGKVYDEAWERIDKKVEGLSKHIKLEEERRSEDAQSKAALTDWLRAKASFVIEGLKEADKDEFCRCELKLQKWYGDLRGKPFAIEAENSILDISGFSKQYNCAFIWQKDGVKKLNLYLIINYFKGGKLRFKKIKPEAFEANRFYTVINKKSGEIVPMEVNFNFDDPNLIILPLAFGKRQGREFIWNDLLSLETGSLKLANGRVIEKTLYNRRTRQDEPALFVALTFERREVLDSSNIKPMNLIGVDRGENIPAVIALTDPEGCPLSRFKDSLGNPTHILRIGESYKEKQRTIQAKKEVEQRRAGGYSRKYASKAKNLADDMVRNTARDLLYYAVTQDAMLIFENLSRGFGRQGKRTFMAERQYTRMEDWLTAKLAYEGLASKTYLSKTLAQYTSKTCSNCGFTITSADYDRVLEKLKKTATGWMTTINGKELKVEGQITYYNRYKRQNVVKDLSVELDRLSEESVNNDISSWTKGRSGEALSLLKKRFSHRPVQEKFVCLNCGFETHADEQAALNIARSWLFLRSQEYKKYQTNKTTGNTDKRAFVETWQSFYRKKLKEVWKPAV

SEQ ID NO: 38780 - protein, 979 aa, synthetic construct
  REGION 1..979: note = engineered CasX variant
QEIKRINKIRRRLVKDSNTKKAGKTGPMKTLLVRVMTPDLRERLENLRKKPENIPQPISNTSRANLNKLLTDYTEMKKAILHVYWEEFQKDPVGLMSRVAQPASKKIDQNKLKPEMDEKGNLTTAGFACSQCGQPLFVYKLEQVSEKGKAYTNYFGRCNVAEHEKLILLAQLKPEKDSDEAVTYSLGKFGQRALDFYSIHVTKESTHPVKPLAQIAGNRYASTPVGKALSDACMGTIASFLSKYQDIIIEHQKVVKGNQKRLESLRELAGKENLEYPSVTLPPQPHTKEGVDAYNEVIARVRMWVNLNLWQKLKLSRDDAKPLLRLKGFPSFPLVERQANEVDWWDMVCNVKKLINEKKEDGKVFWQNLAGYKRQEALRPYLSSEEDVRKKGKKFARYQLGDLLLHLEKKHGEDWGKVYDEAWERIDKKVEGLSKHIKLEEERRSEDAQSKAALTDWLRAKASFVIEGLKEADKDEFCRCELKLQKWYGDLRGKPFAIEAENSILDISGFSKQYNCAFIWQKDGVKKLNLYLIINYFKGGKLRFKKIKPEAFEANRFYTVINKKSGEIVPMEVNFNFDDPNLIILPLAFGKRQGREFIWNDLLSLETGSLKLANGRVIEKTLYNRRTRQDEPALFVALTFERREVLDSSNIKPMNLIGVDRGENIPAVIALTDPEGCPLSRFKDSLGNPTHILRIGESYKEKQRTIQAKKEVEQRRAGGYSRKYASKAKNLADDMVRNTARDLLYYAVTQDAMLIFENLSRGFGRQGKRTFMAERQYTRMEDWLTAKLAYEGLASKTYLSKTLAQYTSKTCSNCGFTITSADYDRVLEKLKKTATGWMTTINGKELKVEGQITYYNRYKRQNVVKDLSVELDRLSEESVNNDISSWTKGRSGEALSLLKKRFSHRPVQEKFVCLNCGFETHADEQAALNIARSWLFLRSQEYKKYQTNKTTGNTDKRAFVETWQSFYRKKLKEVWKPAV

SEQ ID NO: 38781 - protein, 979 aa, synthetic construct
  REGION 1..979: note = engineered CasX variant
QEIKRINKIRRRLVKDSNTKKAGKTGPMKTLLVRVMTPDLRERLENLRKKPENIPQPISNTSRANLNKLLTDYTEMKKAILHVYWEEFQKDPVGLMSRVAQPASKKIDQNKLKPEMDEKGNLTTAGFACSQCGQPLFVYKLEQVSEKGKAYTNYFGRCNVAEHEKLILLAQLKPEKDSDEAVTYSLGKFGQRALDFYSIHVTKESTHPVKPLAQIAGNRYASAPVGKALSDACMGTIASFLSKYQDIIIEHQKVVKGNQKRLESLRELAGKENLEYPSVTLPPQPHTKEGVDAYNEVIARVRMWVNLNLWQKLKLSRDDAKPLLRLKGFPSFPLVERQANEVDWWDMVCNVKKLINEKKEDGKVFWQNLAGYKRQEALRPYLSSEEDVRKKGKKFARYQLGDLLLHLEKKHGEDWGKVYDEAWERIDKKVEGLSKHIKLEEERRSEDAQSKAALTDWLRAKASFVIEGLKEADKDEFCRCELKLQKWYGDLRGKPFAIEAENSILDISGFSKQYNCAFIWQKDGVKKLNLYLIINYFKGGKLRFKKIKPEAFEANRFYTVINKKSGEIVPMEVNFNFDDPNLIILPLAFGKRQGREFIWNDLLSLETGSLKLANGRVIEKTLYNRRTRQDEPALFVALTFERREVLDSSNIKPMNLIGVDRGENIPAVIALTDPEGCPLSRFKDSLGNPTHILRIGESYKEKQRTIQAKKEVEQRRAGGYSRKYASKAKNLADDMVRNTARDLLYYAVTQDAMLIFENLSRGFGRQGKRTFMAERQYTRMEDWLTAKLAYEGLASKTYLSKTLAQYTSKTCSNCGFTITSADYDRVLEKLKKTATGWMTTINGKELKVEGQITYYNRYKRQNVVKDLSVELDRLSEESVNNDISSWTKGRSGEALSLLKKRFSHRPVQEKFVCLNCGFETHADEQAALNIARSWLFLRSQEYKKYQTNKTTGNTDKRAFVETWQSFYRKKLKEVWKPAV

SEQ ID NO: 38782 - protein, 979 aa, synthetic construct
  REGION 1..979: note = engineered CasX variant
QEIKRINKIRRRLVKDSNTKKAGKTGPMKTLLVRVMTPDLRERLENLRKKPENIPQPISNTSRANLNKLLTDYTEMKKAILHVYWEEFQKDPVGLMSRVAQPASKKIDQNKLKPEMDEKGNLTTAGFACSQCGQPLFVYKLEQVSEKGKAYTNYFGRCNVAEHEKLILLAQLKPEKDSDEAVTYSLGKFGQRALDFYSIHVTKESTHPVKPLAQIAGNRYASVPVGKALSDACMGTIASFLSKYQDIIIEHQKVVKGNQKRLESLRELAGKENLEYPSVTLPPQPHTKEGVDAYNEVIARVRMWVNLNLWQKLKLSRDDAKPLLRLKGFPSFPLVERQANEVDWWDMVCNVKKLINEKKEDGKVFWQNLAGYKRQEALRPYLSSEEDVRKKGKKFARYQLGDLLLHLEKKHGEDWGKVYDEAWERIDKKVEGLSKHIKLEEERRSEDAQSKAALTDWLRAKASFVIEGLKEADKDEFCRCELKLQKWYGDLRGKPFAIEAENSILDISGFSKQYNCAFIWQKDGVKKLNLYLIINYFKGGKLRFKKIKPEAFEANRFYTVINKKSGEIVPMEVNFNFDDPNLIILPLAFGKRQGREFIWNDLLSLETGSLKLANGRVIEKTLYNRRTRQDEPALFVALTFERREVLDSSNIKPMNLIGVDRGENIPAVIALTDPEGCPLSRFKDSLGNPTHILRIGESYKEKQRTIQAKKEVEQRRAGGYSRKYASKAKNLADDMVRNTARDLLYYAVTQDAMLIFENLSRGFGRQGKRTFMAERQYTRMEDWLTAKLAYEGLASKTYLSKTLAQYTSKTCSNCGFTITSADYDRVLEKLKKTATGWMTTINGKELKVEGQITYYNRYKRQNVVKDLSVELDRLSEESVNNDISSWTKGRSGEALSLLKKRFSHRPVQEKFVCLNCGFETHADEQAALNIARSWLFLRSQEYKKYQTNKTTGNTDKRAFVETWQSFYRKKLKEVWKPAV

SEQ ID NO: 38783 - protein, 979 aa, synthetic construct
  REGION 1..979: note = engineered CasX variant
QEIKRINKIRRRLVKDSNTKKAGKTGPMKTLLVRVMTPDLRERLENLRKKPENIPQPISNTSRANLNKLLTDYTEMKKAILHVYWEEFQKDPVGLMSRVAQPASKKIDQNKLKPEMDEKGNLTTAGFACSQCGQPLFVYKLEQVSEKGKAYTNYFGRCNVAEHEKLIKLAQLKPEKDSDEAVTYSLGKFGQRALDFYSIHVTKESTHPVKPLAQIAGNRYASGPVGKALSDACMGTIASFLSKYQDIIIEHQKVVKGNQKRLESLRELAGKENLEYPSVTLPPQPHTKEGVDAYNEVIARVRMWVNLNLWQKLKLSRDDAKPLLRLKGFPSFPLVERQANEVDWWDMVCNVKKLINEKKEDGKVFWQNLAGYKRQEALRPYLSSEEDVRKKGKKFARYQLGDLLLHLEKKHGEDWGKVYDEAWERIDKKVEGLSKHIKLEEERRSEDAQSKAALTDWLRAKASFVIEGLKEADKDEFCRCELKLQKWYGDLRGKPFAIEAENSILDISGFSKQYNCAFIWQKDGVKKLNLYLIINYFKGGKLRFKKIKPEAFEANRFYTVINKKSGEIVPMEVNFNFDDPNLIILPLAFGKRQGREFIWNDLLSLETGSLKLANGRVIEKTLYNRRTRQDEPALFVALTFERREVLDSSNIKPMNLIGVDRGENIPAVIALTDPEGCPLSRFKDSLGNPTHILRIGESYKEKQRTIQAKKEVEQRRAGGYSRKYASKAKNLADDMVRNTARDLLYYAVTQDAMLIFENLSRGFGRQGKRTFMAERQYTRMEDWLTAKLAYEGLASKTYLSKTLAQYTSKTCSNCGFTITSADYDRVLEKLKKTATGWMTTINGKELKVEGQITYYNRYKRQNVVKDLSVELDRLSEESVNNDISSWTKGRSGEALSLLKKRFSHRPVQEKFVCLNCGFETHADEQAALNIARSWLFLRSQEYKKYQTNKTTGNTDKRAFVETWQSFYRKKLKEVWKPAV

SEQ ID NO: 38784 - protein, 978 aa, synthetic construct
  REGION 1..978: note = engineered CasX variant
QEIKRINKIRRRLVKDSNTKKAGKTGPMKTLLVRVMTPDLRERLENLRKKPENIPQPISNTSRANLNKLLTDYTEMKKAILHVYWEEFQKDPVGLMSRVAQPASKKIDQNKLKPEMDEKGNLTTAGFACSQCGQPLFVYKLEQVSEKGKAYTNYFGRCNVAEHEKLILLAQLKPEKDSDEAVTYSLGKFGQRALDFYSIHVTKESTHPVKPLAQIAGNRYASPVGKALSDACMGTIASFLSKYQDIIIEHQKVVKGNQKRLESLRELAGKENLEYPSVTLPPQPHTKEGVDAYNEVIARVRMWVNLNLWQKLKLSRDDAKPLLRLKGFPSFPLVERQANEVDWWDMVCNVKKLINEKKEDGKVFWQNLAGYKRQEALRPYLSSEEDVRKKGKKFARYQLGDLLLHLEKKHGEDWGKVYDEAWERIDKKVEGLSKHIKLEEERRSEDAQSKAALTDWLRAKASFVIEGLKEADKDEFCRCELKLQKWYGDLRGKPFAIEAENSILDISGFSKQYNCAFIWQKDGVKKLNLYLIINYFKGGKLRFKKIKPEAFEANRFYTVINKKSGEIVPMEVNFNFDDPNLIILPLAFGKRQGREFIWNDLLSLETGSLKLANGRVIEKTLYNRRTRQDEPALFVALTFERREVLDSSNIKPMNLIGVDRGENIPAVIALTDPEGCPLSRFKDSLGNPTHILRIGESYKEKQRTIQAKKEVEQRRAGGYSRKYASKAKNLADDMVRNTARDLLYYAVTQDAMLIFENLSRGFGRQGKRTFMAERQYTRMEDWLTAKLAYEGLASKTYLSKTLAQYTSKTCSNCGFTITSADYDRVLEKLKKTATGWMTTINGKELKVEGQITYYNRYKRQNVVKDLSVELDRLSEESVNNDISSWTKGRSGEALSLLKKRFSHRPVQEKFVCLNCGFETHADEQAALNIARSWLFLRSQEYKKYQTNKTTGNTDKRAFVETWQSFYRKKLKEVWKPAV

SEQ ID NO: 38785 - protein, 978 aa, synthetic construct
  REGION 1..978: note = engineered CasX variant
QEIKRINKIRRRLVKDSNTKKAGKTGPMKTLLVRVMTPDLRERLENLRKKPENIPQPISNTSRANLNKLLTDYTEMKKAILHVYWEEFQKDPVGLMSRVAQPASKKIDQNKLKPEMDEKGNLTTAGFACSQCGQPLFVYKLEQVSEKGKAYTNYFGRCNVAEHEKLILLAQLKPEKDSDEAVTYSLGKFGQRALDFYSIHVTKESTHPVKPLAQIAGNRYASYPVGKALSDACMGTIASFLSKYQDIIIEHQKVVKGNQKRLESLRELAGKENLEYPSVTLPPQPHTKEGVDAYNEVIARVRMWVNLNLWQKLKLSRDDAKPLLRLKGFPSFPLVERQANEVDWWDMVCNVKKLINEKKEDGKVFWQNLAGYKRQEALRPYLSSEEDRKKGKKFARYQLGDLLLHLEKKHGEDWGKVYDEAWERIDKKVEGLSKHIKLEEERRSEDAQSKAALTDWLRAKASFVIEGLKEADKDEFCRCELKLQKWYGDLRGKPFAIEAENSILDISGFSKQYNCAFIWQKDGVKKLNLYLIINYFKGGKLRFKKIKPEAFEANRFYTVINKKSGEIVPMEVNFNFDDPNLIILPLAFGKRQGREFIWNDLLSLETGSLKLANGRVIEKTLYNRRTRQDEPALFVALTFERREVLDSSNIKPMNLIGVDRGENIPAVIALTDPEGCPLSRFKDSLGNPTHILRIGESYKEKQRTIQAKKEVEQRRAGGYSRKYASKAKNLADDMVRNTARDLLYYAVTQDAMLIFENLSRGFGRQGKRTFMAERQYTRMEDWLTAKLAYEGLASKTYLSKTLAQYTSKTCSNCGFTITSADYDRMLEKLKKTATGWMTTINGKELKVEGQITYYNRYKRQNVVKDLSVELDRLSEESVNNDISSWTKGRSGEALSLLKKRFSHRPVQEKFVCLNCGFETHADEQAALNIARSWLFLRSQEYKKYQTNKTTGNTDKRAFVETWQSFYRKKLKEVWKPAV

SEQ ID NO: 38786 - protein, 978 aa, synthetic construct
  REGION 1..978: note = engineered CasX variant
QEIKRINKIRRRLVKDSNTKKAGKTGPMKTLLVRVMTPDLRERLENLRKKPENIPQPISNTSRANLNKLLTDYTEMKKAILHVYWEEFQKDPVGLMSRVAQPASKKIDQNKLKPEMDEKGNLTTAGFACSQCGQPLFVYKLEQVSEKGKAYTNYFGRCNVAEHEKLILLAQLKPEKDSDEAVTYSLGKFGQRALDFYSIHVTKESTHPVKPLAQIAGNRYASHPVGKALSDACMGTIASFLSKYQDIIIEHQKVVKGNQKRLESLRELAGKENLEYPSVTLPPQPHTKEGVDAYNEVIARVRMWVNLNLWQKLKLSRDDAKPLLRLKGFPSFPLVERQANEVDWWDMVCNVKKLINEKKEDGKVFWQNLAGYKRQEALRPYLSSEEDRKKGKKFARYQLGDLLLHLEKKHGEDWGKVYDEAWERIDKKVEGLSKHIKLEEERRSEDAQSKAALTDWLRAKASFVIEGLKEADKDEFCRCELKLQKWYGDLRGKPFAIEAENSILDISGFSKQYNCAFIWQKDGVKKLNLYLIINYFKGGKLRFKKIKPEAFEANRFYTVINKKSGEIVPMEVNFNFDDPNLIILPLAFGKRQGREFIWNDLLSLETGSLKLANGRVIEKTLYNRRTRQDEPALFVALTFERREVLDSSNIKPMNLIGVDRGENIPAVIALTDPEGCPLSRFKDSLGNPTHILRIGESYKEKQRTIQAKKEVEQRRAGGYSRKYASKAKNLADDMVRNTARDLLYYAVTQDAMLIFENLSRGFGRQGKRTFMAERQYTRMEDWLTAKLAYEGLASKTYLSKTLAQYTSKTCSNCGFTITSADYDRMLEKLKKTATGWMTTINGKELKVEGQITYYNRYKRQNVVKDLSVELDRLSEESVNNDISSWTKGRSGEALSLLKKRFSHRPVQEKFVCLNCGFETHADEQAALNIARSWLFLRSQEYKKYQTNKTTGNTDKRAFVETWQSFYRKKLKEVWKPAV

SEQ ID NO: 38787 - protein, 978 aa, synthetic construct
  REGION 1..978: note = engineered CasX variant
QEIKRINKIRRRLVKDSNTKKAGKTGPMKTLLVRVMTPDLRERLENLRKKPENIPQPISNTSRANLNKLLTDYTEMKKAILHVYWEEFQKDPVGLMSRVAQPASKKIDQNKLKPEMDEKGNLTTAGFACSQCGQPLFVYKLEQVSEKGKAYTNYFGRCNVAEHEKLILLAQLKPEKDSDEAVTYSLGKFGQRALDFYSIHVTKESTHPVKPLAQIAGNRYASSPVGKALSDACMGTIASFLSKYQDIIIEHQKVVKGNQKRLESLRELAGKENLEYPSVTLPPQPHTKEGVDAYNEVIARVRMWVNLNLWQKLKLSRDDAKPLLRLKGFPSFPLVERQANEVDWWDMVCNVKKLINEKKEDGKVFWQNLAGYKRQEALRPYLSSEEDRKKGKKFARYQLGDLLLHLEKKHGEDWGKVYDEAWERIDKKVEGLSKHIKLEEERRSEDAQSKAALTDWLRAKASFVIEGLKEADKDEFCRCELKLQKWYGDLRGKPFAIEAENSILDISGFSKQYNCAFIWQKDGVKKLNLYLIINYFKGGKLRFKKIKPEAFEANRFYTVINKKSGEIVPMEVNFNFDDPNLIILPLAFGKRQGREFIWNDLLSLETGSLKLANGRVIEKTLYNRRTRQDEPALFVALTFERREVLDSSNIKPMNLIGVDRGENIPAVIALTDPEGCPLSRFKDSLGNPTHILRIGESYKEKQRTIQAKKEVEQRRAGGYSRKYASKAKNLADDMVRNTARDLLYYAVTQDAMLIFENLSRGFGRQGKRTFMAERQYTRMEDWLTAKLAYEGLASKTYLSKTLAQYTSKTCSNCGFTITSADYDRMLEKLKKTATGWMTTINGKELKVEGQITYYNRYKRQNVVKDLSVELDRLSEESVNNDISSWTKGRSGEALSLLKKRFSHRPVQEKFVCLNCGFETHADEQAALNIARSWLFLRSQEYKKYQTNKTTGNTDKRAFVETWQSFYRKKLKEVWKPAV

SEQ ID NO: 38788 - protein, 978 aa, synthetic construct
  REGION 1..978: note = engineered CasX variant
QEIKRINKIRRRLVKDSNTKKAGKTGPMKTLLVRVMTPDLRERLENLRKKPENIPQPISNTSRANLNKLLTDYTEMKKAILHVYWEEFQKDPVGLMSRVAQPASKKIDQNKLKPEMDEKGNLTTAGFACSQCGQPLFVYKLEQVSEKGKAYTNYFGRCNVAEHEKLILLAQLKPEKDSDEAVTYSLGKFGQRALDFYSIHVTKESTHPVKPLAQIAGNRYASTPVGKALSDACMGTIASFLSKYQDIIIEHQKVVKGNQKRLESLRELAGKENLEYPSVTLPPQPHTKEGVDAYNEVIARVRMWVNLNLWQKLKLSRDDAKPLLRLKGFPSFPLVERQANEVDWWDMVCNVKKLINEKKEDGKVFWQNLAGYKRQEALRPYLSSEEDRKKGKKFARYQLGDLLLHLEKKHGEDWGKVYDEAWERIDKKVEGLSKHIKLEEERRSEDAQSKAALTDWLRAKASFVIEGLKEADKDEFCRCELKLQKWYGDLRGKPFAIEAENSILDISGFSKQYNCAFIWQKDGVKKLNLYLIINYFKGGKLRFKKIKPEAFEANRFYTVINKKSGEIVPMEVNFNFDDPNLIILPLAFGKRQGREFIWNDLLSLETGSLKLANGRVIEKTLYNRRTRQDEPALFVALTFERREVLDSSNIKPMNLIGVDRGENIPAVIALTDPEGCPLSRFKDSLGNPTHILRIGESYKEKQRTIQAKKEVEQRRAGGYSRKYASKAKNLADDMVRNTARDLLYYAVTQDAMLIFENLSRGFGRQGKRTFMAERQYTRMEDWLTAKLAYEGLASKTYLSKTLAQYTSKTCSNCGFTITSADYDRMLEKLKKTATGWMTTINGKELKVEGQITYYNRYKRQNVVKDLSVELDRLSEESVNNDISSWTKGRSGEALSLLKKRFSHRPVQEKFVCLNCGFETHADEQAALNIARSWLFLRSQEYKKYQTNKTTGNTDKRAFVETWQSFYRKKLKEVWKPAV

SEQ ID NO: 38789 - protein, 978 aa, synthetic construct
  REGION 1..978: note = engineered CasX variant
QEIKRINKIRRRLVKDSNTKKAGKTGPMKTLLVRVMTPDLRERLENLRKKPENIPQPISNTSRANLNKLLTDYTEMKKAILHVYWEEFQKDPVGLMSRVAQPASKKIDQNKLKPEMDEKGNLTTAGFACSQCGQPLFVYKLEQVSEKGKAYTNYFGRCNVAEHEKLILLAQLKPEKDSDEAVTYSLGKFGQRALDFYSIHVTKESTHPVKPLAQIAGNRYASAPVGKALSDACMGTIASFLSKYQDIIIEHQKVVKGNQKRLESLRELAGKENLEYPSVTLPPQPHTKEGVDAYNEVIARVRMWVNLNLWQKLKLSRDDAKPLLRLKGFPSFPLVERQANEVDWWDMVCNVKKLINEKKEDGKVFWQNLAGYKRQEALRPYLSSEEDRKKGKKFARYQLGDLLLHLEKKHGEDWGKVYDEAWERIDKKVEGLSKHIKLEEERRSEDAQSKAALTDWLRAKASFVIEGLKEADKDEFCRCELKLQKWYGDLRGKPFAIEAENSILDISGFSKQYNCAFIWQKDGVKKLNLYLIINYFKGGKLRFKKIKPEAFEANRFYTVINKKSGEIVPMEVNFNFDDPNLIILPLAFGKRQGREFIWNDLLSLETGSLKLANGRVIEKTLYNRRTRQDEPALFVALTFERREVLDSSNIKPMNLIGVDRGENIPAVIALTDPEGCPLSRFKDSLGNPTHILRIGESYKEKQRTIQAKKEVEQRRAGGYSRKYASKAKNLADDMVRNTARDLLYYAVTQDAMLIFENLSRGFGRQGKRTFMAERQYTRMEDWLTAKLAYEGLASKTYLSKTLAQYTSKTCSNCGFTITSADYDRMLEKLKKTATGWMTTINGKELKVEGQITYYNRYKRQNVVKDLSVELDRLSEESVNNDISSWTKGRSGEALSLLKKRFSHRPVQEKFVCLNCGFETHADEQAALNIARSWLFLRSQEYKKYQTNKTTGNTDKRAFVETWQSFYRKKLKEVWKPAV

SEQ ID NO: 38790 - protein, 978 aa, synthetic construct
  REGION 1..978: note = engineered CasX variant
QEIKRINKIRRRLVKDSNTKKAGKTGPMKTLLVRVMTPDLRERLENLRKKPENIPQPISNTSRANLNKLLTDYTEMKKAILHVYWEEFQKDPVGLMSRVAQPASKKIDQNKLKPEMDEKGNLTTAGFACSQCGQPLFVYKLEQVSEKGKAYTNYFGRCNVAEHEKLILLAQLKPEKDSDEAVTYSLGKFGQRALDFYSIHVTKESTHPVKPLAQIAGNRYASVPVGKALSDACMGTIASFLSKYQDIIIEHQKVVKGNQKRLESLRELAGKENLEYPSVTLPPQPHTKEGVDAYNEVIARVRMWVNLNLWQKLKLSRDDAKPLLRLKGFPSFPLVERQANEVDWWDMVCNVKKLINEKKEDGKVFWQNLAGYKRQEALRPYLSSEEDRKKGKKFARYQLGDLLLHLEKKHGEDWGKVYDEAWERIDKKVEGLSKHIKLEEERRSEDAQSKAALTDWLRAKASFVIEGLKEADKDEFCRCELKLQKWYGDLRGKPFAIEAENSILDISGFSKQYNCAFIWQKDGVKKLNLYLIINYFKGGKLRFKKIKPEAFEANRFYTVINKKSGEIVPMEVNFNFDDPNLIILPLAFGKRQGREFIWNDLLSLETGSLKLANGRVIEKTLYNRRTRQDEPALFVALTFERREVLDSSNIKPMNLIGVDRGENIPAVIALTDPEGCPLSRFKDSLGNPTHILRIGESYKEKQRTIQAKKEVEQRRAGGYSRKYASKAKNLADDMVRNTARDLLYYAVTQDAMLIFENLSRGFGRQGKRTFMAERQYTRMEDWLTAKLAYEGLASKTYLSKTLAQYTSKTCSNCGFTITSADYDRMLEKLKKTATGWMTTINGKELKVEGQITYYNRYKRQNVVKDLSVELDRLSEESVNNDISSWTKGRSGEALSLLKKRFSHRPVQEKFVCLNCGFETHADEQAALNIARSWLFLRSQEYKKYQTNKTTGNTDKRAFVETWQSFYRKKLKEVWKPAV

SEQ ID NO: 38791 - protein, 978 aa, synthetic construct
  REGION 1..978: note = engineered CasX variant
QEIKRINKIRRRLVKDSNTKKAGKTGPMKTLLVRVMTPDLRERLENLRKKPENIPQPISNTSRANLNKLLTDYTEMKKAILHVYWEEFQKDPVGLMSRVAQPASKKIDQNKLKPEMDEKGNLTTAGFACSQCGQPLFVYKLEQVSEKGKAYTNYFGRCNVAEHEKLIKLAQLKPEKDSDEAVTYSLGKFGQRALDFYSIHVTKESTHPVKPLAQIAGNRYASGPVGKALSDACMGTIASFLSKYQDIIIEHQKVVKGNQKRLESLRELAGKENLEYPSVTLPPQPHTKEGVDAYNEVIARVRMWVNLNLWQKLKLSRDDAKPLLRLKGFPSFPLVERQANEVDWWDMVCNVKKLINEKKEDGKVFWQNLAGYKRQEALRPYLSSEEDRKKGKKFARYQLGDLLLHLEKKHGEDWGKVYDEAWERIDKKVEGLSKHIKLEEERRSEDAQSKAALTDWLRAKASFVIEGLKEADKDEFCRCELKLQKWYGDLRGKPFAIEAENSILDISGFSKQYNCAFIWQKDGVKKLNLYLIINYFKGGKLRFKKIKPEAFEANRFYTVINKKSGEIVPMEVNFNFDDPNLIILPLAFGKRQGREFIWNDLLSLETGSLKLANGRVIEKTLYNRRTRQDEPALFVALTFERREVLDSSNIKPMNLIGVDRGENIPAVIALTDPEGCPLSRFKDSLGNPTHILRIGESYKEKQRTIQAKKEVEQRRAGGYSRKYASKAKNLADDMVRNTARDLLYYAVTQDAMLIFENLSRGFGRQGKRTFMAERQYTRMEDWLTAKLAYEGLASKTYLSKTLAQYTSKTCSNCGFTITSADYDRMLEKLKKTATGWMTTINGKELKVEGQITYYNRYKRQNVVKDLSVELDRLSEESVNNDISSWTKGRSGEALSLLKKRFSHRPVQEKFVCLNCGFETHADEQAALNIARSWLFLRSQEYKKYQTNKTTGNTDKRAFVETWQSFYRKKLKEVWKPAV

SEQ ID NO: 38792 - protein, 977 aa, synthetic construct
  REGION 1..977: note = engineered CasX variant
QEIKRINKIRRRLVKDSNTKKAGKTGPMKTLLVRVMTPDLRERLENLRKKPENIPQPISNTSRANLNKLLTDYTEMKKAILHVYWEEFQKDPVGLMSRVAQPASKKIDQNKLKPEMDEKGNLTTAGFACSQCGQPLFVYKLEQVSEKGKAYTNYFGRCNVAEHEKLILLAQLKPEKDSDEAVTYSLGKFGQRALDFYSIHVTKESTHPVKPLAQIAGNRYASPVGKALSDACMGTIASFLSKYQDIIIEHQKVVKGNQKRLESLRELAGKENLEYPSVTLPPQPHTKEGVDAYNEVIARVRMWVNLNLWQKLKLSRDDAKPLLRLKGFPSFPLVERQANEVDWWDMVCNVKKLINEKKEDGKVFWQNLAGYKRQEALRPYLSSEEDRKKGKKFARYQLGDLLLHLEKKHGEDWGKVYDEAWERIDKKVEGLSKHIKLEEERRSEDAQSKAALTDWLRAKASFVIEGLKEADKDEFCRCELKLQKWYGDLRGKPFAIEAENSILDISGFSKQYNCAFIWQKDGVKKLNLYLIINYFKGGKLRFKKIKPEAFEANRFYTVINKKSGEIVPMEVNFNFDDPNLIILPLAFGKRQGREFIWNDLLSLETGSLKLANGRVIEKTLYNRRTRQDEPALFVALTFERREVLDSSNIKPMNLIGVDRGENIPAVIALTDPEGCPLSRFKDSLGNPTHILRIGESYKEKQRTIQAKKEVEQRRAGGYSRKYASKAKNLADDMVRNTARDLLYYAVTQDAMLIFENLSRGFGRQGKRTFMAERQYTRMEDWLTAKLAYEGLASKTYLSKTLAQYTSKTCSNCGFTITSADYDRMLEKLKKTATGWMTTINGKELKVEGQITYYNRYKRQNVVKDLSVELDRLSEESVNNDISSWTKGRSGEALSLLKKRFSHRPVQEKFVCLNCGFETHADEQAALNIARSWLFLRSQEYKKYQTNKTTGNTDKRAFVETWQSFYRKKLKEVWKPAV

SEQ ID NO: 38793 - protein, 978 aa, synthetic construct
  REGION 1..978: note = engineered CasX variant
QEIKRINKIRRRLVKDSNTKKAGKTGPMKTLLVRVMTPDLRERLENLRKKPENIPQPISNTSRANLNKLLTDYTEMKKAILHVYWEEFQKDPVGLMSRVAQPASKKIDQNKLKPEMDEKGNLTTAGFACSQCGQPLFVYKLEQVSEKGKAYTNYFGRCNVAEHEKLILLAQLKPEKDSDEAVTYSLGKFGQRALDFYSIHVTKESTHPVKPLAQIAGNRYASYPVGKALSDACMGTIASFLSKYQDIIIEHQKVVKGNQKRLESLRELAGKENLEYPSVTLPPQPHTKEGVDAYNEVIARVRMWVNLNLWQKLKLSRDDAKPLLRLKGFPSFPLVERQANEVDWWDMVCNVKKLINEKKEDGKVFWQNLAGYKRQEALRPYLSSEEDRKKGKKFARYQLGDLLLHLEKKHGEDWGKVYDEAWERIDKKVEGLSKHIKLEEERRSEDAQSKAALTDWLRAKASFVIEGLKEADKDEFCRCELKLQKWYGDLRGKPFAIEAENSILDISGFSKQYNCAFIWQKDGVKKLNLYLIINYFKGGKLRFKKIKPEAFEANRFYTVINKKSGEIVPMEVNFNFDDPNLIILPLAFGKRQGREFIWNDLLSLETGSLKLANGRVIEKTLYNRRTRQDEPALFVALTFERREVLDSSNIKPMNLIGVDRGENIPAVIALTDPEGCPLSRFKDSLGNPTHILRIGESYKEKQRTIQAKKEVEQRRAGGYSRKYASKAKNLADDMVRNTARDLLYYAVTQDAMLIFENLSRGFGRQGKRTFMAERQYTRMEDWLTAKLAYEGLASKTYLSKTLAQYTSKTCSNCGFTITSADYDRVLEKLKKTATGWMTTINGKELKVEGQITYYNRYKRQNVVKDLSVELDRLSEESVNNDISSWTKGRQGEALSLLKKRFSHRPVQEKFVCLNCGFETHADEQAALNIARSWLFLRSQEYKKYQTNKTTGNTDKRAFVETWQSFYRKKLKEVWKPAV

SEQ ID NO: 38794 - protein, 978 aa, synthetic construct
  REGION 1..978: note = engineered CasX variant
QEIKRINKIRRRLVKDSNTKKAGKTGPMKTLLVRVMTPDLRERLENLRKKPENIPQPISNTSRANLNKLLTDYTEMKKAILHVYWEEFQKDPVGLMSRVAQPASKKIDQNKLKPEMDEKGNLTTAGFACSQCGQPLFVYKLEQVSEKGKAYTNYFGRCNVAEHEKLILLAQLKPEKDSDEAVTYSLGKFGQRALDFYSIHVTKESTHPVKPLAQIAGNRYASHPVGKALSDACMGTIASFLSKYQDIIIEHQKVVKGNQKRLESLRELAGKENLEYPSVTLPPQPHTKEGVDAYNEVIARVRMWVNLNLWQKLKLSRDDAKPLLRLKGFPSFPLVERQANEVDWWDMVCNVKKLINEKKEDGKVFWQNLAGYKRQEALRPYLSSEEDRKKGKKFARYQLGDLLLHLEKKHGEDWGKVYDEAWERIDKKVEGLSKHIKLEEERRSEDAQSKAALTDWLRAKASFVIEGLKEADKDEFCRCELKLQKWYGDLRGKPFAIEAENSILDISGFSKQYNCAFIWQKDGVKKLNLYLIINYFKGGKLRFKKIKPEAFEANRFYTVINKKSGEIVPMEVNFNFDDPNLIILPLAFGKRQGREFIWNDLLSLETGSLKLANGRVIEKTLYNRRTRQDEPALFVALTFERREVLDSSNIKPMNLIGVDRGENIPAVIALTDPEGCPLSRFKDSLGNPTHILRIGESYKEKQRTIQAKKEVEQRRAGGYSRKYASKAKNLADDMVRNTARDLLYYAVTQDAMLIFENLSRGFGRQGKRTFMAERQYTRMEDWLTAKLAYEGLASKTYLSKTLAQYTSKTCSNCGFTITSADYDRVLEKLKKTATGWMTTINGKELKVEGQITYYNRYKRQNVVKDLSVELDRLSEESVNNDISSWTKGRQGEALSLLKKRFSHRPVQEKFVCLNCGFETHADEQAALNIARSWLFLRSQEYKKYQTNKTTGNTDKRAFVETWQSFYRKKLKEVWKPAV

SEQ ID NO: 38795 - protein, 978 aa, synthetic construct
  REGION 1..978: note = engineered CasX variant
QEIKRINKIRRRLVKDSNTKKAGKTGPMKTLLVRVMTPDLRERLENLRKKPENIPQPISNTSRANLNKLLTDYTEMKKAILHVYWEEFQKDPVGLMSRVAQPASKKIDQNKLKPEMDEKGNLTTAGFACSQCGQPLFVYKLEQVSEKGKAYTNYFGRCNVAEHEKLILLAQLKPEKDSDEAVTYSLGKFGQRALDFYSIHVTKESTHPVKPLAQIAGNRYASSPVGKALSDACMGTIASFLSKYQDIIIEHQKVVKGNQKRLESLRELAGKENLEYPSVTLPPQPHTKEGVDAYNEVIARVRMWVNLNLWQKLKLSRDDAKPLLRLKGFPSFPLVERQANEVDWWDMVCNVKKLINEKKEDGKVFWQNLAGYKRQEALRPYLSSEEDRKKGKKFARYQLGDLLLHLEKKHGEDWGKVYDEAWERIDKKVEGLSKHIKLEEERRSEDAQSKAALTDWLRAKASFVIEGLKEADKDEFCRCELKLQKWYGDLRGKPFAIEAENSILDISGFSKQYNCAFIWQKDGVKKLNLYLIINYFKGGKLRFKKIKPEAFEANRFYTVINKKSGEIVPMEVNFNFDDPNLIILPLAFGKRQGREFIWNDLLSLETGSLKLANGRVIEKTLYNRRTRQDEPALFVALTFERREVLDSSNIKPMNLIGVDRGENIPAVIALTDPEGCPLSRFKDSLGNPTHILRIGESYKEKQRTIQAKKEVEQRRAGGYSRKYASKAKNLADDMVRNTARDLLYYAVTQDAMLIFENLSRGFGRQGKRTFMAERQYTRMEDWLTAKLAYEGLASKTYLSKTLAQYTSKTCSNCGFTITSADYDRVLEKLKKTATGWMTTINGKELKVEGQITYYNRYKRQNVVKDLSVELDRLSEESVNNDISSWTKGRQGEALSLLKKRFSHRPVQEKFVCLNCGFETHADEQAALNIARSWLFLRSQEYKKYQTNKTTGNTDKRAFVETWQSFYRKKLKEVWKPAV

SEQ ID NO: 38796 - protein, 978 aa, synthetic construct
  REGION 1..978: note = engineered CasX variant
QEIKRINKIRRRLVKDSNTKKAGKTGPMKTLLVRVMTPDLRERLENLRKKPENIPQPISNTSRANLNKLLTDYTEMKKAILHVYWEEFQKDPVGLMSRVAQPASKKIDQNKLKPEMDEKGNLTTAGFACSQCGQPLFVYKLEQVSEKGKAYTNYFGRCNVAEHEKLILLAQLKPEKDSDEAVTYSLGKFGQRALDFYSIHVTKESTHPVKPLAQIAGNRYASTPVGKALSDACMGTIASFLSKYQDIIIEHQKVVKGNQKRLESLRELAGKENLEYPSVTLPPQPHTKEGVDAYNEVIARVRMWVNLNLWQKLKLSRDDAKPLLRLKGFPSFPLVERQANEVDWWDMVCNVKKLINEKKEDGKVFWQNLAGYKRQEALRPYLSSEEDRKKGKKFARYQLGDLLLHLEKKHGEDWGKVYDEAWERIDKKVEGLSKHIKLEEERRSEDAQSKAALTDWLRAKASFVIEGLKEADKDEFCRCELKLQKWYGDLRGKPFAIEAENSILDISGFSKQYNCAFIWQKDGVKKLNLYLIINYFKGGKLRFKKIKPEAFEANRFYTVINKKSGEIVPMEVNFNFDDPNLIILPLAFGKRQGREFIWNDLLSLETGSLKLANGRVIEKTLYNRRTRQDEPALFVALTFERREVLDSSNIKPMNLIGVDRGENIPAVIALTDPEGCPLSRFKDSLGNPTHILRIGESYKEKQRTIQAKKEVEQRRAGGYSRKYASKAKNLADDMVRNTARDLLYYAVTQDAMLIFENLSRGFGRQGKRTFMAERQYTRMEDWLTAKLAYEGLASKTYLSKTLAQYTSKTCSNCGFTITSADYDRVLEKLKKTATGWMTTINGKELKVEGQITYYNRYKRQNVVKDLSVELDRLSEESVNNDISSWTKGRQGEALSLLKKRFSHRPVQEKFVCLNCGFETHADEQAALNIARSWLFLRSQEYKKYQTNKTTGNTDKRAFVETWQSFYRKKLKEVWKPAV

SEQ ID NO: 38797 - protein, 978 aa, synthetic construct
  REGION 1..978: note = engineered CasX variant
QEIKRINKIRRRLVKDSNTKKAGKTGPMKTLLVRVMTPDLRERLENLRKKPENIPQPISNTSRANLNKLLTDYTEMKKAILHVYWEEFQKDPVGLMSRVAQPASKKIDQNKLKPEMDEKGNLTTAGFACSQCGQPLFVYKLEQVSEKGKAYTNYFGRCNVAEHEKLILLAQLKPEKDSDEAVTYSLGKFGQRALDFYSIHVTKESTHPVKPLAQIAGNRYASAPVGKALSDACMGTIASFLSKYQDIIIEHQKVVKGNQKRLESLRELAGKENLEYPSVTLPPQPHTKEGVDAYNEVIARVRMWVNLNLWQKLKLSRDDAKPLLRLKGFPSFPLVERQANEVDWWDMVCNVKKLINEKKEDGKVFWQNLAGYKRQEALRPYLSSEEDRKKGKKFARYQLGDLLLHLEKKHGEDWGKVYDEAWERIDKKVEGLSKHIKLEEERRSEDAQSKAALTDWLRAKASFVIEGLKEADKDEFCRCELKLQKWYGDLRGKPFAIEAENSILDISGFSKQYNCAFIWQKDGVKKLNLYLIINYFKGGKLRFKKIKPEAFEANRFYTVINKKSGEIVPMEVNFNFDDPNLIILPLAFGKRQGREFIWNDLLSLETGSLKLANGRVIEKTLYNRRTRQDEPALFVALTFERREVLDSSNIKPMNLIGVDRGENIPAVIALTDPEGCPLSRFKDSLGNPTHILRIGESYKEKQRTIQAKKEVEQRRAGGYSRKYASKAKNLADDMVRNTARDLLYYAVTQDAMLIFENLSRGFGRQGKRTFMAERQYTRMEDWLTAKLAYEGLASKTYLSKTLAQYTSKTCSNCGFTITSADYDRVLEKLKKTATGWMTTINGKELKVEGQITYYNRYKRQNVVKDLSVELDRLSEESVNNDISSWTKGRQGEALSLLKKRFSHRPVQEKFVCLNCGFETHADEQAALNIARSWLFLRSQEYKKYQTNKTTGNTDKRAFVETWQSFYRKKLKEVWKPAV

SEQ ID NO: 38798 - protein, 978 aa, synthetic construct
  REGION 1..978: note = engineered CasX variant
QEIKRINKIRRRLVKDSNTKKAGKTGPMKTLLVRVMTPDLRERLENLRKKPENIPQPISNTSRANLNKLLTDYTEMKKAILHVYWEEFQKDPVGLMSRVAQPASKKIDQNKLKPEMDEKGNLTTAGFACSQCGQPLFVYKLEQVSEKGKAYTNYFGRCNVAEHEKLILLAQLKPEKDSDEAVTYSLGKFGQRALDFYSIHVTKESTHPVKPLAQIAGNRYASVPVGKALSDACMGTIASFLSKYQDIIIEHQKVVKGNQKRLESLRELAGKENLEYPSVTLPPQPHTKEGVDAYNEVIARVRMWVNLNLWQKLKLSRDDAKPLLRLKGFPSFPLVERQANEVDWWDMVCNVKKLINEKKEDGKVFWQNLAGYKRQEALRPYLSSEEDRKKGKKFARYQLGDLLLHLEKKHGEDWGKVYDEAWERIDKKVEGLSKHIKLEEERRSEDAQSKAALTDWLRAKASFVIEGLKEADKDEFCRCELKLQKWYGDLRGKPFAIEAENSILDISGFSKQYNCAFIWQKDGVKKLNLYLIINYFKGGKLRFKKIKPEAFEANRFYTVINKKSGEIVPMEVNFNFDDPNLIILPLAFGKRQGREFIWNDLLSLETGSLKLANGRVIEKTLYNRRTRQDEPALFVALTFERREVLDSSNIKPMNLIGVDRGENIPAVIALTDPEGCPLSRFKDSLGNPTHILRIGESYKEKQRTIQAKKEVEQRRAGGYSRKYASKAKNLADDMVRNTARDLLYYAVTQDAMLIFENLSRGFGRQGKRTFMAERQYTRMEDWLTAKLAYEGLASKTYLSKTLAQYTSKTCSNCGFTITSADYDRVLEKLKKTATGWMTTINGKELKVEGQITYYNRYKRQNVVKDLSVELDRLSEESVNNDISSWTKGRQGEALSLLKKRFSHRPVQEKFVCLNCGFETHADEQAALNIARSWLFLRSQEYKKYQTNKTTGNTDKRAFVETWQSFYRKKLKEVWKPAV

SEQ ID NO: 38799 - protein, 978 aa, synthetic construct
  REGION 1..978: note = engineered CasX variant
QEIKRINKIRRRLVKDSNTKKAGKTGPMKTLLVRVMTPDLRERLENLRKKPENIPQPISNTSRANLNKLLTDYTEMKKAILHVYWEEFQKDPVGLMSRVAQPASKKIDQNKLKPEMDEKGNLTTAGFACSQCGQPLFVYKLEQVSEKGKAYTNYFGRCNVAEHEKLIKLAQLKPEKDSDEAVTYSLGKFGQRALDFYSIHVTKESTHPVKPLAQIAGNRYASGPVGKALSDACMGTIASFLSKYQDIIIEHQKVVKGNQKRLESLRELAGKENLEYPSVTLPPQPHTKEGVDAYNEVIARVRMWVNLNLWQKLKLSRDDAKPLLRLKGFPSFPLVERQANEVDWWDMVCNVKKLINEKKEDGKVFWQNLAGYKRQEALRPYLSSEEDRKKGKKFARYQLGDLLLHLEKKHGEDWGKVYDEAWERIDKKVEGLSKHIKLEEERRSEDAQSKAALTDWLRAKASFVIEGLKEADKDEFCRCELKLQKWYGDLRGKPFAIEAENSILDISGFSKQYNCAFIWQKDGVKKLNLYLIINYFKGGKLRFKKIKPEAFEANRFYTVINKKSGEIVPMEVNFNFDDPNLIILPLAFGKRQGREFIWNDLLSLETGSLKLANGRVIEKTLYNRRTRQDEPALFVALTFERREVLDSSNIKPMNLIGVDRGENIPAVIALTDPEGCPLSRFKDSLGNPTHILRIGESYKEKQRTIQAKKEVEQRRAGGYSRKYASKAKNLADDMVRNTARDLLYYAVTQDAMLIFENLSRGFGRQGKRTFMAERQYTRMEDWLTAKLAYEGLASKTYLSKTLAQYTSKTCSNCGFTITSADYDRVLEKLKKTATGWMTTINGKELKVEGQITYYNRYKRQNVVKDLSVELDRLSEESVNNDISSWTKGRQGEALSLLKKRFSHRPVQEKFVCLNCGFETHADEQAALNIARSWLFLRSQEYKKYQTNKTTGNTDKRAFVETWQSFYRKKLKEVWKPAV

SEQ ID NO: 38800 - protein, 977 aa, synthetic construct
  REGION 1..977: note = engineered CasX variant
QEIKRINKIRRRLVKDSNTKKAGKTGPMKTLLVRVMTPDLRERLENLRKKPENIPQPISNTSRANLNKLLTDYTEMKKAILHVYWEEFQKDPVGLMSRVAQPASKKIDQNKLKPEMDEKGNLTTAGFACSQCGQPLFVYKLEQVSEKGKAYTNYFGRCNVAEHEKLILLAQLKPEKDSDEAVTYSLGKFGQRALDFYSIHVTKESTHPVKPLAQIAGNRYASPVGKALSDACMGTIASFLSKYQDIIIEHQKVVKGNQKRLESLRELAGKENLEYPSVTLPPQPHTKEGVDAYNEVIARVRMWVNLNLWQKLKLSRDDAKPLLRLKGFPSFPLVERQANEVDWWDMVCNVKKLINEKKEDGKVFWQNLAGYKRQEALRPYLSSEEDRKKGKKFARYQLGDLLLHLEKKHGEDWGKVYDEAWERIDKKVEGLSKHIKLEEERRSEDAQSKAALTDWLRAKASFVIEGLKEADKDEFCRCELKLQKWYGDLRGKPFAIEAENSILDISGFSKQYNCAFIWQKDGVKKLNLYLIINYFKGGKLRFKKIKPEAFEANRFYTVINKKSGEIVPMEVNFNFDDPNLIILPLAFGKRQGREFIWNDLLSLETGSLKLANGRVIEKTLYNRRTRQDEPALFVALTFERREVLDSSNIKPMNLIGVDRGENIPAVIALTDPEGCPLSRFKDSLGNPTHILRIGESYKEKQRTIQAKKEVEQRRAGGYSRKYASKAKNLADDMVRNTARDLLYYAVTQDAMLIFENLSRGFGRQGKRTFMAERQYTRMEDWLTAKLAYEGLASKTYLSKTLAQYTSKTCSNCGFTITSADYDRVLEKLKKTATGWMTTINGKELKVEGQITYYNRYKRQNVVKDLSVELDRLSEESVNNDISSWTKGRQGEALSLLKKRFSHRPVQEKFVCLNCGFETHADEQAALNIARSWLFLRSQEYKKYQTNKTTGNTDKRAFVETWQSFYRKKLKEVWKPAV

SEQ ID NO: 38801 - protein, 978 aa, synthetic construct
  REGION 1..978: note = engineered CasX variant
QEIKRINKIRRRLVKDSNTKKAGKTGPMKTLLVRVMTPDLRERLENLRKKPENIPQPISNTSRANLNKLLTDYTEMKKAILHVYWEEFQKDPVGLMSRVAQPASKKIDQNKLKPEMDEKGNLTTAGFACSQCGQPLFVYKLEQVSEKGKAYTNYFGRCNVAEHEKLILLAQLKPEKDSDEAVTYSLGKFGQRALDFYSIHVTKESTHPVKPLAQIAGNRYASYPVGKALSDACMGTIASFLSKYQDIIIEHQKVVKGNQKRLESLRELAGKENLEYPSVTLPPQPHTKEGVDAYNEVIARVRMWVNLNLWQKLKLSRDDAKPLLRLKGFPSFPLVERQANEVDWWDMVCNVKKLINEKKEDGKVFWQNLAGYKRQEALRPYLSSEEDRKKGKKFARYQLGDLLLHLEKKHGEDWGKVYDEAWERIDKKVEGLSKHIKLEEERRSEDAQSKAALTDWLRAKASFVIEGLKEADKDEFCRCELKLQKWYGDLRGKPFAIEAENSILDISGFSKQYNCAFIWQKDGVKKLNLYLIINYFKGGKLRFKKIKPEAFEANRFYTVINKKSGEIVPMEVNFNFDDPNLIILPLAFGKRQGREFIWNDLLSLETGSLKLANGRVIEKTLYNRRTRQDEPALFVALTFERREVLDSSNIKPMNLIGVDRGENIPAVIALTDPEGCPLSRFKDSLGNPTHILRIGESYKEKQRTIQAKKEVEQRRAGGYSRKYASKAKNLADDMVRNTARDLLYYAVTQDAMLIFENLSRGFGRQGKRTFMAERQYTRMEDWLTAKLAYEGLASKTYLSKTLAQYTSKTCSNCGFTITSADYDRVLEKLKKTATGWMTTINGKELKVEGQITYYNRYKRQNVVKDLSVELDRLSEESVNNDISSWTKGRSGEALSLLKKRFSHRPVQEKFVCLNCEFETHADEQAALNIARSWLFLRSQEYKKYQTNKTTGNTDKRAFVETWQSFYRKKLKEVWKPAV

SEQ ID NO: 38802 - protein, 978 aa, synthetic construct
  REGION 1..978: note = engineered CasX variant
QEIKRINKIRRRLVKDSNTKKAGKTGPMKTLLVRVMTPDLRERLENLRKKPENIPQPISNTSRANLNKLLTDYTEMKKAILHVYWEEFQKDPVGLMSRVAQPASKKIDQNKLKPEMDEKGNLTTAGFACSQCGQPLFVYKLEQVSEKGKAYTNYFGRCNVAEHEKLILLAQLKPEKDSDEAVTYSLGKFGQRALDFYSIHVTKESTHPVKPLAQIAGNRYASHPVGKALSDACMGTIASFLSKYQDIIIEHQKVVKGNQKRLESLRELAGKENLEYPSVTLPPQPHTKEGVDAYNEVIARVRMWVNLNLWQKLKLSRDDAKPLLRLKGFPSFPLVERQANEVDWWDMVCNVKKLINEKKEDGKVFWQNLAGYKRQEALRPYLSSEEDRKKGKKFARYQLGDLLLHLEKKHGEDWGKVYDEAWERIDKKVEGLSKHIKLEEERRSEDAQSKAALTDWLRAKASFVIEGLKEADKDEFCRCELKLQKWYGDLRGKPFAIEAENSILDISGFSKQYNCAFIWQKDGVKKLNLYLIINYFKGGKLRFKKIKPEAFEANRFYTVINKKSGEIVPMEVNFNFDDPNLIILPLAFGKRQGREFIWNDLLSLETGSLKLANGRVIEKTLYNRRTRQDEPALFVALTFERREVLDSSNIKPMNLIGVDRGENIPAVIALTDPEGCPLSRFKDSLGNPTHILRIGESYKEKQRTIQAKKEVEQRRAGGYSRKYASKAKNLADDMVRNTARDLLYYAVTQDAMLIFENLSRGFGRQGKRTFMAERQYTRMEDWLTAKLAYEGLASKTYLSKTLAQYTSKTCSNCGFTITSADYDRVLEKLKKTATGWMTTINGKELKVEGQITYYNRYKRQNVVKDLSVELDRLSEESVNNDISSWTKGRSGEALSLLKKRFSHRPVQEKFVCLNCEFETHADEQAALNIARSWLFLRSQEYKKYQTNKTTGNTDKRAFVETWQSFYRKKLKEVWKPAV

SEQ ID NO: 38803 - protein, 978 aa, synthetic construct
  REGION 1..978: note = engineered CasX variant
QEIKRINKIRRRLVKDSNTKKAGKTGPMKTLLVRVMTPDLRERLENLRKKPENIPQPISNTSRANLNKLLTDYTEMKKAILHVYWEEFQKDPVGLMSRVAQPASKKIDQNKLKPEMDEKGNLTTAGFACSQCGQPLFVYKLEQVSEKGKAYTNYFGRCNVAEHEKLILLAQLKPEKDSDEAVTYSLGKFGQRALDFYSIHVTKESTHPVKPLAQIAGNRYASSPVGKALSDACMGTIASFLSKYQDIIIEHQKVVKGNQKRLESLRELAGKENLEYPSVTLPPQPHTKEGVDAYNEVIARVRMWVNLNLWQKLKLSRDDAKPLLRLKGFPSFPLVERQANEVDWWDMVCNVKKLINEKKEDGKVFWQNLAGYKRQEALRPYLSSEEDRKKGKKFARYQLGDLLLHLEKKHGEDWGKVYDEAWERIDKKVEGLSKHIKLEEERRSEDAQSKAALTDWLRAKASFVIEGLKEADKDEFCRCELKLQKWYGDLRGKPFAIEAENSILDISGFSKQYNCAFIWQKDGVKKLNLYLIINYFKGGKLRFKKIKPEAFEANRFYTVINKKSGEIVPMEVNFNFDDPNLIILPLAFGKRQGREFIWNDLLSLETGSLKLANGRVIEKTLYNRRTRQDEPALFVALTFERREVLDSSNIKPMNLIGVDRGENIPAVIALTDPEGCPLSRFKDSLGNPTHILRIGESYKEKQRTIQAKKEVEQRRAGGYSRKYASKAKNLADDMVRNTARDLLYYAVTQDAMLIFENLSRGFGRQGKRTFMAERQYTRMEDWLTAKLAYEGLASKTYLSKTLAQYTSKTCSNCGFTITSADYDRVLEKLKKTATGWMTTINGKELKVEGQITYYNRYKRQNVVKDLSVELDRLSEESVNNDISSWTKGRSGEALSLLKKRFSHRPVQEKFVCLNCEFETHADEQAALNIARSWLFLRSQEYKKYQTNKTTGNTDKRAFVETWQSFYRKKLKEVWKPAV

SEQ ID NO: 38804 - protein, 978 aa, synthetic construct
  REGION 1..978: note = engineered CasX variant
QEIKRINKIRRRLVKDSNTKKAGKTGPMKTLLVRVMTPDLRERLENLRKKPENIPQPISNTSRANLNKLLTDYTEMKKAILHVYWEEFQKDPVGLMSRVAQPASKKIDQNKLKPEMDEKGNLTTAGFACSQCGQPLFVYKLEQVSEKGKAYTNYFGRCNVAEHEKLILLAQLKPEKDSDEAVTYSLGKFGQRALDFYSIHVTKESTHPVKPLAQIAGNRYASTPVGKALSDACMGTIASFLSKYQDIIIEHQKVVKGNQKRLESLRELAGKENLEYPSVTLPPQPHTKEGVDAYNEVIARVRMWVNLNLWQKLKLSRDDAKPLLRLKGFPSFPLVERQANEVDWWDMVCNVKKLINEKKEDGKVFWQNLAGYKRQEALRPYLSSEEDRKKGKKFARYQLGDLLLHLEKKHGEDWGKVYDEAWERIDKKVEGLSKHIKLEEERRSEDAQSKAALTDWLRAKASFVIEGLKEADKDEFCRCELKLQKWYGDLRGKPFAIEAENSILDISGFSKQYNCAFIWQKDGVKKLNLYLIINYFKGGKLRFKKIKPEAFEANRFYTVINKKSGEIVPMEVNFNFDDPNLIILPLAFGKRQGREFIWNDLLSLETGSLKLANGRVIEKTLYNRRTRQDEPALFVALTFERREVLDSSNIKPMNLIGVDRGENIPAVIALTDPEGCPLSRFKDSLGNPTHILRIGESYKEKQRTIQAKKEVEQRRAGGYSRKYASKAKNLADDMVRNTARDLLYYAVTQDAMLIFENLSRGFGRQGKRTFMAERQYTRMEDWLTAKLAYEGLASKTYLSKTLAQYTSKTCSNCGFTITSADYDRVLEKLKKTATGWMTTINGKELKVEGQITYYNRYKRQNVVKDLSVELDRLSEESVNNDISSWTKGRSGEALSLLKKRFSHRPVQEKFVCLNCEFETHADEQAALNIARSWLFLRSQEYKKYQTNKTTGNTDKRAFVETWQSFYRKKLKEVWKPAV

SEQ ID NO: 38805 - protein, 978 aa, synthetic construct
  REGION 1..978: note = engineered CasX variant
QEIKRINKIRRRLVKDSNTKKAGKTGPMKTLLVRVMTPDLRERLENLRKKPENIPQPISNTSRANLNKLLTDYTEMKKAILHVYWEEFQKDPVGLMSRVAQPASKKIDQNKLKPEMDEKGNLTTAGFACSQCGQPLFVYKLEQVSEKGKAYTNYFGRCNVAEHEKLILLAQLKPEKDSDEAVTYSLGKFGQRALDFYSIHVTKESTHPVKPLAQIAGNRYASAPVGKALSDACMGTIASFLSKYQDIIIEHQKVVKGNQKRLESLRELAGKENLEYPSVTLPPQPHTKEGVDAYNEVIARVRMWVNLNLWQKLKLSRDDAKPLLRLKGFPSFPLVERQANEVDWWDMVCNVKKLINEKKEDGKVFWQNLAGYKRQEALRPYLSSEEDRKKGKKFARYQLGDLLLHLEKKHGEDWGKVYDEAWERIDKKVEGLSKHIKLEEERRSEDAQSKAALTDWLRAKASFVIEGLKEADKDEFCRCELKLQKWYGDLRGKPFAIEAENSILDISGFSKQYNCAFIWQKDGVKKLNLYLIINYFKGGKLRFKKIKPEAFEANRFYTVINKKSGEIVPMEVNFNFDDPNLIILPLAFGKRQGREFIWNDLLSLETGSLKLANGRVIEKTLYNRRTRQDEPALFVALTFERREVLDSSNIKPMNLIGVDRGENIPAVIALTDPEGCPLSRFKDSLGNPTHILRIGESYKEKQRTIQAKKEVEQRRAGGYSRKYASKAKNLADDMVRNTARDLLYYAVTQDAMLIFENLSRGFGRQGKRTFMAERQYTRMEDWLTAKLAYEGLASKTYLSKTLAQYTSKTCSNCGFTITSADYDRVLEKLKKTATGWMTTINGKELKVEGQITYYNRYKRQNVVKDLSVELDRLSEESVNNDISSWTKGRSGEALSLLKKRFSHRPVQEKFVCLNCEFETHADEQAALNIARSWLFLRSQEYKKYQTNKTTGNTDKRAFVETWQSFYRKKLKEVWKPAV

SEQ ID NO: 38806 - protein, 978 aa, synthetic construct
  REGION 1..978: note = engineered CasX variant
QEIKRINKIRRRLVKDSNTKKAGKTGPMKTLLVRVMTPDLRERLENLRKKPENIPQPISNTSRANLNKLLTDYTEMKKAILHVYWEEFQKDPVGLMSRVAQPASKKIDQNKLKPEMDEKGNLTTAGFACSQCGQPLFVYKLEQVSEKGKAYTNYFGRCNVAEHEKLILLAQLKPEKDSDEAVTYSLGKFGQRALDFYSIHVTKESTHPVKPLAQIAGNRYASVPVGKALSDACMGTIASFLSKYQDIIIEHQKVVKGNQKRLESLRELAGKENLEYPSVTLPPQPHTKEGVDAYNEVIARVRMWVNLNLWQKLKLSRDDAKPLLRLKGFPSFPLVERQANEVDWWDMVCNVKKLINEKKEDGKVFWQNLAGYKRQEALRPYLSSEEDRKKGKKFARYQLGDLLLHLEKKHGEDWGKVYDEAWERIDKKVEGLSKHIKLEEERRSEDAQSKAALTDWLRAKASFVIEGLKEADKDEFCRCELKLQKWYGDLRGKPFAIEAENSILDISGFSKQYNCAFIWQKDGVKKLNLYLIINYFKGGKLRFKKIKPEAFEANRFYTVINKKSGEIVPMEVNFNFDDPNLIILPLAFGKRQGREFIWNDLLSLETGSLKLANGRVIEKTLYNRRTRQDEPALFVALTFERREVLDSSNIKPMNLIGVDRGENIPAVIALTDPEGCPLSRFKDSLGNPTHILRIGESYKEKQRTIQAKKEVEQRRAGGYSRKYASKAKNLADDMVRNTARDLLYYAVTQDAMLIFENLSRGFGRQGKRTFMAERQYTRMEDWLTAKLAYEGLASKTYLSKTLAQYTSKTCSNCGFTITSADYDRVLEKLKKTATGWMTTINGKELKVEGQITYYNRYKRQNVVKDLSVELDRLSEESVNNDISSWTKGRSGEALSLLKKRFSHRPVQEKFVCLNCEFETHADEQAALNIARSWLFLRSQEYKKYQTNKTTGNTDKRAFVETWQSFYRKKLKEVWKPAV

SEQ ID NO: 38807 - protein, 978 aa, synthetic construct
  REGION 1..978: note = engineered CasX variant
QEIKRINKIRRRLVKDSNTKKAGKTGPMKTLLVRVMTPDLRERLENLRKKPENIPQPISNTSRANLNKLLTDYTEMKKAILHVYWEEFQKDPVGLMSRVAQPASKKIDQNKLKPEMDEKGNLTTAGFACSQCGQPLFVYKLEQVSEKGKAYTNYFGRCNVAEHEKLIKLAQLKPEKDSDEAVTYSLGKFGQRALDFYSIHVTKESTHPVKPLAQIAGNRYASGPVGKALSDACMGTIASFLSKYQDIIIEHQKVVKGNQKRLESLRELAGKENLEYPSVTLPPQPHTKEGVDAYNEVIARVRMWVNLNLWQKLKLSRDDAKPLLRLKGFPSFPLVERQANEVDWWDMVCNVKKLINEKKEDGKVFWQNLAGYKRQEALRPYLSSEEDRKKGKKFARYQLGDLLLHLEKKHGEDWGKVYDEAWERIDKKVEGLSKHIKLEEERRSEDAQSKAALTDWLRAKASFVIEGLKEADKDEFCRCELKLQKWYGDLRGKPFAIEAENSILDISGFSKQYNCAFIWQKDGVKKLNLYLIINYFKGGKLRFKKIKPEAFEANRFYTVINKKSGEIVPMEVNFNFDDPNLIILPLAFGKRQGREFIWNDLLSLETGSLKLANGRVIEKTLYNRRTRQDEPALFVALTFERREVLDSSNIKPMNLIGVDRGENIPAVIALTDPEGCPLSRFKDSLGNPTHILRIGESYKEKQRTIQAKKEVEQRRAGGYSRKYASKAKNLADDMVRNTARDLLYYAVTQDAMLIFENLSRGFGRQGKRTFMAERQYTRMEDWLTAKLAYEGLASKTYLSKTLAQYTSKTCSNCGFTITSADYDRVLEKLKKTATGWMTTINGKELKVEGQITYYNRYKRQNVVKDLSVELDRLSEESVNNDISSWTKGRSGEALSLLKKRFSHRPVQEKFVCLNCEFETHADEQAALNIARSWLFLRSQEYKKYQTNKTTGNTDKRAFVETWQSFYRKKLKEVWKPAV

SEQ ID NO: 38808 - protein, 977 aa, synthetic construct
  REGION 1..977: note = engineered CasX variant
QEIKRINKIRRRLVKDSNTKKAGKTGPMKTLLVRVMTPDLRERLENLRKKPENIPQPISNTSRANLNKLLTDYTEMKKAILHVYWEEFQKDPVGLMSRVAQPASKKIDQNKLKPEMDEKGNLTTAGFACSQCGQPLFVYKLEQVSEKGKAYTNYFGRCNVAEHEKLILLAQLKPEKDSDEAVTYSLGKFGQRALDFYSIHVTKESTHPVKPLAQIAGNRYASPVGKALSDACMGTIASFLSKYQDIIIEHQKVVKGNQKRLESLRELAGKENLEYPSVTLPPQPHTKEGVDAYNEVIARVRMWVNLNLWQKLKLSRDDAKPLLRLKGFPSFPLVERQANEVDWWDMVCNVKKLINEKKEDGKVFWQNLAGYKRQEALRPYLSSEEDRKKGKKFARYQLGDLLLHLEKKHGEDWGKVYDEAWERIDKKVEGLSKHIKLEEERRSEDAQSKAALTDWLRAKASFVIEGLKEADKDEFCRCELKLQKWYGDLRGKPFAIEAENSILDISGFSKQYNCAFIWQKDGVKKLNLYLIINYFKGGKLRFKKIKPEAFEANRFYTVINKKSGEIVPMEVNFNFDDPNLIILPLAFGKRQGREFIWNDLLSLETGSLKLANGRVIEKTLYNRRTRQDEPALFVALTFERREVLDSSNIKPMNLIGVDRGENIPAVIALTDPEGCPLSRFKDSLGNPTHILRIGESYKEKQRTIQAKKEVEQRRAGGYSRKYASKAKNLADDMVRNTARDLLYYAVTQDAMLIFENLSRGFGRQGKRTFMAERQYTRMEDWLTAKLAYEGLASKTYLSKTLAQYTSKTCSNCGFTITSADYDRVLEKLKKTATGWMTTINGKELKVEGQITYYNRYKRQNVVKDLSVELDRLSEESVNNDISSWTKGRSGEALSLLKKRFSHRPVQEKFVCLNCEFETHADEQAALNIARSWLFLRSQEYKKYQTNKTTGNTDKRAFVETWQSFYRKKLKEVWKPAV

SEQ ID NO: 38809 - protein, 979 aa, synthetic construct
  REGION 1..979: note = engineered CasX variant
QEIKRINKIRRRLVKDSNTKKAGKTGPMKTLLVRVMTPDLRERLENLRKKPENIPQPISNTSRANLNKLLTDYTEMKKAILHVYWEEFQKDPVGLMSRVAQPASKKIDQNKLKPEMDEKGNLTTAGFACSQCGQPLFVYKLEQVSEKGKAYTNYFGRCNVAEHEKLILLAQLKPEKDSDEAVTYSLGKFGQRALDFYSIHVTKESTHPVKPLAQIAGNRYASYPVGKALSDACMGTIASFLSKYQDIIIEHQKVVKGNQKRLESLRELAGKENLEYPSVTLPPQPHTKEGVDAYNEVIARVRMWVNLNLWQKLKLSRDDAKPLLRLKGFPSFPLVERQANEVDWWDMVCNVKKLINEKKEDGKVFWQNLAGYKRQEALRPYLSSEEDRKKGKKFARYQLGDLLLHLEKKHGEDWGKVYDEAWERIDKKVEGLSKHIKLEEERRSEDAQSKAALTDWLRAKASFVIEGLKEADKDEFCRCELKLQKWYGDLRGKPFAIEAENSILDISGFSKQYNCAFIWQKDGVKKLNLYLIINYFKGGKLRFKKIKPEAFEANRFYTVINKKSGEIVPMEVNFNFDDPNLIILPLAFGKRQGREFIWNDLLSLETGSLKLANGRVIEKTLYNRRTRQDEPALFVALTFERREVLDSSNIKPMNLIGVDRGENIPAVIALTDPEGCPLSRFKDSLGNPTHILRIGESYKEKQRTIQAKKEVEQRRAGGYSRKYASKAKNLADDMVRNTARDLLYYAVTQDAMLIFENLSRGFGRQGKRTFMAERQYTRMEDWLTAKLAYEGLASKTYLSKTLAQYTSKTCSNCGFTITSADYDRVLEKLKKTATGWMTTINGKELKVEGQITYYNRYKRQNVVKDLSVELDRLSEESVNNDISSWTKGRSGEALSLLKKRFSHRPVQEKFVCLNCGFETHADEQAALNIARSWLFLRSQEYKKYQTNKTSTGNTDKRAFVETWQSFYRKKLKEVWKPAV

SEQ ID NO: 38810 - protein, 979 aa, synthetic construct
  REGION 1..979: note = engineered CasX variant
QEIKRINKIRRRLVKDSNTKKAGKTGPMKTLLVRVMTPDLRERLENLRKKPENIPQPISNTSRANLNKLLTDYTEMKKAILHVYWEEFQKDPVGLMSRVAQPASKKIDQNKLKPEMDEKGNLTTAGFACSQCGQPLFVYKLEQVSEKGKAYTNYFGRCNVAEHEKLILLAQLKPEKDSDEAVTYSLGKFGQRALDFYSIHVTKESTHPVKPLAQIAGNRYASHPVGKALSDACMGTIASFLSKYQDIIIEHQKVVKGNQKRLESLRELAGKENLEYPSVTLPPQPHTKEGVDAYNEVIARVRMWVNLNLWQKLKLSRDDAKPLLRLKGFPSFPLVERQANEVDWWDMVCNVKKLINEKKEDGKVFWQNLAGYKRQEALRPYLSSEEDRKKGKKFARYQLGDLLLHLEKKHGEDWGKVYDEAWERIDKKVEGLSKHIKLEEERRSEDAQSKAALTDWLRAKASFVIEGLKEADKDEFCRCELKLQKWYGDLRGKPFAIEAENSILDISGFSKQYNCAFIWQKDGVKKLNLYLIINYFKGGKLRFKKIKPEAFEANRFYTVINKKSGEIVPMEVNFNFDDPNLIILPLAFGKRQGREFIWNDLLSLETGSLKLANGRVIEKTLYNRRTRQDEPALFVALTFERREVLDSSNIKPMNLIGVDRGENIPAVIALTDPEGCPLSRFKDSLGNPTHILRIGESYKEKQRTIQAKKEVEQRRAGGYSRKYASKAKNLADDMVRNTARDLLYYAVTQDAMLIFENLSRGFGRQGKRTFMAERQYTRMEDWLTAKLAYEGLASKTYLSKTLAQYTSKTCSNCGFTITSADYDRVLEKLKKTATGWMTTINGKELKVEGQITYYNRYKRQNVVKDLSVELDRLSEESVNNDISSWTKGRSGEALSLLKKRFSHRPVQEKFVCLNCGFETHADEQAALNIARSWLFLRSQEYKKYQTNKTSTGNTDKRAFVETWQSFYRKKLKEVWKPAV

SEQ ID NO: 38811 - protein, 979 aa, synthetic construct
  REGION 1..979: note = engineered CasX variant
QEIKRINKIRRRLVKDSNTKKAGKTGPMKTLLVRVMTPDLRERLENLRKKPENIPQPISNTSRANLNKLLTDYTEMKKAILHVYWEEFQKDPVGLMSRVAQPASKKIDQNKLKPEMDEKGNLTTAGFACSQCGQPLFVYKLEQVSEKGKAYTNYFGRCNVAEHEKLILLAQLKPEKDSDEAVTYSLGKFGQRALDFYSIHVTKESTHPVKPLAQIAGNRYASSPVGKALSDACMGTIASFLSKYQDIIIEHQKVVKGNQKRLESLRELAGKENLEYPSVTLPPQPHTKEGVDAYNEVIARVRMWVNLNLWQKLKLSRDDAKPLLRLKGFPSFPLVERQANEVDWWDMVCNVKKLINEKKEDGKVFWQNLAGYKRQEALRPYLSSEEDRKKGKKFARYQLGDLLLHLEKKHGEDWGKVYDEAWERIDKKVEGLSKHIKLEEERRSEDAQSKAALTDWLRAKASFVIEGLKEADKDEFCRCELKLQKWYGDLRGKPFAIEAENSILDISGFSKQYNCAFIWQKDGVKKLNLYLIINYFKGGKLRFKKIKPEAFEANRFYTVINKKSGEIVPMEVNFNFDDPNLIILPLAFGKRQGREFIWNDLLSLETGSLKLANGRVIEKTLYNRRTRQDEPALFVALTFERREVLDSSNIKPMNLIGVDRGENIPAVIALTDPEGCPLSRFKDSLGNPTHILRIGESYKEKQRTIQAKKEVEQRRAGGYSRKYASKAKNLADDMVRNTARDLLYYAVTQDAMLIFENLSRGFGRQGKRTFMAERQYTRMEDWLTAKLAYEGLASKTYLSKTLAQYTSKTCSNCGFTITSADYDRVLEKLKKTATGWMTTINGKELKVEGQITYYNRYKRQNVVKDLSVELDRLSEESVNNDISSWTKGRSGEALSLLKKRFSHRPVQEKFVCLNCGFETHADEQAALNIARSWLFLRSQEYKKYQTNKTSTGNTDKRAFVETWQSFYRKKLKEVWKPAV

SEQ ID NO: 38812 - protein, 979 aa, synthetic construct
  REGION 1..979: note = engineered CasX variant
QEIKRINKIRRRLVKDSNTKKAGKTGPMKTLLVRVMTPDLRERLENLRKKPENIPQPISNTSRANLNKLLTDYTEMKKAILHVYWEEFQKDPVGLMSRVAQPASKKIDQNKLKPEMDEKGNLTTAGFACSQCGQPLFVYKLEQVSEKGKAYTNYFGRCNVAEHEKLILLAQLKPEKDSDEAVTYSLGKFGQRALDFYSIHVTKESTHPVKPLAQIAGNRYASTPVGKALSDACMGTIASFLSKYQDIIIEHQKVVKGNQKRLESLRELAGKENLEYPSVTLPPQPHTKEGVDAYNEVIARVRMWVNLNLWQKLKLSRDDAKPLLRLKGFPSFPLVERQANEVDWWDMVCNVKKLINEKKEDGKVFWQNLAGYKRQEALRPYLSSEEDRKKGKKFARYQLGDLLLHLEKKHGEDWGKVYDEAWERIDKKVEGLSKHIKLEEERRSEDAQSKAALTDWLRAKASFVIEGLKEADKDEFCRCELKLQKWYGDLRGKPFAIEAENSILDISGFSKQYNCAFIWQKDGVKKLNLYLIINYFKGGKLRFKKIKPEAFEANRFYTVINKKSGEIVPMEVNFNFDDPNLIILPLAFGKRQGREFIWNDLLSLETGSLKLANGRVIEKTLYNRRTRQDEPALFVALTFERREVLDSSNIKPMNLIGVDRGENIPAVIALTDPEGCPLSRFKDSLGNPTHILRIGESYKEKQRTIQAKKEVEQRRAGGYSRKYASKAKNLADDMVRNTARDLLYYAVTQDAMLIFENLSRGFGRQGKRTFMAERQYTRMEDWLTAKLAYEGLASKTYLSKTLAQYTSKTCSNCGFTITSADYDRVLEKLKKTATGWMTTINGKELKVEGQITYYNRYKRQNVVKDLSVELDRLSEESVNNDISSWTKGRSGEALSLLKKRFSHRPVQEKFVCLNCGFETHADEQAALNIARSWLFLRSQEYKKYQTNKTSTGNTDKRAFVETWQSFYRKKLKEVWKPAV

SEQ ID NO: 38813 - protein, 979 aa, synthetic construct
  REGION 1..979: note = engineered CasX variant
QEIKRINKIRRRLVKDSNTKKAGKTGPMKTLLVRVMTPDLRERLENLRKKPENIPQPISNTSRANLNKLLTDYTEMKKAILHVYWEEFQKDPVGLMSRVAQPASKKIDQNKLKPEMDEKGNLTTAGFACSQCGQPLFVYKLEQVSEKGKAYTNYFGRCNVAEHEKLILLAQLKPEKDSDEAVTYSLGKFGQRALDFYSIHVTKESTHPVKPLAQIAGNRYASAPVGKALSDACMGTIASFLSKYQDIIIEHQKVVKGNQKRLESLRELAGKENLEYPSVTLPPQPHTKEGVDAYNEVIARVRMWVNLNLWQKLKLSRDDAKPLLRLKGFPSFPLVERQANEVDWWDMVCNVKKLINEKKEDGKVFWQNLAGYKRQEALRPYLSSEEDRKKGKKFARYQLGDLLLHLEKKHGEDWGKVYDEAWERIDKKVEGLSKHIKLEEERRSEDAQSKAALTDWLRAKASFVIEGLKEADKDEFCRCELKLQKWYGDLRGKPFAIEAENSILDISGFSKQYNCAFIWQKDGVKKLNLYLIINYFKGGKLRFKKIKPEAFEANRFYTVINKKSGEIVPMEVNFNFDDPNLIILPLAFGKRQGREFIWNDLLSLETGSLKLANGRVIEKTLYNRRTRQDEPALFVALTFERREVLDSSNIKPMNLIGVDRGENIPAVIALTDPEGCPLSRFKDSLGNPTHILRIGESYKEKQRTIQAKKEVEQRRAGGYSRKYASKAKNLADDMVRNTARDLLYYAVTQDAMLIFENLSRGFGRQGKRTFMAERQYTRMEDWLTAKLAYEGLASKTYLSKTLAQYTSKTCSNCGFTITSADYDRVLEKLKKTATGWMTTINGKELKVEGQITYYNRYKRQNVVKDLSVELDRLSEESVNNDISSWTKGRSGEALSLLKKRFSHRPVQEKFVCLNCGFETHADEQAALNIARSWLFLRSQEYKKYQTNKTSTGNTDKRAFVETWQSFYRKKLKEVWKPAV

SEQ ID NO: 38814 - protein, 979 aa, synthetic construct
  REGION 1..979: note = engineered CasX variant
QEIKRINKIRRRLVKDSNTKKAGKTGPMKTLLVRVMTPDLRERLENLRKKPENIPQPISNTSRANLNKLLTDYTEMKKAILHVYWEEFQKDPVGLMSRVAQPASKKIDQNKLKPEMDEKGNLTTAGFACSQCGQPLFVYKLEQVSEKGKAYTNYFGRCNVAEHEKLILLAQLKPEKDSDEAVTYSLGKFGQRALDFYSIHVTKESTHPVKPLAQIAGNRYASVPVGKALSDACMGTIASFLSKYQDIIIEHQKVVKGNQKRLESLRELAGKENLEYPSVTLPPQPHTKEGVDAYNEVIARVRMWVNLNLWQKLKLSRDDAKPLLRLKGFPSFPLVERQANEVDWWDMVCNVKKLINEKKEDGKVFWQNLAGYKRQEALRPYLSSEEDRKKGKKFARYQLGDLLLHLEKKHGEDWGKVYDEAWERIDKKVEGLSKHIKLEEERRSEDAQSKAALTDWLRAKASFVIEGLKEADKDEFCRCELKLQKWYGDLRGKPFAIEAENSILDISGFSKQYNCAFIWQKDGVKKLNLYLIINYFKGGKLRFKKIKPEAFEANRFYTVINKKSGEIVPMEVNFNFDDPNLIILPLAFGKRQGREFIWNDLLSLETGSLKLANGRVIEKTLYNRRTRQDEPALFVALTFERREVLDSSNIKPMNLIGVDRGENIPAVIALTDPEGCPLSRFKDSLGNPTHILRIGESYKEKQRTIQAKKEVEQRRAGGYSRKYASKAKNLADDMVRNTARDLLYYAVTQDAMLIFENLSRGFGRQGKRTFMAERQYTRMEDWLTAKLAYEGLASKTYLSKTLAQYTSKTCSNCGFTITSADYDRVLEKLKKTATGWMTTINGKELKVEGQITYYNRYKRQNVVKDLSVELDRLSEESVNNDISSWTKGRSGEALSLLKKRFSHRPVQEKFVCLNCGFETHADEQAALNIARSWLFLRSQEYKKYQTNKTSTGNTDKRAFVETWQSFYRKKLKEVWKPAV

SEQ ID NO: 38815 - protein, 979 aa, synthetic construct
  REGION 1..979: note = engineered CasX variant
QEIKRINKIRRRLVKDSNTKKAGKTGPMKTLLVRVMTPDLRERLENLRKKPENIPQPISNTSRANLNKLLTDYTEMKKAILHVYWEEFQKDPVGLMSRVAQPASKKIDQNKLKPEMDEKGNLTTAGFACSQCGQPLFVYKLEQVSEKGKAYTNYFGRCNVAEHEKLIKLAQLKPEKDSDEAVTYSLGKFGQRALDFYSIHVTKESTHPVKPLAQIAGNRYASGPVGKALSDACMGTIASFLSKYQDIIIEHQKVVKGNQKRLESLRELAGKENLEYPSVTLPPQPHTKEGVDAYNEVIARVRMWVNLNLWQKLKLSRDDAKPLLRLKGFPSFPLVERQANEVDWWDMVCNVKKLINEKKEDGKVFWQNLAGYKRQEALRPYLSSEEDRKKGKKFARYQLGDLLLHLEKKHGEDWGKVYDEAWERIDKKVEGLSKHIKLEEERRSEDAQSKAALTDWLRAKASFVIEGLKEADKDEFCRCELKLQKWYGDLRGKPFAIEAENSILDISGFSKQYNCAFIWQKDGVKKLNLYLIINYFKGGKLRFKKIKPEAFEANRFYTVINKKSGEIVPMEVNFNFDDPNLIILPLAFGKRQGREFIWNDLLSLETGSLKLANGRVIEKTLYNRRTRQDEPALFVALTFERREVLDSSNIKPMNLIGVDRGENIPAVIALTDPEGCPLSRFKDSLGNPTHILRIGESYKEKQRTIQAKKEVEQRRAGGYSRKYASKAKNLADDMVRNTARDLLYYAVTQDAMLIFENLSRGFGRQGKRTFMAERQYTRMEDWLTAKLAYEGLASKTYLSKTLAQYTSKTCSNCGFTITSADYDRVLEKLKKTATGWMTTINGKELKVEGQITYYNRYKRQNVVKDLSVELDRLSEESVNNDISSWTKGRSGEALSLLKKRFSHRPVQEKFVCLNCGFETHADEQAALNIARSWLFLRSQEYKKYQTNKTSTGNTDKRAFVETWQSFYRKKLKEVWKPAV

SEQ ID NO: 38816 - protein, 978 aa, synthetic construct
  REGION 1..978: note = engineered CasX variant
QEIKRINKIRRRLVKDSNTKKAGKTGPMKTLLVRVMTPDLRERLENLRKKPENIPQPISNTSRANLNKLLTDYTEMKKAILHVYWEEFQKDPVGLMSRVAQPASKKIDQNKLKPEMDEKGNLTTAGFACSQCGQPLFVYKLEQVSEKGKAYTNYFGRCNVAEHEKLILLAQLKPEKDSDEAVTYSLGKFGQRALDFYSIHVTKESTHPVKPLAQIAGNRYASPVGKALSDACMGTIASFLSKYQDIIIEHQKVVKGNQKRLESLRELAGKENLEYPSVTLPPQPHTKEGVDAYNEVIARVRMWVNLNLWQKLKLSRDDAKPLLRLKGFPSFPLVERQANEVDWWDMVCNVKKLINEKKEDGKVFWQNLAGYKRQEALRPYLSSEEDRKKGKKFARYQLGDLLLHLEKKHGEDWGKVYDEAWERIDKKVEGLSKHIKLEEERRSEDAQSKAALTDWLRAKASFVIEGLKEADKDEFCRCELKLQKWYGDLRGKPFAIEAENSILDISGFSKQYNCAFIWQKDGVKKLNLYLIINYFKGGKLRFKKIKPEAFEANRFYTVINKKSGEIVPMEVNFNFDDPNLIILPLAFGKRQGREFIWNDLLSLETGSLKLANGRVIEKTLYNRRTRQDEPALFVALTFERREVLDSSNIKPMNLIGVDRGENIPAVIALTDPEGCPLSRFKDSLGNPTHILRIGESYKEKQRTIQAKKEVEQRRAGGYSRKYASKAKNLADDMVRNTARDLLYYAVTQDAMLIFENLSRGFGRQGKRTFMAERQYTRMEDWLTAKLAYEGLASKTYLSKTLAQYTSKTCSNCGFTITSADYDRVLEKLKKTATGWMTTINGKELKVEGQITYYNRYKRQNVVKDLSVELDRLSEESVNNDISSWTKGRSGEALSLLKKRFSHRPVQEKFVCLNCGFETHADEQAALNIARSWLFLRSQEYKKYQTNKTSTGNTDKRAFVETWQSFYRKKLKEVWKPAV

SEQ ID NO: 38817 - protein, 979 aa, synthetic construct
  REGION 1..979: note = engineered CasX variant
QEIKRINKIRRRLVKDSNTKKAGKTGPMKTLLVRVMTPDLRERLENLRKKPENIPQPISNTSRANLNKLLTDYTEMKKAILHVYWEEFQKDPVGLMSRVAQPASKKIDQNKLKPEMDEKGNLTTAGFACSQCGQPLFVYKLEQVSEKGKAYTNYFGRCNVAEHEKLILLAQLKPEKDSDEAVTYSLGKFGQRALDFYSIHVTKESTHPVKPLAQIAGNRYASYPVGKALSDACMGTIASFLSKYQDIIIEHQKVVKGNQKRLESLRELAGKENLEYPSVTLPPQPHTKEGVDAYNEVIARVRMWVNLNLWQKLKLSRDDAKPLLRLKGFPSFPLVERQANEVDWWDMVCNVKKLINEKKEDGKVFWQNLAGYKRQEALRPYLSSEEDRKKGKKFARYQLGDLLLHLEKKHGEDWGKVYDEAWERIDKKVEGLSKHIKLEEERRSEDAQSKAALTDWLRAKASFVIEGLKEADKDEFCRCELKLQKWYGDLRGKPFAIEAENSILDISGFSKQYNCAFIWQKDGVKKLNLYLIINYFKGGKLRFKKIKPEAFEANRFYTVINKKSGEIVPMEVNFNFDDPNLIILPLAFGKRQGREFIWNDLLSLETGSLKLANGRVIEKTLYNRRTRQDEPALFVALTFERREVLDSSNIKPMNLIGVDRGENIPAVIALTDPEGCPLSRFKDSLGNPTHILRIGESYKEKQRTIQAKKEVEQRRAGGYSRKYASKAKNLADDMVRNTARDLLYYAVTQDAMLIFENLSRGFGRQGKRTFMAERQYTRMEDWLTAKLAYEGLASKTYLSKTLAQYTSKTCSNCGFTITSADYDRVLEKLKKTATGWMTTINGKELKVEGQITYYNRYKRQNVVKDLSVELDRLSEESVNNDISSWTKGRSGEALSLLKKRFSHRPVQEKFVCLNCGFETHADEQAALNIARSWLFLRSQEYKKYQTNKTTGKNTDKRAFVETWQSFYRKKLKEVWKPAV

SEQ ID NO: 38818 - protein, 979 aa, synthetic construct
  REGION 1..979: note = engineered CasX variant
QEIKRINKIRRRLVKDSNTKKAGKTGPMKTLLVRVMTPDLRERLENLRKKPENIPQPISNTSRANLNKLLTDYTEMKKAILHVYWEEFQKDPVGLMSRVAQPASKKIDQNKLKPEMDEKGNLTTAGFACSQCGQPLFVYKLEQVSEKGKAYTNYFGRCNVAEHEKLILLAQLKPEKDSDEAVTYSLGKFGQRALDFYSIHVTKESTHPVKPLAQIAGNRYASHPVGKALSDACMGTIASFLSKYQDIIIEHQKVVKGNQKRLESLRELAGKENLEYPSVTLPPQPHTKEGVDAYNEVIARVRMWVNLNLWQKLKLSRDDAKPLLRLKGFPSFPLVERQANEVDWWDMVCNVKKLINEKKEDGKVFWQNLAGYKRQEALRPYLSSEEDRKKGKKFARYQLGDLLLHLEKKHGEDWGKVYDEAWERIDKKVEGLSKHIKLEEERRSEDAQSKAALTDWLRAKASFVIEGLKEADKDEFCRCELKLQKWYGDLRGKPFAIEAENSILDISGFSKQYNCAFIWQKDGVKKLNLYLIINYFKGGKLRFKKIKPEAFEANRFYTVINKKSGEIVPMEVNFNFDDPNLIILPLAFGKRQGREFIWNDLLSLETGSLKLANGRVIEKTLYNRRTRQDEPALFVALTFERREVLDSSNIKPMNLIGVDRGENIPAVIALTDPEGCPLSRFKDSLGNPTHILRIGESYKEKQRTIQAKKEVEQRRAGGYSRKYASKAKNLADDMVRNTARDLLYYAVTQDAMLIFENLSRGFGRQGKRTFMAERQYTRMEDWLTAKLAYEGLASKTYLSKTLAQYTSKTCSNCGFTITSADYDRVLEKLKKTATGWMTTINGKELKVEGQITYYNRYKRQNVVKDLSVELDRLSEESVNNDISSWTKGRSGEALSLLKKRFSHRPVQEKFVCLNCGFETHADEQAALNIARSWLFLRSQEYKKYQTNKTTGKNTDKRAFVETWQSFYRKKLKEVWKPAV

SEQ ID NO: 38819 - protein, 979 aa, synthetic construct
  REGION 1..979: note = engineered CasX variant
QEIKRINKIRRRLVKDSNTKKAGKTGPMKTLLVRVMTPDLRERLENLRKKPENIPQPISNTSRANLNKLLTDYTEMKKAILHVYWEEFQKDPVGLMSRVAQPASKKIDQNKLKPEMDEKGNLTTAGFACSQCGQPLFVYKLEQVSEKGKAYTNYFGRCNVAEHEKLILLAQLKPEKDSDEAVTYSLGKFGQRALDFYSIHVTKESTHPVKPLAQIAGNRYASSPVGKALSDACMGTIASFLSKYQDIIIEHQKVVKGNQKRLESLRELAGKENLEYPSVTLPPQPHTKEGVDAYNEVIARVRMWVNLNLWQKLKLSRDDAKPLLRLKGFPSFPLVERQANEVDWWDMVCNVKKLINEKKEDGKVFWQNLAGYKRQEALRPYLSSEEDRKKGKKFARYQLGDLLLHLEKKHGEDWGKVYDEAWERIDKKVEGLSKHIKLEEERRSEDAQSKAALTDWLRAKASFVIEGLKEADKDEFCRCELKLQKWYGDLRGKPFAIEAENSILDISGFSKQYNCAFIWQKDGVKKLNLYLIINYFKGGKLRFKKIKPEAFEANRFYTVINKKSGEIVPMEVNFNFDDPNLIILPLAFGKRQGREFIWNDLLSLETGSLKLANGRVIEKTLYNRRTRQDEPALFVALTFERREVLDSSNIKPMNLIGVDRGENIPAVIALTDPEGCPLSRFKDSLGNPTHILRIGESYKEKQRTIQAKKEVEQRRAGGYSRKYASKAKNLADDMVRNTARDLLYYAVTQDAMLIFENLSRGFGRQGKRTFMAERQYTRMEDWLTAKLAYEGLASKTYLSKTLAQYTSKTCSNCGFTITSADYDRVLEKLKKTATGWMTTINGKELKVEGQITYYNRYKRQNVVKDLSVELDRLSEESVNNDISSWTKGRSGEALSLLKKRFSHRPVQEKFVCLNCGFETHADEQAALNIARSWLFLRSQEYKKYQTNKTTGKNTDKRAFVETWQSFYRKKLKEVWKPAV

SEQ ID NO: 38820 - protein, 979 aa, synthetic construct
  REGION 1..979: note = engineered CasX variant
QEIKRINKIRRRLVKDSNTKKAGKTGPMKTLLVRVMTPDLRERLENLRKKPENIPQPISNTSRANLNKLLTDYTEMKKAILHVYWEEFQKDPVGLMSRVAQPASKKIDQNKLKPEMDEKGNLTTAGFACSQCGQPLFVYKLEQVSEKGKAYTNYFGRCNVAEHEKLILLAQLKPEKDSDEAVTYSLGKFGQRALDFYSIHVTKESTHPVKPLAQIAGNRYASTPVGKALSDACMGTIASFLSKYQDIIIEHQKVVKGNQKRLESLRELAGKENLEYPSVTLPPQPHTKEGVDAYNEVIARVRMWVNLNLWQKLKLSRDDAKPLLRLKGFPSFPLVERQANEVDWWDMVCNVKKLINEKKEDGKVFWQNLAGYKRQEALRPYLSSEEDRKKGKKFARYQLGDLLLHLEKKHGEDWGKVYDEAWERIDKKVEGLSKHIKLEEERRSEDAQSKAALTDWLRAKASFVIEGLKEADKDEFCRCELKLQKWYGDLRGKPFAIEAENSILDISGFSKQYNCAFIWQKDGVKKLNLYLIINYFKGGKLRFKKIKPEAFEANRFYTVINKKSGEIVPMEVNFNFDDPNLIILPLAFGKRQGREFIWNDLLSLETGSLKLANGRVIEKTLYNRRTRQDEPALFVALTFERREVLDSSNIKPMNLIGVDRGENIPAVIALTDPEGCPLSRFKDSLGNPTHILRIGESYKEKQRTIQAKKEVEQRRAGGYSRKYASKAKNLADDMVRNTARDLLYYAVTQDAMLIFENLSRGFGRQGKRTFMAERQYTRMEDWLTAKLAYEGLASKTYLSKTLAQYTSKTCSNCGFTITSADYDRVLEKLKKTATGWMTTINGKELKVEGQITYYNRYKRQNVVKDLSVELDRLSEESVNNDISSWTKGRSGEALSLLKKRFSHRPVQEKFVCLNCGFETHADEQAALNIARSWLFLRSQEYKKYQTNKTTGKNTDKRAFVETWQSFYRKKLKEVWKPAV

SEQ ID NO: 38821 - protein, 979 aa, synthetic construct
  REGION 1..979: note = engineered CasX variant
QEIKRINKIRRRLVKDSNTKKAGKTGPMKTLLVRVMTPDLRERLENLRKKPENIPQPISNTSRANLNKLLTDYTEMKKAILHVYWEEFQKDPVGLMSRVAQPASKKIDQNKLKPEMDEKGNLTTAGFACSQCGQPLFVYKLEQVSEKGKAYTNYFGRCNVAEHEKLILLAQLKPEKDSDEAVTYSLGKFGQRALDFYSIHVTKESTHPVKPLAQIAGNRYASAPVGKALSDACMGTIASFLSKYQDIIIEHQKVVKGNQKRLESLRELAGKENLEYPSVTLPPQPHTKEGVDAYNEVIARVRMWVNLNLWQKLKLSRDDAKPLLRLKGFPSFPLVERQANEVDWWDMVCNVKKLINEKKEDGKVFWQNLAGYKRQEALRPYLSSEEDRKKGKKFARYQLGDLLLHLEKKHGEDWGKVYDEAWERIDKKVEGLSKHIKLEEERRSEDAQSKAALTDWLRAKASFVIEGLKEADKDEFCRCELKLQKWYGDLRGKPFAIEAENSILDISGFSKQYNCAFIWQKDGVKKLNLYLIINYFKGGKLRFKKIKPEAFEANRFYTVINKKSGEIVPMEVNFNFDDPNLIILPLAFGKRQGREFIWNDLLSLETGSLKLANGRVIEKTLYNRRTRQDEPALFVALTFERREVLDSSNIKPMNLIGVDRGENIPAVIALTDPEGCPLSRFKDSLGNPTHILRIGESYKEKQRTIQAKKEVEQRRAGGYSRKYASKAKNLADDMVRNTARDLLYYAVTQDAMLIFENLSRGFGRQGKRTFMAERQYTRMEDWLTAKLAYEGLASKTYLSKTLAQYTSKTCSNCGFTITSADYDRVLEKLKKTATGWMTTINGKELKVEGQITYYNRYKRQNVVKDLSVELDRLSEESVNNDISSWTKGRSGEALSLLKKRFSHRPVQEKFVCLNCGFETHADEQAALNIARSWLFLRSQEYKKYQTNKTTGKNTDKRAFVETWQSFYRKKLKEVWKPAV

SEQ ID NO: 38822 - protein, 979 aa, synthetic construct
  REGION 1..979: note = engineered CasX variant
QEIKRINKIRRRLVKDSNTKKAGKTGPMKTLLVRVMTPDLRERLENLRKKPENIPQPISNTSRANLNKLLTDYTEMKKAILHVYWEEFQKDPVGLMSRVAQPASKKIDQNKLKPEMDEKGNLTTAGFACSQCGQPLFVYKLEQVSEKGKAYTNYFGRCNVAEHEKLILLAQLKPEKDSDEAVTYSLGKFGQRALDFYSIHVTKESTHPVKPLAQIAGNRYASVPVGKALSDACMGTIASFLSKYQDIIIEHQKVVKGNQKRLESLRELAGKENLEYPSVTLPPQPHTKEGVDAYNEVIARVRMWVNLNLWQKLKLSRDDAKPLLRLKGFPSFPLVERQANEVDWWDMVCNVKKLINEKKEDGKVFWQNLAGYKRQEALRPYLSSEEDRKKGKKFARYQLGDLLLHLEKKHGEDWGKVYDEAWERIDKKVEGLSKHIKLEEERRSEDAQSKAALTDWLRAKASFVIEGLKEADKDEFCRCELKLQKWYGDLRGKPFAIEAENSILDISGFSKQYNCAFIWQKDGVKKLNLYLIINYFKGGKLRFKKIKPEAFEANRFYTVINKKSGEIVPMEVNFNFDDPNLIILPLAFGKRQGREFIWNDLLSLETGSLKLANGRVIEKTLYNRRTRQDEPALFVALTFERREVLDSSNIKPMNLIGVDRGENIPAVIALTDPEGCPLSRFKDSLGNPTHILRIGESYKEKQRTIQAKKEVEQRRAGGYSRKYASKAKNLADDMVRNTARDLLYYAVTQDAMLIFENLSRGFGRQGKRTFMAERQYTRMEDWLTAKLAYEGLASKTYLSKTLAQYTSKTCSNCGFTITSADYDRVLEKLKKTATGWMTTINGKELKVEGQITYYNRYKRQNVVKDLSVELDRLSEESVNNDISSWTKGRSGEALSLLKKRFSHRPVQEKFVCLNCGFETHADEQAALNIARSWLFLRSQEYKKYQTNKTTGKNTDKRAFVETWQSFYRKKLKEVWKPAV

SEQ ID NO: 38823 - protein, 979 aa, synthetic construct
  REGION 1..979: note = engineered CasX variant
QEIKRINKIRRRLVKDSNTKKAGKTGPMKTLLVRVMTPDLRERLENLRKKPENIPQPISNTSRANLNKLLTDYTEMKKAILHVYWEEFQKDPVGLMSRVAQPASKKIDQNKLKPEMDEKGNLTTAGFACSQCGQPLFVYKLEQVSEKGKAYTNYFGRCNVAEHEKLIKLAQLKPEKDSDEAVTYSLGKFGQRALDFYSIHVTKESTHPVKPLAQIAGNRYASGPVGKALSDACMGTIASFLSKYQDIIIEHQKVVKGNQKRLESLRELAGKENLEYPSVTLPPQPHTKEGVDAYNEVIARVRMWVNLNLWQKLKLSRDDAKPLLRLKGFPSFPLVERQANEVDWWDMVCNVKKLINEKKEDGKVFWQNLAGYKRQEALRPYLSSEEDRKKGKKFARYQLGDLLLHLEKKHGEDWGKVYDEAWERIDKKVEGLSKHIKLEEERRSEDAQSKAALTDWLRAKASFVIEGLKEADKDEFCRCELKLQKWYGDLRGKPFAIEAENSILDISGFSKQYNCAFIWQKDGVKKLNLYLIINYFKGGKLRFKKIKPEAFEANRFYTVINKKSGEIVPMEVNFNFDDPNLIILPLAFGKRQGREFIWNDLLSLETGSLKLANGRVIEKTLYNRRTRQDEPALFVALTFERREVLDSSNIKPMNLIGVDRGENIPAVIALTDPEGCPLSRFKDSLGNPTHILRIGESYKEKQRTIQAKKEVEQRRAGGYSRKYASKAKNLADDMVRNTARDLLYYAVTQDAMLIFENLSRGFGRQGKRTFMAERQYTRMEDWLTAKLAYEGLASKTYLSKTLAQYTSKTCSNCGFTITSADYDRVLEKLKKTATGWMTTINGKELKVEGQITYYNRYKRQNVVKDLSVELDRLSEESVNNDISSWTKGRSGEALSLLKKRFSHRPVQEKFVCLNCGFETHADEQAALNIARSWLFLRSQEYKKYQTNKTTGKNTDKRAFVETWQSFYRKKLKEVWKPAV

SEQ ID NO: 38824 - protein, 978 aa, synthetic construct
  REGION 1..978: note = engineered CasX variant
QEIKRINKIRRRLVKDSNTKKAGKTGPMKTLLVRVMTPDLRERLENLRKKPENIPQPISNTSRANLNKLLTDYTEMKKAILHVYWEEFQKDPVGLMSRVAQPASKKIDQNKLKPEMDEKGNLTTAGFACSQCGQPLFVYKLEQVSEKGKAYTNYFGRCNVAEHEKLILLAQLKPEKDSDEAVTYSLGKFGQRALDFYSIHVTKESTHPVKPLAQIAGNRYASPVGKALSDACMGTIASFLSKYQDIIIEHQKVVKGNQKRLESLRELAGKENLEYPSVTLPPQPHTKEGVDAYNEVIARVRMWVNLNLWQKLKLSRDDAKPLLRLKGFPSFPLVERQANEVDWWDMVCNVKKLINEKKEDGKVFWQNLAGYKRQEALRPYLSSEEDRKKGKKFARYQLGDLLLHLEKKHGEDWGKVYDEAWERIDKKVEGLSKHIKLEEERRSEDAQSKAALTDWLRAKASFVIEGLKEADKDEFCRCELKLQKWYGDLRGKPFAIEAENSILDISGFSKQYNCAFIWQKDGVKKLNLYLIINYFKGGKLRFKKIKPEAFEANRFYTVINKKSGEIVPMEVNFNFDDPNLIILPLAFGKRQGREFIWNDLLSLETGSLKLANGRVIEKTLYNRRTRQDEPALFVALTFERREVLDSSNIKPMNLIGVDRGENIPAVIALTDPEGCPLSRFKDSLGNPTHILRIGESYKEKQRTIQAKKEVEQRRAGGYSRKYASKAKNLADDMVRNTARDLLYYAVTQDAMLIFENLSRGFGRQGKRTFMAERQYTRMEDWLTAKLAYEGLASKTYLSKTLAQYTSKTCSNCGFTITSADYDRVLEKLKKTATGWMTTINGKELKVEGQITYYNRYKRQNVVKDLSVELDRLSEESVNNDISSWTKGRSGEALSLLKKRFSHRPVQEKFVCLNCGFETHADEQAALNIARSWLFLRSQEYKKYQTNKTTGKNTDKRAFVETWQSFYRKKLKEVWKPAV

SEQ ID NO: 38825 - protein, 978 aa, synthetic construct
  REGION 1..978: note = engineered CasX variant
QEIKRINKIRRRLVKDSNTKKAGKTGPMKTLLVRVMTPDLRERLENLRKKPENIPQPISNTSRANLNKLLTDYTEMKKAILHVYWEEFQKDPVGLMSRVAQPASKKIDQNKLKPEMDEKGNLTTAGFACSQCGQPLFVYKLEQVSEKGKAYTNYFGRCNVAEHEKLILLAQLKPEKDSDEAVTYSLGKFGQRALDFYSIHVTKESTHPVKPLAQIAGNRYASYPVGKALSDACMGTIASFLSKYQDIIIEHQKVVKGNQKRLESLRELAGKENLEYPSVTLPPQPHTKEGVDAYNEVIARVRMWVNLNLWQKLKLSRDDAKPLLRLKKFPSFPLVERQANEVDWWDMVCNVKKLINEKKEDGKVFWQNLAGYKRQEALRPYLSSEEDRKKGKKFARYQLGDLLLHLEKKHGEDWGKVYDEAWERIDKKVEGLSKHIKLEEERRSEDAQSKAALTDWLRAKASFVIEGLKEADKDEFCRCELKLQKWYGDLRGKPFAIEAENSILDISGFSKQYNCAFIWQKDGVKKLNLYLIINYFKGGKLRFKKIKPEAFEANRFYTVINKKSGEIVPMEVNFNFDDPNLIILPLAFGKRQGREFIWNDLLSLETGSLKLANGRVIEKTLYNRRTRQDEPALFVALTFERREVLDSSNIKPMNLIGVDRGENIPAVIALTDPEGCPLSRFKDSLGNPTHILRIGESYKEKQRTIQAKKEVEQRRAGGYSRKYASKAKNLADDMVRNTARDLLYYAVTQDAMLIFENLSRGFGRQGKRTFMAERQYTRMEDWLTAKLAYEGLASKTYLSKTLAQYTSKTCSNCGFTITSADYDRVLEKLKKTATGWMTTINGKELKVEGQITYYNRYKRQNVVKDLSVELDRLSEESVNNDISSWTKGRSGEALSLLKKRFSHRPVQEKFVCLNCGFETHADEQAALNIARSWLFLRSQEYKKYQTNKTTGNTDKRAFVETWQSFYRKKLKEVWKPAV

SEQ ID NO: 38826 - protein, 978 aa, synthetic construct
  REGION 1..978: note = engineered CasX variant
QEIKRINKIRRRLVKDSNTKKAGKTGPMKTLLVRVMTPDLRERLENLRKKPENIPQPISNTSRANLNKLLTDYTEMKKAILHVYWEEFQKDPVGLMSRVAQPASKKIDQNKLKPEMDEKGNLTTAGFACSQCGQPLFVYKLEQVSEKGKAYTNYFGRCNVAEHEKLILLAQLKPEKDSDEAVTYSLGKFGQRALDFYSIHVTKESTHPVKPLAQIAGNRYASHPVGKALSDACMGTIASFLSKYQDIIIEHQKVVKGNQKRLESLRELAGKENLEYPSVTLPPQPHTKEGVDAYNEVIARVRMWVNLNLWQKLKLSRDDAKPLLRLKKFPSFPLVERQANEVDWWDMVCNVKKLINEKKEDGKVFWQNLAGYKRQEALRPYLSSEEDRKKGKKFARYQLGDLLLHLEKKHGEDWGKVYDEAWERIDKKVEGLSKHIKLEEERRSEDAQSKAALTDWLRAKASFVIEGLKEADKDEFCRCELKLQKWYGDLRGKPFAIEAENSILDISGFSKQYNCAFIWQKDGVKKLNLYLIINYFKGGKLRFKKIKPEAFEANRFYTVINKKSGEIVPMEVNFNFDDPNLIILPLAFGKRQGREFIWNDLLSLETGSLKLANGRVIEKTLYNRRTRQDEPALFVALTFERREVLDSSNIKPMNLIGVDRGENIPAVIALTDPEGCPLSRFKDSLGNPTHILRIGESYKEKQRTIQAKKEVEQRRAGGYSRKYASKAKNLADDMVRNTARDLLYYAVTQDAMLIFENLSRGFGRQGKRTFMAERQYTRMEDWLTAKLAYEGLASKTYLSKTLAQYTSKTCSNCGFTITSADYDRVLEKLKKTATGWMTTINGKELKVEGQITYYNRYKRQNVVKDLSVELDRLSEESVNNDISSWTKGRSGEALSLLKKRFSHRPVQEKFVCLNCGFETHADEQAALNIARSWLFLRSQEYKKYQTNKTTGNTDKRAFVETWQSFYRKKLKEVWKPAV

SEQ ID NO: 38827 - protein, 978 aa, synthetic construct
  REGION 1..978: note = engineered CasX variant
QEIKRINKIRRRLVKDSNTKKAGKTGPMKTLLVRVMTPDLRERLENLRKKPENIPQPISNTSRANLNKLLTDYTEMKKAILHVYWEEFQKDPVGLMSRVAQPASKKIDQNKLKPEMDEKGNLTTAGFACSQCGQPLFVYKLEQVSEKGKAYTNYFGRCNVAEHEKLILLAQLKPEKDSDEAVTYSLGKFGQRALDFYSIHVTKESTHPVKPLAQIAGNRYASSPVGKALSDACMGTIASFLSKYQDIIIEHQKVVKGNQKRLESLRELAGKENLEYPSVTLPPQPHTKEGVDAYNEVIARVRMWVNLNLWQKLKLSRDDAKPLLRLKKFPSFPLVERQANEVDWWDMVCNVKKLINEKKEDGKVFWQNLAGYKRQEALRPYLSSEEDRKKGKKFARYQLGDLLLHLEKKHGEDWGKVYDEAWERIDKKVEGLSKHIKLEEERRSEDAQSKAALTDWLRAKASFVIEGLKEADKDEFCRCELKLQKWYGDLRGKPFAIEAENSILDISGFSKQYNCAFIWQKDGVKKLNLYLIINYFKGGKLRFKKIKPEAFEANRFYTVINKKSGEIVPMEVNFNFDDPNLIILPLAFGKRQGREFIWNDLLSLETGSLKLANGRVIEKTLYNRRTRQDEPALFVALTFERREVLDSSNIKPMNLIGVDRGENIPAVIALTDPEGCPLSRFKDSLGNPTHILRIGESYKEKQRTIQAKKEVEQRRAGGYSRKYASKAKNLADDMVRNTARDLLYYAVTQDAMLIFENLSRGFGRQGKRTFMAERQYTRMEDWLTAKLAYEGLASKTYLSKTLAQYTSKTCSNCGFTITSADYDRVLEKLKKTATGWMTTINGKELKVEGQITYYNRYKRQNVVKDLSVELDRLSEESVNNDISSWTKGRSGEALSLLKKRFSHRPVQEKFVCLNCGFETHADEQAALNIARSWLFLRSQEYKKYQTNKTTGNTDKRAFVETWQSFYRKKLKEVWKPAV

SEQ ID NO: 38828 - protein, 978 aa, synthetic construct
  REGION 1..978: note = engineered CasX variant
QEIKRINKIRRRLVKDSNTKKAGKTGPMKTLLVRVMTPDLRERLENLRKKPENIPQPISNTSRANLNKLLTDYTEMKKAILHVYWEEFQKDPVGLMSRVAQPASKKIDQNKLKPEMDEKGNLTTAGFACSQCGQPLFVYKLEQVSEKGKAYTNYFGRCNVAEHEKLILLAQLKPEKDSDEAVTYSLGKFGQRALDFYSIHVTKESTHPVKPLAQIAGNRYASTPVGKALSDACMGTIASFLSKYQDIIIEHQKVVKGNQKRLESLRELAGKENLEYPSVTLPPQPHTKEGVDAYNEVIARVRMWVNLNLWQKLKLSRDDAKPLLRLKKFPSFPLVERQANEVDWWDMVCNVKKLINEKKEDGKVFWQNLAGYKRQEALRPYLSSEEDRKKGKKFARYQLGDLLLHLEKKHGEDWGKVYDEAWERIDKKVEGLSKHIKLEEERRSEDAQSKAALTDWLRAKASFVIEGLKEADKDEFCRCELKLQKWYGDLRGKPFAIEAENSILDISGFSKQYNCAFIWQKDGVKKLNLYLIINYFKGGKLRFKKIKPEAFEANRFYTVINKKSGEIVPMEVNFNFDDPNLIILPLAFGKRQGREFIWNDLLSLETGSLKLANGRVIEKTLYNRRTRQDEPALFVALTFERREVLDSSNIKPMNLIGVDRGENIPAVIALTDPEGCPLSRFKDSLGNPTHILRIGESYKEKQRTIQAKKEVEQRRAGGYSRKYASKAKNLADDMVRNTARDLLYYAVTQDAMLIFENLSRGFGRQGKRTFMAERQYTRMEDWLTAKLAYEGLASKTYLSKTLAQYTSKTCSNCGFTITSADYDRVLEKLKKTATGWMTTINGKELKVEGQITYYNRYKRQNVVKDLSVELDRLSEESVNNDISSWTKGRSGEALSLLKKRFSHRPVQEKFVCLNCGFETHADEQAALNIARSWLFLRSQEYKKYQTNKTTGNTDKRAFVETWQSFYRKKLKEVWKPAV

SEQ ID NO: 38829 - protein, 978 aa, synthetic construct
  REGION 1..978: note = engineered CasX variant
QEIKRINKIRRRLVKDSNTKKAGKTGPMKTLLVRVMTPDLRERLENLRKKPENIPQPISNTSRANLNKLLTDYTEMKKAILHVYWEEFQKDPVGLMSRVAQPASKKIDQNKLKPEMDEKGNLTTAGFACSQCGQPLFVYKLEQVSEKGKAYTNYFGRCNVAEHEKLILLAQLKPEKDSDEAVTYSLGKFGQRALDFYSIHVTKESTHPVKPLAQIAGNRYASAPVGKALSDACMGTIASFLSKYQDIIIEHQKVVKGNQKRLESLRELAGKENLEYPSVTLPPQPHTKEGVDAYNEVIARVRMWVNLNLWQKLKLSRDDAKPLLRLKKFPSFPLVERQANEVDWWDMVCNVKKLINEKKEDGKVFWQNLAGYKRQEALRPYLSSEEDRKKGKKFARYQLGDLLLHLEKKHGEDWGKVYDEAWERIDKKVEGLSKHIKLEEERRSEDAQSKAALTDWLRAKASFVIEGLKEADKDEFCRCELKLQKWYGDLRGKPFAIEAENSILDISGFSKQYNCAFIWQKDGVKKLNLYLIINYFKGGKLRFKKIKPEAFEANRFYTVINKKSGEIVPMEVNFNFDDPNLIILPLAFGKRQGREFIWNDLLSLETGSLKLANGRVIEKTLYNRRTRQDEPALFVALTFERREVLDSSNIKPMNLIGVDRGENIPAVIALTDPEGCPLSRFKDSLGNPTHILRIGESYKEKQRTIQAKKEVEQRRAGGYSRKYASKAKNLADDMVRNTARDLLYYAVTQDAMLIFENLSRGFGRQGKRTFMAERQYTRMEDWLTAKLAYEGLASKTYLSKTLAQYTSKTCSNCGFTITSADYDRVLEKLKKTATGWMTTINGKELKVEGQITYYNRYKRQNVVKDLSVELDRLSEESVNNDISSWTKGRSGEALSLLKKRFSHRPVQEKFVCLNCGFETHADEQAALNIARSWLFLRSQEYKKYQTNKTTGNTDKRAFVETWQSFYRKKLKEVWKPAV

SEQ ID NO: 38830 - protein, 978 aa, synthetic construct
  REGION 1..978: note = engineered CasX variant
QEIKRINKIRRRLVKDSNTKKAGKTGPMKTLLVRVMTPDLRERLENLRKKPENIPQPISNTSRANLNKLLTDYTEMKKAILHVYWEEFQKDPVGLMSRVAQPASKKIDQNKLKPEMDEKGNLTTAGFACSQCGQPLFVYKLEQVSEKGKAYTNYFGRCNVAEHEKLILLAQLKPEKDSDEAVTYSLGKFGQRALDFYSIHVTKESTHPVKPLAQIAGNRYASVPVGKALSDACMGTIASFLSKYQDIIIEHQKVVKGNQKRLESLRELAGKENLEYPSVTLPPQPHTKEGVDAYNEVIARVRMWVNLNLWQKLKLSRDDAKPLLRLKKFPSFPLVERQANEVDWWDMVCNVKKLINEKKEDGKVFWQNLAGYKRQEALRPYLSSEEDRKKGKKFARYQLGDLLLHLEKKHGEDWGKVYDEAWERIDKKVEGLSKHIKLEEERRSEDAQSKAALTDWLRAKASFVIEGLKEADKDEFCRCELKLQKWYGDLRGKPFAIEAENSILDISGFSKQYNCAFIWQKDGVKKLNLYLIINYFKGGKLRFKKIKPEAFEANRFYTVINKKSGEIVPMEVNFNFDDPNLIILPLAFGKRQGREFIWNDLLSLETGSLKLANGRVIEKTLYNRRTRQDEPALFVALTFERREVLDSSNIKPMNLIGVDRGENIPAVIALTDPEGCPLSRFKDSLGNPTHILRIGESYKEKQRTIQAKKEVEQRRAGGYSRKYASKAKNLADDMVRNTARDLLYYAVTQDAMLIFENLSRGFGRQGKRTFMAERQYTRMEDWLTAKLAYEGLASKTYLSKTLAQYTSKTCSNCGFTITSADYDRVLEKLKKTATGWMTTINGKELKVEGQITYYNRYKRQNVVKDLSVELDRLSEESVNNDISSWTKGRSGEALSLLKKRFSHRPVQEKFVCLNCGFETHADEQAALNIARSWLFLRSQEYKKYQTNKTTGNTDKRAFVETWQSFYRKKLKEVWKPAV

SEQ ID NO: 38831 - protein, 978 aa, synthetic construct
  REGION 1..978: note = engineered CasX variant
QEIKRINKIRRRLVKDSNTKKAGKTGPMKTLLVRVMTPDLRERLENLRKKPENIPQPISNTSRANLNKLLTDYTEMKKAILHVYWEEFQKDPVGLMSRVAQPASKKIDQNKLKPEMDEKGNLTTAGFACSQCGQPLFVYKLEQVSEKGKAYTNYFGRCNVAEHEKLIKLAQLKPEKDSDEAVTYSLGKFGQRALDFYSIHVTKESTHPVKPLAQIAGNRYASGPVGKALSDACMGTIASFLSKYQDIIIEHQKVVKGNQKRLESLRELAGKENLEYPSVTLPPQPHTKEGVDAYNEVIARVRMWVNLNLWQKLKLSRDDAKPLLRLKKFPSFPLVERQANEVDWWDMVCNVKKLINEKKEDGKVFWQNLAGYKRQEALRPYLSSEEDRKKGKKFARYQLGDLLLHLEKKHGEDWGKVYDEAWERIDKKVEGLSKHIKLEEERRSEDAQSKAALTDWLRAKASFVIEGLKEADKDEFCRCELKLQKWYGDLRGKPFAIEAENSILDISGFSKQYNCAFIWQKDGVKKLNLYLIINYFKGGKLRFKKIKPEAFEANRFYTVINKKSGEIVPMEVNFNFDDPNLIILPLAFGKRQGREFIWNDLLSLETGSLKLANGRVIEKTLYNRRTRQDEPALFVALTFERREVLDSSNIKPMNLIGVDRGENIPAVIALTDPEGCPLSRFKDSLGNPTHILRIGESYKEKQRTIQAKKEVEQRRAGGYSRKYASKAKNLADDMVRNTARDLLYYAVTQDAMLIFENLSRGFGRQGKRTFMAERQYTRMEDWLTAKLAYEGLASKTYLSKTLAQYTSKTCSNCGFTITSADYDRVLEKLKKTATGWMTTINGKELKVEGQITYYNRYKRQNVVKDLSVELDRLSEESVNNDISSWTKGRSGEALSLLKKRFSHRPVQEKFVCLNCGFETHADEQAALNIARSWLFLRSQEYKKYQTNKTTGNTDKRAFVETWQSFYRKKLKEVWKPAV

SEQ ID NO: 38832 - protein, 977 aa, synthetic construct
  REGION 1..977: note = engineered CasX variant
QEIKRINKIRRRLVKDSNTKKAGKTGPMKTLLVRVMTPDLRERLENLRKKPENIPQPISNTSRANLNKLLTDYTEMKKAILHVYWEEFQKDPVGLMSRVAQPASKKIDQNKLKPEMDEKGNLTTAGFACSQCGQPLFVYKLEQVSEKGKAYTNYFGRCNVAEHEKLILLAQLKPEKDSDEAVTYSLGKFGQRALDFYSIHVTKESTHPVKPLAQIAGNRYASPVGKALSDACMGTIASFLSKYQDIIIEHQKVVKGNQKRLESLRELAGKENLEYPSVTLPPQPHTKEGVDAYNEVIARVRMWVNLNLWQKLKLSRDDAKPLLRLKKFPSFPLVERQANEVDWWDMVCNVKKLINEKKEDGKVFWQNLAGYKRQEALRPYLSSEEDRKKGKKFARYQLGDLLLHLEKKHGEDWGKVYDEAWERIDKKVEGLSKHIKLEEERRSEDAQSKAALTDWLRAKASFVIEGLKEADKDEFCRCELKLQKWYGDLRGKPFAIEAENSILDISGFSKQYNCAFIWQKDGVKKLNLYLIINYFKGGKLRFKKIKPEAFEANRFYTVINKKSGEIVPMEVNFNFDDPNLIILPLAFGKRQGREFIWNDLLSLETGSLKLANGRVIEKTLYNRRTRQDEPALFVALTFERREVLDSSNIKPMNLIGVDRGENIPAVIALTDPEGCPLSRFKDSLGNPTHILRIGESYKEKQRTIQAKKEVEQRRAGGYSRKYASKAKNLADDMVRNTARDLLYYAVTQDAMLIFENLSRGFGRQGKRTFMAERQYTRMEDWLTAKLAYEGLASKTYLSKTLAQYTSKTCSNCGFTITSADYDRVLEKLKKTATGWMTTINGKELKVEGQITYYNRYKRQNVVKDLSVELDRLSEESVNNDISSWTKGRSGEALSLLKKRFSHRPVQEKFVCLNCGFETHADEQAALNIARSWLFLRSQEYKKYQTNKTTGNTDKRAFVETWQSFYRKKLKEVWKPAV

SEQ ID NO: 38833 - protein, 978 aa, synthetic construct
  REGION 1..978: note = engineered CasX variant
QEIKRINKIRRRLVKDSNTKKAGKTGPMKTLLVRVMTPDLRERLENLRKKPENIPQPISNTSRANLNKLLTDYTEMKKAILHVYWEEFQKDPVGLMSRVAQPASKKIDQNKLKPEMDEKGNLTTAGFACSQCGQPLFVYKLEQVSEKGKAYTNYFGRCNVAEHEKLILLAQLKPEKDSDEAVTYSLGKFGQRALDFYSIHVTKESTHPVKPLAQIAGNRYASYPVGKALSDACMGTIASFLSKYQDIIIEHQKVVKGNQKRLESLRELAGKENLEYPSVTLPPQPHTKEGVDAYNEVIARVRMWVNLNLWQKLKLSRDDAKPLLRLKGFPSFPLVERQANEVDWWDMVCNVKKLINEKKEDGKVFWQNLAGYKRQEALRPYLSSEEDRKKGKKFARYQLGDLLLHLEKKHGEDWGKVYDEAWERIDKKVEGLSKHIKLEEERRSEDAQSKAALTDWLRAKASFVIEGLKEADKDEFCRCELKLQKWYGDLRGKPFAIEAENSILDISGFSKQYNCAFIWQKDGVKKLNLYLIINYFKGGKLRFKKIKPEAFEANRFYTVINKKSGEIVPMEVNFNFDDPNLIILPLAFGKRQGREFIWNDLLSLETGSLKLANGRVIEKTLYNRRTRQDEPALFVALTFERREVLDSSNIKPMNLIGVDRGENIPAVIALTDPEGCPLSRFKDSLGNPTHILRIGERYKEKQRTIQAKKEVEQRRAGGYSRKYASKAKNLADDMVRNTARDLLYYAVTQDAMLIFENLSRGFGRQGKRTFMAERQYTRMEDWLTAKLAYEGLASKTYLSKTLAQYTSKTCSNCGFTITSADYDRVLEKLKKTATGWMTTINGKELKVEGQITYYNRYKRQNVVKDLSVELDRLSEESVNNDISSWTKGRSGEALSLLKKRFSHRPVQEKFVCLNCGFETHADEQAALNIARSWLFLRSQEYKKYQTNKTTGNTDKRAFVETWQSFYRKKLKEVWKPAV

SEQ ID NO: 38834 - protein, 978 aa, synthetic construct
  REGION 1..978: note = engineered CasX variant
QEIKRINKIRRRLVKDSNTKKAGKTGPMKTLLVRVMTPDLRERLENLRKKPENIPQPISNTSRANLNKLLTDYTEMKKAILHVYWEEFQKDPVGLMSRVAQPASKKIDQNKLKPEMDEKGNLTTAGFACSQCGQPLFVYKLEQVSEKGKAYTNYFGRCNVAEHEKLILLAQLKPEKDSDEAVTYSLGKFGQRALDFYSIHVTKESTHPVKPLAQIAGNRYASHPVGKALSDACMGTIASFLSKYQDIIIEHQKVVKGNQKRLESLRELAGKENLEYPSVTLPPQPHTKEGVDAYNEVIARVRMWVNLNLWQKLKLSRDDAKPLLRLKGFPSFPLVERQANEVDWWDMVCNVKKLINEKKEDGKVFWQNLAGYKRQEALRPYLSSEEDRKKGKKFARYQLGDLLLHLEKKHGEDWGKVYDEAWERIDKKVEGLSKHIKLEEERRSEDAQSKAALTDWLRAKASFVIEGLKEADKDEFCRCELKLQKWYGDLRGKPFAIEAENSILDISGFSKQYNCAFIWQKDGVKKLNLYLIINYFKGGKLRFKKIKPEAFEANRFYTVINKKSGEIVPMEVNFNFDDPNLIILPLAFGKRQGREFIWNDLLSLETGSLKLANGRVIEKTLYNRRTRQDEPALFVALTFERREVLDSSNIKPMNLIGVDRGENIPAVIALTDPEGCPLSRFKDSLGNPTHILRIGERYKEKQRTIQAKKEVEQRRAGGYSRKYASKAKNLADDMVRNTARDLLYYAVTQDAMLIFENLSRGFGRQGKRTFMAERQYTRMEDWLTAKLAYEGLASKTYLSKTLAQYTSKTCSNCGFTITSADYDRVLEKLKKTATGWMTTINGKELKVEGQITYYNRYKRQNVVKDLSVELDRLSEESVNNDISSWTKGRSGEALSLLKKRFSHRPVQEKFVCLNCGFETHADEQAALNIARSWLFLRSQEYKKYQTNKTTGNTDKRAFVETWQSFYRKKLKEVWKPAV

SEQ ID NO: 38835 - protein, 978 aa, synthetic construct
  REGION 1..978: note = engineered CasX variant
QEIKRINKIRRRLVKDSNTKKAGKTGPMKTLLVRVMTPDLRERLENLRKKPENIPQPISNTSRANLNKLLTDYTEMKKAILHVYWEEFQKDPVGLMSRVAQPASKKIDQNKLKPEMDEKGNLTTAGFACSQCGQPLFVYKLEQVSEKGKAYTNYFGRCNVAEHEKLILLAQLKPEKDSDEAVTYSLGKFGQRALDFYSIHVTKESTHPVKPLAQIAGNRYASSPVGKALSDACMGTIASFLSKYQDIIIEHQKVVKGNQKRLESLRELAGKENLEYPSVTLPPQPHTKEGVDAYNEVIARVRMWVNLNLWQKLKLSRDDAKPLLRLKGFPSFPLVERQANEVDWWDMVCNVKKLINEKKEDGKVFWQNLAGYKRQEALRPYLSSEEDRKKGKKFARYQLGDLLLHLEKKHGEDWGKVYDEAWERIDKKVEGLSKHIKLEEERRSEDAQSKAALTDWLRAKASFVIEGLKEADKDEFCRCELKLQKWYGDLRGKPFAIEAENSILDISGFSKQYNCAFIWQKDGVKKLNLYLIINYFKGGKLRFKKIKPEAFEANRFYTVINKKSGEIVPMEVNFNFDDPNLIILPLAFGKRQGREFIWNDLLSLETGSLKLANGRVIEKTLYNRRTRQDEPALFVALTFERREVLDSSNIKPMNLIGVDRGENIPAVIALTDPEGCPLSRFKDSLGNPTHILRIGERYKEKQRTIQAKKEVEQRRAGGYSRKYASKAKNLADDMVRNTARDLLYYAVTQDAMLIFENLSRGFGRQGKRTFMAERQYTRMEDWLTAKLAYEGLASKTYLSKTLAQYTSKTCSNCGFTITSADYDRVLEKLKKTATGWMTTINGKELKVEGQITYYNRYKRQNVVKDLSVELDRLSEESVNNDISSWTKGRSGEALSLLKKRFSHRPVQEKFVCLNCGFETHADEQAALNIARSWLFLRSQEYKKYQTNKTTGNTDKRAFVETWQSFYRKKLKEVWKPAV

SEQ ID NO: 38836 - protein, 978 aa, synthetic construct
  REGION 1..978: note = engineered CasX variant
QEIKRINKIRRRLVKDSNTKKAGKTGPMKTLLVRVMTPDLRERLENLRKKPENIPQPISNTSRANLNKLLTDYTEMKKAILHVYWEEFQKDPVGLMSRVAQPASKKIDQNKLKPEMDEKGNLTTAGFACSQCGQPLFVYKLEQVSEKGKAYTNYFGRCNVAEHEKLILLAQLKPEKDSDEAVTYSLGKFGQRALDFYSIHVTKESTHPVKPLAQIAGNRYASTPVGKALSDACMGTIASFLSKYQDIIIEHQKVVKGNQKRLESLRELAGKENLEYPSVTLPPQPHTKEGVDAYNEVIARVRMWVNLNLWQKLKLSRDDAKPLLRLKGFPSFPLVERQANEVDWWDMVCNVKKLINEKKEDGKVFWQNLAGYKRQEALRPYLSSEEDRKKGKKFARYQLGDLLLHLEKKHGEDWGKVYDEAWERIDKKVEGLSKHIKLEEERRSEDAQSKAALTDWLRAKASFVIEGLKEADKDEFCRCELKLQKWYGDLRGKPFAIEAENSILDISGFSKQYNCAFIWQKDGVKKLNLYLIINYFKGGKLRFKKIKPEAFEANRFYTVINKKSGEIVPMEVNFNFDDPNLIILPLAFGKRQGREFIWNDLLSLETGSLKLANGRVIEKTLYNRRTRQDEPALFVALTFERREVLDSSNIKPMNLIGVDRGENIPAVIALTDPEGCPLSRFKDSLGNPTHILRIGERYKEKQRTIQAKKEVEQRRAGGYSRKYASKAKNLADDMVRNTARDLLYYAVTQDAMLIFENLSRGFGRQGKRTFMAERQYTRMEDWLTAKLAYEGLASKTYLSKTLAQYTSKTCSNCGFTITSADYDRVLEKLKKTATGWMTTINGKELKVEGQITYYNRYKRQNVVKDLSVELDRLSEESVNNDISSWTKGRSGEALSLLKKRFSHRPVQEKFVCLNCGFETHADEQAALNIARSWLFLRSQEYKKYQTNKTTGNTDKRAFVETWQSFYRKKLKEVWKPAV

SEQ ID NO: 38837 - protein, 978 aa, synthetic construct
  REGION 1..978: note = engineered CasX variant
QEIKRINKIRRRLVKDSNTKKAGKTGPMKTLLVRVMTPDLRERLENLRKKPENIPQPISNTSRANLNKLLTDYTEMKKAILHVYWEEFQKDPVGLMSRVAQPASKKIDQNKLKPEMDEKGNLTTAGFACSQCGQPLFVYKLEQVSEKGKAYTNYFGRCNVAEHEKLILLAQLKPEKDSDEAVTYSLGKFGQRALDFYSIHVTKESTHPVKPLAQIAGNRYASAPVGKALSDACMGTIASFLSKYQDIIIEHQKVVKGNQKRLESLRELAGKENLEYPSVTLPPQPHTKEGVDAYNEVIARVRMWVNLNLWQKLKLSRDDAKPLLRLKGFPSFPLVERQANEVDWWDMVCNVKKLINEKKEDGKVFWQNLAGYKRQEALRPYLSSEEDRKKGKKFARYQLGDLLLHLEKKHGEDWGKVYDEAWERIDKKVEGLSKHIKLEEERRSEDAQSKAALTDWLRAKASFVIEGLKEADKDEFCRCELKLQKWYGDLRGKPFAIEAENSILDISGFSKQYNCAFIWQKDGVKKLNLYLIINYFKGGKLRFKKIKPEAFEANRFYTVINKKSGEIVPMEVNFNFDDPNLIILPLAFGKRQGREFIWNDLLSLETGSLKLANGRVIEKTLYNRRTRQDEPALFVALTFERREVLDSSNIKPMNLIGVDRGENIPAVIALTDPEGCPLSRFKDSLGNPTHILRIGERYKEKQRTIQAKKEVEQRRAGGYSRKYASKAKNLADDMVRNTARDLLYYAVTQDAMLIFENLSRGFGRQGKRTFMAERQYTRMEDWLTAKLAYEGLASKTYLSKTLAQYTSKTCSNCGFTITSADYDRVLEKLKKTATGWMTTINGKELKVEGQITYYNRYKRQNVVKDLSVELDRLSEESVNNDISSWTKGRSGEALSLLKKRFSHRPVQEKFVCLNCGFETHADEQAALNIARSWLFLRSQEYKKYQTNKTTGNTDKRAFVETWQSFYRKKLKEVWKPAV

SEQ ID NO: 38838 - protein, 978 aa, synthetic construct
  REGION 1..978: note = engineered CasX variant
QEIKRINKIRRRLVKDSNTKKAGKTGPMKTLLVRVMTPDLRERLENLRKKPENIPQPISNTSRANLNKLLTDYTEMKKAILHVYWEEFQKDPVGLMSRVAQPASKKIDQNKLKPEMDEKGNLTTAGFACSQCGQPLFVYKLEQVSEKGKAYTNYFGRCNVAEHEKLILLAQLKPEKDSDEAVTYSLGKFGQRALDFYSIHVTKESTHPVKPLAQIAGNRYASVPVGKALSDACMGTIASFLSKYQDIIIEHQKVVKGNQKRLESLRELAGKENLEYPSVTLPPQPHTKEGVDAYNEVIARVRMWVNLNLWQKLKLSRDDAKPLLRLKGFPSFPLVERQANEVDWWDMVCNVKKLINEKKEDGKVFWQNLAGYKRQEALRPYLSSEEDRKKGKKFARYQLGDLLLHLEKKHGEDWGKVYDEAWERIDKKVEGLSKHIKLEEERRSEDAQSKAALTDWLRAKASFVIEGLKEADKDEFCRCELKLQKWYGDLRGKPFAIEAENSILDISGFSKQYNCAFIWQKDGVKKLNLYLIINYFKGGKLRFKKIKPEAFEANRFYTVINKKSGEIVPMEVNFNFDDPNLIILPLAFGKRQGREFIWNDLLSLETGSLKLANGRVIEKTLYNRRTRQDEPALFVALTFERREVLDSSNIKPMNLIGVDRGENIPAVIALTDPEGCPLSRFKDSLGNPTHILRIGERYKEKQRTIQAKKEVEQRRAGGYSRKYASKAKNLADDMVRNTARDLLYYAVTQDAMLIFENLSRGFGRQGKRTFMAERQYTRMEDWLTAKLAYEGLASKTYLSKTLAQYTSKTCSNCGFTITSADYDRVLEKLKKTATGWMTTINGKELKVEGQITYYNRYKRQNVVKDLSVELDRLSEESVNNDISSWTKGRSGEALSLLKKRFSHRPVQEKFVCLNCGFETHADEQAALNIARSWLFLRSQEYKKYQTNKTTGNTDKRAFVETWQSFYRKKLKEVWKPAV

SEQ ID NO: 38839 - protein, 978 aa, synthetic construct
  REGION 1..978: note = engineered CasX variant
QEIKRINKIRRRLVKDSNTKKAGKTGPMKTLLVRVMTPDLRERLENLRKKPENIPQPISNTSRANLNKLLTDYTEMKKAILHVYWEEFQKDPVGLMSRVAQPASKKIDQNKLKPEMDEKGNLTTAGFACSQCGQPLFVYKLEQVSEKGKAYTNYFGRCNVAEHEKLIKLAQLKPEKDSDEAVTYSLGKFGQRALDFYSIHVTKESTHPVKPLAQIAGNRYASGPVGKALSDACMGTIASFLSKYQDIIIEHQKVVKGNQKRLESLRELAGKENLEYPSVTLPPQPHTKEGVDAYNEVIARVRMWVNLNLWQKLKLSRDDAKPLLRLKGFPSFPLVERQANEVDWWDMVCNVKKLINEKKEDGKVFWQNLAGYKRQEALRPYLSSEEDRKKGKKFARYQLGDLLLHLEKKHGEDWGKVYDEAWERIDKKVEGLSKHIKLEEERRSEDAQSKAALTDWLRAKASFVIEGLKEADKDEFCRCELKLQKWYGDLRGKPFAIEAENSILDISGFSKQYNCAFIWQKDGVKKLNLYLIINYFKGGKLRFKKIKPEAFEANRFYTVINKKSGEIVPMEVNFNFDDPNLIILPLAFGKRQGREFIWNDLLSLETGSLKLANGRVIEKTLYNRRTRQDEPALFVALTFERREVLDSSNIKPMNLIGVDRGENIPAVIALTDPEGCPLSRFKDSLGNPTHILRIGERYKEKQRTIQAKKEVEQRRAGGYSRKYASKAKNLADDMVRNTARDLLYYAVTQDAMLIFENLSRGFGRQGKRTFMAERQYTRMEDWLTAKLAYEGLASKTYLSKTLAQYTSKTCSNCGFTITSADYDRVLEKLKKTATGWMTTINGKELKVEGQITYYNRYKRQNVVKDLSVELDRLSEESVNNDISSWTKGRSGEALSLLKKRFSHRPVQEKFVCLNCGFETHADEQAALNIARSWLFLRSQEYKKYQTNKTTGNTDKRAFVETWQSFYRKKLKEVWKPAV

SEQ ID NO: 38840 - protein, 977 aa, synthetic construct
  REGION 1..977: note = engineered CasX variant
QEIKRINKIRRRLVKDSNTKKAGKTGPMKTLLVRVMTPDLRERLENLRKKPENIPQPISNTSRANLNKLLTDYTEMKKAILHVYWEEFQKDPVGLMSRVAQPASKKIDQNKLKPEMDEKGNLTTAGFACSQCGQPLFVYKLEQVSEKGKAYTNYFGRCNVAEHEKLILLAQLKPEKDSDEAVTYSLGKFGQRALDFYSIHVTKESTHPVKPLAQIAGNRYASPVGKALSDACMGTIASFLSKYQDIIIEHQKVVKGNQKRLESLRELAGKENLEYPSVTLPPQPHTKEGVDAYNEVIARVRMWVNLNLWQKLKLSRDDAKPLLRLKGFPSFPLVERQANEVDWWDMVCNVKKLINEKKEDGKVFWQNLAGYKRQEALRPYLSSEEDRKKGKKFARYQLGDLLLHLEKKHGEDWGKVYDEAWERIDKKVEGLSKHIKLEEERRSEDAQSKAALTDWLRAKASFVIEGLKEADKDEFCRCELKLQKWYGDLRGKPFAIEAENSILDISGFSKQYNCAFIWQKDGVKKLNLYLIINYFKGGKLRFKKIKPEAFEANRFYTVINKKSGEIVPMEVNFNFDDPNLIILPLAFGKRQGREFIWNDLLSLETGSLKLANGRVIEKTLYNRRTRQDEPALFVALTFERREVLDSSNIKPMNLIGVDRGENIPAVIALTDPEGCPLSRFKDSLGNPTHILRIGERYKEKQRTIQAKKEVEQRRAGGYSRKYASKAKNLADDMVRNTARDLLYYAVTQDAMLIFENLSRGFGRQGKRTFMAERQYTRMEDWLTAKLAYEGLASKTYLSKTLAQYTSKTCSNCGFTITSADYDRVLEKLKKTATGWMTTINGKELKVEGQITYYNRYKRQNVVKDLSVELDRLSEESVNNDISSWTKGRSGEALSLLKKRFSHRPVQEKFVCLNCGFETHADEQAALNIARSWLFLRSQEYKKYQTNKTTGNTDKRAFVETWQSFYRKKLKEVWKPAV

SEQ ID NO: 38841 - protein, 978 aa, synthetic construct
  REGION 1..978: note = engineered CasX variant
QEIKRINKIRRRLVKDSNTKKAGKTGPMKTLLVRVMTPDLRERLENLRKKPENIPQPISNTSRANLNKLLTDYTEMKKAILHVYWEEFQKDPVGLMSRVAQPASKKIDQNKLKPEMDEKGNLTTAGFACSQCGQPLFVYKLEQVSEKGKAYTNYFGRCNVAEHEKLILLAQLKPEKDSDEAVTYSLGKFGQRALDFYSIHVTKESTHPVKPLAQIAGNRYASYPVGKALSDACMGTIASFLSKYQDIIIEHQKVVKGNQKRLESLRELAGKENLEYPSVTLPPQPHTKEGVDAYNEVIARVRMWVNLNLWQKLKLSRDDAKPLLRLKGFPSFPLVERQANEVDWWDMVCNVKKLINEKKEDGKVFWQNLAGYKRQEALRPYLSSEEDRKKGKKFARYQLGDLLLHLEKKHGEDWGKVYDEAWERIDKKVEGLSKHIKLEEERRSEDAQSKAALTDWLRAKASFVIEGLKEADKDEFCRCELKLQKWYGDLRGKPFAIEAENSILDISGFSKQYNCAFIWQKDGVKKLNLYLIINYFKGGKLRFKKIKPEAFEANRFYTVINKKSGEIVPMEVNFNFDDPNLIILPLAFGKRQGREFIWNDLLSLETGSLQLANGRVIEKTLYNRRTRQDEPALFVALTFERREVLDSSNIKPMNLIGVDRGENIPAVIALTDPEGCPLSRFKDSLGNPTHILRIGESYKEKQRTIQAKKEVEQRRAGGYSRKYASKAKNLADDMVRNTARDLLYYAVTQDAMLIFENLSRGFGRQGKRTFMAERQYTRMEDWLTAKLAYEGLASKTYLSKTLAQYTSKTCSNCGFTITSADYDRVLEKLKKTATGWMTTINGKELKVEGQITYYNRYKRQNVVKDLSVELDRLSEESVNNDISSWTKGRSGEALSLLKKRFSHRPVQEKFVCLNCGFETHADEQAALNIARSWLFLRSQEYKKYQTNKTTGNTDKRAFVETWQSFYRKKLKEVWKPAV

SEQ ID NO: 38842 - protein, 978 aa, synthetic construct
  REGION 1..978: note = engineered CasX variant
QEIKRINKIRRRLVKDSNTKKAGKTGPMKTLLVRVMTPDLRERLENLRKKPENIPQPISNTSRANLNKLLTDYTEMKKAILHVYWEEFQKDPVGLMSRVAQPASKKIDQNKLKPEMDEKGNLTTAGFACSQCGQPLFVYKLEQVSEKGKAYTNYFGRCNVAEHEKLILLAQLKPEKDSDEAVTYSLGKFGQRALDFYSIHVTKESTHPVKPLAQIAGNRYASHPVGKALSDACMGTIASFLSKYQDIIIEHQKVVKGNQKRLESLRELAGKENLEYPSVTLPPQPHTKEGVDAYNEVIARVRMWVNLNLWQKLKLSRDDAKPLLRLKGFPSFPLVERQANEVDWWDMVCNVKKLINEKKEDGKVFWQNLAGYKRQEALRPYLSSEEDRKKGKKFARYQLGDLLLHLEKKHGEDWGKVYDEAWERIDKKVEGLSKHIKLEEERRSEDAQSKAALTDWLRAKASFVIEGLKEADKDEFCRCELKLQKWYGDLRGKPFAIEAENSILDISGFSKQYNCAFIWQKDGVKKLNLYLIINYFKGGKLRFKKIKPEAFEANRFYTVINKKSGEIVPMEVNFNFDDPNLIILPLAFGKRQGREFIWNDLLSLETGSLQLANGRVIEKTLYNRRTRQDEPALFVALTFERREVLDSSNIKPMNLIGVDRGENIPAVIALTDPEGCPLSRFKDSLGNPTHILRIGESYKEKQRTIQAKKEVEQRRAGGYSRKYASKAKNLADDMVRNTARDLLYYAVTQDAMLIFENLSRGFGRQGKRTFMAERQYTRMEDWLTAKLAYEGLASKTYLSKTLAQYTSKTCSNCGFTITSADYDRVLEKLKKTATGWMTTINGKELKVEGQITYYNRYKRQNVVKDLSVELDRLSEESVNNDISSWTKGRSGEALSLLKKRFSHRPVQEKFVCLNCGFETHADEQAALNIARSWLFLRSQEYKKYQTNKTTGNTDKRAFVETWQSFYRKKLKEVWKPAV

SEQ ID NO: 38843 - protein, 978 aa, synthetic construct
  REGION 1..978: note = engineered CasX variant
QEIKRINKIRRRLVKDSNTKKAGKTGPMKTLLVRVMTPDLRERLENLRKKPENIPQPISNTSRANLNKLLTDYTEMKKAILHVYWEEFQKDPVGLMSRVAQPASKKIDQNKLKPEMDEKGNLTTAGFACSQCGQPLFVYKLEQVSEKGKAYTNYFGRCNVAEHEKLILLAQLKPEKDSDEAVTYSLGKFGQRALDFYSIHVTKESTHPVKPLAQIAGNRYASSPVGKALSDACMGTIASFLSKYQDIIIEHQKVVKGNQKRLESLRELAGKENLEYPSVTLPPQPHTKEGVDAYNEVIARVRMWVNLNLWQKLKLSRDDAKPLLRLKGFPSFPLVERQANEVDWWDMVCNVKKLINEKKEDGKVFWQNLAGYKRQEALRPYLSSEEDRKKGKKFARYQLGDLLLHLEKKHGEDWGKVYDEAWERIDKKVEGLSKHIKLEEERRSEDAQSKAALTDWLRAKASFVIEGLKEADKDEFCRCELKLQKWYGDLRGKPFAIEAENSILDISGFSKQYNCAFIWQKDGVKKLNLYLIINYFKGGKLRFKKIKPEAFEANRFYTVINKKSGEIVPMEVNFNFDDPNLIILPLAFGKRQGREFIWNDLLSLETGSLQLANGRVIEKTLYNRRTRQDEPALFVALTFERREVLDSSNIKPMNLIGVDRGENIPAVIALTDPEGCPLSRFKDSLGNPTHILRIGESYKEKQRTIQAKKEVEQRRAGGYSRKYASKAKNLADDMVRNTARDLLYYAVTQDAMLIFENLSRGFGRQGKRTFMAERQYTRMEDWLTAKLAYEGLASKTYLSKTLAQYTSKTCSNCGFTITSADYDRVLEKLKKTATGWMTTINGKELKVEGQITYYNRYKRQNVVKDLSVELDRLSEESVNNDISSWTKGRSGEALSLLKKRFSHRPVQEKFVCLNCGFETHADEQAALNIARSWLFLRSQEYKKYQTNKTTGNTDKRAFVETWQSFYRKKLKEVWKPAV

SEQ ID NO: 38844 - protein, 978 aa, synthetic construct
  REGION 1..978: note = engineered CasX variant
QEIKRINKIRRRLVKDSNTKKAGKTGPMKTLLVRVMTPDLRERLENLRKKPENIPQPISNTSRANLNKLLTDYTEMKKAILHVYWEEFQKDPVGLMSRVAQPASKKIDQNKLKPEMDEKGNLTTAGFACSQCGQPLFVYKLEQVSEKGKAYTNYFGRCNVAEHEKLILLAQLKPEKDSDEAVTYSLGKFGQRALDFYSIHVTKESTHPVKPLAQIAGNRYASTPVGKALSDACMGTIASFLSKYQDIIIEHQKVVKGNQKRLESLRELAGKENLEYPSVTLPPQPHTKEGVDAYNEVIARVRMWVNLNLWQKLKLSRDDAKPLLRLKGFPSFPLVERQANEVDWWDMVCNVKKLINEKKEDGKVFWQNLAGYKRQEALRPYLSSEEDRKKGKKFARYQLGDLLLHLEKKHGEDWGKVYDEAWERIDKKVEGLSKHIKLEEERRSEDAQSKAALTDWLRAKASFVIEGLKEADKDEFCRCELKLQKWYGDLRGKPFAIEAENSILDISGFSKQYNCAFIWQKDGVKKLNLYLIINYFKGGKLRFKKIKPEAFEANRFYTVINKKSGEIVPMEVNFNFDDPNLIILPLAFGKRQGREFIWNDLLSLETGSLQLANGRVIEKTLYNRRTRQDEPALFVALTFERREVLDSSNIKPMNLIGVDRGENIPAVIALTDPEGCPLSRFKDSLGNPTHILRIGESYKEKQRTIQAKKEVEQRRAGGYSRKYASKAKNLADDMVRNTARDLLYYAVTQDAMLIFENLSRGFGRQGKRTFMAERQYTRMEDWLTAKLAYEGLASKTYLSKTLAQYTSKTCSNCGFTITSADYDRVLEKLKKTATGWMTTINGKELKVEGQITYYNRYKRQNVVKDLSVELDRLSEESVNNDISSWTKGRSGEALSLLKKRFSHRPVQEKFVCLNCGFETHADEQAALNIARSWLFLRSQEYKKYQTNKTTGNTDKRAFVETWQSFYRKKLKEVWKPAV

SEQ ID NO: 38845 - protein, 978 aa, synthetic construct
  REGION 1..978: note = engineered CasX variant
QEIKRINKIRRRLVKDSNTKKAGKTGPMKTLLVRVMTPDLRERLENLRKKPENIPQPISNTSRANLNKLLTDYTEMKKAILHVYWEEFQKDPVGLMSRVAQPASKKIDQNKLKPEMDEKGNLTTAGFACSQCGQPLFVYKLEQVSEKGKAYTNYFGRCNVAEHEKLILLAQLKPEKDSDEAVTYSLGKFGQRALDFYSIHVTKESTHPVKPLAQIAGNRYASAPVGKALSDACMGTIASFLSKYQDIIIEHQKVVKGNQKRLESLRELAGKENLEYPSVTLPPQPHTKEGVDAYNEVIARVRMWVNLNLWQKLKLSRDDAKPLLRLKGFPSFPLVERQANEVDWWDMVCNVKKLINEKKEDGKVFWQNLAGYKRQEALRPYLSSEEDRKKGKKFARYQLGDLLLHLEKKHGEDWGKVYDEAWERIDKKVEGLSKHIKLEEERRSEDAQSKAALTDWLRAKASFVIEGLKEADKDEFCRCELKLQKWYGDLRGKPFAIEAENSILDISGFSKQYNCAFIWQKDGVKKLNLYLIINYFKGGKLRFKKIKPEAFEANRFYTVINKKSGEIVPMEVNFNFDDPNLIILPLAFGKRQGREFIWNDLLSLETGSLQLANGRVIEKTLYNRRTRQDEPALFVALTFERREVLDSSNIKPMNLIGVDRGENIPAVIALTDPEGCPLSRFKDSLGNPTHILRIGESYKEKQRTIQAKKEVEQRRAGGYSRKYASKAKNLADDMVRNTARDLLYYAVTQDAMLIFENLSRGFGRQGKRTFMAERQYTRMEDWLTAKLAYEGLASKTYLSKTLAQYTSKTCSNCGFTITSADYDRVLEKLKKTATGWMTTINGKELKVEGQITYYNRYKRQNVVKDLSVELDRLSEESVNNDISSWTKGRSGEALSLLKKRFSHRPVQEKFVCLNCGFETHADEQAALNIARSWLFLRSQEYKKYQTNKTTGNTDKRAFVETWQSFYRKKLKEVWKPAV

SEQ ID NO: 38846 - protein, 978 aa, synthetic construct
  REGION 1..978: note = engineered CasX variant
QEIKRINKIRRRLVKDSNTKKAGKTGPMKTLLVRVMTPDLRERLENLRKKPENIPQPISNTSRANLNKLLTDYTEMKKAILHVYWEEFQKDPVGLMSRVAQPASKKIDQNKLKPEMDEKGNLTTAGFACSQCGQPLFVYKLEQVSEKGKAYTNYFGRCNVAEHEKLILLAQLKPEKDSDEAVTYSLGKFGQRALDFYSIHVTKESTHPVKPLAQIAGNRYASVPVGKALSDACMGTIASFLSKYQDIIIEHQKVVKGNQKRLESLRELAGKENLEYPSVTLPPQPHTKEGVDAYNEVIARVRMWVNLNLWQKLKLSRDDAKPLLRLKGFPSFPLVERQANEVDWWDMVCNVKKLINEKKEDGKVFWQNLAGYKRQEALRPYLSSEEDRKKGKKFARYQLGDLLLHLEKKHGEDWGKVYDEAWERIDKKVEGLSKHIKLEEERRSEDAQSKAALTDWLRAKASFVIEGLKEADKDEFCRCELKLQKWYGDLRGKPFAIEAENSILDISGFSKQYNCAFIWQKDGVKKLNLYLIINYFKGGKLRFKKIKPEAFEANRFYTVINKKSGEIVPMEVNFNFDDPNLIILPLAFGKRQGREFIWNDLLSLETGSLQLANGRVIEKTLYNRRTRQDEPALFVALTFERREVLDSSNIKPMNLIGVDRGENIPAVIALTDPEGCPLSRFKDSLGNPTHILRIGESYKEKQRTIQAKKEVEQRRAGGYSRKYASKAKNLADDMVRNTARDLLYYAVTQDAMLIFENLSRGFGRQGKRTFMAERQYTRMEDWLTAKLAYEGLASKTYLSKTLAQYTSKTCSNCGFTITSADYDRVLEKLKKTATGWMTTINGKELKVEGQITYYNRYKRQNVVKDLSVELDRLSEESVNNDISSWTKGRSGEALSLLKKRFSHRPVQEKFVCLNCGFETHADEQAALNIARSWLFLRSQEYKKYQTNKTTGNTDKRAFVETWQSFYRKKLKEVWKPAV

SEQ ID NO: 38847 - protein, 978 aa, synthetic construct
  REGION 1..978: note = engineered CasX variant
QEIKRINKIRRRLVKDSNTKKAGKTGPMKTLLVRVMTPDLRERLENLRKKPENIPQPISNTSRANLNKLLTDYTEMKKAILHVYWEEFQKDPVGLMSRVAQPASKKIDQNKLKPEMDEKGNLTTAGFACSQCGQPLFVYKLEQVSEKGKAYTNYFGRCNVAEHEKLIKLAQLKPEKDSDEAVTYSLGKFGQRALDFYSIHVTKESTHPVKPLAQIAGNRYASGPVGKALSDACMGTIASFLSKYQDIIIEHQKVVKGNQKRLESLRELAGKENLEYPSVTLPPQPHTKEGVDAYNEVIARVRMWVNLNLWQKLKLSRDDAKPLLRLKGFPSFPLVERQANEVDWWDMVCNVKKLINEKKEDGKVFWQNLAGYKRQEALRPYLSSEEDRKKGKKFARYQLGDLLLHLEKKHGEDWGKVYDEAWERIDKKVEGLSKHIKLEEERRSEDAQSKAALTDWLRAKASFVIEGLKEADKDEFCRCELKLQKWYGDLRGKPFAIEAENSILDISGFSKQYNCAFIWQKDGVKKLNLYLIINYFKGGKLRFKKIKPEAFEANRFYTVINKKSGEIVPMEVNFNFDDPNLIILPLAFGKRQGREFIWNDLLSLETGSLQLANGRVIEKTLYNRRTRQDEPALFVALTFERREVLDSSNIKPMNLIGVDRGENIPAVIALTDPEGCPLSRFKDSLGNPTHILRIGESYKEKQRTIQAKKEVEQRRAGGYSRKYASKAKNLADDMVRNTARDLLYYAVTQDAMLIFENLSRGFGRQGKRTFMAERQYTRMEDWLTAKLAYEGLASKTYLSKTLAQYTSKTCSNCGFTITSADYDRVLEKLKKTATGWMTTINGKELKVEGQITYYNRYKRQNVVKDLSVELDRLSEESVNNDISSWTKGRSGEALSLLKKRFSHRPVQEKFVCLNCGFETHADEQAALNIARSWLFLRSQEYKKYQTNKTTGNTDKRAFVETWQSFYRKKLKEVWKPAV

SEQ ID NO: 38848 - protein, 977 aa, synthetic construct
  REGION 1..977: note = engineered CasX variant
QEIKRINKIRRRLVKDSNTKKAGKTGPMKTLLVRVMTPDLRERLENLRKKPENIPQPISNTSRANLNKLLTDYTEMKKAILHVYWEEFQKDPVGLMSRVAQPASKKIDQNKLKPEMDEKGNLTTAGFACSQCGQPLFVYKLEQVSEKGKAYTNYFGRCNVAEHEKLILLAQLKPEKDSDEAVTYSLGKFGQRALDFYSIHVTKESTHPVKPLAQIAGNRYASPVGKALSDACMGTIASFLSKYQDIIIEHQKVVKGNQKRLESLRELAGKENLEYPSVTLPPQPHTKEGVDAYNEVIARVRMWVNLNLWQKLKLSRDDAKPLLRLKGFPSFPLVERQANEVDWWDMVCNVKKLINEKKEDGKVFWQNLAGYKRQEALRPYLSSEEDRKKGKKFARYQLGDLLLHLEKKHGEDWGKVYDEAWERIDKKVEGLSKHIKLEEERRSEDAQSKAALTDWLRAKASFVIEGLKEADKDEFCRCELKLQKWYGDLRGKPFAIEAENSILDISGFSKQYNCAFIWQKDGVKKLNLYLIINYFKGGKLRFKKIKPEAFEANRFYTVINKKSGEIVPMEVNFNFDDPNLIILPLAFGKRQGREFIWNDLLSLETGSLQLANGRVIEKTLYNRRTRQDEPALFVALTFERREVLDSSNIKPMNLIGVDRGENIPAVIALTDPEGCPLSRFKDSLGNPTHILRIGESYKEKQRTIQAKKEVEQRRAGGYSRKYASKAKNLADDMVRNTARDLLYYAVTQDAMLIFENLSRGFGRQGKRTFMAERQYTRMEDWLTAKLAYEGLASKTYLSKTLAQYTSKTCSNCGFTITSADYDRVLEKLKKTATGWMTTINGKELKVEGQITYYNRYKRQNVVKDLSVELDRLSEESVNNDISSWTKGRSGEALSLLKKRFSHRPVQEKFVCLNCGFETHADEQAALNIARSWLFLRSQEYKKYQTNKTTGNTDKRAFVETWQSFYRKKLKEVWKPAV

SEQ ID NO: 38849 - protein, 979 aa, synthetic construct
  REGION 1..979: note = engineered CasX variant
QEIKRINKIRRRLVKDSNTKKAGKTGPMKTLLVRVMTPDLRERLENLRKKPENIPQPISNTSRANLNKLLTDYTEMKKAILHVYWEEFQKDPVGLMSRVAQPASKKIDQNKLKPEMDEKGNLTTAGFACSQCGQPLFVYKLEQVSEKGKAYTNYFGRCNVAEHEKLILLAQLKPEKDSDEAVTYSLGKFGQRALDFYSIHVTKESTHPVKPLAQIAGNRYASYPVGKALSDACMGTIASFLSKYQDIIIEHQKVVKGNQKRLESLRELAGKENLEYPSVTLPPQPHTKEGVDAYNEVIARVRMWVNLNLWQKLKLSRDDAKPLLRLKGFPSFPLVERQANEVDWWDMVCNVKKLINEKKEDGKVFWQNLAGYKRQEALRPYLSSEEDRKKGKKFARYQLGDLLLHLEKKHGEDWGKVYDEAWERIDKKVEGLSKHIKLEEERRSEDAQSKAALTDWLRAKASFVIEGLKEADKDEFCRCELKLQKWYGDLRGKPFAIEAENSILDISGFSKQYNCAFIWQKDGVKKLNLYLIINYFKGGKLRFKKIKPEAFEANRFYTVINKKSGEIVPMEVNFNFDDPNLIILPLAFGKRQGREFIWNDLLSLETGSLKLANGRVIEKTLYNRRTRQDEPALFVALTFERREVLDSSNIKPMNLIGVDRGENIPAVIALTDPEGCPLSRFKDSLGNPTHILRIGESYKEKQRTIQAKKEVEQRRAGGYSRKYASKAKNLADDMVRNTARDLLYYAVTQDAMLIFENLSRGFGRQGKRTFMAERQYTRMEDWLTAKLAYEGPLPSKVYLSKTLAQYTSKTCSNCGFTITSADYDRVLEKLKKTATGWMTTINGKELKVEGQITYYNRYKRQNVVKDLSVELDRLSEESVNNDISSWTKGRSGEALSLLKKRFSHRPVQEKFVCLNCGFETHADEQAALNIARSWLFLRSQEYKKYQTNKTTGNTDKRAFVETWQSFYRKKLKEVWKPAV

SEQ ID NO: 38850 - protein, 979 aa, synthetic construct
  REGION 1..979: note = engineered CasX variant
QEIKRINKIRRRLVKDSNTKKAGKTGPMKTLLVRVMTPDLRERLENLRKKPENIPQPISNTSRANLNKLLTDYTEMKKAILHVYWEEFQKDPVGLMSRVAQPASKKIDQNKLKPEMDEKGNLTTAGFACSQCGQPLFVYKLEQVSEKGKAYTNYFGRCNVAEHEKLILLAQLKPEKDSDEAVTYSLGKFGQRALDFYSIHVTKESTHPVKPLAQIAGNRYASHPVGKALSDACMGTIASFLSKYQDIIIEHQKVVKGNQKRLESLRELAGKENLEYPSVTLPPQPHTKEGVDAYNEVIARVRMWVNLNLWQKLKLSRDDAKPLLRLKGFPSFPLVERQANEVDWWDMVCNVKKLINEKKEDGKVFWQNLAGYKRQEALRPYLSSEEDRKKGKKFARYQLGDLLLHLEKKHGEDWGKVYDEAWERIDKKVEGLSKHIKLEEERRSEDAQSKAALTDWLRAKASFVIEGLKEADKDEFCRCELKLQKWYGDLRGKPFAIEAENSILDISGFSKQYNCAFIWQKDGVKKLNLYLIINYFKGGKLRFKKIKPEAFEANRFYTVINKKSGEIVPMEVNFNFDDPNLIILPLAFGKRQGREFIWNDLLSLETGSLKLANGRVIEKTLYNRRTRQDEPALFVALTFERREVLDSSNIKPMNLIGVDRGENIPAVIALTDPEGCPLSRFKDSLGNPTHILRIGESYKEKQRTIQAKKEVEQRRAGGYSRKYASKAKNLADDMVRNTARDLLYYAVTQDAMLIFENLSRGFGRQGKRTFMAERQYTRMEDWLTAKLAYEGPLPSKVYLSKTLAQYTSKTCSNCGFTITSADYDRVLEKLKKTATGWMTTINGKELKVEGQITYYNRYKRQNVVKDLSVELDRLSEESVNNDISSWTKGRSGEALSLLKKRFSHRPVQEKFVCLNCGFETHADEQAALNIARSWLFLRSQEYKKYQTNKTTGNTDKRAFVETWQSFYRKKLKEVWKPAV

SEQ ID NO: 38851 - protein, 979 aa, synthetic construct
  REGION 1..979: note = engineered CasX variant
QEIKRINKIRRRLVKDSNTKKAGKTGPMKTLLVRVMTPDLRERLENLRKKPENIPQPISNTSRANLNKLLTDYTEMKKAILHVYWEEFQKDPVGLMSRVAQPASKKIDQNKLKPEMDEKGNLTTAGFACSQCGQPLFVYKLEQVSEKGKAYTNYFGRCNVAEHEKLILLAQLKPEKDSDEAVTYSLGKFGQRALDFYSIHVTKESTHPVKPLAQIAGNRYASSPVGKALSDACMGTIASFLSKYQDIIIEHQKVVKGNQKRLESLRELAGKENLEYPSVTLPPQPHTKEGVDAYNEVIARVRMWVNLNLWQKLKLSRDDAKPLLRLKGFPSFPLVERQANEVDWWDMVCNVKKLINEKKEDGKVFWQNLAGYKRQEALRPYLSSEEDRKKGKKFARYQLGDLLLHLEKKHGEDWGKVYDEAWERIDKKVEGLSKHIKLEEERRSEDAQSKAALTDWLRAKASFVIEGLKEADKDEFCRCELKLQKWYGDLRGKPFAIEAENSILDISGFSKQYNCAFIWQKDGVKKLNLYLIINYFKGGKLRFKKIKPEAFEANRFYTVINKKSGEIVPMEVNFNFDDPNLIILPLAFGKRQGREFIWNDLLSLETGSLKLANGRVIEKTLYNRRTRQDEPALFVALTFERREVLDSSNIKPMNLIGVDRGENIPAVIALTDPEGCPLSRFKDSLGNPTHILRIGESYKEKQRTIQAKKEVEQRRAGGYSRKYASKAKNLADDMVRNTARDLLYYAVTQDAMLIFENLSRGFGRQGKRTFMAERQYTRMEDWLTAKLAYEGPLPSKVYLSKTLAQYTSKTCSNCGFTITSADYDRVLEKLKKTATGWMTTINGKELKVEGQITYYNRYKRQNVVKDLSVELDRLSEESVNNDISSWTKGRSGEALSLLKKRFSHRPVQEKFVCLNCGFETHADEQAALNIARSWLFLRSQEYKKYQTNKTTGNTDKRAFVETWQSFYRKKLKEVWKPAV

SEQ ID NO: 38852 - protein, 979 aa, synthetic construct
  REGION 1..979: note = engineered CasX variant
QEIKRINKIRRRLVKDSNTKKAGKTGPMKTLLVRVMTPDLRERLENLRKKPENIPQPISNTSRANLNKLLTDYTEMKKAILHVYWEEFQKDPVGLMSRVAQPASKKIDQNKLKPEMDEKGNLTTAGFACSQCGQPLFVYKLEQVSEKGKAYTNYFGRCNVAEHEKLILLAQLKPEKDSDEAVTYSLGKFGQRALDFYSIHVTKESTHPVKPLAQIAGNRYASTPVGKALSDACMGTIASFLSKYQDIIIEHQKVVKGNQKRLESLRELAGKENLEYPSVTLPPQPHTKEGVDAYNEVIARVRMWVNLNLWQKLKLSRDDAKPLLRLKGFPSFPLVERQANEVDWWDMVCNVKKLINEKKEDGKVFWQNLAGYKRQEALRPYLSSEEDRKKGKKFARYQLGDLLLHLEKKHGEDWGKVYDEAWERIDKKVEGLSKHIKLEEERRSEDAQSKAALTDWLRAKASFVIEGLKEADKDEFCRCELKLQKWYGDLRGKPFAIEAENSILDISGFSKQYNCAFIWQKDGVKKLNLYLIINYFKGGKLRFKKIKPEAFEANRFYTVINKKSGEIVPMEVNFNFDDPNLIILPLAFGKRQGREFIWNDLLSLETGSLKLANGRVIEKTLYNRRTRQDEPALFVALTFERREVLDSSNIKPMNLIGVDRGENIPAVIALTDPEGCPLSRFKDSLGNPTHILRIGESYKEKQRTIQAKKEVEQRRAGGYSRKYASKAKNLADDMVRNTARDLLYYAVTQDAMLIFENLSRGFGRQGKRTFMAERQYTRMEDWLTAKLAYEGPLPSKVYLSKTLAQYTSKTCSNCGFTITSADYDRVLEKLKKTATGWMTTINGKELKVEGQITYYNRYKRQNVVKDLSVELDRLSEESVNNDISSWTKGRSGEALSLLKKRFSHRPVQEKFVCLNCGFETHADEQAALNIARSWLFLRSQEYKKYQTNKTTGNTDKRAFVETWQSFYRKKLKEVWKPAV

SEQ ID NO: 38853 - protein, 979 aa, synthetic construct
  REGION 1..979: note = engineered CasX variant
QEIKRINKIRRRLVKDSNTKKAGKTGPMKTLLVRVMTPDLRERLENLRKKPENIPQPISNTSRANLNKLLTDYTEMKKAILHVYWEEFQKDPVGLMSRVAQPASKKIDQNKLKPEMDEKGNLTTAGFACSQCGQPLFVYKLEQVSEKGKAYTNYFGRCNVAEHEKLILLAQLKPEKDSDEAVTYSLGKFGQRALDFYSIHVTKESTHPVKPLAQIAGNRYASAPVGKALSDACMGTIASFLSKYQDIIIEHQKVVKGNQKRLESLRELAGKENLEYPSVTLPPQPHTKEGVDAYNEVIARVRMWVNLNLWQKLKLSRDDAKPLLRLKGFPSFPLVERQANEVDWWDMVCNVKKLINEKKEDGKVFWQNLAGYKRQEALRPYLSSEEDRKKGKKFARYQLGDLLLHLEKKHGEDWGKVYDEAWERIDKKVEGLSKHIKLEEERRSEDAQSKAALTDWLRAKASFVIEGLKEADKDEFCRCELKLQKWYGDLRGKPFAIEAENSILDISGFSKQYNCAFIWQKDGVKKLNLYLIINYFKGGKLRFKKIKPEAFEANRFYTVINKKSGEIVPMEVNFNFDDPNLIILPLAFGKRQGREFIWNDLLSLETGSLKLANGRVIEKTLYNRRTRQDEPALFVALTFERREVLDSSNIKPMNLIGVDRGENIPAVIALTDPEGCPLSRFKDSLGNPTHILRIGESYKEKQRTIQAKKEVEQRRAGGYSRKYASKAKNLADDMVRNTARDLLYYAVTQDAMLIFENLSRGFGRQGKRTFMAERQYTRMEDWLTAKLAYEGPLPSKVYLSKTLAQYTSKTCSNCGFTITSADYDRVLEKLKKTATGWMTTINGKELKVEGQITYYNRYKRQNVVKDLSVELDRLSEESVNNDISSWTKGRSGEALSLLKKRFSHRPVQEKFVCLNCGFETHADEQAALNIARSWLFLRSQEYKKYQTNKTTGNTDKRAFVETWQSFYRKKLKEVWKPAV

SEQ ID NO: 38854 - protein, 979 aa, synthetic construct
  REGION 1..979: note = engineered CasX variant
QEIKRINKIRRRLVKDSNTKKAGKTGPMKTLLVRVMTPDLRERLENLRKKPENIPQPISNTSRANLNKLLTDYTEMKKAILHVYWEEFQKDPVGLMSRVAQPASKKIDQNKLKPEMDEKGNLTTAGFACSQCGQPLFVYKLEQVSEKGKAYTNYFGRCNVAEHEKLILLAQLKPEKDSDEAVTYSLGKFGQRALDFYSIHVTKESTHPVKPLAQIAGNRYASVPVGKALSDACMGTIASFLSKYQDIIIEHQKVVKGNQKRLESLRELAGKENLEYPSVTLPPQPHTKEGVDAYNEVIARVRMWVNLNLWQKLKLSRDDAKPLLRLKGFPSFPLVERQANEVDWWDMVCNVKKLINEKKEDGKVFWQNLAGYKRQEALRPYLSSEEDRKKGKKFARYQLGDLLLHLEKKHGEDWGKVYDEAWERIDKKVEGLSKHIKLEEERRSEDAQSKAALTDWLRAKASFVIEGLKEADKDEFCRCELKLQKWYGDLRGKPFAIEAENSILDISGFSKQYNCAFIWQKDGVKKLNLYLIINYFKGGKLRFKKIKPEAFEANRFYTVINKKSGEIVPMEVNFNFDDPNLIILPLAFGKRQGREFIWNDLLSLETGSLKLANGRVIEKTLYNRRTRQDEPALFVALTFERREVLDSSNIKPMNLIGVDRGENIPAVIALTDPEGCPLSRFKDSLGNPTHILRIGESYKEKQRTIQAKKEVEQRRAGGYSRKYASKAKNLADDMVRNTARDLLYYAVTQDAMLIFENLSRGFGRQGKRTFMAERQYTRMEDWLTAKLAYEGPLPSKVYLSKTLAQYTSKTCSNCGFTITSADYDRVLEKLKKTATGWMTTINGKELKVEGQITYYNRYKRQNVVKDLSVELDRLSEESVNNDISSWTKGRSGEALSLLKKRFSHRPVQEKFVCLNCGFETHADEQAALNIARSWLFLRSQEYKKYQTNKTTGNTDKRAFVETWQSFYRKKLKEVWKPAV

SEQ ID NO: 38855 - protein, 979 aa, synthetic construct
  REGION 1..979: note = engineered CasX variant
QEIKRINKIRRRLVKDSNTKKAGKTGPMKTLLVRVMTPDLRERLENLRKKPENIPQPISNTSRANLNKLLTDYTEMKKAILHVYWEEFQKDPVGLMSRVAQPASKKIDQNKLKPEMDEKGNLTTAGFACSQCGQPLFVYKLEQVSEKGKAYTNYFGRCNVAEHEKLIKLAQLKPEKDSDEAVTYSLGKFGQRALDFYSIHVTKESTHPVKPLAQIAGNRYASGPVGKALSDACMGTIASFLSKYQDIIIEHQKVVKGNQKRLESLRELAGKENLEYPSVTLPPQPHTKEGVDAYNEVIARVRMWVNLNLWQKLKLSRDDAKPLLRLKGFPSFPLVERQANEVDWWDMVCNVKKLINEKKEDGKVFWQNLAGYKRQEALRPYLSSEEDRKKGKKFARYQLGDLLLHLEKKHGEDWGKVYDEAWERIDKKVEGLSKHIKLEEERRSEDAQSKAALTDWLRAKASFVIEGLKEADKDEFCRCELKLQKWYGDLRGKPFAIEAENSILDISGFSKQYNCAFIWQKDGVKKLNLYLIINYFKGGKLRFKKIKPEAFEANRFYTVINKKSGEIVPMEVNFNFDDPNLIILPLAFGKRQGREFIWNDLLSLETGSLKLANGRVIEKTLYNRRTRQDEPALFVALTFERREVLDSSNIKPMNLIGVDRGENIPAVIALTDPEGCPLSRFKDSLGNPTHILRIGESYKEKQRTIQAKKEVEQRRAGGYSRKYASKAKNLADDMVRNTARDLLYYAVTQDAMLIFENLSRGFGRQGKRTFMAERQYTRMEDWLTAKLAYEGPLPSKVYLSKTLAQYTSKTCSNCGFTITSADYDRVLEKLKKTATGWMTTINGKELKVEGQITYYNRYKRQNVVKDLSVELDRLSEESVNNDISSWTKGRSGEALSLLKKRFSHRPVQEKFVCLNCGFETHADEQAALNIARSWLFLRSQEYKKYQTNKTTGNTDKRAFVETWQSFYRKKLKEVWKPAV

SEQ ID NO: 38856 - protein, 978 aa, synthetic construct
  REGION 1..978: note = engineered CasX variant
QEIKRINKIRRRLVKDSNTKKAGKTGPMKTLLVRVMTPDLRERLENLRKKPENIPQPISNTSRANLNKLLTDYTEMKKAILHVYWEEFQKDPVGLMSRVAQPASKKIDQNKLKPEMDEKGNLTTAGFACSQCGQPLFVYKLEQVSEKGKAYTNYFGRCNVAEHEKLILLAQLKPEKDSDEAVTYSLGKFGQRALDFYSIHVTKESTHPVKPLAQIAGNRYASPVGKALSDACMGTIASFLSKYQDIIIEHQKVVKGNQKRLESLRELAGKENLEYPSVTLPPQPHTKEGVDAYNEVIARVRMWVNLNLWQKLKLSRDDAKPLLRLKGFPSFPLVERQANEVDWWDMVCNVKKLINEKKEDGKVFWQNLAGYKRQEALRPYLSSEEDRKKGKKFARYQLGDLLLHLEKKHGEDWGKVYDEAWERIDKKVEGLSKHIKLEEERRSEDAQSKAALTDWLRAKASFVIEGLKEADKDEFCRCELKLQKWYGDLRGKPFAIEAENSILDISGFSKQYNCAFIWQKDGVKKLNLYLIINYFKGGKLRFKKIKPEAFEANRFYTVINKKSGEIVPMEVNFNFDDPNLIILPLAFGKRQGREFIWNDLLSLETGSLKLANGRVIEKTLYNRRTRQDEPALFVALTFERREVLDSSNIKPMNLIGVDRGENIPAVIALTDPEGCPLSRFKDSLGNPTHILRIGESYKEKQRTIQAKKEVEQRRAGGYSRKYASKAKNLADDMVRNTARDLLYYAVTQDAMLIFENLSRGFGRQGKRTFMAERQYTRMEDWLTAKLAYEGPLPSKVYLSKTLAQYTSKTCSNCGFTITSADYDRVLEKLKKTATGWMTTINGKELKVEGQITYYNRYKRQNVVKDLSVELDRLSEESVNNDISSWTKGRSGEALSLLKKRFSHRPVQEKFVCLNCGFETHADEQAALNIARSWLFLRSQEYKKYQTNKTTGNTDKRAFVETWQSFYRKKLKEVWKPAV

SEQ ID NO: 38857 - protein, 979 aa, synthetic construct
  REGION 1..979: note = engineered CasX variant
QEIKRINKIRRRLVKDSNTKKAGKTGPMKTLLVRVMTPDLRERLENLRKKPENIPQPISNTSRANLNKLLTDYTEMKKAILHVYWEEFQKDPVGLMSRVAQPASKKIDQNKLKPEMDEKGNLTTAGFACSQCGQPLFVYKLEQVSEKGKAYTNYFGRCNVAEHEKLILLAQLKPEKDSDEAVTYSLGKFGQRALDFYSIHVTKESTHPVKPLAQIAGNRYASYPVGKALSDACMGTIASFLSKYQDIIIEHQKVVKGNQKRLESLRELAGKENLEYPSVTLPPQPHTKEGVDAYNEVIARVRMWVNLNLWQKLKLSRDDAKPLLRLKGFPSFPLVERQANEVDWWDMVCNVKKLINEKKEDGKVFWQNLAGYKRQEALRPYLSSEEDVRKKGKKFARYQLGDLLLHLEKKHGEDWGKVYDEAWERIDKKVEGLSKHIKLEEERRSEDAQSKAALTDWLRAKASFVIEGLKEADKDEFCRCELKLQKWYGDLRGKPFAIEAENSILDISGFSKQYNCAFIWQKDGVKKLNLYLIINYFKGGKLRFKKIKPEAFEANRFYTVINKKSGEIVPMEVNFNFDDPNLIILPLAFGKRQGREFIWNDLLSLETGSLKLANGRVIEKTLYNRRTRQDEPALFVALTFERREVLDSSNIKPMNLIGVDRGENIPAVIALTDPEGCPLSRFKDSLGNPTHILRIGESYKEKQRTIQAKKEVEQRRAGGYSRKYASKAKNLADDMVRNTARDLLYYAVTQDAMLIFENLSRGFGRQGKRTFMAERQYTRMEDWLTAKLAYEGLPSKVYLSKTLAQYTSKTCSNCGFTITSADYDRVLEKLKKTATGWMTTINGKELKVEGQITYYNRYKRQNVVKDLSVELDRLSEESVNNDISSWTKGRSGEALSLLKKRFSHRPVQEKFVCLNCGFETHADEQAALNIARSWLFLRSQEYKKYQTNKTTGNTDKRAFVETWQSFYRKKLKEVWKPAV

SEQ ID NO: 38858 - protein, 979 aa, synthetic construct
  REGION 1..979: note = engineered CasX variant
QEIKRINKIRRRLVKDSNTKKAGKTGPMKTLLVRVMTPDLRERLENLRKKPENIPQPISNTSRANLNKLLTDYTEMKKAILHVYWEEFQKDPVGLMSRVAQPASKKIDQNKLKPEMDEKGNLTTAGFACSQCGQPLFVYKLEQVSEKGKAYTNYFGRCNVAEHEKLILLAQLKPEKDSDEAVTYSLGKFGQRALDFYSIHVTKESTHPVKPLAQIAGNRYASHPVGKALSDACMGTIASFLSKYQDIIIEHQKVVKGNQKRLESLRELAGKENLEYPSVTLPPQPHTKEGVDAYNEVIARVRMWVNLNLWQKLKLSRDDAKPLLRLKGFPSFPLVERQANEVDWWDMVCNVKKLINEKKEDGKVFWQNLAGYKRQEALRPYLSSEEDVRKKGKKFARYQLGDLLLHLEKKHGEDWGKVYDEAWERIDKKVEGLSKHIKLEEERRSEDAQSKAALTDWLRAKASFVIEGLKEADKDEFCRCELKLQKWYGDLRGKPFAIEAENSILDISGFSKQYNCAFIWQKDGVKKLNLYLIINYFKGGKLRFKKIKPEAFEANRFYTVINKKSGEIVPMEVNFNFDDPNLIILPLAFGKRQGREFIWNDLLSLETGSLKLANGRVIEKTLYNRRTRQDEPALFVALTFERREVLDSSNIKPMNLIGVDRGENIPAVIALTDPEGCPLSRFKDSLGNPTHILRIGESYKEKQRTIQAKKEVEQRRAGGYSRKYASKAKNLADDMVRNTARDLLYYAVTQDAMLIFENLSRGFGRQGKRTFMAERQYTRMEDWLTAKLAYEGLPSKVYLSKTLAQYTSKTCSNCGFTITSADYDRVLEKLKKTATGWMTTINGKELKVEGQITYYNRYKRQNVVKDLSVELDRLSEESVNNDISSWTKGRSGEALSLLKKRFSHRPVQEKFVCLNCGFETHADEQAALNIARSWLFLRSQEYKKYQTNKTTGNTDKRAFVETWQSFYRKKLKEVWKPAV

SEQ ID NO: 38859 - protein, 979 aa, synthetic construct
  REGION 1..979: note = engineered CasX variant
QEIKRINKIRRRLVKDSNTKKAGKTGPMKTLLVRVMTPDLRERLENLRKKPENIPQPISNTSRANLNKLLTDYTEMKKAILHVYWEEFQKDPVGLMSRVAQPASKKIDQNKLKPEMDEKGNLTTAGFACSQCGQPLFVYKLEQVSEKGKAYTNYFGRCNVAEHEKLILLAQLKPEKDSDEAVTYSLGKFGQRALDFYSIHVTKESTHPVKPLAQIAGNRYASSPVGKALSDACMGTIASFLSKYQDIIIEHQKVVKGNQKRLESLRELAGKENLEYPSVTLPPQPHTKEGVDAYNEVIARVRMWVNLNLWQKLKLSRDDAKPLLRLKGFPSFPLVERQANEVDWWDMVCNVKKLINEKKEDGKVFWQNLAGYKRQEALRPYLSSEEDVRKKGKKFARYQLGDLLLHLEKKHGEDWGKVYDEAWERIDKKVEGLSKHIKLEEERRSEDAQSKAALTDWLRAKASFVIEGLKEADKDEFCRCELKLQKWYGDLRGKPFAIEAENSILDISGFSKQYNCAFIWQKDGVKKLNLYLIINYFKGGKLRFKKIKPEAFEANRFYTVINKKSGEIVPMEVNFNFDDPNLIILPLAFGKRQGREFIWNDLLSLETGSLKLANGRVIEKTLYNRRTRQDEPALFVALTFERREVLDSSNIKPMNLIGVDRGENIPAVIALTDPEGCPLSRFKDSLGNPTHILRIGESYKEKQRTIQAKKEVEQRRAGGYSRKYASKAKNLADDMVRNTARDLLYYAVTQDAMLIFENLSRGFGRQGKRTFMAERQYTRMEDWLTAKLAYEGLPSKVYLSKTLAQYTSKTCSNCGFTITSADYDRVLEKLKKTATGWMTTINGKELKVEGQITYYNRYKRQNVVKDLSVELDRLSEESVNNDISSWTKGRSGEALSLLKKRFSHRPVQEKFVCLNCGFETHADEQAALNIARSWLFLRSQEYKKYQTNKTTGNTDKRAFVETWQSFYRKKLKEVWKPAV

SEQ ID NO: 38860 - protein, 979 aa, synthetic construct
  REGION 1..979: note = engineered CasX variant
QEIKRINKIRRRLVKDSNTKKAGKTGPMKTLLVRVMTPDLRERLENLRKKPENIPQPISNTSRANLNKLLTDYTEMKKAILHVYWEEFQKDPVGLMSRVAQPASKKIDQNKLKPEMDEKGNLTTAGFACSQCGQPLFVYKLEQVSEKGKAYTNYFGRCNVAEHEKLILLAQLKPEKDSDEAVTYSLGKFGQRALDFYSIHVTKESTHPVKPLAQIAGNRYASTPVGKALSDACMGTIASFLSKYQDIIIEHQKVVKGNQKRLESLRELAGKENLEYPSVTLPPQPHTKEGVDAYNEVIARVRMWVNLNLWQKLKLSRDDAKPLLRLKGFPSFPLVERQANEVDWWDMVCNVKKLINEKKEDGKVFWQNLAGYKRQEALRPYLSSEEDVRKKGKKFARYQLGDLLLHLEKKHGEDWGKVYDEAWERIDKKVEGLSKHIKLEEERRSEDAQSKAALTDWLRAKASFVIEGLKEADKDEFCRCELKLQKWYGDLRGKPFAIEAENSILDISGFSKQYNCAFIWQKDGVKKLNLYLIINYFKGGKLRFKKIKPEAFEANRFYTVINKKSGEIVPMEVNFNFDDPNLIILPLAFGKRQGREFIWNDLLSLETGSLKLANGRVIEKTLYNRRTRQDEPALFVALTFERREVLDSSNIKPMNLIGVDRGENIPAVIALTDPEGCPLSRFKDSLGNPTHILRIGESYKEKQRTIQAKKEVEQRRAGGYSRKYASKAKNLADDMVRNTARDLLYYAVTQDAMLIFENLSRGFGRQGKRTFMAERQYTRMEDWLTAKLAYEGLPSKVYLSKTLAQYTSKTCSNCGFTITSADYDRVLEKLKKTATGWMTTINGKELKVEGQITYYNRYKRQNVVKDLSVELDRLSEESVNNDISSWTKGRSGEALSLLKKRFSHRPVQEKFVCLNCGFETHADEQAALNIARSWLFLRSQEYKKYQTNKTTGNTDKRAFVETWQSFYRKKLKEVWKPAV

SEQ ID NO: 38861 - protein, 979 aa, synthetic construct
  REGION 1..979: note = engineered CasX variant
QEIKRINKIRRRLVKDSNTKKAGKTGPMKTLLVRVMTPDLRERLENLRKKPENIPQPISNTSRANLNKLLTDYTEMKKAILHVYWEEFQKDPVGLMSRVAQPASKKIDQNKLKPEMDEKGNLTTAGFACSQCGQPLFVYKLEQVSEKGKAYTNYFGRCNVAEHEKLILLAQLKPEKDSDEAVTYSLGKFGQRALDFYSIHVTKESTHPVKPLAQIAGNRYASAPVGKALSDACMGTIASFLSKYQDIIIEHQKVVKGNQKRLESLRELAGKENLEYPSVTLPPQPHTKEGVDAYNEVIARVRMWVNLNLWQKLKLSRDDAKPLLRLKGFPSFPLVERQANEVDWWDMVCNVKKLINEKKEDGKVFWQNLAGYKRQEALRPYLSSEEDVRKKGKKFARYQLGDLLLHLEKKHGEDWGKVYDEAWERIDKKVEGLSKHIKLEEERRSEDAQSKAALTDWLRAKASFVIEGLKEADKDEFCRCELKLQKWYGDLRGKPFAIEAENSILDISGFSKQYNCAFIWQKDGVKKLNLYLIINYFKGGKLRFKKIKPEAFEANRFYTVINKKSGEIVPMEVNFNFDDPNLIILPLAFGKRQGREFIWNDLLSLETGSLKLANGRVIEKTLYNRRTRQDEPALFVALTFERREVLDSSNIKPMNLIGVDRGENIPAVIALTDPEGCPLSRFKDSLGNPTHILRIGESYKEKQRTIQAKKEVEQRRAGGYSRKYASKAKNLADDMVRNTARDLLYYAVTQDAMLIFENLSRGFGRQGKRTFMAERQYTRMEDWLTAKLAYEGLPSKVYLSKTLAQYTSKTCSNCGFTITSADYDRVLEKLKKTATGWMTTINGKELKVEGQITYYNRYKRQNVVKDLSVELDRLSEESVNNDISSWTKGRSGEALSLLKKRFSHRPVQEKFVCLNCGFETHADEQAALNIARSWLFLRSQEYKKYQTNKTTGNTDKRAFVETWQSFYRKKLKEVWKPAV

SEQ ID NO: 38862 - protein, 979 aa, synthetic construct
  REGION 1..979: note = engineered CasX variant
QEIKRINKIRRRLVKDSNTKKAGKTGPMKTLLVRVMTPDLRERLENLRKKPENIPQPISNTSRANLNKLLTDYTEMKKAILHVYWEEFQKDPVGLMSRVAQPASKKIDQNKLKPEMDEKGNLTTAGFACSQCGQPLFVYKLEQVSEKGKAYTNYFGRCNVAEHEKLILLAQLKPEKDSDEAVTYSLGKFGQRALDFYSIHVTKESTHPVKPLAQIAGNRYASVPVGKALSDACMGTIASFLSKYQDIIIEHQKVVKGNQKRLESLRELAGKENLEYPSVTLPPQPHTKEGVDAYNEVIARVRMWVNLNLWQKLKLSRDDAKPLLRLKGFPSFPLVERQANEVDWWDMVCNVKKLINEKKEDGKVFWQNLAGYKRQEALRPYLSSEEDVRKKGKKFARYQLGDLLLHLEKKHGEDWGKVYDEAWERIDKKVEGLSKHIKLEEERRSEDAQSKAALTDWLRAKASFVIEGLKEADKDEFCRCELKLQKWYGDLRGKPFAIEAENSILDISGFSKQYNCAFIWQKDGVKKLNLYLIINYFKGGKLRFKKIKPEAFEANRFYTVINKKSGEIVPMEVNFNFDDPNLIILPLAFGKRQGREFIWNDLLSLETGSLKLANGRVIEKTLYNRRTRQDEPALFVALTFERREVLDSSNIKPMNLIGVDRGENIPAVIALTDPEGCPLSRFKDSLGNPTHILRIGESYKEKQRTIQAKKEVEQRRAGGYSRKYASKAKNLADDMVRNTARDLLYYAVTQDAMLIFENLSRGFGRQGKRTFMAERQYTRMEDWLTAKLAYEGLPSKVYLSKTLAQYTSKTCSNCGFTITSADYDRVLEKLKKTATGWMTTINGKELKVEGQITYYNRYKRQNVVKDLSVELDRLSEESVNNDISSWTKGRSGEALSLLKKRFSHRPVQEKFVCLNCGFETHADEQAALNIARSWLFLRSQEYKKYQTNKTTGNTDKRAFVETWQSFYRKKLKEVWKPAV

SEQ ID NO: 38863 - protein, 979 aa, synthetic construct
  REGION 1..979: note = engineered CasX variant
QEIKRINKIRRRLVKDSNTKKAGKTGPMKTLLVRVMTPDLRERLENLRKKPENIPQPISNTSRANLNKLLTDYTEMKKAILHVYWEEFQKDPVGLMSRVAQPASKKIDQNKLKPEMDEKGNLTTAGFACSQCGQPLFVYKLEQVSEKGKAYTNYFGRCNVAEHEKLIKLAQLKPEKDSDEAVTYSLGKFGQRALDFYSIHVTKESTHPVKPLAQIAGNRYASGPVGKALSDACMGTIASFLSKYQDIIIEHQKVVKGNQKRLESLRELAGKENLEYPSVTLPPQPHTKEGVDAYNEVIARVRMWVNLNLWQKLKLSRDDAKPLLRLKGFPSFPLVERQANEVDWWDMVCNVKKLINEKKEDGKVFWQNLAGYKRQEALRPYLSSEEDVRKKGKKFARYQLGDLLLHLEKKHGEDWGKVYDEAWERIDKKVEGLSKHIKLEEERRSEDAQSKAALTDWLRAKASFVIEGLKEADKDEFCRCELKLQKWYGDLRGKPFAIEAENSILDISGFSKQYNCAFIWQKDGVKKLNLYLIINYFKGGKLRFKKIKPEAFEANRFYTVINKKSGEIVPMEVNFNFDDPNLIILPLAFGKRQGREFIWNDLLSLETGSLKLANGRVIEKTLYNRRTRQDEPALFVALTFERREVLDSSNIKPMNLIGVDRGENIPAVIALTDPEGCPLSRFKDSLGNPTHILRIGESYKEKQRTIQAKKEVEQRRAGGYSRKYASKAKNLADDMVRNTARDLLYYAVTQDAMLIFENLSRGFGRQGKRTFMAERQYTRMEDWLTAKLAYEGLPSKVYLSKTLAQYTSKTCSNCGFTITSADYDRVLEKLKKTATGWMTTINGKELKVEGQITYYNRYKRQNVVKDLSVELDRLSEESVNNDISSWTKGRSGEALSLLKKRFSHRPVQEKFVCLNCGFETHADEQAALNIARSWLFLRSQEYKKYQTNKTTGNTDKRAFVETWQSFYRKKLKEVWKPAV

SEQ ID NO: 38864 - protein, 978 aa, synthetic construct
  REGION 1..978: note = engineered CasX variant
QEIKRINKIRRRLVKDSNTKKAGKTGPMKTLLVRVMTPDLRERLENLRKKPENIPQPISNTSRANLNKLLTDYTEMKKAILHVYWEEFQKDPVGLMSRVAQPASKKIDQNKLKPEMDEKGNLTTAGFACSQCGQPLFVYKLEQVSEKGKAYTNYFGRCNVAEHEKLILLAQLKPEKDSDEAVTYSLGKFGQRALDFYSIHVTKESTHPVKPLAQIAGNRYASPVGKALSDACMGTIASFLSKYQDIIIEHQKVVKGNQKRLESLRELAGKENLEYPSVTLPPQPHTKEGVDAYNEVIARVRMWVNLNLWQKLKLSRDDAKPLLRLKGFPSFPLVERQANEVDWWDMVCNVKKLINEKKEDGKVFWQNLAGYKRQEALRPYLSSEEDVRKKGKKFARYQLGDLLLHLEKKHGEDWGKVYDEAWERIDKKVEGLSKHIKLEEERRSEDAQSKAALTDWLRAKASFVIEGLKEADKDEFCRCELKLQKWYGDLRGKPFAIEAENSILDISGFSKQYNCAFIWQKDGVKKLNLYLIINYFKGGKLRFKKIKPEAFEANRFYTVINKKSGEIVPMEVNFNFDDPNLIILPLAFGKRQGREFIWNDLLSLETGSLKLANGRVIEKTLYNRRTRQDEPALFVALTFERREVLDSSNIKPMNLIGVDRGENIPAVIALTDPEGCPLSRFKDSLGNPTHILRIGESYKEKQRTIQAKKEVEQRRAGGYSRKYASKAKNLADDMVRNTARDLLYYAVTQDAMLIFENLSRGFGRQGKRTFMAERQYTRMEDWLTAKLAYEGLPSKVYLSKTLAQYTSKTCSNCGFTITSADYDRVLEKLKKTATGWMTTINGKELKVEGQITYYNRYKRQNVVKDLSVELDRLSEESVNNDISSWTKGRSGEALSLLKKRFSHRPVQEKFVCLNCGFETHADEQAALNIARSWLFLRSQEYKKYQTNKTTGNTDKRAFVETWQSFYRKKLKEVWKPAV

SEQ ID NO: 38865 - protein, 978 aa, synthetic construct
  REGION 1..978: note = engineered CasX variant
QEIKRINKIRRRLVKDSNTKKAGKTGPMKTLLVRVMTPDLRERLENLRKKPENIPQPISNTSRANLNKLLTDYTEMKKAILHVYWEEFQKDPVGLMSRVAQPASKKIDQNKLKPEMDEKGNLTTAGFACSQCGQPLFVYKLEQVSEKGKAYTNYFGRCNVAEHEKLILLAQLKPEKDSDEAVTYSLGKFGQRALDFYSIHVTKESTHPVKPLAQIAGNRYASYPVGKALSDACMGTIASFLSKYQDIIIEHQKVVKGNQKRLESLRELAGKENLEYPSVTLPPQPHTKEGVDAYNEVIARVRMWVNLNLWQKLKLSRDDAKPLLRLKGFPSFPLVERQANEVDWWDMVCNVKKLINEKKEDGKVFWQNLAGYKRQEALRPYLSSEEDRKKGKKFARYQLGDLLLHLEKKHGEDWGKVYDEAWERIDKKVEGLSKHIKLEEERRSEDAQSKAALTDWLRAKASFVIEGLKEADKDEFCRCELKLQKWYGDLRGKPFAIEAENSILDISGFSKQYNCAFIWQKDGVKKLNLYLIINYFKGGKLRFKKIKPEAFEANRFYTVINKKSGEIVPMEVNFNFDDPNLIILPLAFGKRQGREFIWNDLLSLETGSLKLANGRVIEKTLYNRRTRQDEPALFVALTFERREVLDSSNIKPMNLIGVDRGENIPAVIALTDPEGCPLSRFKDSLGNPTHILRIGESYKEKQRTIQAKKEVEQRRAGGYSRKYASKAKNLADDMVRNTARDLLYYAVTQDAMLIFENLSRGFGRQGKRTFMAERQYTRMEDWLTAKLAYEGLPSKVYLSKTLAQYTSKTCSNCGFTITSADYDRMLEKLKKTATGWMTTINGKELKVEGQITYYNRYKRQNVVKDLSVELDRLSEESVNNDISSWTKGRSGEALSLLKKRFSHRPVQEKFVCLNCGFETHADEQAALNIARSWLFLRSQEYKKYQTNKTTGNTDKRAFVETWQSFYRKKLKEVWKPAV

SEQ ID NO: 38866 - protein, 978 aa, synthetic construct
  REGION 1..978: note = engineered CasX variant
QEIKRINKIRRRLVKDSNTKKAGKTGPMKTLLVRVMTPDLRERLENLRKKPENIPQPISNTSRANLNKLLTDYTEMKKAILHVYWEEFQKDPVGLMSRVAQPASKKIDQNKLKPEMDEKGNLTTAGFACSQCGQPLFVYKLEQVSEKGKAYTNYFGRCNVAEHEKLILLAQLKPEKDSDEAVTYSLGKFGQRALDFYSIHVTKESTHPVKPLAQIAGNRYASHPVGKALSDACMGTIASFLSKYQDIIIEHQKVVKGNQKRLESLRELAGKENLEYPSVTLPPQPHTKEGVDAYNEVIARVRMWVNLNLWQKLKLSRDDAKPLLRLKGFPSFPLVERQANEVDWWDMVCNVKKLINEKKEDGKVFWQNLAGYKRQEALRPYLSSEEDRKKGKKFARYQLGDLLLHLEKKHGEDWGKVYDEAWERIDKKVEGLSKHIKLEEERRSEDAQSKAALTDWLRAKASFVIEGLKEADKDEFCRCELKLQKWYGDLRGKPFAIEAENSILDISGFSKQYNCAFIWQKDGVKKLNLYLIINYFKGGKLRFKKIKPEAFEANRFYTVINKKSGEIVPMEVNFNFDDPNLIILPLAFGKRQGREFIWNDLLSLETGSLKLANGRVIEKTLYNRRTRQDEPALFVALTFERREVLDSSNIKPMNLIGVDRGENIPAVIALTDPEGCPLSRFKDSLGNPTHILRIGESYKEKQRTIQAKKEVEQRRAGGYSRKYASKAKNLADDMVRNTARDLLYYAVTQDAMLIFENLSRGFGRQGKRTFMAERQYTRMEDWLTAKLAYEGLPSKVYLSKTLAQYTSKTCSNCGFTITSADYDRMLEKLKKTATGWMTTINGKELKVEGQITYYNRYKRQNVVKDLSVELDRLSEESVNNDISSWTKGRSGEALSLLKKRFSHRPVQEKFVCLNCGFETHADEQAALNIARSWLFLRSQEYKKYQTNKTTGNTDKRAFVETWQSFYRKKLKEVWKPAV

SEQ ID NO: 38867 - protein, 978 aa, synthetic construct
  REGION 1..978: note = engineered CasX variant
QEIKRINKIRRRLVKDSNTKKAGKTGPMKTLLVRVMTPDLRERLENLRKKPENIPQPISNTSRANLNKLLTDYTEMKKAILHVYWEEFQKDPVGLMSRVAQPASKKIDQNKLKPEMDEKGNLTTAGFACSQCGQPLFVYKLEQVSEKGKAYTNYFGRCNVAEHEKLILLAQLKPEKDSDEAVTYSLGKFGQRALDFYSIHVTKESTHPVKPLAQIAGNRYASSPVGKALSDACMGTIASFLSKYQDIIIEHQKVVKGNQKRLESLRELAGKENLEYPSVTLPPQPHTKEGVDAYNEVIARVRMWVNLNLWQKLKLSRDDAKPLLRLKGFPSFPLVERQANEVDWWDMVCNVKKLINEKKEDGKVFWQNLAGYKRQEALRPYLSSEEDRKKGKKFARYQLGDLLLHLEKKHGEDWGKVYDEAWERIDKKVEGLSKHIKLEEERRSEDAQSKAALTDWLRAKASFVIEGLKEADKDEFCRCELKLQKWYGDLRGKPFAIEAENSILDISGFSKQYNCAFIWQKDGVKKLNLYLIINYFKGGKLRFKKIKPEAFEANRFYTVINKKSGEIVPMEVNFNFDDPNLIILPLAFGKRQGREFIWNDLLSLETGSLKLANGRVIEKTLYNRRTRQDEPALFVALTFERREVLDSSNIKPMNLIGVDRGENIPAVIALTDPEGCPLSRFKDSLGNPTHILRIGESYKEKQRTIQAKKEVEQRRAGGYSRKYASKAKNLADDMVRNTARDLLYYAVTQDAMLIFENLSRGFGRQGKRTFMAERQYTRMEDWLTAKLAYEGLPSKVYLSKTLAQYTSKTCSNCGFTITSADYDRMLEKLKKTATGWMTTINGKELKVEGQITYYNRYKRQNVVKDLSVELDRLSEESVNNDISSWTKGRSGEALSLLKKRFSHRPVQEKFVCLNCGFETHADEQAALNIARSWLFLRSQEYKKYQTNKTTGNTDKRAFVETWQSFYRKKLKEVWKPAV

SEQ ID NO: 38868 - protein, 978 aa, synthetic construct
  REGION 1..978: note = engineered CasX variant
QEIKRINKIRRRLVKDSNTKKAGKTGPMKTLLVRVMTPDLRERLENLRKKPENIPQPISNTSRANLNKLLTDYTEMKKAILHVYWEEFQKDPVGLMSRVAQPASKKIDQNKLKPEMDEKGNLTTAGFACSQCGQPLFVYKLEQVSEKGKAYTNYFGRCNVAEHEKLILLAQLKPEKDSDEAVTYSLGKFGQRALDFYSIHVTKESTHPVKPLAQIAGNRYASTPVGKALSDACMGTIASFLSKYQDIIIEHQKVVKGNQKRLESLRELAGKENLEYPSVTLPPQPHTKEGVDAYNEVIARVRMWVNLNLWQKLKLSRDDAKPLLRLKGFPSFPLVERQANEVDWWDMVCNVKKLINEKKEDGKVFWQNLAGYKRQEALRPYLSSEEDRKKGKKFARYQLGDLLLHLEKKHGEDWGKVYDEAWERIDKKVEGLSKHIKLEEERRSEDAQSKAALTDWLRAKASFVIEGLKEADKDEFCRCELKLQKWYGDLRGKPFAIEAENSILDISGFSKQYNCAFIWQKDGVKKLNLYLIINYFKGGKLRFKKIKPEAFEANRFYTVINKKSGEIVPMEVNFNFDDPNLIILPLAFGKRQGREFIWNDLLSLETGSLKLANGRVIEKTLYNRRTRQDEPALFVALTFERREVLDSSNIKPMNLIGVDRGENIPAVIALTDPEGCPLSRFKDSLGNPTHILRIGESYKEKQRTIQAKKEVEQRRAGGYSRKYASKAKNLADDMVRNTARDLLYYAVTQDAMLIFENLSRGFGRQGKRTFMAERQYTRMEDWLTAKLAYEGLPSKVYLSKTLAQYTSKTCSNCGFTITSADYDRMLEKLKKTATGWMTTINGKELKVEGQITYYNRYKRQNVVKDLSVELDRLSEESVNNDISSWTKGRSGEALSLLKKRFSHRPVQEKFVCLNCGFETHADEQAALNIARSWLFLRSQEYKKYQTNKTTGNTDKRAFVETWQSFYRKKLKEVWKPAV

SEQ ID NO: 38869 - protein, 978 aa, synthetic construct
  REGION 1..978: note = engineered CasX variant
QEIKRINKIRRRLVKDSNTKKAGKTGPMKTLLVRVMTPDLRERLENLRKKPENIPQPISNTSRANLNKLLTDYTEMKKAILHVYWEEFQKDPVGLMSRVAQPASKKIDQNKLKPEMDEKGNLTTAGFACSQCGQPLFVYKLEQVSEKGKAYTNYFGRCNVAEHEKLILLAQLKPEKDSDEAVTYSLGKFGQRALDFYSIHVTKESTHPVKPLAQIAGNRYASAPVGKALSDACMGTIASFLSKYQDIIIEHQKVVKGNQKRLESLRELAGKENLEYPSVTLPPQPHTKEGVDAYNEVIARVRMWVNLNLWQKLKLSRDDAKPLLRLKGFPSFPLVERQANEVDWWDMVCNVKKLINEKKEDGKVFWQNLAGYKRQEALRPYLSSEEDRKKGKKFARYQLGDLLLHLEKKHGEDWGKVYDEAWERIDKKVEGLSKHIKLEEERRSEDAQSKAALTDWLRAKASFVIEGLKEADKDEFCRCELKLQKWYGDLRGKPFAIEAENSILDISGFSKQYNCAFIWQKDGVKKLNLYLIINYFKGGKLRFKKIKPEAFEANRFYTVINKKSGEIVPMEVNFNFDDPNLIILPLAFGKRQGREFIWNDLLSLETGSLKLANGRVIEKTLYNRRTRQDEPALFVALTFERREVLDSSNIKPMNLIGVDRGENIPAVIALTDPEGCPLSRFKDSLGNPTHILRIGESYKEKQRTIQAKKEVEQRRAGGYSRKYASKAKNLADDMVRNTARDLLYYAVTQDAMLIFENLSRGFGRQGKRTFMAERQYTRMEDWLTAKLAYEGLPSKVYLSKTLAQYTSKTCSNCGFTITSADYDRMLEKLKKTATGWMTTINGKELKVEGQITYYNRYKRQNVVKDLSVELDRLSEESVNNDISSWTKGRSGEALSLLKKRFSHRPVQEKFVCLNCGFETHADEQAALNIARSWLFLRSQEYKKYQTNKTTGNTDKRAFVETWQSFYRKKLKEVWKPAV

SEQ ID NO: 38870 - protein, 978 aa, synthetic construct
  REGION 1..978: note = engineered CasX variant
QEIKRINKIRRRLVKDSNTKKAGKTGPMKTLLVRVMTPDLRERLENLRKKPENIPQPISNTSRANLNKLLTDYTEMKKAILHVYWEEFQKDPVGLMSRVAQPASKKIDQNKLKPEMDEKGNLTTAGFACSQCGQPLFVYKLEQVSEKGKAYTNYFGRCNVAEHEKLILLAQLKPEKDSDEAVTYSLGKFGQRALDFYSIHVTKESTHPVKPLAQIAGNRYASVPVGKALSDACMGTIASFLSKYQDIIIEHQKVVKGNQKRLESLRELAGKENLEYPSVTLPPQPHTKEGVDAYNEVIARVRMWVNLNLWQKLKLSRDDAKPLLRLKGFPSFPLVERQANEVDWWDMVCNVKKLINEKKEDGKVFWQNLAGYKRQEALRPYLSSEEDRKKGKKFARYQLGDLLLHLEKKHGEDWGKVYDEAWERIDKKVEGLSKHIKLEEERRSEDAQSKAALTDWLRAKASFVIEGLKEADKDEFCRCELKLQKWYGDLRGKPFAIEAENSILDISGFSKQYNCAFIWQKDGVKKLNLYLIINYFKGGKLRFKKIKPEAFEANRFYTVINKKSGEIVPMEVNFNFDDPNLIILPLAFGKRQGREFIWNDLLSLETGSLKLANGRVIEKTLYNRRTRQDEPALFVALTFERREVLDSSNIKPMNLIGVDRGENIPAVIALTDPEGCPLSRFKDSLGNPTHILRIGESYKEKQRTIQAKKEVEQRRAGGYSRKYASKAKNLADDMVRNTARDLLYYAVTQDAMLIFENLSRGFGRQGKRTFMAERQYTRMEDWLTAKLAYEGLPSKVYLSKTLAQYTSKTCSNCGFTITSADYDRMLEKLKKTATGWMTTINGKELKVEGQITYYNRYKRQNVVKDLSVELDRLSEESVNNDISSWTKGRSGEALSLLKKRFSHRPVQEKFVCLNCGFETHADEQAALNIARSWLFLRSQEYKKYQTNKTTGNTDKRAFVETWQSFYRKKLKEVWKPAV

SEQ ID NO: 38871 - protein, 978 aa, synthetic construct
  REGION 1..978: note = engineered CasX variant
QEIKRINKIRRRLVKDSNTKKAGKTGPMKTLLVRVMTPDLRERLENLRKKPENIPQPISNTSRANLNKLLTDYTEMKKAILHVYWEEFQKDPVGLMSRVAQPASKKIDQNKLKPEMDEKGNLTTAGFACSQCGQPLFVYKLEQVSEKGKAYTNYFGRCNVAEHEKLIKLAQLKPEKDSDEAVTYSLGKFGQRALDFYSIHVTKESTHPVKPLAQIAGNRYASGPVGKALSDACMGTIASFLSKYQDIIIEHQKVVKGNQKRLESLRELAGKENLEYPSVTLPPQPHTKEGVDAYNEVIARVRMWVNLNLWQKLKLSRDDAKPLLRLKGFPSFPLVERQANEVDWWDMVCNVKKLINEKKEDGKVFWQNLAGYKRQEALRPYLSSEEDRKKGKKFARYQLGDLLLHLEKKHGEDWGKVYDEAWERIDKKVEGLSKHIKLEEERRSEDAQSKAALTDWLRAKASFVIEGLKEADKDEFCRCELKLQKWYGDLRGKPFAIEAENSILDISGFSKQYNCAFIWQKDGVKKLNLYLIINYFKGGKLRFKKIKPEAFEANRFYTVINKKSGEIVPMEVNFNFDDPNLIILPLAFGKRQGREFIWNDLLSLETGSLKLANGRVIEKTLYNRRTRQDEPALFVALTFERREVLDSSNIKPMNLIGVDRGENIPAVIALTDPEGCPLSRFKDSLGNPTHILRIGESYKEKQRTIQAKKEVEQRRAGGYSRKYASKAKNLADDMVRNTARDLLYYAVTQDAMLIFENLSRGFGRQGKRTFMAERQYTRMEDWLTAKLAYEGLPSKVYLSKTLAQYTSKTCSNCGFTITSADYDRMLEKLKKTATGWMTTINGKELKVEGQITYYNRYKRQNVVKDLSVELDRLSEESVNNDISSWTKGRSGEALSLLKKRFSHRPVQEKFVCLNCGFETHADEQAALNIARSWLFLRSQEYKKYQTNKTTGNTDKRAFVETWQSFYRKKLKEVWKPAV

SEQ ID NO: 38872 - protein, 977 aa, synthetic construct
  REGION 1..977: note = engineered CasX variant
QEIKRINKIRRRLVKDSNTKKAGKTGPMKTLLVRVMTPDLRERLENLRKKPENIPQPISNTSRANLNKLLTDYTEMKKAILHVYWEEFQKDPVGLMSRVAQPASKKIDQNKLKPEMDEKGNLTTAGFACSQCGQPLFVYKLEQVSEKGKAYTNYFGRCNVAEHEKLILLAQLKPEKDSDEAVTYSLGKFGQRALDFYSIHVTKESTHPVKPLAQIAGNRYASPVGKALSDACMGTIASFLSKYQDIIIEHQKVVKGNQKRLESLRELAGKENLEYPSVTLPPQPHTKEGVDAYNEVIARVRMWVNLNLWQKLKLSRDDAKPLLRLKGFPSFPLVERQANEVDWWDMVCNVKKLINEKKEDGKVFWQNLAGYKRQEALRPYLSSEEDRKKGKKFARYQLGDLLLHLEKKHGEDWGKVYDEAWERIDKKVEGLSKHIKLEEERRSEDAQSKAALTDWLRAKASFVIEGLKEADKDEFCRCELKLQKWYGDLRGKPFAIEAENSILDISGFSKQYNCAFIWQKDGVKKLNLYLIINYFKGGKLRFKKIKPEAFEANRFYTVINKKSGEIVPMEVNFNFDDPNLIILPLAFGKRQGREFIWNDLLSLETGSLKLANGRVIEKTLYNRRTRQDEPALFVALTFERREVLDSSNIKPMNLIGVDRGENIPAVIALTDPEGCPLSRFKDSLGNPTHILRIGESYKEKQRTIQAKKEVEQRRAGGYSRKYASKAKNLADDMVRNTARDLLYYAVTQDAMLIFENLSRGFGRQGKRTFMAERQYTRMEDWLTAKLAYEGLPSKVYLSKTLAQYTSKTCSNCGFTITSADYDRMLEKLKKTATGWMTTINGKELKVEGQITYYNRYKRQNVVKDLSVELDRLSEESVNNDISSWTKGRSGEALSLLKKRFSHRPVQEKFVCLNCGFETHADEQAALNIARSWLFLRSQEYKKYQTNKTTGNTDKRAFVETWQSFYRKKLKEVWKPAV

SEQ ID NO: 38873 - protein, 978 aa, synthetic construct
  REGION 1..978: note = engineered CasX variant
QEIKRINKIRRRLVKDSNTKKAGKTGPMKTLLVRVMTPDLRERLENLRKKPENIPQPISNTSRANLNKLLTDYTEMKKAILHVYWEEFQKDPVGLMSRVAQPASKKIDQNKLKPEMDEKGNLTTAGFACSQCGQPLFVYKLEQVSEKGKAYTNYFGRCNVAEHEKLILLAQLKPEKDSDEAVTYSLGKFGQRALDFYSIHVTKESTHPVKPLAQIAGNRYASYPVGKALSDACMGTIASFLSKYQDIIIEHQKVVKGNQKRLESLRELAGKENLEYPSVTLPPQPHTKEGVDAYNEVIARVRMWVNLNLWQKLKLSRDDAKPLLRLKGFPSFPLVERQANEVDWWDMVCNVKKLINEKKEDGKVFWQNLAGYKRQEALRPYLSSEEDRKKGKKFARYQLGDLLLHLEKKHGEDWGKVYDEAWERIDKKVEGLSKHIKLEEERRSEDAQSKAALTDWLRAKASFVIEGLKEADKDEFCRCELKLQKWYGDLRGKPFAIEAENSILDISGFSKQYNCAFIWQKDGVKKLNLYLIINYFKGGKLRFKKIKPEAFEANRFYTVINKKSGEIVPMEVNFNFDDPNLIILPLAFGKRQGREFIWNDLLSLETGSLKLANGRVIEKTLYNRRTRQDEPALFVALTFERREVLDSSNIKPMNLIGVDRGENIPAVIALTDPEGCPLSRFKDSLGNPTHILRIGESYKEKQRTIQAKKEVEQRRAGGYSRKYASKAKNLADDMVRNTARDLLYYAVTQDAMLIFENLSRGFGRQGKRTFMAERQYTRMEDWLTAKLAYEGLPSKVYLSKTLAQYTSKTCSNCGFTITSADYDRVLEKLKKTATGWMTTINGKELKVEGQITYYNRYKRQNVVKDLSVELDRLSEESVNNDISSWTKGRQGEALSLLKKRFSHRPVQEKFVCLNCGFETHADEQAALNIARSWLFLRSQEYKKYQTNKTTGNTDKRAFVETWQSFYRKKLKEVWKPAV

SEQ ID NO: 38874 - protein, 978 aa, synthetic construct
  REGION 1..978: note = engineered CasX variant
QEIKRINKIRRRLVKDSNTKKAGKTGPMKTLLVRVMTPDLRERLENLRKKPENIPQPISNTSRANLNKLLTDYTEMKKAILHVYWEEFQKDPVGLMSRVAQPASKKIDQNKLKPEMDEKGNLTTAGFACSQCGQPLFVYKLEQVSEKGKAYTNYFGRCNVAEHEKLILLAQLKPEKDSDEAVTYSLGKFGQRALDFYSIHVTKESTHPVKPLAQIAGNRYASHPVGKALSDACMGTIASFLSKYQDIIIEHQKVVKGNQKRLESLRELAGKENLEYPSVTLPPQPHTKEGVDAYNEVIARVRMWVNLNLWQKLKLSRDDAKPLLRLKGFPSFPLVERQANEVDWWDMVCNVKKLINEKKEDGKVFWQNLAGYKRQEALRPYLSSEEDRKKGKKFARYQLGDLLLHLEKKHGEDWGKVYDEAWERIDKKVEGLSKHIKLEEERRSEDAQSKAALTDWLRAKASFVIEGLKEADKDEFCRCELKLQKWYGDLRGKPFAIEAENSILDISGFSKQYNCAFIWQKDGVKKLNLYLIINYFKGGKLRFKKIKPEAFEANRFYTVINKKSGEIVPMEVNFNFDDPNLIILPLAFGKRQGREFIWNDLLSLETGSLKLANGRVIEKTLYNRRTRQDEPALFVALTFERREVLDSSNIKPMNLIGVDRGENIPAVIALTDPEGCPLSRFKDSLGNPTHILRIGESYKEKQRTIQAKKEVEQRRAGGYSRKYASKAKNLADDMVRNTARDLLYYAVTQDAMLIFENLSRGFGRQGKRTFMAERQYTRMEDWLTAKLAYEGLPSKVYLSKTLAQYTSKTCSNCGFTITSADYDRVLEKLKKTATGWMTTINGKELKVEGQITYYNRYKRQNVVKDLSVELDRLSEESVNNDISSWTKGRQGEALSLLKKRFSHRPVQEKFVCLNCGFETHADEQAALNIARSWLFLRSQEYKKYQTNKTTGNTDKRAFVETWQSFYRKKLKEVWKPAV

SEQ ID NO: 38875 - protein, 978 aa, synthetic construct
  REGION 1..978: note = engineered CasX variant
QEIKRINKIRRRLVKDSNTKKAGKTGPMKTLLVRVMTPDLRERLENLRKKPENIPQPISNTSRANLNKLLTDYTEMKKAILHVYWEEFQKDPVGLMSRVAQPASKKIDQNKLKPEMDEKGNLTTAGFACSQCGQPLFVYKLEQVSEKGKAYTNYFGRCNVAEHEKLILLAQLKPEKDSDEAVTYSLGKFGQRALDFYSIHVTKESTHPVKPLAQIAGNRYASSPVGKALSDACMGTIASFLSKYQDIIIEHQKVVKGNQKRLESLRELAGKENLEYPSVTLPPQPHTKEGVDAYNEVIARVRMWVNLNLWQKLKLSRDDAKPLLRLKGFPSFPLVERQANEVDWWDMVCNVKKLINEKKEDGKVFWQNLAGYKRQEALRPYLSSEEDRKKGKKFARYQLGDLLLHLEKKHGEDWGKVYDEAWERIDKKVEGLSKHIKLEEERRSEDAQSKAALTDWLRAKASFVIEGLKEADKDEFCRCELKLQKWYGDLRGKPFAIEAENSILDISGFSKQYNCAFIWQKDGVKKLNLYLIINYFKGGKLRFKKIKPEAFEANRFYTVINKKSGEIVPMEVNFNFDDPNLIILPLAFGKRQGREFIWNDLLSLETGSLKLANGRVIEKTLYNRRTRQDEPALFVALTFERREVLDSSNIKPMNLIGVDRGENIPAVIALTDPEGCPLSRFKDSLGNPTHILRIGESYKEKQRTIQAKKEVEQRRAGGYSRKYASKAKNLADDMVRNTARDLLYYAVTQDAMLIFENLSRGFGRQGKRTFMAERQYTRMEDWLTAKLAYEGLPSKVYLSKTLAQYTSKTCSNCGFTITSADYDRVLEKLKKTATGWMTTINGKELKVEGQITYYNRYKRQNVVKDLSVELDRLSEESVNNDISSWTKGRQGEALSLLKKRFSHRPVQEKFVCLNCGFETHADEQAALNIARSWLFLRSQEYKKYQTNKTTGNTDKRAFVETWQSFYRKKLKEVWKPAV

SEQ ID NO: 38876 - protein, 978 aa, synthetic construct
  REGION 1..978: note = engineered CasX variant
QEIKRINKIRRRLVKDSNTKKAGKTGPMKTLLVRVMTPDLRERLENLRKKPENIPQPISNTSRANLNKLLTDYTEMKKAILHVYWEEFQKDPVGLMSRVAQPASKKIDQNKLKPEMDEKGNLTTAGFACSQCGQPLFVYKLEQVSEKGKAYTNYFGRCNVAEHEKLILLAQLKPEKDSDEAVTYSLGKFGQRALDFYSIHVTKESTHPVKPLAQIAGNRYASTPVGKALSDACMGTIASFLSKYQDIIIEHQKVVKGNQKRLESLRELAGKENLEYPSVTLPPQPHTKEGVDAYNEVIARVRMWVNLNLWQKLKLSRDDAKPLLRLKGFPSFPLVERQANEVDWWDMVCNVKKLINEKKEDGKVFWQNLAGYKRQEALRPYLSSEEDRKKGKKFARYQLGDLLLHLEKKHGEDWGKVYDEAWERIDKKVEGLSKHIKLEEERRSEDAQSKAALTDWLRAKASFVIEGLKEADKDEFCRCELKLQKWYGDLRGKPFAIEAENSILDISGFSKQYNCAFIWQKDGVKKLNLYLIINYFKGGKLRFKKIKPEAFEANRFYTVINKKSGEIVPMEVNFNFDDPNLIILPLAFGKRQGREFIWNDLLSLETGSLKLANGRVIEKTLYNRRTRQDEPALFVALTFERREVLDSSNIKPMNLIGVDRGENIPAVIALTDPEGCPLSRFKDSLGNPTHILRIGESYKEKQRTIQAKKEVEQRRAGGYSRKYASKAKNLADDMVRNTARDLLYYAVTQDAMLIFENLSRGFGRQGKRTFMAERQYTRMEDWLTAKLAYEGLPSKVYLSKTLAQYTSKTCSNCGFTITSADYDRVLEKLKKTATGWMTTINGKELKVEGQITYYNRYKRQNVVKDLSVELDRLSEESVNNDISSWTKGRQGEALSLLKKRFSHRPVQEKFVCLNCGFETHADEQAALNIARSWLFLRSQEYKKYQTNKTTGNTDKRAFVETWQSFYRKKLKEVWKPAV

SEQ ID NO: 38877 - protein, 978 aa, synthetic construct
  REGION 1..978: note = engineered CasX variant
QEIKRINKIRRRLVKDSNTKKAGKTGPMKTLLVRVMTPDLRERLENLRKKPENIPQPISNTSRANLNKLLTDYTEMKKAILHVYWEEFQKDPVGLMSRVAQPASKKIDQNKLKPEMDEKGNLTTAGFACSQCGQPLFVYKLEQVSEKGKAYTNYFGRCNVAEHEKLILLAQLKPEKDSDEAVTYSLGKFGQRALDFYSIHVTKESTHPVKPLAQIAGNRYASAPVGKALSDACMGTIASFLSKYQDIIIEHQKVVKGNQKRLESLRELAGKENLEYPSVTLPPQPHTKEGVDAYNEVIARVRMWVNLNLWQKLKLSRDDAKPLLRLKGFPSFPLVERQANEVDWWDMVCNVKKLINEKKEDGKVFWQNLAGYKRQEALRPYLSSEEDRKKGKKFARYQLGDLLLHLEKKHGEDWGKVYDEAWERIDKKVEGLSKHIKLEEERRSEDAQSKAALTDWLRAKASFVIEGLKEADKDEFCRCELKLQKWYGDLRGKPFAIEAENSILDISGFSKQYNCAFIWQKDGVKKLNLYLIINYFKGGKLRFKKIKPEAFEANRFYTVINKKSGEIVPMEVNFNFDDPNLIILPLAFGKRQGREFIWNDLLSLETGSLKLANGRVIEKTLYNRRTRQDEPALFVALTFERREVLDSSNIKPMNLIGVDRGENIPAVIALTDPEGCPLSRFKDSLGNPTHILRIGESYKEKQRTIQAKKEVEQRRAGGYSRKYASKAKNLADDMVRNTARDLLYYAVTQDAMLIFENLSRGFGRQGKRTFMAERQYTRMEDWLTAKLAYEGLPSKVYLSKTLAQYTSKTCSNCGFTITSADYDRVLEKLKKTATGWMTTINGKELKVEGQITYYNRYKRQNVVKDLSVELDRLSEESVNNDISSWTKGRQGEALSLLKKRFSHRPVQEKFVCLNCGFETHADEQAALNIARSWLFLRSQEYKKYQTNKTTGNTDKRAFVETWQSFYRKKLKEVWKPAV

SEQ ID NO: 38878 - protein, 978 aa, synthetic construct
  REGION 1..978: note = engineered CasX variant
QEIKRINKIRRRLVKDSNTKKAGKTGPMKTLLVRVMTPDLRERLENLRKKPENIPQPISNTSRANLNKLLTDYTEMKKAILHVYWEEFQKDPVGLMSRVAQPASKKIDQNKLKPEMDEKGNLTTAGFACSQCGQPLFVYKLEQVSEKGKAYTNYFGRCNVAEHEKLILLAQLKPEKDSDEAVTYSLGKFGQRALDFYSIHVTKESTHPVKPLAQIAGNRYASVPVGKALSDACMGTIASFLSKYQDIIIEHQKVVKGNQKRLESLRELAGKENLEYPSVTLPPQPHTKEGVDAYNEVIARVRMWVNLNLWQKLKLSRDDAKPLLRLKGFPSFPLVERQANEVDWWDMVCNVKKLINEKKEDGKVFWQNLAGYKRQEALRPYLSSEEDRKKGKKFARYQLGDLLLHLEKKHGEDWGKVYDEAWERIDKKVEGLSKHIKLEEERRSEDAQSKAALTDWLRAKASFVIEGLKEADKDEFCRCELKLQKWYGDLRGKPFAIEAENSILDISGFSKQYNCAFIWQKDGVKKLNLYLIINYFKGGKLRFKKIKPEAFEANRFYTVINKKSGEIVPMEVNFNFDDPNLIILPLAFGKRQGREFIWNDLLSLETGSLKLANGRVIEKTLYNRRTRQDEPALFVALTFERREVLDSSNIKPMNLIGVDRGENIPAVIALTDPEGCPLSRFKDSLGNPTHILRIGESYKEKQRTIQAKKEVEQRRAGGYSRKYASKAKNLADDMVRNTARDLLYYAVTQDAMLIFENLSRGFGRQGKRTFMAERQYTRMEDWLTAKLAYEGLPSKVYLSKTLAQYTSKTCSNCGFTITSADYDRVLEKLKKTATGWMTTINGKELKVEGQITYYNRYKRQNVVKDLSVELDRLSEESVNNDISSWTKGRQGEALSLLKKRFSHRPVQEKFVCLNCGFETHADEQAALNIARSWLFLRSQEYKKYQTNKTTGNTDKRAFVETWQSFYRKKLKEVWKPAV

SEQ ID NO: 38879 - protein, 978 aa, synthetic construct
  REGION 1..978: note = engineered CasX variant
QEIKRINKIRRRLVKDSNTKKAGKTGPMKTLLVRVMTPDLRERLENLRKKPENIPQPISNTSRANLNKLLTDYTEMKKAILHVYWEEFQKDPVGLMSRVAQPASKKIDQNKLKPEMDEKGNLTTAGFACSQCGQPLFVYKLEQVSEKGKAYTNYFGRCNVAEHEKLIKLAQLKPEKDSDEAVTYSLGKFGQRALDFYSIHVTKESTHPVKPLAQIAGNRYASGPVGKALSDACMGTIASFLSKYQDIIIEHQKVVKGNQKRLESLRELAGKENLEYPSVTLPPQPHTKEGVDAYNEVIARVRMWVNLNLWQKLKLSRDDAKPLLRLKGFPSFPLVERQANEVDWWDMVCNVKKLINEKKEDGKVFWQNLAGYKRQEALRPYLSSEEDRKKGKKFARYQLGDLLLHLEKKHGEDWGKVYDEAWERIDKKVEGLSKHIKLEEERRSEDAQSKAALTDWLRAKASFVIEGLKEADKDEFCRCELKLQKWYGDLRGKPFAIEAENSILDISGFSKQYNCAFIWQKDGVKKLNLYLIINYFKGGKLRFKKIKPEAFEANRFYTVINKKSGEIVPMEVNFNFDDPNLIILPLAFGKRQGREFIWNDLLSLETGSLKLANGRVIEKTLYNRRTRQDEPALFVALTFERREVLDSSNIKPMNLIGVDRGENIPAVIALTDPEGCPLSRFKDSLGNPTHILRIGESYKEKQRTIQAKKEVEQRRAGGYSRKYASKAKNLADDMVRNTARDLLYYAVTQDAMLIFENLSRGFGRQGKRTFMAERQYTRMEDWLTAKLAYEGLPSKVYLSKTLAQYTSKTCSNCGFTITSADYDRVLEKLKKTATGWMTTINGKELKVEGQITYYNRYKRQNVVKDLSVELDRLSEESVNNDISSWTKGRQGEALSLLKKRFSHRPVQEKFVCLNCGFETHADEQAALNIARSWLFLRSQEYKKYQTNKTTGNTDKRAFVETWQSFYRKKLKEVWKPAV

SEQ ID NO: 38880 - protein, 977 aa, synthetic construct
  REGION 1..977: note = engineered CasX variant
QEIKRINKIRRRLVKDSNTKKAGKTGPMKTLLVRVMTPDLRERLENLRKKPENIPQPISNTSRANLNKLLTDYTEMKKAILHVYWEEFQKDPVGLMSRVAQPASKKIDQNKLKPEMDEKGNLTTAGFACSQCGQPLFVYKLEQVSEKGKAYTNYFGRCNVAEHEKLILLAQLKPEKDSDEAVTYSLGKFGQRALDFYSIHVTKESTHPVKPLAQIAGNRYASPVGKALSDACMGTIASFLSKYQDIIIEHQKVVKGNQKRLESLRELAGKENLEYPSVTLPPQPHTKEGVDAYNEVIARVRMWVNLNLWQKLKLSRDDAKPLLRLKGFPSFPLVERQANEVDWWDMVCNVKKLINEKKEDGKVFWQNLAGYKRQEALRPYLSSEEDRKKGKKFARYQLGDLLLHLEKKHGEDWGKVYDEAWERIDKKVEGLSKHIKLEEERRSEDAQSKAALTDWLRAKASFVIEGLKEADKDEFCRCELKLQKWYGDLRGKPFAIEAENSILDISGFSKQYNCAFIWQKDGVKKLNLYLIINYFKGGKLRFKKIKPEAFEANRFYTVINKKSGEIVPMEVNFNFDDPNLIILPLAFGKRQGREFIWNDLLSLETGSLKLANGRVIEKTLYNRRTRQDEPALFVALTFERREVLDSSNIKPMNLIGVDRGENIPAVIALTDPEGCPLSRFKDSLGNPTHILRIGESYKEKQRTIQAKKEVEQRRAGGYSRKYASKAKNLADDMVRNTARDLLYYAVTQDAMLIFENLSRGFGRQGKRTFMAERQYTRMEDWLTAKLAYEGLPSKVYLSKTLAQYTSKTCSNCGFTITSADYDRVLEKLKKTATGWMTTINGKELKVEGQITYYNRYKRQNVVKDLSVELDRLSEESVNNDISSWTKGRQGEALSLLKKRFSHRPVQEKFVCLNCGFETHADEQAALNIARSWLFLRSQEYKKYQTNKTTGNTDKRAFVETWQSFYRKKLKEVWKPAV

SEQ ID NO: 38881 - protein, 978 aa, synthetic construct
  REGION 1..978: note = engineered CasX variant
QEIKRINKIRRRLVKDSNTKKAGKTGPMKTLLVRVMTPDLRERLENLRKKPENIPQPISNTSRANLNKLLTDYTEMKKAILHVYWEEFQKDPVGLMSRVAQPASKKIDQNKLKPEMDEKGNLTTAGFACSQCGQPLFVYKLEQVSEKGKAYTNYFGRCNVAEHEKLILLAQLKPEKDSDEAVTYSLGKFGQRALDFYSIHVTKESTHPVKPLAQIAGNRYASYPVGKALSDACMGTIASFLSKYQDIIIEHQKVVKGNQKRLESLRELAGKENLEYPSVTLPPQPHTKEGVDAYNEVIARVRMWVNLNLWQKLKLSRDDAKPLLRLKGFPSFPLVERQANEVDWWDMVCNVKKLINEKKEDGKVFWQNLAGYKRQEALRPYLSSEEDRKKGKKFARYQLGDLLLHLEKKHGEDWGKVYDEAWERIDKKVEGLSKHIKLEEERRSEDAQSKAALTDWLRAKASFVIEGLKEADKDEFCRCELKLQKWYGDLRGKPFAIEAENSILDISGFSKQYNCAFIWQKDGVKKLNLYLIINYFKGGKLRFKKIKPEAFEANRFYTVINKKSGEIVPMEVNFNFDDPNLIILPLAFGKRQGREFIWNDLLSLETGSLKLANGRVIEKTLYNRRTRQDEPALFVALTFERREVLDSSNIKPMNLIGVDRGENIPAVIALTDPEGCPLSRFKDSLGNPTHILRIGESYKEKQRTIQAKKEVEQRRAGGYSRKYASKAKNLADDMVRNTARDLLYYAVTQDAMLIFENLSRGFGRQGKRTFMAERQYTRMEDWLTAKLAYEGLPSKVYLSKTLAQYTSKTCSNCGFTITSADYDRVLEKLKKTATGWMTTINGKELKVEGQITYYNRYKRQNVVKDLSVELDRLSEESVNNDISSWTKGRSGEALSLLKKRFSHRPVQEKFVCLNCEFETHADEQAALNIARSWLFLRSQEYKKYQTNKTTGNTDKRAFVETWQSFYRKKLKEVWKPAV

SEQ ID NO: 38882 - protein, 978 aa, synthetic construct
  REGION 1..978: note = engineered CasX variant
QEIKRINKIRRRLVKDSNTKKAGKTGPMKTLLVRVMTPDLRERLENLRKKPENIPQPISNTSRANLNKLLTDYTEMKKAILHVYWEEFQKDPVGLMSRVAQPASKKIDQNKLKPEMDEKGNLTTAGFACSQCGQPLFVYKLEQVSEKGKAYTNYFGRCNVAEHEKLILLAQLKPEKDSDEAVTYSLGKFGQRALDFYSIHVTKESTHPVKPLAQIAGNRYASHPVGKALSDACMGTIASFLSKYQDIIIEHQKVVKGNQKRLESLRELAGKENLEYPSVTLPPQPHTKEGVDAYNEVIARVRMWVNLNLWQKLKLSRDDAKPLLRLKGFPSFPLVERQANEVDWWDMVCNVKKLINEKKEDGKVFWQNLAGYKRQEALRPYLSSEEDRKKGKKFARYQLGDLLLHLEKKHGEDWGKVYDEAWERIDKKVEGLSKHIKLEEERRSEDAQSKAALTDWLRAKASFVIEGLKEADKDEFCRCELKLQKWYGDLRGKPFAIEAENSILDISGFSKQYNCAFIWQKDGVKKLNLYLIINYFKGGKLRFKKIKPEAFEANRFYTVINKKSGEIVPMEVNFNFDDPNLIILPLAFGKRQGREFIWNDLLSLETGSLKLANGRVIEKTLYNRRTRQDEPALFVALTFERREVLDSSNIKPMNLIGVDRGENIPAVIALTDPEGCPLSRFKDSLGNPTHILRIGESYKEKQRTIQAKKEVEQRRAGGYSRKYASKAKNLADDMVRNTARDLLYYAVTQDAMLIFENLSRGFGRQGKRTFMAERQYTRMEDWLTAKLAYEGLPSKVYLSKTLAQYTSKTCSNCGFTITSADYDRVLEKLKKTATGWMTTINGKELKVEGQITYYNRYKRQNVVKDLSVELDRLSEESVNNDISSWTKGRSGEALSLLKKRFSHRPVQEKFVCLNCEFETHADEQAALNIARSWLFLRSQEYKKYQTNKTTGNTDKRAFVETWQSFYRKKLKEVWKPAV

SEQ ID NO: 38883 - protein, 978 aa, synthetic construct
  REGION 1..978: note = engineered CasX variant
QEIKRINKIRRRLVKDSNTKKAGKTGPMKTLLVRVMTPDLRERLENLRKKPENIPQPISNTSRANLNKLLTDYTEMKKAILHVYWEEFQKDPVGLMSRVAQPASKKIDQNKLKPEMDEKGNLTTAGFACSQCGQPLFVYKLEQVSEKGKAYTNYFGRCNVAEHEKLILLAQLKPEKDSDEAVTYSLGKFGQRALDFYSIHVTKESTHPVKPLAQIAGNRYASSPVGKALSDACMGTIASFLSKYQDIIIEHQKVVKGNQKRLESLRELAGKENLEYPSVTLPPQPHTKEGVDAYNEVIARVRMWVNLNLWQKLKLSRDDAKPLLRLKGFPSFPLVERQANEVDWWDMVCNVKKLINEKKEDGKVFWQNLAGYKRQEALRPYLSSEEDRKKGKKFARYQLGDLLLHLEKKHGEDWGKVYDEAWERIDKKVEGLSKHIKLEEERRSEDAQSKAALTDWLRAKASFVIEGLKEADKDEFCRCELKLQKWYGDLRGKPFAIEAENSILDISGFSKQYNCAFIWQKDGVKKLNLYLIINYFKGGKLRFKKIKPEAFEANRFYTVINKKSGEIVPMEVNFNFDDPNLIILPLAFGKRQGREFIWNDLLSLETGSLKLANGRVIEKTLYNRRTRQDEPALFVALTFERREVLDSSNIKPMNLIGVDRGENIPAVIALTDPEGCPLSRFKDSLGNPTHILRIGESYKEKQRTIQAKKEVEQRRAGGYSRKYASKAKNLADDMVRNTARDLLYYAVTQDAMLIFENLSRGFGRQGKRTFMAERQYTRMEDWLTAKLAYEGLPSKVYLSKTLAQYTSKTCSNCGFTITSADYDRVLEKLKKTATGWMTTINGKELKVEGQITYYNRYKRQNVVKDLSVELDRLSEESVNNDISSWTKGRSGEALSLLKKRFSHRPVQEKFVCLNCEFETHADEQAALNIARSWLFLRSQEYKKYQTNKTTGNTDKRAFVETWQSFYRKKLKEVWKPAV

SEQ ID NO: 38884 - protein, 978 aa, synthetic construct
  REGION 1..978: note = engineered CasX variant
QEIKRINKIRRRLVKDSNTKKAGKTGPMKTLLVRVMTPDLRERLENLRKKPENIPQPISNTSRANLNKLLTDYTEMKKAILHVYWEEFQKDPVGLMSRVAQPASKKIDQNKLKPEMDEKGNLTTAGFACSQCGQPLFVYKLEQVSEKGKAYTNYFGRCNVAEHEKLILLAQLKPEKDSDEAVTYSLGKFGQRALDFYSIHVTKESTHPVKPLAQIAGNRYASTPVGKALSDACMGTIASFLSKYQDIIIEHQKVVKGNQKRLESLRELAGKENLEYPSVTLPPQPHTKEGVDAYNEVIARVRMWVNLNLWQKLKLSRDDAKPLLRLKGFPSFPLVERQANEVDWWDMVCNVKKLINEKKEDGKVFWQNLAGYKRQEALRPYLSSEEDRKKGKKFARYQLGDLLLHLEKKHGEDWGKVYDEAWERIDKKVEGLSKHIKLEEERRSEDAQSKAALTDWLRAKASFVIEGLKEADKDEFCRCELKLQKWYGDLRGKPFAIEAENSILDISGFSKQYNCAFIWQKDGVKKLNLYLIINYFKGGKLRFKKIKPEAFEANRFYTVINKKSGEIVPMEVNFNFDDPNLIILPLAFGKRQGREFIWNDLLSLETGSLKLANGRVIEKTLYNRRTRQDEPALFVALTFERREVLDSSNIKPMNLIGVDRGENIPAVIALTDPEGCPLSRFKDSLGNPTHILRIGESYKEKQRTIQAKKEVEQRRAGGYSRKYASKAKNLADDMVRNTARDLLYYAVTQDAMLIFENLSRGFGRQGKRTFMAERQYTRMEDWLTAKLAYEGLPSKVYLSKTLAQYTSKTCSNCGFTITSADYDRVLEKLKKTATGWMTTINGKELKVEGQITYYNRYKRQNVVKDLSVELDRLSEESVNNDISSWTKGRSGEALSLLKKRFSHRPVQEKFVCLNCEFETHADEQAALNIARSWLFLRSQEYKKYQTNKTTGNTDKRAFVETWQSFYRKKLKEVWKPAV

SEQ ID NO: 38885 - protein, 978 aa, synthetic construct
  REGION 1..978: note = engineered CasX variant
QEIKRINKIRRRLVKDSNTKKAGKTGPMKTLLVRVMTPDLRERLENLRKKPENIPQPISNTSRANLNKLLTDYTEMKKAILHVYWEEFQKDPVGLMSRVAQPASKKIDQNKLKPEMDEKGNLTTAGFACSQCGQPLFVYKLEQVSEKGKAYTNYFGRCNVAEHEKLILLAQLKPEKDSDEAVTYSLGKFGQRALDFYSIHVTKESTHPVKPLAQIAGNRYASAPVGKALSDACMGTIASFLSKYQDIIIEHQKVVKGNQKRLESLRELAGKENLEYPSVTLPPQPHTKEGVDAYNEVIARVRMWVNLNLWQKLKLSRDDAKPLLRLKGFPSFPLVERQANEVDWWDMVCNVKKLINEKKEDGKVFWQNLAGYKRQEALRPYLSSEEDRKKGKKFARYQLGDLLLHLEKKHGEDWGKVYDEAWERIDKKVEGLSKHIKLEEERRSEDAQSKAALTDWLRAKASFVIEGLKEADKDEFCRCELKLQKWYGDLRGKPFAIEAENSILDISGFSKQYNCAFIWQKDGVKKLNLYLIINYFKGGKLRFKKIKPEAFEANRFYTVINKKSGEIVPMEVNFNFDDPNLIILPLAFGKRQGREFIWNDLLSLETGSLKLANGRVIEKTLYNRRTRQDEPALFVALTFERREVLDSSNIKPMNLIGVDRGENIPAVIALTDPEGCPLSRFKDSLGNPTHILRIGESYKEKQRTIQAKKEVEQRRAGGYSRKYASKAKNLADDMVRNTARDLLYYAVTQDAMLIFENLSRGFGRQGKRTFMAERQYTRMEDWLTAKLAYEGLPSKVYLSKTLAQYTSKTCSNCGFTITSADYDRVLEKLKKTATGWMTTINGKELKVEGQITYYNRYKRQNVVKDLSVELDRLSEESVNNDISSWTKGRSGEALSLLKKRFSHRPVQEKFVCLNCEFETHADEQAALNIARSWLFLRSQEYKKYQTNKTTGNTDKRAFVETWQSFYRKKLKEVWKPAV

SEQ ID NO: 38886 - protein, 978 aa, synthetic construct
  REGION 1..978: note = engineered CasX variant
QEIKRINKIRRRLVKDSNTKKAGKTGPMKTLLVRVMTPDLRERLENLRKKPENIPQPISNTSRANLNKLLTDYTEMKKAILHVYWEEFQKDPVGLMSRVAQPASKKIDQNKLKPEMDEKGNLTTAGFACSQCGQPLFVYKLEQVSEKGKAYTNYFGRCNVAEHEKLILLAQLKPEKDSDEAVTYSLGKFGQRALDFYSIHVTKESTHPVKPLAQIAGNRYASVPVGKALSDACMGTIASFLSKYQDIIIEHQKVVKGNQKRLESLRELAGKENLEYPSVTLPPQPHTKEGVDAYNEVIARVRMWVNLNLWQKLKLSRDDAKPLLRLKGFPSFPLVERQANEVDWWDMVCNVKKLINEKKEDGKVFWQNLAGYKRQEALRPYLSSEEDRKKGKKFARYQLGDLLLHLEKKHGEDWGKVYDEAWERIDKKVEGLSKHIKLEEERRSEDAQSKAALTDWLRAKASFVIEGLKEADKDEFCRCELKLQKWYGDLRGKPFAIEAENSILDISGFSKQYNCAFIWQKDGVKKLNLYLIINYFKGGKLRFKKIKPEAFEANRFYTVINKKSGEIVPMEVNFNFDDPNLIILPLAFGKRQGREFIWNDLLSLETGSLKLANGRVIEKTLYNRRTRQDEPALFVALTFERREVLDSSNIKPMNLIGVDRGENIPAVIALTDPEGCPLSRFKDSLGNPTHILRIGESYKEKQRTIQAKKEVEQRRAGGYSRKYASKAKNLADDMVRNTARDLLYYAVTQDAMLIFENLSRGFGRQGKRTFMAERQYTRMEDWLTAKLAYEGLPSKVYLSKTLAQYTSKTCSNCGFTITSADYDRVLEKLKKTATGWMTTINGKELKVEGQITYYNRYKRQNVVKDLSVELDRLSEESVNNDISSWTKGRSGEALSLLKKRFSHRPVQEKFVCLNCEFETHADEQAALNIARSWLFLRSQEYKKYQTNKTTGNTDKRAFVETWQSFYRKKLKEVWKPAV

SEQ ID NO: 38887 - protein, 978 aa, synthetic construct
  REGION 1..978: note = engineered CasX variant
QEIKRINKIRRRLVKDSNTKKAGKTGPMKTLLVRVMTPDLRERLENLRKKPENIPQPISNTSRANLNKLLTDYTEMKKAILHVYWEEFQKDPVGLMSRVAQPASKKIDQNKLKPEMDEKGNLTTAGFACSQCGQPLFVYKLEQVSEKGKAYTNYFGRCNVAEHEKLIKLAQLKPEKDSDEAVTYSLGKFGQRALDFYSIHVTKESTHPVKPLAQIAGNRYASGPVGKALSDACMGTIASFLSKYQDIIIEHQKVVKGNQKRLESLRELAGKENLEYPSVTLPPQPHTKEGVDAYNEVIARVRMWVNLNLWQKLKLSRDDAKPLLRLKGFPSFPLVERQANEVDWWDMVCNVKKLINEKKEDGKVFWQNLAGYKRQEALRPYLSSEEDRKKGKKFARYQLGDLLLHLEKKHGEDWGKVYDEAWERIDKKVEGLSKHIKLEEERRSEDAQSKAALTDWLRAKASFVIEGLKEADKDEFCRCELKLQKWYGDLRGKPFAIEAENSILDISGFSKQYNCAFIWQKDGVKKLNLYLIINYFKGGKLRFKKIKPEAFEANRFYTVINKKSGEIVPMEVNFNFDDPNLIILPLAFGKRQGREFIWNDLLSLETGSLKLANGRVIEKTLYNRRTRQDEPALFVALTFERREVLDSSNIKPMNLIGVDRGENIPAVIALTDPEGCPLSRFKDSLGNPTHILRIGESYKEKQRTIQAKKEVEQRRAGGYSRKYASKAKNLADDMVRNTARDLLYYAVTQDAMLIFENLSRGFGRQGKRTFMAERQYTRMEDWLTAKLAYEGLPSKVYLSKTLAQYTSKTCSNCGFTITSADYDRVLEKLKKTATGWMTTINGKELKVEGQITYYNRYKRQNVVKDLSVELDRLSEESVNNDISSWTKGRSGEALSLLKKRFSHRPVQEKFVCLNCEFETHADEQAALNIARSWLFLRSQEYKKYQTNKTTGNTDKRAFVETWQSFYRKKLKEVWKPAV

SEQ ID NO: 38888 - protein, 977 aa, synthetic construct
  REGION 1..977: note = engineered CasX variant
QEIKRINKIRRRLVKDSNTKKAGKTGPMKTLLVRVMTPDLRERLENLRKKPENIPQPISNTSRANLNKLLTDYTEMKKAILHVYWEEFQKDPVGLMSRVAQPASKKIDQNKLKPEMDEKGNLTTAGFACSQCGQPLFVYKLEQVSEKGKAYTNYFGRCNVAEHEKLILLAQLKPEKDSDEAVTYSLGKFGQRALDFYSIHVTKESTHPVKPLAQIAGNRYASPVGKALSDACMGTIASFLSKYQDIIIEHQKVVKGNQKRLESLRELAGKENLEYPSVTLPPQPHTKEGVDAYNEVIARVRMWVNLNLWQKLKLSRDDAKPLLRLKGFPSFPLVERQANEVDWWDMVCNVKKLINEKKEDGKVFWQNLAGYKRQEALRPYLSSEEDRKKGKKFARYQLGDLLLHLEKKHGEDWGKVYDEAWERIDKKVEGLSKHIKLEEERRSEDAQSKAALTDWLRAKASFVIEGLKEADKDEFCRCELKLQKWYGDLRGKPFAIEAENSILDISGFSKQYNCAFIWQKDGVKKLNLYLIINYFKGGKLRFKKIKPEAFEANRFYTVINKKSGEIVPMEVNFNFDDPNLIILPLAFGKRQGREFIWNDLLSLETGSLKLANGRVIEKTLYNRRTRQDEPALFVALTFERREVLDSSNIKPMNLIGVDRGENIPAVIALTDPEGCPLSRFKDSLGNPTHILRIGESYKEKQRTIQAKKEVEQRRAGGYSRKYASKAKNLADDMVRNTARDLLYYAVTQDAMLIFENLSRGFGRQGKRTFMAERQYTRMEDWLTAKLAYEGLPSKVYLSKTLAQYTSKTCSNCGFTITSADYDRVLEKLKKTATGWMTTINGKELKVEGQITYYNRYKRQNVVKDLSVELDRLSEESVNNDISSWTKGRSGEALSLLKKRFSHRPVQEKFVCLNCEFETHADEQAALNIARSWLFLRSQEYKKYQTNKTTGNTDKRAFVETWQSFYRKKLKEVWKPAV

SEQ ID NO: 38889 - protein, 979 aa, synthetic construct
  REGION 1..979: note = engineered CasX variant
QEIKRINKIRRRLVKDSNTKKAGKTGPMKTLLVRVMTPDLRERLENLRKKPENIPQPISNTSRANLNKLLTDYTEMKKAILHVYWEEFQKDPVGLMSRVAQPASKKIDQNKLKPEMDEKGNLTTAGFACSQCGQPLFVYKLEQVSEKGKAYTNYFGRCNVAEHEKLILLAQLKPEKDSDEAVTYSLGKFGQRALDFYSIHVTKESTHPVKPLAQIAGNRYASYPVGKALSDACMGTIASFLSKYQDIIIEHQKVVKGNQKRLESLRELAGKENLEYPSVTLPPQPHTKEGVDAYNEVIARVRMWVNLNLWQKLKLSRDDAKPLLRLKGFPSFPLVERQANEVDWWDMVCNVKKLINEKKEDGKVFWQNLAGYKRQEALRPYLSSEEDRKKGKKFARYQLGDLLLHLEKKHGEDWGKVYDEAWERIDKKVEGLSKHIKLEEERRSEDAQSKAALTDWLRAKASFVIEGLKEADKDEFCRCELKLQKWYGDLRGKPFAIEAENSILDISGFSKQYNCAFIWQKDGVKKLNLYLIINYFKGGKLRFKKIKPEAFEANRFYTVINKKSGEIVPMEVNFNFDDPNLIILPLAFGKRQGREFIWNDLLSLETGSLKLANGRVIEKTLYNRRTRQDEPALFVALTFERREVLDSSNIKPMNLIGVDRGENIPAVIALTDPEGCPLSRFKDSLGNPTHILRIGESYKEKQRTIQAKKEVEQRRAGGYSRKYASKAKNLADDMVRNTARDLLYYAVTQDAMLIFENLSRGFGRQGKRTFMAERQYTRMEDWLTAKLAYEGLPSKVYLSKTLAQYTSKTCSNCGFTITSADYDRVLEKLKKTATGWMTTINGKELKVEGQITYYNRYKRQNVVKDLSVELDRLSEESVNNDISSWTKGRSGEALSLLKKRFSHRPVQEKFVCLNCGFETHADEQAALNIARSWLFLRSQEYKKYQTNKTSTGNTDKRAFVETWQSFYRKKLKEVWKPAV

SEQ ID NO: 38890 - protein, 979 aa, synthetic construct
  REGION 1..979: note = engineered CasX variant
QEIKRINKIRRRLVKDSNTKKAGKTGPMKTLLVRVMTPDLRERLENLRKKPENIPQPISNTSRANLNKLLTDYTEMKKAILHVYWEEFQKDPVGLMSRVAQPASKKIDQNKLKPEMDEKGNLTTAGFACSQCGQPLFVYKLEQVSEKGKAYTNYFGRCNVAEHEKLILLAQLKPEKDSDEAVTYSLGKFGQRALDFYSIHVTKESTHPVKPLAQIAGNRYASHPVGKALSDACMGTIASFLSKYQDIIIEHQKVVKGNQKRLESLRELAGKENLEYPSVTLPPQPHTKEGVDAYNEVIARVRMWVNLNLWQKLKLSRDDAKPLLRLKGFPSFPLVERQANEVDWWDMVCNVKKLINEKKEDGKVFWQNLAGYKRQEALRPYLSSEEDRKKGKKFARYQLGDLLLHLEKKHGEDWGKVYDEAWERIDKKVEGLSKHIKLEEERRSEDAQSKAALTDWLRAKASFVIEGLKEADKDEFCRCELKLQKWYGDLRGKPFAIEAENSILDISGFSKQYNCAFIWQKDGVKKLNLYLIINYFKGGKLRFKKIKPEAFEANRFYTVINKKSGEIVPMEVNFNFDDPNLIILPLAFGKRQGREFIWNDLLSLETGSLKLANGRVIEKTLYNRRTRQDEPALFVALTFERREVLDSSNIKPMNLIGVDRGENIPAVIALTDPEGCPLSRFKDSLGNPTHILRIGESYKEKQRTIQAKKEVEQRRAGGYSRKYASKAKNLADDMVRNTARDLLYYAVTQDAMLIFENLSRGFGRQGKRTFMAERQYTRMEDWLTAKLAYEGLPSKVYLSKTLAQYTSKTCSNCGFTITSADYDRVLEKLKKTATGWMTTINGKELKVEGQITYYNRYKRQNVVKDLSVELDRLSEESVNNDISSWTKGRSGEALSLLKKRFSHRPVQEKFVCLNCGFETHADEQAALNIARSWLFLRSQEYKKYQTNKTSTGNTDKRAFVETWQSFYRKKLKEVWKPAV

SEQ ID NO: 38891 - protein, 979 aa, synthetic construct
  REGION 1..979: note = engineered CasX variant
QEIKRINKIRRRLVKDSNTKKAGKTGPMKTLLVRVMTPDLRERLENLRKKPENIPQPISNTSRANLNKLLTDYTEMKKAILHVYWEEFQKDPVGLMSRVAQPASKKIDQNKLKPEMDEKGNLTTAGFACSQCGQPLFVYKLEQVSEKGKAYTNYFGRCNVAEHEKLILLAQLKPEKDSDEAVTYSLGKFGQRALDFYSIHVTKESTHPVKPLAQIAGNRYASSPVGKALSDACMGTIASFLSKYQDIIIEHQKVVKGNQKRLESLRELAGKENLEYPSVTLPPQPHTKEGVDAYNEVIARVRMWVNLNLWQKLKLSRDDAKPLLRLKGFPSFPLVERQANEVDWWDMVCNVKKLINEKKEDGKVFWQNLAGYKRQEALRPYLSSEEDRKKGKKFARYQLGDLLLHLEKKHGEDWGKVYDEAWERIDKKVEGLSKHIKLEEERRSEDAQSKAALTDWLRAKASFVIEGLKEADKDEFCRCELKLQKWYGDLRGKPFAIEAENSILDISGFSKQYNCAFIWQKDGVKKLNLYLIINYFKGGKLRFKKIKPEAFEANRFYTVINKKSGEIVPMEVNFNFDDPNLIILPLAFGKRQGREFIWNDLLSLETGSLKLANGRVIEKTLYNRRTRQDEPALFVALTFERREVLDSSNIKPMNLIGVDRGENIPAVIALTDPEGCPLSRFKDSLGNPTHILRIGESYKEKQRTIQAKKEVEQRRAGGYSRKYASKAKNLADDMVRNTARDLLYYAVTQDAMLIFENLSRGFGRQGKRTFMAERQYTRMEDWLTAKLAYEGLPSKVYLSKTLAQYTSKTCSNCGFTITSADYDRVLEKLKKTATGWMTTINGKELKVEGQITYYNRYKRQNVVKDLSVELDRLSEESVNNDISSWTKGRSGEALSLLKKRFSHRPVQEKFVCLNCGFETHADEQAALNIARSWLFLRSQEYKKYQTNKTSTGNTDKRAFVETWQSFYRKKLKEVWKPAV

SEQ ID NO: 38892 - protein, 979 aa, synthetic construct
  REGION 1..979: note = engineered CasX variant
QEIKRINKIRRRLVKDSNTKKAGKTGPMKTLLVRVMTPDLRERLENLRKKPENIPQPISNTSRANLNKLLTDYTEMKKAILHVYWEEFQKDPVGLMSRVAQPASKKIDQNKLKPEMDEKGNLTTAGFACSQCGQPLFVYKLEQVSEKGKAYTNYFGRCNVAEHEKLILLAQLKPEKDSDEAVTYSLGKFGQRALDFYSIHVTKESTHPVKPLAQIAGNRYASTPVGKALSDACMGTIASFLSKYQDIIIEHQKVVKGNQKRLESLRELAGKENLEYPSVTLPPQPHTKEGVDAYNEVIARVRMWVNLNLWQKLKLSRDDAKPLLRLKGFPSFPLVERQANEVDWWDMVCNVKKLINEKKEDGKVFWQNLAGYKRQEALRPYLSSEEDRKKGKKFARYQLGDLLLHLEKKHGEDWGKVYDEAWERIDKKVEGLSKHIKLEEERRSEDAQSKAALTDWLRAKASFVIEGLKEADKDEFCRCELKLQKWYGDLRGKPFAIEAENSILDISGFSKQYNCAFIWQKDGVKKLNLYLIINYFKGGKLRFKKIKPEAFEANRFYTVINKKSGEIVPMEVNFNFDDPNLIILPLAFGKRQGREFIWNDLLSLETGSLKLANGRVIEKTLYNRRTRQDEPALFVALTFERREVLDSSNIKPMNLIGVDRGENIPAVIALTDPEGCPLSRFKDSLGNPTHILRIGESYKEKQRTIQAKKEVEQRRAGGYSRKYASKAKNLADDMVRNTARDLLYYAVTQDAMLIFENLSRGFGRQGKRTFMAERQYTRMEDWLTAKLAYEGLPSKVYLSKTLAQYTSKTCSNCGFTITSADYDRVLEKLKKTATGWMTTINGKELKVEGQITYYNRYKRQNVVKDLSVELDRLSEESVNNDISSWTKGRSGEALSLLKKRFSHRPVQEKFVCLNCGFETHADEQAALNIARSWLFLRSQEYKKYQTNKTSTGNTDKRAFVETWQSFYRKKLKEVWKPAV

SEQ ID NO: 38893 - protein, 979 aa, synthetic construct
  REGION 1..979: note = engineered CasX variant
QEIKRINKIRRRLVKDSNTKKAGKTGPMKTLLVRVMTPDLRERLENLRKKPENIPQPISNTSRANLNKLLTDYTEMKKAILHVYWEEFQKDPVGLMSRVAQPASKKIDQNKLKPEMDEKGNLTTAGFACSQCGQPLFVYKLEQVSEKGKAYTNYFGRCNVAEHEKLILLAQLKPEKDSDEAVTYSLGKFGQRALDFYSIHVTKESTHPVKPLAQIAGNRYASAPVGKALSDACMGTIASFLSKYQDIIIEHQKVVKGNQKRLESLRELAGKENLEYPSVTLPPQPHTKEGVDAYNEVIARVRMWVNLNLWQKLKLSRDDAKPLLRLKGFPSFPLVERQANEVDWWDMVCNVKKLINEKKEDGKVFWQNLAGYKRQEALRPYLSSEEDRKKGKKFARYQLGDLLLHLEKKHGEDWGKVYDEAWERIDKKVEGLSKHIKLEEERRSEDAQSKAALTDWLRAKASFVIEGLKEADKDEFCRCELKLQKWYGDLRGKPFAIEAENSILDISGFSKQYNCAFIWQKDGVKKLNLYLIINYFKGGKLRFKKIKPEAFEANRFYTVINKKSGEIVPMEVNFNFDDPNLIILPLAFGKRQGREFIWNDLLSLETGSLKLANGRVIEKTLYNRRTRQDEPALFVALTFERREVLDSSNIKPMNLIGVDRGENIPAVIALTDPEGCPLSRFKDSLGNPTHILRIGESYKEKQRTIQAKKEVEQRRAGGYSRKYASKAKNLADDMVRNTARDLLYYAVTQDAMLIFENLSRGFGRQGKRTFMAERQYTRMEDWLTAKLAYEGLPSKVYLSKTLAQYTSKTCSNCGFTITSADYDRVLEKLKKTATGWMTTINGKELKVEGQITYYNRYKRQNVVKDLSVELDRLSEESVNNDISSWTKGRSGEALSLLKKRFSHRPVQEKFVCLNCGFETHADEQAALNIARSWLFLRSQEYKKYQTNKTSTGNTDKRAFVETWQSFYRKKLKEVWKPAV

SEQ ID NO: 38894 - protein, 979 aa, synthetic construct
  REGION 1..979: note = engineered CasX variant
QEIKRINKIRRRLVKDSNTKKAGKTGPMKTLLVRVMTPDLRERLENLRKKPENIPQPISNTSRANLNKLLTDYTEMKKAILHVYWEEFQKDPVGLMSRVAQPASKKIDQNKLKPEMDEKGNLTTAGFACSQCGQPLFVYKLEQVSEKGKAYTNYFGRCNVAEHEKLILLAQLKPEKDSDEAVTYSLGKFGQRALDFYSIHVTKESTHPVKPLAQIAGNRYASVPVGKALSDACMGTIASFLSKYQDIIIEHQKVVKGNQKRLESLRELAGKENLEYPSVTLPPQPHTKEGVDAYNEVIARVRMWVNLNLWQKLKLSRDDAKPLLRLKGFPSFPLVERQANEVDWWDMVCNVKKLINEKKEDGKVFWQNLAGYKRQEALRPYLSSEEDRKKGKKFARYQLGDLLLHLEKKHGEDWGKVYDEAWERIDKKVEGLSKHIKLEEERRSEDAQSKAALTDWLRAKASFVIEGLKEADKDEFCRCELKLQKWYGDLRGKPFAIEAENSILDISGFSKQYNCAFIWQKDGVKKLNLYLIINYFKGGKLRFKKIKPEAFEANRFYTVINKKSGEIVPMEVNFNFDDPNLIILPLAFGKRQGREFIWNDLLSLETGSLKLANGRVIEKTLYNRRTRQDEPALFVALTFERREVLDSSNIKPMNLIGVDRGENIPAVIALTDPEGCPLSRFKDSLGNPTHILRIGESYKEKQRTIQAKKEVEQRRAGGYSRKYASKAKNLADDMVRNTARDLLYYAVTQDAMLIFENLSRGFGRQGKRTFMAERQYTRMEDWLTAKLAYEGLPSKVYLSKTLAQYTSKTCSNCGFTITSADYDRVLEKLKKTATGWMTTINGKELKVEGQITYYNRYKRQNVVKDLSVELDRLSEESVNNDISSWTKGRSGEALSLLKKRFSHRPVQEKFVCLNCGFETHADEQAALNIARSWLFLRSQEYKKYQTNKTSTGNTDKRAFVETWQSFYRKKLKEVWKPAV

SEQ ID NO: 38895 - protein, 979 aa, synthetic construct
  REGION 1..979: note = engineered CasX variant
QEIKRINKIRRRLVKDSNTKKAGKTGPMKTLLVRVMTPDLRERLENLRKKPENIPQPISNTSRANLNKLLTDYTEMKKAILHVYWEEFQKDPVGLMSRVAQPASKKIDQNKLKPEMDEKGNLTTAGFACSQCGQPLFVYKLEQVSEKGKAYTNYFGRCNVAEHEKLIKLAQLKPEKDSDEAVTYSLGKFGQRALDFYSIHVTKESTHPVKPLAQIAGNRYASGPVGKALSDACMGTIASFLSKYQDIIIEHQKVVKGNQKRLESLRELAGKENLEYPSVTLPPQPHTKEGVDAYNEVIARVRMWVNLNLWQKLKLSRDDAKPLLRLKGFPSFPLVERQANEVDWWDMVCNVKKLINEKKEDGKVFWQNLAGYKRQEALRPYLSSEEDRKKGKKFARYQLGDLLLHLEKKHGEDWGKVYDEAWERIDKKVEGLSKHIKLEEERRSEDAQSKAALTDWLRAKASFVIEGLKEADKDEFCRCELKLQKWYGDLRGKPFAIEAENSILDISGFSKQYNCAFIWQKDGVKKLNLYLIINYFKGGKLRFKKIKPEAFEANRFYTVINKKSGEIVPMEVNFNFDDPNLIILPLAFGKRQGREFIWNDLLSLETGSLKLANGRVIEKTLYNRRTRQDEPALFVALTFERREVLDSSNIKPMNLIGVDRGENIPAVIALTDPEGCPLSRFKDSLGNPTHILRIGESYKEKQRTIQAKKEVEQRRAGGYSRKYASKAKNLADDMVRNTARDLLYYAVTQDAMLIFENLSRGFGRQGKRTFMAERQYTRMEDWLTAKLAYEGLPSKVYLSKTLAQYTSKTCSNCGFTITSADYDRVLEKLKKTATGWMTTINGKELKVEGQITYYNRYKRQNVVKDLSVELDRLSEESVNNDISSWTKGRSGEALSLLKKRFSHRPVQEKFVCLNCGFETHADEQAALNIARSWLFLRSQEYKKYQTNKTSTGNTDKRAFVETWQSFYRKKLKEVWKPAV

SEQ ID NO: 38896 - protein, 978 aa, synthetic construct
  REGION 1..978: note = engineered CasX variant
QEIKRINKIRRRLVKDSNTKKAGKTGPMKTLLVRVMTPDLRERLENLRKKPENIPQPISNTSRANLNKLLTDYTEMKKAILHVYWEEFQKDPVGLMSRVAQPASKKIDQNKLKPEMDEKGNLTTAGFACSQCGQPLFVYKLEQVSEKGKAYTNYFGRCNVAEHEKLILLAQLKPEKDSDEAVTYSLGKFGQRALDFYSIHVTKESTHPVKPLAQIAGNRYASPVGKALSDACMGTIASFLSKYQDIIIEHQKVVKGNQKRLESLRELAGKENLEYPSVTLPPQPHTKEGVDAYNEVIARVRMWVNLNLWQKLKLSRDDAKPLLRLKGFPSFPLVERQANEVDWWDMVCNVKKLINEKKEDGKVFWQNLAGYKRQEALRPYLSSEEDRKKGKKFARYQLGDLLLHLEKKHGEDWGKVYDEAWERIDKKVEGLSKHIKLEEERRSEDAQSKAALTDWLRAKASFVIEGLKEADKDEFCRCELKLQKWYGDLRGKPFAIEAENSILDISGFSKQYNCAFIWQKDGVKKLNLYLIINYFKGGKLRFKKIKPEAFEANRFYTVINKKSGEIVPMEVNFNFDDPNLIILPLAFGKRQGREFIWNDLLSLETGSLKLANGRVIEKTLYNRRTRQDEPALFVALTFERREVLDSSNIKPMNLIGVDRGENIPAVIALTDPEGCPLSRFKDSLGNPTHILRIGESYKEKQRTIQAKKEVEQRRAGGYSRKYASKAKNLADDMVRNTARDLLYYAVTQDAMLIFENLSRGFGRQGKRTFMAERQYTRMEDWLTAKLAYEGLPSKVYLSKTLAQYTSKTCSNCGFTITSADYDRVLEKLKKTATGWMTTINGKELKVEGQITYYNRYKRQNVVKDLSVELDRLSEESVNNDISSWTKGRSGEALSLLKKRFSHRPVQEKFVCLNCGFETHADEQAALNIARSWLFLRSQEYKKYQTNKTSTGNTDKRAFVETWQSFYRKKLKEVWKPAV

SEQ ID NO: 38897 - protein, 979 aa, synthetic construct
  REGION 1..979: note = engineered CasX variant
QEIKRINKIRRRLVKDSNTKKAGKTGPMKTLLVRVMTPDLRERLENLRKKPENIPQPISNTSRANLNKLLTDYTEMKKAILHVYWEEFQKDPVGLMSRVAQPASKKIDQNKLKPEMDEKGNLTTAGFACSQCGQPLFVYKLEQVSEKGKAYTNYFGRCNVAEHEKLILLAQLKPEKDSDEAVTYSLGKFGQRALDFYSIHVTKESTHPVKPLAQIAGNRYASYPVGKALSDACMGTIASFLSKYQDIIIEHQKVVKGNQKRLESLRELAGKENLEYPSVTLPPQPHTKEGVDAYNEVIARVRMWVNLNLWQKLKLSRDDAKPLLRLKGFPSFPLVERQANEVDWWDMVCNVKKLINEKKEDGKVFWQNLAGYKRQEALRPYLSSEEDRKKGKKFARYQLGDLLLHLEKKHGEDWGKVYDEAWERIDKKVEGLSKHIKLEEERRSEDAQSKAALTDWLRAKASFVIEGLKEADKDEFCRCELKLQKWYGDLRGKPFAIEAENSILDISGFSKQYNCAFIWQKDGVKKLNLYLIINYFKGGKLRFKKIKPEAFEANRFYTVINKKSGEIVPMEVNFNFDDPNLIILPLAFGKRQGREFIWNDLLSLETGSLKLANGRVIEKTLYNRRTRQDEPALFVALTFERREVLDSSNIKPMNLIGVDRGENIPAVIALTDPEGCPLSRFKDSLGNPTHILRIGESYKEKQRTIQAKKEVEQRRAGGYSRKYASKAKNLADDMVRNTARDLLYYAVTQDAMLIFENLSRGFGRQGKRTFMAERQYTRMEDWLTAKLAYEGLPSKVYLSKTLAQYTSKTCSNCGFTITSADYDRVLEKLKKTATGWMTTINGKELKVEGQITYYNRYKRQNVVKDLSVELDRLSEESVNNDISSWTKGRSGEALSLLKKRFSHRPVQEKFVCLNCGFETHADEQAALNIARSWLFLRSQEYKKYQTNKTTGKNTDKRAFVETWQSFYRKKLKEVWKPAV

SEQ ID NO: 38898 - protein, 979 aa, synthetic construct
  REGION 1..979: note = engineered CasX variant
QEIKRINKIRRRLVKDSNTKKAGKTGPMKTLLVRVMTPDLRERLENLRKKPENIPQPISNTSRANLNKLLTDYTEMKKAILHVYWEEFQKDPVGLMSRVAQPASKKIDQNKLKPEMDEKGNLTTAGFACSQCGQPLFVYKLEQVSEKGKAYTNYFGRCNVAEHEKLILLAQLKPEKDSDEAVTYSLGKFGQRALDFYSIHVTKESTHPVKPLAQIAGNRYASHPVGKALSDACMGTIASFLSKYQDIIIEHQKVVKGNQKRLESLRELAGKENLEYPSVTLPPQPHTKEGVDAYNEVIARVRMWVNLNLWQKLKLSRDDAKPLLRLKGFPSFPLVERQANEVDWWDMVCNVKKLINEKKEDGKVFWQNLAGYKRQEALRPYLSSEEDRKKGKKFARYQLGDLLLHLEKKHGEDWGKVYDEAWERIDKKVEGLSKHIKLEEERRSEDAQSKAALTDWLRAKASFVIEGLKEADKDEFCRCELKLQKWYGDLRGKPFAIEAENSILDISGFSKQYNCAFIWQKDGVKKLNLYLIINYFKGGKLRFKKIKPEAFEANRFYTVINKKSGEIVPMEVNFNFDDPNLIILPLAFGKRQGREFIWNDLLSLETGSLKLANGRVIEKTLYNRRTRQDEPALFVALTFERREVLDSSNIKPMNLIGVDRGENIPAVIALTDPEGCPLSRFKDSLGNPTHILRIGESYKEKQRTIQAKKEVEQRRAGGYSRKYASKAKNLADDMVRNTARDLLYYAVTQDAMLIFENLSRGFGRQGKRTFMAERQYTRMEDWLTAKLAYEGLPSKVYLSKTLAQYTSKTCSNCGFTITSADYDRVLEKLKKTATGWMTTINGKELKVEGQITYYNRYKRQNVVKDLSVELDRLSEESVNNDISSWTKGRSGEALSLLKKRFSHRPVQEKFVCLNCGFETHADEQAALNIARSWLFLRSQEYKKYQTNKTTGKNTDKRAFVETWQSFYRKKLKEVWKPAV

SEQ ID NO: 38899 - protein, 979 aa, synthetic construct
  REGION 1..979: note = engineered CasX variant
QEIKRINKIRRRLVKDSNTKKAGKTGPMKTLLVRVMTPDLRERLENLRKKPENIPQPISNTSRANLNKLLTDYTEMKKAILHVYWEEFQKDPVGLMSRVAQPASKKIDQNKLKPEMDEKGNLTTAGFACSQCGQPLFVYKLEQVSEKGKAYTNYFGRCNVAEHEKLILLAQLKPEKDSDEAVTYSLGKFGQRALDFYSIHVTKESTHPVKPLAQIAGNRYASSPVGKALSDACMGTIASFLSKYQDIIIEHQKVVKGNQKRLESLRELAGKENLEYPSVTLPPQPHTKEGVDAYNEVIARVRMWVNLNLWQKLKLSRDDAKPLLRLKGFPSFPLVERQANEVDWWDMVCNVKKLINEKKEDGKVFWQNLAGYKRQEALRPYLSSEEDRKKGKKFARYQLGDLLLHLEKKHGEDWGKVYDEAWERIDKKVEGLSKHIKLEEERRSEDAQSKAALTDWLRAKASFVIEGLKEADKDEFCRCELKLQKWYGDLRGKPFAIEAENSILDISGFSKQYNCAFIWQKDGVKKLNLYLIINYFKGGKLRFKKIKPEAFEANRFYTVINKKSGEIVPMEVNFNFDDPNLIILPLAFGKRQGREFIWNDLLSLETGSLKLANGRVIEKTLYNRRTRQDEPALFVALTFERREVLDSSNIKPMNLIGVDRGENIPAVIALTDPEGCPLSRFKDSLGNPTHILRIGESYKEKQRTIQAKKEVEQRRAGGYSRKYASKAKNLADDMVRNTARDLLYYAVTQDAMLIFENLSRGFGRQGKRTFMAERQYTRMEDWLTAKLAYEGLPSKVYLSKTLAQYTSKTCSNCGFTITSADYDRVLEKLKKTATGWMTTINGKELKVEGQITYYNRYKRQNVVKDLSVELDRLSEESVNNDISSWTKGRSGEALSLLKKRFSHRPVQEKFVCLNCGFETHADEQAALNIARSWLFLRSQEYKKYQTNKTTGKNTDKRAFVETWQSFYRKKLKEVWKPAV

SEQ ID NO: 38900 - protein, 979 aa, synthetic construct
  REGION 1..979: note = engineered CasX variant
QEIKRINKIRRRLVKDSNTKKAGKTGPMKTLLVRVMTPDLRERLENLRKKPENIPQPISNTSRANLNKLLTDYTEMKKAILHVYWEEFQKDPVGLMSRVAQPASKKIDQNKLKPEMDEKGNLTTAGFACSQCGQPLFVYKLEQVSEKGKAYTNYFGRCNVAEHEKLILLAQLKPEKDSDEAVTYSLGKFGQRALDFYSIHVTKESTHPVKPLAQIAGNRYASTPVGKALSDACMGTIASFLSKYQDIIIEHQKVVKGNQKRLESLRELAGKENLEYPSVTLPPQPHTKEGVDAYNEVIARVRMWVNLNLWQKLKLSRDDAKPLLRLKGFPSFPLVERQANEVDWWDMVCNVKKLINEKKEDGKVFWQNLAGYKRQEALRPYLSSEEDRKKGKKFARYQLGDLLLHLEKKHGEDWGKVYDEAWERIDKKVEGLSKHIKLEEERRSEDAQSKAALTDWLRAKASFVIEGLKEADKDEFCRCELKLQKWYGDLRGKPFAIEAENSILDISGFSKQYNCAFIWQKDGVKKLNLYLIINYFKGGKLRFKKIKPEAFEANRFYTVINKKSGEIVPMEVNFNFDDPNLIILPLAFGKRQGREFIWNDLLSLETGSLKLANGRVIEKTLYNRRTRQDEPALFVALTFERREVLDSSNIKPMNLIGVDRGENIPAVIALTDPEGCPLSRFKDSLGNPTHILRIGESYKEKQRTIQAKKEVEQRRAGGYSRKYASKAKNLADDMVRNTARDLLYYAVTQDAMLIFENLSRGFGRQGKRTFMAERQYTRMEDWLTAKLAYEGLPSKVYLSKTLAQYTSKTCSNCGFTITSADYDRVLEKLKKTATGWMTTINGKELKVEGQITYYNRYKRQNVVKDLSVELDRLSEESVNNDISSWTKGRSGEALSLLKKRFSHRPVQEKFVCLNCGFETHADEQAALNIARSWLFLRSQEYKKYQTNKTTGKNTDKRAFVETWQSFYRKKLKEVWKPAV

SEQ ID NO: 38901 - protein, 979 aa, synthetic construct
  REGION 1..979: note = engineered CasX variant
QEIKRINKIRRRLVKDSNTKKAGKTGPMKTLLVRVMTPDLRERLENLRKKPENIPQPISNTSRANLNKLLTDYTEMKKAILHVYWEEFQKDPVGLMSRVAQPASKKIDQNKLKPEMDEKGNLTTAGFACSQCGQPLFVYKLEQVSEKGKAYTNYFGRCNVAEHEKLILLAQLKPEKDSDEAVTYSLGKFGQRALDFYSIHVTKESTHPVKPLAQIAGNRYASAPVGKALSDACMGTIASFLSKYQDIIIEHQKVVKGNQKRLESLRELAGKENLEYPSVTLPPQPHTKEGVDAYNEVIARVRMWVNLNLWQKLKLSRDDAKPLLRLKGFPSFPLVERQANEVDWWDMVCNVKKLINEKKEDGKVFWQNLAGYKRQEALRPYLSSEEDRKKGKKFARYQLGDLLLHLEKKHGEDWGKVYDEAWERIDKKVEGLSKHIKLEEERRSEDAQSKAALTDWLRAKASFVIEGLKEADKDEFCRCELKLQKWYGDLRGKPFAIEAENSILDISGFSKQYNCAFIWQKDGVKKLNLYLIINYFKGGKLRFKKIKPEAFEANRFYTVINKKSGEIVPMEVNFNFDDPNLIILPLAFGKRQGREFIWNDLLSLETGSLKLANGRVIEKTLYNRRTRQDEPALFVALTFERREVLDSSNIKPMNLIGVDRGENIPAVIALTDPEGCPLSRFKDSLGNPTHILRIGESYKEKQRTIQAKKEVEQRRAGGYSRKYASKAKNLADDMVRNTARDLLYYAVTQDAMLIFENLSRGFGRQGKRTFMAERQYTRMEDWLTAKLAYEGLPSKVYLSKTLAQYTSKTCSNCGFTITSADYDRVLEKLKKTATGWMTTINGKELKVEGQITYYNRYKRQNVVKDLSVELDRLSEESVNNDISSWTKGRSGEALSLLKKRFSHRPVQEKFVCLNCGFETHADEQAALNIARSWLFLRSQEYKKYQTNKTTGKNTDKRAFVETWQSFYRKKLKEVWKPAV

SEQ ID NO: 38902 - protein, 979 aa, synthetic construct
  REGION 1..979: note = engineered CasX variant
QEIKRINKIRRRLVKDSNTKKAGKTGPMKTLLVRVMTPDLRERLENLRKKPENIPQPISNTSRANLNKLLTDYTEMKKAILHVYWEEFQKDPVGLMSRVAQPASKKIDQNKLKPEMDEKGNLTTAGFACSQCGQPLFVYKLEQVSEKGKAYTNYFGRCNVAEHEKLILLAQLKPEKDSDEAVTYSLGKFGQRALDFYSIHVTKESTHPVKPLAQIAGNRYASVPVGKALSDACMGTIASFLSKYQDIIIEHQKVVKGNQKRLESLRELAGKENLEYPSVTLPPQPHTKEGVDAYNEVIARVRMWVNLNLWQKLKLSRDDAKPLLRLKGFPSFPLVERQANEVDWWDMVCNVKKLINEKKEDGKVFWQNLAGYKRQEALRPYLSSEEDRKKGKKFARYQLGDLLLHLEKKHGEDWGKVYDEAWERIDKKVEGLSKHIKLEEERRSEDAQSKAALTDWLRAKASFVIEGLKEADKDEFCRCELKLQKWYGDLRGKPFAIEAENSILDISGFSKQYNCAFIWQKDGVKKLNLYLIINYFKGGKLRFKKIKPEAFEANRFYTVINKKSGEIVPMEVNFNFDDPNLIILPLAFGKRQGREFIWNDLLSLETGSLKLANGRVIEKTLYNRRTRQDEPALFVALTFERREVLDSSNIKPMNLIGVDRGENIPAVIALTDPEGCPLSRFKDSLGNPTHILRIGESYKEKQRTIQAKKEVEQRRAGGYSRKYASKAKNLADDMVRNTARDLLYYAVTQDAMLIFENLSRGFGRQGKRTFMAERQYTRMEDWLTAKLAYEGLPSKVYLSKTLAQYTSKTCSNCGFTITSADYDRVLEKLKKTATGWMTTINGKELKVEGQITYYNRYKRQNVVKDLSVELDRLSEESVNNDISSWTKGRSGEALSLLKKRFSHRPVQEKFVCLNCGFETHADEQAALNIARSWLFLRSQEYKKYQTNKTTGKNTDKRAFVETWQSFYRKKLKEVWKPAV

SEQ ID NO: 38903 - protein, 979 aa, synthetic construct
  REGION 1..979: note = engineered CasX variant
QEIKRINKIRRRLVKDSNTKKAGKTGPMKTLLVRVMTPDLRERLENLRKKPENIPQPISNTSRANLNKLLTDYTEMKKAILHVYWEEFQKDPVGLMSRVAQPASKKIDQNKLKPEMDEKGNLTTAGFACSQCGQPLFVYKLEQVSEKGKAYTNYFGRCNVAEHEKLIKLAQLKPEKDSDEAVTYSLGKFGQRALDFYSIHVTKESTHPVKPLAQIAGNRYASGPVGKALSDACMGTIASFLSKYQDIIIEHQKVVKGNQKRLESLRELAGKENLEYPSVTLPPQPHTKEGVDAYNEVIARVRMWVNLNLWQKLKLSRDDAKPLLRLKGFPSFPLVERQANEVDWWDMVCNVKKLINEKKEDGKVFWQNLAGYKRQEALRPYLSSEEDRKKGKKFARYQLGDLLLHLEKKHGEDWGKVYDEAWERIDKKVEGLSKHIKLEEERRSEDAQSKAALTDWLRAKASFVIEGLKEADKDEFCRCELKLQKWYGDLRGKPFAIEAENSILDISGFSKQYNCAFIWQKDGVKKLNLYLIINYFKGGKLRFKKIKPEAFEANRFYTVINKKSGEIVPMEVNFNFDDPNLIILPLAFGKRQGREFIWNDLLSLETGSLKLANGRVIEKTLYNRRTRQDEPALFVALTFERREVLDSSNIKPMNLIGVDRGENIPAVIALTDPEGCPLSRFKDSLGNPTHILRIGESYKEKQRTIQAKKEVEQRRAGGYSRKYASKAKNLADDMVRNTARDLLYYAVTQDAMLIFENLSRGFGRQGKRTFMAERQYTRMEDWLTAKLAYEGLPSKVYLSKTLAQYTSKTCSNCGFTITSADYDRVLEKLKKTATGWMTTINGKELKVEGQITYYNRYKRQNVVKDLSVELDRLSEESVNNDISSWTKGRSGEALSLLKKRFSHRPVQEKFVCLNCGFETHADEQAALNIARSWLFLRSQEYKKYQTNKTTGKNTDKRAFVETWQSFYRKKLKEVWKPAV

SEQ ID NO: 38904 - protein, 978 aa, synthetic construct
  REGION 1..978: note = engineered CasX variant
QEIKRINKIRRRLVKDSNTKKAGKTGPMKTLLVRVMTPDLRERLENLRKKPENIPQPISNTSRANLNKLLTDYTEMKKAILHVYWEEFQKDPVGLMSRVAQPASKKIDQNKLKPEMDEKGNLTTAGFACSQCGQPLFVYKLEQVSEKGKAYTNYFGRCNVAEHEKLILLAQLKPEKDSDEAVTYSLGKFGQRALDFYSIHVTKESTHPVKPLAQIAGNRYASPVGKALSDACMGTIASFLSKYQDIIIEHQKVVKGNQKRLESLRELAGKENLEYPSVTLPPQPHTKEGVDAYNEVIARVRMWVNLNLWQKLKLSRDDAKPLLRLKGFPSFPLVERQANEVDWWDMVCNVKKLINEKKEDGKVFWQNLAGYKRQEALRPYLSSEEDRKKGKKFARYQLGDLLLHLEKKHGEDWGKVYDEAWERIDKKVEGLSKHIKLEEERRSEDAQSKAALTDWLRAKASFVIEGLKEADKDEFCRCELKLQKWYGDLRGKPFAIEAENSILDISGFSKQYNCAFIWQKDGVKKLNLYLIINYFKGGKLRFKKIKPEAFEANRFYTVINKKSGEIVPMEVNFNFDDPNLIILPLAFGKRQGREFIWNDLLSLETGSLKLANGRVIEKTLYNRRTRQDEPALFVALTFERREVLDSSNIKPMNLIGVDRGENIPAVIALTDPEGCPLSRFKDSLGNPTHILRIGESYKEKQRTIQAKKEVEQRRAGGYSRKYASKAKNLADDMVRNTARDLLYYAVTQDAMLIFENLSRGFGRQGKRTFMAERQYTRMEDWLTAKLAYEGLPSKVYLSKTLAQYTSKTCSNCGFTITSADYDRVLEKLKKTATGWMTTINGKELKVEGQITYYNRYKRQNVVKDLSVELDRLSEESVNNDISSWTKGRSGEALSLLKKRFSHRPVQEKFVCLNCGFETHADEQAALNIARSWLFLRSQEYKKYQTNKTTGKNTDKRAFVETWQSFYRKKLKEVWKPAV

SEQ ID NO: 38905 - protein, 978 aa, synthetic construct
  REGION 1..978: note = engineered CasX variant
QEIKRINKIRRRLVKDSNTKKAGKTGPMKTLLVRVMTPDLRERLENLRKKPENIPQPISNTSRANLNKLLTDYTEMKKAILHVYWEEFQKDPVGLMSRVAQPASKKIDQNKLKPEMDEKGNLTTAGFACSQCGQPLFVYKLEQVSEKGKAYTNYFGRCNVAEHEKLILLAQLKPEKDSDEAVTYSLGKFGQRALDFYSIHVTKESTHPVKPLAQIAGNRYASYPVGKALSDACMGTIASFLSKYQDIIIEHQKVVKGNQKRLESLRELAGKENLEYPSVTLPPQPHTKEGVDAYNEVIARVRMWVNLNLWQKLKLSRDDAKPLLRLKKFPSFPLVERQANEVDWWDMVCNVKKLINEKKEDGKVFWQNLAGYKRQEALRPYLSSEEDRKKGKKFARYQLGDLLLHLEKKHGEDWGKVYDEAWERIDKKVEGLSKHIKLEEERRSEDAQSKAALTDWLRAKASFVIEGLKEADKDEFCRCELKLQKWYGDLRGKPFAIEAENSILDISGFSKQYNCAFIWQKDGVKKLNLYLIINYFKGGKLRFKKIKPEAFEANRFYTVINKKSGEIVPMEVNFNFDDPNLIILPLAFGKRQGREFIWNDLLSLETGSLKLANGRVIEKTLYNRRTRQDEPALFVALTFERREVLDSSNIKPMNLIGVDRGENIPAVIALTDPEGCPLSRFKDSLGNPTHILRIGESYKEKQRTIQAKKEVEQRRAGGYSRKYASKAKNLADDMVRNTARDLLYYAVTQDAMLIFENLSRGFGRQGKRTFMAERQYTRMEDWLTAKLAYEGLPSKVYLSKTLAQYTSKTCSNCGFTITSADYDRVLEKLKKTATGWMTTINGKELKVEGQITYYNRYKRQNVVKDLSVELDRLSEESVNNDISSWTKGRSGEALSLLKKRFSHRPVQEKFVCLNCGFETHADEQAALNIARSWLFLRSQEYKKYQTNKTTGNTDKRAFVETWQSFYRKKLKEVWKPAV

SEQ ID NO: 38906 - protein, 978 aa, synthetic construct
  REGION 1..978: note = engineered CasX variant
QEIKRINKIRRRLVKDSNTKKAGKTGPMKTLLVRVMTPDLRERLENLRKKPENIPQPISNTSRANLNKLLTDYTEMKKAILHVYWEEFQKDPVGLMSRVAQPASKKIDQNKLKPEMDEKGNLTTAGFACSQCGQPLFVYKLEQVSEKGKAYTNYFGRCNVAEHEKLILLAQLKPEKDSDEAVTYSLGKFGQRALDFYSIHVTKESTHPVKPLAQIAGNRYASHPVGKALSDACMGTIASFLSKYQDIIIEHQKVVKGNQKRLESLRELAGKENLEYPSVTLPPQPHTKEGVDAYNEVIARVRMWVNLNLWQKLKLSRDDAKPLLRLKKFPSFPLVERQANEVDWWDMVCNVKKLINEKKEDGKVFWQNLAGYKRQEALRPYLSSEEDRKKGKKFARYQLGDLLLHLEKKHGEDWGKVYDEAWERIDKKVEGLSKHIKLEEERRSEDAQSKAALTDWLRAKASFVIEGLKEADKDEFCRCELKLQKWYGDLRGKPFAIEAENSILDISGFSKQYNCAFIWQKDGVKKLNLYLIINYFKGGKLRFKKIKPEAFEANRFYTVINKKSGEIVPMEVNFNFDDPNLIILPLAFGKRQGREFIWNDLLSLETGSLKLANGRVIEKTLYNRRTRQDEPALFVALTFERREVLDSSNIKPMNLIGVDRGENIPAVIALTDPEGCPLSRFKDSLGNPTHILRIGESYKEKQRTIQAKKEVEQRRAGGYSRKYASKAKNLADDMVRNTARDLLYYAVTQDAMLIFENLSRGFGRQGKRTFMAERQYTRMEDWLTAKLAYEGLPSKVYLSKTLAQYTSKTCSNCGFTITSADYDRVLEKLKKTATGWMTTINGKELKVEGQITYYNRYKRQNVVKDLSVELDRLSEESVNNDISSWTKGRSGEALSLLKKRFSHRPVQEKFVCLNCGFETHADEQAALNIARSWLFLRSQEYKKYQTNKTTGNTDKRAFVETWQSFYRKKLKEVWKPAV

SEQ ID NO: 38907 - protein, 978 aa, synthetic construct
  REGION 1..978: note = engineered CasX variant
QEIKRINKIRRRLVKDSNTKKAGKTGPMKTLLVRVMTPDLRERLENLRKKPENIPQPISNTSRANLNKLLTDYTEMKKAILHVYWEEFQKDPVGLMSRVAQPASKKIDQNKLKPEMDEKGNLTTAGFACSQCGQPLFVYKLEQVSEKGKAYTNYFGRCNVAEHEKLILLAQLKPEKDSDEAVTYSLGKFGQRALDFYSIHVTKESTHPVKPLAQIAGNRYASSPVGKALSDACMGTIASFLSKYQDIIIEHQKVVKGNQKRLESLRELAGKENLEYPSVTLPPQPHTKEGVDAYNEVIARVRMWVNLNLWQKLKLSRDDAKPLLRLKKFPSFPLVERQANEVDWWDMVCNVKKLINEKKEDGKVFWQNLAGYKRQEALRPYLSSEEDRKKGKKFARYQLGDLLLHLEKKHGEDWGKVYDEAWERIDKKVEGLSKHIKLEEERRSEDAQSKAALTDWLRAKASFVIEGLKEADKDEFCRCELKLQKWYGDLRGKPFAIEAENSILDISGFSKQYNCAFIWQKDGVKKLNLYLIINYFKGGKLRFKKIKPEAFEANRFYTVINKKSGEIVPMEVNFNFDDPNLIILPLAFGKRQGREFIWNDLLSLETGSLKLANGRVIEKTLYNRRTRQDEPALFVALTFERREVLDSSNIKPMNLIGVDRGENIPAVIALTDPEGCPLSRFKDSLGNPTHILRIGESYKEKQRTIQAKKEVEQRRAGGYSRKYASKAKNLADDMVRNTARDLLYYAVTQDAMLIFENLSRGFGRQGKRTFMAERQYTRMEDWLTAKLAYEGLPSKVYLSKTLAQYTSKTCSNCGFTITSADYDRVLEKLKKTATGWMTTINGKELKVEGQITYYNRYKRQNVVKDLSVELDRLSEESVNNDISSWTKGRSGEALSLLKKRFSHRPVQEKFVCLNCGFETHADEQAALNIARSWLFLRSQEYKKYQTNKTTGNTDKRAFVETWQSFYRKKLKEVWKPAV

SEQ ID NO: 38908 - protein, 978 aa, synthetic construct
  REGION 1..978: note = engineered CasX variant
QEIKRINKIRRRLVKDSNTKKAGKTGPMKTLLVRVMTPDLRERLENLRKKPENIPQPISNTSRANLNKLLTDYTEMKKAILHVYWEEFQKDPVGLMSRVAQPASKKIDQNKLKPEMDEKGNLTTAGFACSQCGQPLFVYKLEQVSEKGKAYTNYFGRCNVAEHEKLILLAQLKPEKDSDEAVTYSLGKFGQRALDFYSIHVTKESTHPVKPLAQIAGNRYASTPVGKALSDACMGTIASFLSKYQDIIIEHQKVVKGNQKRLESLRELAGKENLEYPSVTLPPQPHTKEGVDAYNEVIARVRMWVNLNLWQKLKLSRDDAKPLLRLKKFPSFPLVERQANEVDWWDMVCNVKKLINEKKEDGKVFWQNLAGYKRQEALRPYLSSEEDRKKGKKFARYQLGDLLLHLEKKHGEDWGKVYDEAWERIDKKVEGLSKHIKLEEERRSEDAQSKAALTDWLRAKASFVIEGLKEADKDEFCRCELKLQKWYGDLRGKPFAIEAENSILDISGFSKQYNCAFIWQKDGVKKLNLYLIINYFKGGKLRFKKIKPEAFEANRFYTVINKKSGEIVPMEVNFNFDDPNLIILPLAFGKRQGREFIWNDLLSLETGSLKLANGRVIEKTLYNRRTRQDEPALFVALTFERREVLDSSNIKPMNLIGVDRGENIPAVIALTDPEGCPLSRFKDSLGNPTHILRIGESYKEKQRTIQAKKEVEQRRAGGYSRKYASKAKNLADDMVRNTARDLLYYAVTQDAMLIFENLSRGFGRQGKRTFMAERQYTRMEDWLTAKLAYEGLPSKVYLSKTLAQYTSKTCSNCGFTITSADYDRVLEKLKKTATGWMTTINGKELKVEGQITYYNRYKRQNVVKDLSVELDRLSEESVNNDISSWTKGRSGEALSLLKKRFSHRPVQEKFVCLNCGFETHADEQAALNIARSWLFLRSQEYKKYQTNKTTGNTDKRAFVETWQSFYRKKLKEVWKPAV

SEQ ID NO: 38909 - protein, 978 aa, synthetic construct
  REGION 1..978: note = engineered CasX variant
QEIKRINKIRRRLVKDSNTKKAGKTGPMKTLLVRVMTPDLRERLENLRKKPENIPQPISNTSRANLNKLLTDYTEMKKAILHVYWEEFQKDPVGLMSRVAQPASKKIDQNKLKPEMDEKGNLTTAGFACSQCGQPLFVYKLEQVSEKGKAYTNYFGRCNVAEHEKLILLAQLKPEKDSDEAVTYSLGKFGQRALDFYSIHVTKESTHPVKPLAQIAGNRYASAPVGKALSDACMGTIASFLSKYQDIIIEHQKVVKGNQKRLESLRELAGKENLEYPSVTLPPQPHTKEGVDAYNEVIARVRMWVNLNLWQKLKLSRDDAKPLLRLKKFPSFPLVERQANEVDWWDMVCNVKKLINEKKEDGKVFWQNLAGYKRQEALRPYLSSEEDRKKGKKFARYQLGDLLLHLEKKHGEDWGKVYDEAWERIDKKVEGLSKHIKLEEERRSEDAQSKAALTDWLRAKASFVIEGLKEADKDEFCRCELKLQKWYGDLRGKPFAIEAENSILDISGFSKQYNCAFIWQKDGVKKLNLYLIINYFKGGKLRFKKIKPEAFEANRFYTVINKKSGEIVPMEVNFNFDDPNLIILPLAFGKRQGREFIWNDLLSLETGSLKLANGRVIEKTLYNRRTRQDEPALFVALTFERREVLDSSNIKPMNLIGVDRGENIPAVIALTDPEGCPLSRFKDSLGNPTHILRIGESYKEKQRTIQAKKEVEQRRAGGYSRKYASKAKNLADDMVRNTARDLLYYAVTQDAMLIFENLSRGFGRQGKRTFMAERQYTRMEDWLTAKLAYEGLPSKVYLSKTLAQYTSKTCSNCGFTITSADYDRVLEKLKKTATGWMTTINGKELKVEGQITYYNRYKRQNVVKDLSVELDRLSEESVNNDISSWTKGRSGEALSLLKKRFSHRPVQEKFVCLNCGFETHADEQAALNIARSWLFLRSQEYKKYQTNKTTGNTDKRAFVETWQSFYRKKLKEVWKPAV

SEQ ID NO: 38910 - protein, 978 aa, synthetic construct
  REGION 1..978: note = engineered CasX variant
QEIKRINKIRRRLVKDSNTKKAGKTGPMKTLLVRVMTPDLRERLENLRKKPENIPQPISNTSRANLNKLLTDYTEMKKAILHVYWEEFQKDPVGLMSRVAQPASKKIDQNKLKPEMDEKGNLTTAGFACSQCGQPLFVYKLEQVSEKGKAYTNYFGRCNVAEHEKLILLAQLKPEKDSDEAVTYSLGKFGQRALDFYSIHVTKESTHPVKPLAQIAGNRYASVPVGKALSDACMGTIASFLSKYQDIIIEHQKVVKGNQKRLESLRELAGKENLEYPSVTLPPQPHTKEGVDAYNEVIARVRMWVNLNLWQKLKLSRDDAKPLLRLKKFPSFPLVERQANEVDWWDMVCNVKKLINEKKEDGKVFWQNLAGYKRQEALRPYLSSEEDRKKGKKFARYQLGDLLLHLEKKHGEDWGKVYDEAWERIDKKVEGLSKHIKLEEERRSEDAQSKAALTDWLRAKASFVIEGLKEADKDEFCRCELKLQKWYGDLRGKPFAIEAENSILDISGFSKQYNCAFIWQKDGVKKLNLYLIINYFKGGKLRFKKIKPEAFEANRFYTVINKKSGEIVPMEVNFNFDDPNLIILPLAFGKRQGREFIWNDLLSLETGSLKLANGRVIEKTLYNRRTRQDEPALFVALTFERREVLDSSNIKPMNLIGVDRGENIPAVIALTDPEGCPLSRFKDSLGNPTHILRIGESYKEKQRTIQAKKEVEQRRAGGYSRKYASKAKNLADDMVRNTARDLLYYAVTQDAMLIFENLSRGFGRQGKRTFMAERQYTRMEDWLTAKLAYEGLPSKVYLSKTLAQYTSKTCSNCGFTITSADYDRVLEKLKKTATGWMTTINGKELKVEGQITYYNRYKRQNVVKDLSVELDRLSEESVNNDISSWTKGRSGEALSLLKKRFSHRPVQEKFVCLNCGFETHADEQAALNIARSWLFLRSQEYKKYQTNKTTGNTDKRAFVETWQSFYRKKLKEVWKPAV

SEQ ID NO: 38911 - protein, 978 aa, synthetic construct
  REGION 1..978: note = engineered CasX variant
QEIKRINKIRRRLVKDSNTKKAGKTGPMKTLLVRVMTPDLRERLENLRKKPENIPQPISNTSRANLNKLLTDYTEMKKAILHVYWEEFQKDPVGLMSRVAQPASKKIDQNKLKPEMDEKGNLTTAGFACSQCGQPLFVYKLEQVSEKGKAYTNYFGRCNVAEHEKLIKLAQLKPEKDSDEAVTYSLGKFGQRALDFYSIHVTKESTHPVKPLAQIAGNRYASGPVGKALSDACMGTIASFLSKYQDIIIEHQKVVKGNQKRLESLRELAGKENLEYPSVTLPPQPHTKEGVDAYNEVIARVRMWVNLNLWQKLKLSRDDAKPLLRLKKFPSFPLVERQANEVDWWDMVCNVKKLINEKKEDGKVFWQNLAGYKRQEALRPYLSSEEDRKKGKKFARYQLGDLLLHLEKKHGEDWGKVYDEAWERIDKKVEGLSKHIKLEEERRSEDAQSKAALTDWLRAKASFVIEGLKEADKDEFCRCELKLQKWYGDLRGKPFAIEAENSILDISGFSKQYNCAFIWQKDGVKKLNLYLIINYFKGGKLRFKKIKPEAFEANRFYTVINKKSGEIVPMEVNFNFDDPNLIILPLAFGKRQGREFIWNDLLSLETGSLKLANGRVIEKTLYNRRTRQDEPALFVALTFERREVLDSSNIKPMNLIGVDRGENIPAVIALTDPEGCPLSRFKDSLGNPTHILRIGESYKEKQRTIQAKKEVEQRRAGGYSRKYASKAKNLADDMVRNTARDLLYYAVTQDAMLIFENLSRGFGRQGKRTFMAERQYTRMEDWLTAKLAYEGLPSKVYLSKTLAQYTSKTCSNCGFTITSADYDRVLEKLKKTATGWMTTINGKELKVEGQITYYNRYKRQNVVKDLSVELDRLSEESVNNDISSWTKGRSGEALSLLKKRFSHRPVQEKFVCLNCGFETHADEQAALNIARSWLFLRSQEYKKYQTNKTTGNTDKRAFVETWQSFYRKKLKEVWKPAV

SEQ ID NO: 38912 - protein, 977 aa, synthetic construct
  REGION 1..977: note = engineered CasX variant
QEIKRINKIRRRLVKDSNTKKAGKTGPMKTLLVRVMTPDLRERLENLRKKPENIPQPISNTSRANLNKLLTDYTEMKKAILHVYWEEFQKDPVGLMSRVAQPASKKIDQNKLKPEMDEKGNLTTAGFACSQCGQPLFVYKLEQVSEKGKAYTNYFGRCNVAEHEKLILLAQLKPEKDSDEAVTYSLGKFGQRALDFYSIHVTKESTHPVKPLAQIAGNRYASPVGKALSDACMGTIASFLSKYQDIIIEHQKVVKGNQKRLESLRELAGKENLEYPSVTLPPQPHTKEGVDAYNEVIARVRMWVNLNLWQKLKLSRDDAKPLLRLKKFPSFPLVERQANEVDWWDMVCNVKKLINEKKEDGKVFWQNLAGYKRQEALRPYLSSEEDRKKGKKFARYQLGDLLLHLEKKHGEDWGKVYDEAWERIDKKVEGLSKHIKLEEERRSEDAQSKAALTDWLRAKASFVIEGLKEADKDEFCRCELKLQKWYGDLRGKPFAIEAENSILDISGFSKQYNCAFIWQKDGVKKLNLYLIINYFKGGKLRFKKIKPEAFEANRFYTVINKKSGEIVPMEVNFNFDDPNLIILPLAFGKRQGREFIWNDLLSLETGSLKLANGRVIEKTLYNRRTRQDEPALFVALTFERREVLDSSNIKPMNLIGVDRGENIPAVIALTDPEGCPLSRFKDSLGNPTHILRIGESYKEKQRTIQAKKEVEQRRAGGYSRKYASKAKNLADDMVRNTARDLLYYAVTQDAMLIFENLSRGFGRQGKRTFMAERQYTRMEDWLTAKLAYEGLPSKVYLSKTLAQYTSKTCSNCGFTITSADYDRVLEKLKKTATGWMTTINGKELKVEGQITYYNRYKRQNVVKDLSVELDRLSEESVNNDISSWTKGRSGEALSLLKKRFSHRPVQEKFVCLNCGFETHADEQAALNIARSWLFLRSQEYKKYQTNKTTGNTDKRAFVETWQSFYRKKLKEVWKPAV

SEQ ID NO: 38913 - protein, 978 aa, synthetic construct
  REGION 1..978: note = engineered CasX variant
QEIKRINKIRRRLVKDSNTKKAGKTGPMKTLLVRVMTPDLRERLENLRKKPENIPQPISNTSRANLNKLLTDYTEMKKAILHVYWEEFQKDPVGLMSRVAQPASKKIDQNKLKPEMDEKGNLTTAGFACSQCGQPLFVYKLEQVSEKGKAYTNYFGRCNVAEHEKLILLAQLKPEKDSDEAVTYSLGKFGQRALDFYSIHVTKESTHPVKPLAQIAGNRYASYPVGKALSDACMGTIASFLSKYQDIIIEHQKVVKGNQKRLESLRELAGKENLEYPSVTLPPQPHTKEGVDAYNEVIARVRMWVNLNLWQKLKLSRDDAKPLLRLKGFPSFPLVERQANEVDWWDMVCNVKKLINEKKEDGKVFWQNLAGYKRQEALRPYLSSEEDRKKGKKFARYQLGDLLLHLEKKHGEDWGKVYDEAWERIDKKVEGLSKHIKLEEERRSEDAQSKAALTDWLRAKASFVIEGLKEADKDEFCRCELKLQKWYGDLRGKPFAIEAENSILDISGFSKQYNCAFIWQKDGVKKLNLYLIINYFKGGKLRFKKIKPEAFEANRFYTVINKKSGEIVPMEVNFNFDDPNLIILPLAFGKRQGREFIWNDLLSLETGSLKLANGRVIEKTLYNRRTRQDEPALFVALTFERREVLDSSNIKPMNLIGVDRGENIPAVIALTDPEGCPLSRFKDSLGNPTHILRIGERYKEKQRTIQAKKEVEQRRAGGYSRKYASKAKNLADDMVRNTARDLLYYAVTQDAMLIFENLSRGFGRQGKRTFMAERQYTRMEDWLTAKLAYEGLPSKVYLSKTLAQYTSKTCSNCGFTITSADYDRVLEKLKKTATGWMTTINGKELKVEGQITYYNRYKRQNVVKDLSVELDRLSEESVNNDISSWTKGRSGEALSLLKKRFSHRPVQEKFVCLNCGFETHADEQAALNIARSWLFLRSQEYKKYQTNKTTGNTDKRAFVETWQSFYRKKLKEVWKPAV

SEQ ID NO: 38914 - protein, 978 aa, synthetic construct
  REGION 1..978: note = engineered CasX variant
QEIKRINKIRRRLVKDSNTKKAGKTGPMKTLLVRVMTPDLRERLENLRKKPENIPQPISNTSRANLNKLLTDYTEMKKAILHVYWEEFQKDPVGLMSRVAQPASKKIDQNKLKPEMDEKGNLTTAGFACSQCGQPLFVYKLEQVSEKGKAYTNYFGRCNVAEHEKLILLAQLKPEKDSDEAVTYSLGKFGQRALDFYSIHVTKESTHPVKPLAQIAGNRYASHPVGKALSDACMGTIASFLSKYQDIIIEHQKVVKGNQKRLESLRELAGKENLEYPSVTLPPQPHTKEGVDAYNEVIARVRMWVNLNLWQKLKLSRDDAKPLLRLKGFPSFPLVERQANEVDWWDMVCNVKKLINEKKEDGKVFWQNLAGYKRQEALRPYLSSEEDRKKGKKFARYQLGDLLLHLEKKHGEDWGKVYDEAWERIDKKVEGLSKHIKLEEERRSEDAQSKAALTDWLRAKASFVIEGLKEADKDEFCRCELKLQKWYGDLRGKPFAIEAENSILDISGFSKQYNCAFIWQKDGVKKLNLYLIINYFKGGKLRFKKIKPEAFEANRFYTVINKKSGEIVPMEVNFNFDDPNLIILPLAFGKRQGREFIWNDLLSLETGSLKLANGRVIEKTLYNRRTRQDEPALFVALTFERREVLDSSNIKPMNLIGVDRGENIPAVIALTDPEGCPLSRFKDSLGNPTHILRIGERYKEKQRTIQAKKEVEQRRAGGYSRKYASKAKNLADDMVRNTARDLLYYAVTQDAMLIFENLSRGFGRQGKRTFMAERQYTRMEDWLTAKLAYEGLPSKVYLSKTLAQYTSKTCSNCGFTITSADYDRVLEKLKKTATGWMTTINGKELKVEGQITYYNRYKRQNVVKDLSVELDRLSEESVNNDISSWTKGRSGEALSLLKKRFSHRPVQEKFVCLNCGFETHADEQAALNIARSWLFLRSQEYKKYQTNKTTGNTDKRAFVETWQSFYRKKLKEVWKPAV

SEQ ID NO: 38915 - protein, 978 aa, synthetic construct
  REGION 1..978: note = engineered CasX variant
QEIKRINKIRRRLVKDSNTKKAGKTGPMKTLLVRVMTPDLRERLENLRKKPENIPQPISNTSRANLNKLLTDYTEMKKAILHVYWEEFQKDPVGLMSRVAQPASKKIDQNKLKPEMDEKGNLTTAGFACSQCGQPLFVYKLEQVSEKGKAYTNYFGRCNVAEHEKLILLAQLKPEKDSDEAVTYSLGKFGQRALDFYSIHVTKESTHPVKPLAQIAGNRYASSPVGKALSDACMGTIASFLSKYQDIIIEHQKVVKGNQKRLESLRELAGKENLEYPSVTLPPQPHTKEGVDAYNEVIARVRMWVNLNLWQKLKLSRDDAKPLLRLKGFPSFPLVERQANEVDWWDMVCNVKKLINEKKEDGKVFWQNLAGYKRQEALRPYLSSEEDRKKGKKFARYQLGDLLLHLEKKHGEDWGKVYDEAWERIDKKVEGLSKHIKLEEERRSEDAQSKAALTDWLRAKASFVIEGLKEADKDEFCRCELKLQKWYGDLRGKPFAIEAENSILDISGFSKQYNCAFIWQKDGVKKLNLYLIINYFKGGKLRFKKIKPEAFEANRFYTVINKKSGEIVPMEVNFNFDDPNLIILPLAFGKRQGREFIWNDLLSLETGSLKLANGRVIEKTLYNRRTRQDEPALFVALTFERREVLDSSNIKPMNLIGVDRGENIPAVIALTDPEGCPLSRFKDSLGNPTHILRIGERYKEKQRTIQAKKEVEQRRAGGYSRKYASKAKNLADDMVRNTARDLLYYAVTQDAMLIFENLSRGFGRQGKRTFMAERQYTRMEDWLTAKLAYEGLPSKVYLSKTLAQYTSKTCSNCGFTITSADYDRVLEKLKKTATGWMTTINGKELKVEGQITYYNRYKRQNVVKDLSVELDRLSEESVNNDISSWTKGRSGEALSLLKKRFSHRPVQEKFVCLNCGFETHADEQAALNIARSWLFLRSQEYKKYQTNKTTGNTDKRAFVETWQSFYRKKLKEVWKPAV

SEQ ID NO: 38916 - protein, 978 aa, synthetic construct
  REGION 1..978: note = engineered CasX variant
QEIKRINKIRRRLVKDSNTKKAGKTGPMKTLLVRVMTPDLRERLENLRKKPENIPQPISNTSRANLNKLLTDYTEMKKAILHVYWEEFQKDPVGLMSRVAQPASKKIDQNKLKPEMDEKGNLTTAGFACSQCGQPLFVYKLEQVSEKGKAYTNYFGRCNVAEHEKLILLAQLKPEKDSDEAVTYSLGKFGQRALDFYSIHVTKESTHPVKPLAQIAGNRYASTPVGKALSDACMGTIASFLSKYQDIIIEHQKVVKGNQKRLESLRELAGKENLEYPSVTLPPQPHTKEGVDAYNEVIARVRMWVNLNLWQKLKLSRDDAKPLLRLKGFPSFPLVERQANEVDWWDMVCNVKKLINEKKEDGKVFWQNLAGYKRQEALRPYLSSEEDRKKGKKFARYQLGDLLLHLEKKHGEDWGKVYDEAWERIDKKVEGLSKHIKLEEERRSEDAQSKAALTDWLRAKASFVIEGLKEADKDEFCRCELKLQKWYGDLRGKPFAIEAENSILDISGFSKQYNCAFIWQKDGVKKLNLYLIINYFKGGKLRFKKIKPEAFEANRFYTVINKKSGEIVPMEVNFNFDDPNLIILPLAFGKRQGREFIWNDLLSLETGSLKLANGRVIEKTLYNRRTRQDEPALFVALTFERREVLDSSNIKPMNLIGVDRGENIPAVIALTDPEGCPLSRFKDSLGNPTHILRIGERYKEKQRTIQAKKEVEQRRAGGYSRKYASKAKNLADDMVRNTARDLLYYAVTQDAMLIFENLSRGFGRQGKRTFMAERQYTRMEDWLTAKLAYEGLPSKVYLSKTLAQYTSKTCSNCGFTITSADYDRVLEKLKKTATGWMTTINGKELKVEGQITYYNRYKRQNVVKDLSVELDRLSEESVNNDISSWTKGRSGEALSLLKKRFSHRPVQEKFVCLNCGFETHADEQAALNIARSWLFLRSQEYKKYQTNKTTGNTDKRAFVETWQSFYRKKLKEVWKPAV

SEQ ID NO: 38917 - protein, 978 aa, synthetic construct
  REGION 1..978: note = engineered CasX variant
QEIKRINKIRRRLVKDSNTKKAGKTGPMKTLLVRVMTPDLRERLENLRKKPENIPQPISNTSRANLNKLLTDYTEMKKAILHVYWEEFQKDPVGLMSRVAQPASKKIDQNKLKPEMDEKGNLTTAGFACSQCGQPLFVYKLEQVSEKGKAYTNYFGRCNVAEHEKLILLAQLKPEKDSDEAVTYSLGKFGQRALDFYSIHVTKESTHPVKPLAQIAGNRYASAPVGKALSDACMGTIASFLSKYQDIIIEHQKVVKGNQKRLESLRELAGKENLEYPSVTLPPQPHTKEGVDAYNEVIARVRMWVNLNLWQKLKLSRDDAKPLLRLKGFPSFPLVERQANEVDWWDMVCNVKKLINEKKEDGKVFWQNLAGYKRQEALRPYLSSEEDRKKGKKFARYQLGDLLLHLEKKHGEDWGKVYDEAWERIDKKVEGLSKHIKLEEERRSEDAQSKAALTDWLRAKASFVIEGLKEADKDEFCRCELKLQKWYGDLRGKPFAIEAENSILDISGFSKQYNCAFIWQKDGVKKLNLYLIINYFKGGKLRFKKIKPEAFEANRFYTVINKKSGEIVPMEVNFNFDDPNLIILPLAFGKRQGREFIWNDLLSLETGSLKLANGRVIEKTLYNRRTRQDEPALFVALTFERREVLDSSNIKPMNLIGVDRGENIPAVIALTDPEGCPLSRFKDSLGNPTHILRIGERYKEKQRTIQAKKEVEQRRAGGYSRKYASKAKNLADDMVRNTARDLLYYAVTQDAMLIFENLSRGFGRQGKRTFMAERQYTRMEDWLTAKLAYEGLPSKVYLSKTLAQYTSKTCSNCGFTITSADYDRVLEKLKKTATGWMTTINGKELKVEGQITYYNRYKRQNVVKDLSVELDRLSEESVNNDISSWTKGRSGEALSLLKKRFSHRPVQEKFVCLNCGFETHADEQAALNIARSWLFLRSQEYKKYQTNKTTGNTDKRAFVETWQSFYRKKLKEVWKPAV

SEQ ID NO: 38918 - protein, 978 aa, synthetic construct
  REGION 1..978: note = engineered CasX variant
QEIKRINKIRRRLVKDSNTKKAGKTGPMKTLLVRVMTPDLRERLENLRKKPENIPQPISNTSRANLNKLLTDYTEMKKAILHVYWEEFQKDPVGLMSRVAQPASKKIDQNKLKPEMDEKGNLTTAGFACSQCGQPLFVYKLEQVSEKGKAYTNYFGRCNVAEHEKLILLAQLKPEKDSDEAVTYSLGKFGQRALDFYSIHVTKESTHPVKPLAQIAGNRYASVPVGKALSDACMGTIASFLSKYQDIIIEHQKVVKGNQKRLESLRELAGKENLEYPSVTLPPQPHTKEGVDAYNEVIARVRMWVNLNLWQKLKLSRDDAKPLLRLKGFPSFPLVERQANEVDWWDMVCNVKKLINEKKEDGKVFWQNLAGYKRQEALRPYLSSEEDRKKGKKFARYQLGDLLLHLEKKHGEDWGKVYDEAWERIDKKVEGLSKHIKLEEERRSEDAQSKAALTDWLRAKASFVIEGLKEADKDEFCRCELKLQKWYGDLRGKPFAIEAENSILDISGFSKQYNCAFIWQKDGVKKLNLYLIINYFKGGKLRFKKIKPEAFEANRFYTVINKKSGEIVPMEVNFNFDDPNLIILPLAFGKRQGREFIWNDLLSLETGSLKLANGRVIEKTLYNRRTRQDEPALFVALTFERREVLDSSNIKPMNLIGVDRGENIPAVIALTDPEGCPLSRFKDSLGNPTHILRIGERYKEKQRTIQAKKEVEQRRAGGYSRKYASKAKNLADDMVRNTARDLLYYAVTQDAMLIFENLSRGFGRQGKRTFMAERQYTRMEDWLTAKLAYEGLPSKVYLSKTLAQYTSKTCSNCGFTITSADYDRVLEKLKKTATGWMTTINGKELKVEGQITYYNRYKRQNVVKDLSVELDRLSEESVNNDISSWTKGRSGEALSLLKKRFSHRPVQEKFVCLNCGFETHADEQAALNIARSWLFLRSQEYKKYQTNKTTGNTDKRAFVETWQSFYRKKLKEVWKPAV

SEQ ID NO: 38919 - protein, 978 aa, synthetic construct
  REGION 1..978: note = engineered CasX variant
QEIKRINKIRRRLVKDSNTKKAGKTGPMKTLLVRVMTPDLRERLENLRKKPENIPQPISNTSRANLNKLLTDYTEMKKAILHVYWEEFQKDPVGLMSRVAQPASKKIDQNKLKPEMDEKGNLTTAGFACSQCGQPLFVYKLEQVSEKGKAYTNYFGRCNVAEHEKLIKLAQLKPEKDSDEAVTYSLGKFGQRALDFYSIHVTKESTHPVKPLAQIAGNRYASGPVGKALSDACMGTIASFLSKYQDIIIEHQKVVKGNQKRLESLRELAGKENLEYPSVTLPPQPHTKEGVDAYNEVIARVRMWVNLNLWQKLKLSRDDAKPLLRLKGFPSFPLVERQANEVDWWDMVCNVKKLINEKKEDGKVFWQNLAGYKRQEALRPYLSSEEDRKKGKKFARYQLGDLLLHLEKKHGEDWGKVYDEAWERIDKKVEGLSKHIKLEEERRSEDAQSKAALTDWLRAKASFVIEGLKEADKDEFCRCELKLQKWYGDLRGKPFAIEAENSILDISGFSKQYNCAFIWQKDGVKKLNLYLIINYFKGGKLRFKKIKPEAFEANRFYTVINKKSGEIVPMEVNFNFDDPNLIILPLAFGKRQGREFIWNDLLSLETGSLKLANGRVIEKTLYNRRTRQDEPALFVALTFERREVLDSSNIKPMNLIGVDRGENIPAVIALTDPEGCPLSRFKDSLGNPTHILRIGERYKEKQRTIQAKKEVEQRRAGGYSRKYASKAKNLADDMVRNTARDLLYYAVTQDAMLIFENLSRGFGRQGKRTFMAERQYTRMEDWLTAKLAYEGLPSKVYLSKTLAQYTSKTCSNCGFTITSADYDRVLEKLKKTATGWMTTINGKELKVEGQITYYNRYKRQNVVKDLSVELDRLSEESVNNDISSWTKGRSGEALSLLKKRFSHRPVQEKFVCLNCGFETHADEQAALNIARSWLFLRSQEYKKYQTNKTTGNTDKRAFVETWQSFYRKKLKEVWKPAV

SEQ ID NO: 38920 - protein, 977 aa, synthetic construct
  REGION 1..977: note = engineered CasX variant
QEIKRINKIRRRLVKDSNTKKAGKTGPMKTLLVRVMTPDLRERLENLRKKPENIPQPISNTSRANLNKLLTDYTEMKKAILHVYWEEFQKDPVGLMSRVAQPASKKIDQNKLKPEMDEKGNLTTAGFACSQCGQPLFVYKLEQVSEKGKAYTNYFGRCNVAEHEKLILLAQLKPEKDSDEAVTYSLGKFGQRALDFYSIHVTKESTHPVKPLAQIAGNRYASPVGKALSDACMGTIASFLSKYQDIIIEHQKVVKGNQKRLESLRELAGKENLEYPSVTLPPQPHTKEGVDAYNEVIARVRMWVNLNLWQKLKLSRDDAKPLLRLKGFPSFPLVERQANEVDWWDMVCNVKKLINEKKEDGKVFWQNLAGYKRQEALRPYLSSEEDRKKGKKFARYQLGDLLLHLEKKHGEDWGKVYDEAWERIDKKVEGLSKHIKLEEERRSEDAQSKAALTDWLRAKASFVIEGLKEADKDEFCRCELKLQKWYGDLRGKPFAIEAENSILDISGFSKQYNCAFIWQKDGVKKLNLYLIINYFKGGKLRFKKIKPEAFEANRFYTVINKKSGEIVPMEVNFNFDDPNLIILPLAFGKRQGREFIWNDLLSLETGSLKLANGRVIEKTLYNRRTRQDEPALFVALTFERREVLDSSNIKPMNLIGVDRGENIPAVIALTDPEGCPLSRFKDSLGNPTHILRIGERYKEKQRTIQAKKEVEQRRAGGYSRKYASKAKNLADDMVRNTARDLLYYAVTQDAMLIFENLSRGFGRQGKRTFMAERQYTRMEDWLTAKLAYEGLPSKVYLSKTLAQYTSKTCSNCGFTITSADYDRVLEKLKKTATGWMTTINGKELKVEGQITYYNRYKRQNVVKDLSVELDRLSEESVNNDISSWTKGRSGEALSLLKKRFSHRPVQEKFVCLNCGFETHADEQAALNIARSWLFLRSQEYKKYQTNKTTGNTDKRAFVETWQSFYRKKLKEVWKPAV

SEQ ID NO: 38921 - protein, 978 aa, synthetic construct
  REGION 1..978: note = engineered CasX variant
QEIKRINKIRRRLVKDSNTKKAGKTGPMKTLLVRVMTPDLRERLENLRKKPENIPQPISNTSRANLNKLLTDYTEMKKAILHVYWEEFQKDPVGLMSRVAQPASKKIDQNKLKPEMDEKGNLTTAGFACSQCGQPLFVYKLEQVSEKGKAYTNYFGRCNVAEHEKLILLAQLKPEKDSDEAVTYSLGKFGQRALDFYSIHVTKESTHPVKPLAQIAGNRYASYPVGKALSDACMGTIASFLSKYQDIIIEHQKVVKGNQKRLESLRELAGKENLEYPSVTLPPQPHTKEGVDAYNEVIARVRMWVNLNLWQKLKLSRDDAKPLLRLKGFPSFPLVERQANEVDWWDMVCNVKKLINEKKEDGKVFWQNLAGYKRQEALRPYLSSEEDRKKGKKFARYQLGDLLLHLEKKHGEDWGKVYDEAWERIDKKVEGLSKHIKLEEERRSEDAQSKAALTDWLRAKASFVIEGLKEADKDEFCRCELKLQKWYGDLRGKPFAIEAENSILDISGFSKQYNCAFIWQKDGVKKLNLYLIINYFKGGKLRFKKIKPEAFEANRFYTVINKKSGEIVPMEVNFNFDDPNLIILPLAFGKRQGREFIWNDLLSLETGSLQLANGRVIEKTLYNRRTRQDEPALFVALTFERREVLDSSNIKPMNLIGVDRGENIPAVIALTDPEGCPLSRFKDSLGNPTHILRIGESYKEKQRTIQAKKEVEQRRAGGYSRKYASKAKNLADDMVRNTARDLLYYAVTQDAMLIFENLSRGFGRQGKRTFMAERQYTRMEDWLTAKLAYEGLPSKVYLSKTLAQYTSKTCSNCGFTITSADYDRVLEKLKKTATGWMTTINGKELKVEGQITYYNRYKRQNVVKDLSVELDRLSEESVNNDISSWTKGRSGEALSLLKKRFSHRPVQEKFVCLNCGFETHADEQAALNIARSWLFLRSQEYKKYQTNKTTGNTDKRAFVETWQSFYRKKLKEVWKPAV

SEQ ID NO: 38922 - protein, 978 aa, synthetic construct
  REGION 1..978: note = engineered CasX variant
QEIKRINKIRRRLVKDSNTKKAGKTGPMKTLLVRVMTPDLRERLENLRKKPENIPQPISNTSRANLNKLLTDYTEMKKAILHVYWEEFQKDPVGLMSRVAQPASKKIDQNKLKPEMDEKGNLTTAGFACSQCGQPLFVYKLEQVSEKGKAYTNYFGRCNVAEHEKLILLAQLKPEKDSDEAVTYSLGKFGQRALDFYSIHVTKESTHPVKPLAQIAGNRYASHPVGKALSDACMGTIASFLSKYQDIIIEHQKVVKGNQKRLESLRELAGKENLEYPSVTLPPQPHTKEGVDAYNEVIARVRMWVNLNLWQKLKLSRDDAKPLLRLKGFPSFPLVERQANEVDWWDMVCNVKKLINEKKEDGKVFWQNLAGYKRQEALRPYLSSEEDRKKGKKFARYQLGDLLLHLEKKHGEDWGKVYDEAWERIDKKVEGLSKHIKLEEERRSEDAQSKAALTDWLRAKASFVIEGLKEADKDEFCRCELKLQKWYGDLRGKPFAIEAENSILDISGFSKQYNCAFIWQKDGVKKLNLYLIINYFKGGKLRFKKIKPEAFEANRFYTVINKKSGEIVPMEVNFNFDDPNLIILPLAFGKRQGREFIWNDLLSLETGSLQLANGRVIEKTLYNRRTRQDEPALFVALTFERREVLDSSNIKPMNLIGVDRGENIPAVIALTDPEGCPLSRFKDSLGNPTHILRIGESYKEKQRTIQAKKEVEQRRAGGYSRKYASKAKNLADDMVRNTARDLLYYAVTQDAMLIFENLSRGFGRQGKRTFMAERQYTRMEDWLTAKLAYEGLPSKVYLSKTLAQYTSKTCSNCGFTITSADYDRVLEKLKKTATGWMTTINGKELKVEGQITYYNRYKRQNVVKDLSVELDRLSEESVNNDISSWTKGRSGEALSLLKKRFSHRPVQEKFVCLNCGFETHADEQAALNIARSWLFLRSQEYKKYQTNKTTGNTDKRAFVETWQSFYRKKLKEVWKPAV

SEQ ID NO: 38923 - protein, 978 aa, synthetic construct
  REGION 1..978: note = engineered CasX variant
QEIKRINKIRRRLVKDSNTKKAGKTGPMKTLLVRVMTPDLRERLENLRKKPENIPQPISNTSRANLNKLLTDYTEMKKAILHVYWEEFQKDPVGLMSRVAQPASKKIDQNKLKPEMDEKGNLTTAGFACSQCGQPLFVYKLEQVSEKGKAYTNYFGRCNVAEHEKLILLAQLKPEKDSDEAVTYSLGKFGQRALDFYSIHVTKESTHPVKPLAQIAGNRYASSPVGKALSDACMGTIASFLSKYQDIIIEHQKVVKGNQKRLESLRELAGKENLEYPSVTLPPQPHTKEGVDAYNEVIARVRMWVNLNLWQKLKLSRDDAKPLLRLKGFPSFPLVERQANEVDWWDMVCNVKKLINEKKEDGKVFWQNLAGYKRQEALRPYLSSEEDRKKGKKFARYQLGDLLLHLEKKHGEDWGKVYDEAWERIDKKVEGLSKHIKLEEERRSEDAQSKAALTDWLRAKASFVIEGLKEADKDEFCRCELKLQKWYGDLRGKPFAIEAENSILDISGFSKQYNCAFIWQKDGVKKLNLYLIINYFKGGKLRFKKIKPEAFEANRFYTVINKKSGEIVPMEVNFNFDDPNLIILPLAFGKRQGREFIWNDLLSLETGSLQLANGRVIEKTLYNRRTRQDEPALFVALTFERREVLDSSNIKPMNLIGVDRGENIPAVIALTDPEGCPLSRFKDSLGNPTHILRIGESYKEKQRTIQAKKEVEQRRAGGYSRKYASKAKNLADDMVRNTARDLLYYAVTQDAMLIFENLSRGFGRQGKRTFMAERQYTRMEDWLTAKLAYEGLPSKVYLSKTLAQYTSKTCSNCGFTITSADYDRVLEKLKKTATGWMTTINGKELKVEGQITYYNRYKRQNVVKDLSVELDRLSEESVNNDISSWTKGRSGEALSLLKKRFSHRPVQEKFVCLNCGFETHADEQAALNIARSWLFLRSQEYKKYQTNKTTGNTDKRAFVETWQSFYRKKLKEVWKPAV

SEQ ID NO: 38924 - protein, 978 aa, synthetic construct
  REGION 1..978: note = engineered CasX variant
QEIKRINKIRRRLVKDSNTKKAGKTGPMKTLLVRVMTPDLRERLENLRKKPENIPQPISNTSRANLNKLLTDYTEMKKAILHVYWEEFQKDPVGLMSRVAQPASKKIDQNKLKPEMDEKGNLTTAGFACSQCGQPLFVYKLEQVSEKGKAYTNYFGRCNVAEHEKLILLAQLKPEKDSDEAVTYSLGKFGQRALDFYSIHVTKESTHPVKPLAQIAGNRYASTPVGKALSDACMGTIASFLSKYQDIIIEHQKVVKGNQKRLESLRELAGKENLEYPSVTLPPQPHTKEGVDAYNEVIARVRMWVNLNLWQKLKLSRDDAKPLLRLKGFPSFPLVERQANEVDWWDMVCNVKKLINEKKEDGKVFWQNLAGYKRQEALRPYLSSEEDRKKGKKFARYQLGDLLLHLEKKHGEDWGKVYDEAWERIDKKVEGLSKHIKLEEERRSEDAQSKAALTDWLRAKASFVIEGLKEADKDEFCRCELKLQKWYGDLRGKPFAIEAENSILDISGFSKQYNCAFIWQKDGVKKLNLYLIINYFKGGKLRFKKIKPEAFEANRFYTVINKKSGEIVPMEVNFNFDDPNLIILPLAFGKRQGREFIWNDLLSLETGSLQLANGRVIEKTLYNRRTRQDEPALFVALTFERREVLDSSNIKPMNLIGVDRGENIPAVIALTDPEGCPLSRFKDSLGNPTHILRIGESYKEKQRTIQAKKEVEQRRAGGYSRKYASKAKNLADDMVRNTARDLLYYAVTQDAMLIFENLSRGFGRQGKRTFMAERQYTRMEDWLTAKLAYEGLPSKVYLSKTLAQYTSKTCSNCGFTITSADYDRVLEKLKKTATGWMTTINGKELKVEGQITYYNRYKRQNVVKDLSVELDRLSEESVNNDISSWTKGRSGEALSLLKKRFSHRPVQEKFVCLNCGFETHADEQAALNIARSWLFLRSQEYKKYQTNKTTGNTDKRAFVETWQSFYRKKLKEVWKPAV

SEQ ID NO: 38925 - protein, 978 aa, synthetic construct
  REGION 1..978: note = engineered CasX variant
QEIKRINKIRRRLVKDSNTKKAGKTGPMKTLLVRVMTPDLRERLENLRKKPENIPQPISNTSRANLNKLLTDYTEMKKAILHVYWEEFQKDPVGLMSRVAQPASKKIDQNKLKPEMDEKGNLTTAGFACSQCGQPLFVYKLEQVSEKGKAYTNYFGRCNVAEHEKLILLAQLKPEKDSDEAVTYSLGKFGQRALDFYSIHVTKESTHPVKPLAQIAGNRYASAPVGKALSDACMGTIASFLSKYQDIIIEHQKVVKGNQKRLESLRELAGKENLEYPSVTLPPQPHTKEGVDAYNEVIARVRMWVNLNLWQKLKLSRDDAKPLLRLKGFPSFPLVERQANEVDWWDMVCNVKKLINEKKEDGKVFWQNLAGYKRQEALRPYLSSEEDRKKGKKFARYQLGDLLLHLEKKHGEDWGKVYDEAWERIDKKVEGLSKHIKLEEERRSEDAQSKAALTDWLRAKASFVIEGLKEADKDEFCRCELKLQKWYGDLRGKPFAIEAENSILDISGFSKQYNCAFIWQKDGVKKLNLYLIINYFKGGKLRFKKIKPEAFEANRFYTVINKKSGEIVPMEVNFNFDDPNLIILPLAFGKRQGREFIWNDLLSLETGSLQLANGRVIEKTLYNRRTRQDEPALFVALTFERREVLDSSNIKPMNLIGVDRGENIPAVIALTDPEGCPLSRFKDSLGNPTHILRIGESYKEKQRTIQAKKEVEQRRAGGYSRKYASKAKNLADDMVRNTARDLLYYAVTQDAMLIFENLSRGFGRQGKRTFMAERQYTRMEDWLTAKLAYEGLPSKVYLSKTLAQYTSKTCSNCGFTITSADYDRVLEKLKKTATGWMTTINGKELKVEGQITYYNRYKRQNVVKDLSVELDRLSEESVNNDISSWTKGRSGEALSLLKKRFSHRPVQEKFVCLNCGFETHADEQAALNIARSWLFLRSQEYKKYQTNKTTGNTDKRAFVETWQSFYRKKLKEVWKPAV

SEQ ID NO: 38926 - protein, 978 aa, synthetic construct
  REGION 1..978: note = engineered CasX variant
QEIKRINKIRRRLVKDSNTKKAGKTGPMKTLLVRVMTPDLRERLENLRKKPENIPQPISNTSRANLNKLLTDYTEMKKAILHVYWEEFQKDPVGLMSRVAQPASKKIDQNKLKPEMDEKGNLTTAGFACSQCGQPLFVYKLEQVSEKGKAYTNYFGRCNVAEHEKLILLAQLKPEKDSDEAVTYSLGKFGQRALDFYSIHVTKESTHPVKPLAQIAGNRYASVPVGKALSDACMGTIASFLSKYQDIIIEHQKVVKGNQKRLESLRELAGKENLEYPSVTLPPQPHTKEGVDAYNEVIARVRMWVNLNLWQKLKLSRDDAKPLLRLKGFPSFPLVERQANEVDWWDMVCNVKKLINEKKEDGKVFWQNLAGYKRQEALRPYLSSEEDRKKGKKFARYQLGDLLLHLEKKHGEDWGKVYDEAWERIDKKVEGLSKHIKLEEERRSEDAQSKAALTDWLRAKASFVIEGLKEADKDEFCRCELKLQKWYGDLRGKPFAIEAENSILDISGFSKQYNCAFIWQKDGVKKLNLYLIINYFKGGKLRFKKIKPEAFEANRFYTVINKKSGEIVPMEVNFNFDDPNLIILPLAFGKRQGREFIWNDLLSLETGSLQLANGRVIEKTLYNRRTRQDEPALFVALTFERREVLDSSNIKPMNLIGVDRGENIPAVIALTDPEGCPLSRFKDSLGNPTHILRIGESYKEKQRTIQAKKEVEQRRAGGYSRKYASKAKNLADDMVRNTARDLLYYAVTQDAMLIFENLSRGFGRQGKRTFMAERQYTRMEDWLTAKLAYEGLPSKVYLSKTLAQYTSKTCSNCGFTITSADYDRVLEKLKKTATGWMTTINGKELKVEGQITYYNRYKRQNVVKDLSVELDRLSEESVNNDISSWTKGRSGEALSLLKKRFSHRPVQEKFVCLNCGFETHADEQAALNIARSWLFLRSQEYKKYQTNKTTGNTDKRAFVETWQSFYRKKLKEVWKPAV

SEQ ID NO: 38927 - protein, 978 aa, synthetic construct
  REGION 1..978: note = engineered CasX variant
QEIKRINKIRRRLVKDSNTKKAGKTGPMKTLLVRVMTPDLRERLENLRKKPENIPQPISNTSRANLNKLLTDYTEMKKAILHVYWEEFQKDPVGLMSRVAQPASKKIDQNKLKPEMDEKGNLTTAGFACSQCGQPLFVYKLEQVSEKGKAYTNYFGRCNVAEHEKLIKLAQLKPEKDSDEAVTYSLGKFGQRALDFYSIHVTKESTHPVKPLAQIAGNRYASGPVGKALSDACMGTIASFLSKYQDIIIEHQKVVKGNQKRLESLRELAGKENLEYPSVTLPPQPHTKEGVDAYNEVIARVRMWVNLNLWQKLKLSRDDAKPLLRLKGFPSFPLVERQANEVDWWDMVCNVKKLINEKKEDGKVFWQNLAGYKRQEALRPYLSSEEDRKKGKKFARYQLGDLLLHLEKKHGEDWGKVYDEAWERIDKKVEGLSKHIKLEEERRSEDAQSKAALTDWLRAKASFVIEGLKEADKDEFCRCELKLQKWYGDLRGKPFAIEAENSILDISGFSKQYNCAFIWQKDGVKKLNLYLIINYFKGGKLRFKKIKPEAFEANRFYTVINKKSGEIVPMEVNFNFDDPNLIILPLAFGKRQGREFIWNDLLSLETGSLQLANGRVIEKTLYNRRTRQDEPALFVALTFERREVLDSSNIKPMNLIGVDRGENIPAVIALTDPEGCPLSRFKDSLGNPTHILRIGESYKEKQRTIQAKKEVEQRRAGGYSRKYASKAKNLADDMVRNTARDLLYYAVTQDAMLIFENLSRGFGRQGKRTFMAERQYTRMEDWLTAKLAYEGLPSKVYLSKTLAQYTSKTCSNCGFTITSADYDRVLEKLKKTATGWMTTINGKELKVEGQITYYNRYKRQNVVKDLSVELDRLSEESVNNDISSWTKGRSGEALSLLKKRFSHRPVQEKFVCLNCGFETHADEQAALNIARSWLFLRSQEYKKYQTNKTTGNTDKRAFVETWQSFYRKKLKEVWKPAV

SEQ ID NO: 38928 - protein, 977 aa, synthetic construct
  REGION 1..977: note = engineered CasX variant
QEIKRINKIRRRLVKDSNTKKAGKTGPMKTLLVRVMTPDLRERLENLRKKPENIPQPISNTSRANLNKLLTDYTEMKKAILHVYWEEFQKDPVGLMSRVAQPASKKIDQNKLKPEMDEKGNLTTAGFACSQCGQPLFVYKLEQVSEKGKAYTNYFGRCNVAEHEKLILLAQLKPEKDSDEAVTYSLGKFGQRALDFYSIHVTKESTHPVKPLAQIAGNRYASPVGKALSDACMGTIASFLSKYQDIIIEHQKVVKGNQKRLESLRELAGKENLEYPSVTLPPQPHTKEGVDAYNEVIARVRMWVNLNLWQKLKLSRDDAKPLLRLKGFPSFPLVERQANEVDWWDMVCNVKKLINEKKEDGKVFWQNLAGYKRQEALRPYLSSEEDRKKGKKFARYQLGDLLLHLEKKHGEDWGKVYDEAWERIDKKVEGLSKHIKLEEERRSEDAQSKAALTDWLRAKASFVIEGLKEADKDEFCRCELKLQKWYGDLRGKPFAIEAENSILDISGFSKQYNCAFIWQKDGVKKLNLYLIINYFKGGKLRFKKIKPEAFEANRFYTVINKKSGEIVPMEVNFNFDDPNLIILPLAFGKRQGREFIWNDLLSLETGSLQLANGRVIEKTLYNRRTRQDEPALFVALTFERREVLDSSNIKPMNLIGVDRGENIPAVIALTDPEGCPLSRFKDSLGNPTHILRIGESYKEKQRTIQAKKEVEQRRAGGYSRKYASKAKNLADDMVRNTARDLLYYAVTQDAMLIFENLSRGFGRQGKRTFMAERQYTRMEDWLTAKLAYEGLPSKVYLSKTLAQYTSKTCSNCGFTITSADYDRVLEKLKKTATGWMTTINGKELKVEGQITYYNRYKRQNVVKDLSVELDRLSEESVNNDISSWTKGRSGEALSLLKKRFSHRPVQEKFVCLNCGFETHADEQAALNIARSWLFLRSQEYKKYQTNKTTGNTDKRAFVETWQSFYRKKLKEVWKPAV

SEQ ID NO: 38929 - protein, 980 aa, synthetic construct
  REGION 1..980: note = engineered CasX variant
QEIKRINKIRRRLVKDSNTKKAGKTGPMKTLLVRVMTPDLRERLENLRKKPENIPQPISNTSRANLNKLLTDYTEMKKAILHVYWEEFQKDPVGLMSRVAQPASKKIDQNKLKPEMDEKGNLTTAGFACSQCGQPLFVYKLEQVSEKGKAYTNYFGRCNVAEHEKLILLAQLKPEKDSDEAVTYSLGKFGQRALDFYSIHVTKESTHPVKPLAQIAGNRYASYPVGKALSDACMGTIASFLSKYQDIIIEHQKVVKGNQKRLESLRELAGKENLEYPSVTLPPQPHTKEGVDAYNEVIARVRMWVNLNLWQKLKLSRDDAKPLLRLKGFPSFPLVERQANEVDWWDMVCNVKKLINEKKEDGKVFWQNLAGYKRQEALRPYLSSEEDVRKKGKKFARYQLGDLLLHLEKKHGEDWGKVYDEAWERIDKKVEGLSKHIKLEEERRSEDAQSKAALTDWLRAKASFVIEGLKEADKDEFCRCELKLQKWYGDLRGKPFAIEAENSILDISGFSKQYNCAFIWQKDGVKKLNLYLIINYFKGGKLRFKKIKPEAFEANRFYTVINKKSGEIVPMEVNFNFDDPNLIILPLAFGKRQGREFIWNDLLSLETGSLKLANGRVIEKTLYNRRTRQDEPALFVALTFERREVLDSSNIKPMNLIGVDRGENIPAVIALTDPEGCPLSRFKDSLGNPTHILRIGESYKEKQRTIQAKKEVEQRRAGGYSRKYASKAKNLADDMVRNTARDLLYYAVTQDAMLIFENLSRGFGRQGKRTFMAERQYTRMEDWLTAKLAYEGPLPSKTYLSKTLAQYTSKTCSNCGFTITSADYDRVLEKLKKTATGWMTTINGKELKVEGQITYYNRYKRQNVVKDLSVELDRLSEESVNNDISSWTKGRSGEALSLLKKRFSHRPVQEKFVCLNCGFETHADEQAALNIARSWLFLRSQEYKKYQTNKTTGNTDKRAFVETWQSFYRKKLKEVWKPAV

SEQ ID NO: 38930 - protein, 980 aa, synthetic construct
  REGION 1..980: note = engineered CasX variant
QEIKRINKIRRRLVKDSNTKKAGKTGPMKTLLVRVMTPDLRERLENLRKKPENIPQPISNTSRANLNKLLTDYTEMKKAILHVYWEEFQKDPVGLMSRVAQPASKKIDQNKLKPEMDEKGNLTTAGFACSQCGQPLFVYKLEQVSEKGKAYTNYFGRCNVAEHEKLILLAQLKPEKDSDEAVTYSLGKFGQRALDFYSIHVTKESTHPVKPLAQIAGNRYASHPVGKALSDACMGTIASFLSKYQDIIIEHQKVVKGNQKRLESLRELAGKENLEYPSVTLPPQPHTKEGVDAYNEVIARVRMWVNLNLWQKLKLSRDDAKPLLRLKGFPSFPLVERQANEVDWWDMVCNVKKLINEKKEDGKVFWQNLAGYKRQEALRPYLSSEEDVRKKGKKFARYQLGDLLLHLEKKHGEDWGKVYDEAWERIDKKVEGLSKHIKLEEERRSEDAQSKAALTDWLRAKASFVIEGLKEADKDEFCRCELKLQKWYGDLRGKPFAIEAENSILDISGFSKQYNCAFIWQKDGVKKLNLYLIINYFKGGKLRFKKIKPEAFEANRFYTVINKKSGEIVPMEVNFNFDDPNLIILPLAFGKRQGREFIWNDLLSLETGSLKLANGRVIEKTLYNRRTRQDEPALFVALTFERREVLDSSNIKPMNLIGVDRGENIPAVIALTDPEGCPLSRFKDSLGNPTHILRIGESYKEKQRTIQAKKEVEQRRAGGYSRKYASKAKNLADDMVRNTARDLLYYAVTQDAMLIFENLSRGFGRQGKRTFMAERQYTRMEDWLTAKLAYEGPLPSKTYLSKTLAQYTSKTCSNCGFTITSADYDRVLEKLKKTATGWMTTINGKELKVEGQITYYNRYKRQNVVKDLSVELDRLSEESVNNDISSWTKGRSGEALSLLKKRFSHRPVQEKFVCLNCGFETHADEQAALNIARSWLFLRSQEYKKYQTNKTTGNTDKRAFVETWQSFYRKKLKEVWKPAV

SEQ ID NO: 38931 - protein, 980 aa, synthetic construct
  REGION 1..980: note = engineered CasX variant
QEIKRINKIRRRLVKDSNTKKAGKTGPMKTLLVRVMTPDLRERLENLRKKPENIPQPISNTSRANLNKLLTDYTEMKKAILHVYWEEFQKDPVGLMSRVAQPASKKIDQNKLKPEMDEKGNLTTAGFACSQCGQPLFVYKLEQVSEKGKAYTNYFGRCNVAEHEKLILLAQLKPEKDSDEAVTYSLGKFGQRALDFYSIHVTKESTHPVKPLAQIAGNRYASSPVGKALSDACMGTIASFLSKYQDIIIEHQKVVKGNQKRLESLRELAGKENLEYPSVTLPPQPHTKEGVDAYNEVIARVRMWVNLNLWQKLKLSRDDAKPLLRLKGFPSFPLVERQANEVDWWDMVCNVKKLINEKKEDGKVFWQNLAGYKRQEALRPYLSSEEDVRKKGKKFARYQLGDLLLHLEKKHGEDWGKVYDEAWERIDKKVEGLSKHIKLEEERRSEDAQSKAALTDWLRAKASFVIEGLKEADKDEFCRCELKLQKWYGDLRGKPFAIEAENSILDISGFSKQYNCAFIWQKDGVKKLNLYLIINYFKGGKLRFKKIKPEAFEANRFYTVINKKSGEIVPMEVNFNFDDPNLIILPLAFGKRQGREFIWNDLLSLETGSLKLANGRVIEKTLYNRRTRQDEPALFVALTFERREVLDSSNIKPMNLIGVDRGENIPAVIALTDPEGCPLSRFKDSLGNPTHILRIGESYKEKQRTIQAKKEVEQRRAGGYSRKYASKAKNLADDMVRNTARDLLYYAVTQDAMLIFENLSRGFGRQGKRTFMAERQYTRMEDWLTAKLAYEGPLPSKTYLSKTLAQYTSKTCSNCGFTITSADYDRVLEKLKKTATGWMTTINGKELKVEGQITYYNRYKRQNVVKDLSVELDRLSEESVNNDISSWTKGRSGEALSLLKKRFSHRPVQEKFVCLNCGFETHADEQAALNIARSWLFLRSQEYKKYQTNKTTGNTDKRAFVETWQSFYRKKLKEVWKPAV

SEQ ID NO: 38932 - protein, 980 aa, synthetic construct
  REGION 1..980: note = engineered CasX variant
QEIKRINKIRRRLVKDSNTKKAGKTGPMKTLLVRVMTPDLRERLENLRKKPENIPQPISNTSRANLNKLLTDYTEMKKAILHVYWEEFQKDPVGLMSRVAQPASKKIDQNKLKPEMDEKGNLTTAGFACSQCGQPLFVYKLEQVSEKGKAYTNYFGRCNVAEHEKLILLAQLKPEKDSDEAVTYSLGKFGQRALDFYSIHVTKESTHPVKPLAQIAGNRYASTPVGKALSDACMGTIASFLSKYQDIIIEHQKVVKGNQKRLESLRELAGKENLEYPSVTLPPQPHTKEGVDAYNEVIARVRMWVNLNLWQKLKLSRDDAKPLLRLKGFPSFPLVERQANEVDWWDMVCNVKKLINEKKEDGKVFWQNLAGYKRQEALRPYLSSEEDVRKKGKKFARYQLGDLLLHLEKKHGEDWGKVYDEAWERIDKKVEGLSKHIKLEEERRSEDAQSKAALTDWLRAKASFVIEGLKEADKDEFCRCELKLQKWYGDLRGKPFAIEAENSILDISGFSKQYNCAFIWQKDGVKKLNLYLIINYFKGGKLRFKKIKPEAFEANRFYTVINKKSGEIVPMEVNFNFDDPNLIILPLAFGKRQGREFIWNDLLSLETGSLKLANGRVIEKTLYNRRTRQDEPALFVALTFERREVLDSSNIKPMNLIGVDRGENIPAVIALTDPEGCPLSRFKDSLGNPTHILRIGESYKEKQRTIQAKKEVEQRRAGGYSRKYASKAKNLADDMVRNTARDLLYYAVTQDAMLIFENLSRGFGRQGKRTFMAERQYTRMEDWLTAKLAYEGPLPSKTYLSKTLAQYTSKTCSNCGFTITSADYDRVLEKLKKTATGWMTTINGKELKVEGQITYYNRYKRQNVVKDLSVELDRLSEESVNNDISSWTKGRSGEALSLLKKRFSHRPVQEKFVCLNCGFETHADEQAALNIARSWLFLRSQEYKKYQTNKTTGNTDKRAFVETWQSFYRKKLKEVWKPAV
